United States Patent Application Publication US 2005/0228172 A9 - sequence listing, part 50

SEQ ID NO: 202052 - DNA, 466 bp, Homo sapiens
ttggtaatagcatgttctcacttgtaagtgagagtgcaatagtgggtacacatggacatagtggaataataaacactgaagaatcaatagagtgagaggaagtggggaggggtgagaaattaactaatgcatacaatgtatattcttttcaggtgatggcttcactaaaagcctagacttcaccactacacagtatatccatgtaacagaactgcacttgtatcccccaagtataaaaaaataaaagactgtacmtaatagatcagaaggtatctttcaatattagctcaattaacactcattacaaatttatcattatcctgaaacaattattgagacaactgagacacaaagaggtaaagtaattttctaaatgttgaagtttaagtgaaattatttagaaaaactacttatttaaaattagaaacagaactttggacagattaaaagttgccaacattgattt

SEQ ID NO: 202053 - DNA, 501 bp, Homo sapiens
ctacaatactaaatggtaaagtgtgtctatcagtcttgaaagcaagtcagagttagataatatttataatattaaatgtgaatgtgctagcattatcacataaaataatactggtctaagattgaggttattcctaaatctaagctaacagtgacttagtatgtttcatttattaaccccaaatctctagtatgtggcctgatttctcatgtatgtacacctacatttaactatatgaccaaaggtggaatcaatgaatactgctcaccaccatctatatcatatagaacattaaataaagaagaatgctgaattaaatggaattataacagaaaataaagcttatgagcgtatcactaatgtcctaagccagaacaaatttataatccatatattcaaaataataaggaaagttttatcaaattttaatggttccatagtgagggtatgtcttactaataagacttcyattaaggactgttttgctaccaatcaacctgg

SEQ ID NO: 202054 - DNA, 567 bp, Homo sapiens
ggcattatgtattttatacctctgtagtctgctgatcccatgagaacccaaagcggttttgtttcattacttgcctttgttctcaawaacatctttgaaaaactgtggaaattgtgagggggtggaatcaatttagaatttaaaaagtcagaggatctgaattcagtactttgacctgccatttaagaactacaccccacaattctctttcttcactatcagggtgaaagcaataatgcatgtcttacaatgctaaggataaacaatgtgacaatgattttcacagagctaaacatgctaacacaaaaatatttatggacaaaacaaaaacatgaaaccccactatctcctaaactccactgtgagtttttttttgtagaactagttgtgaatgttgaaaaaagaaaaagagcatcaaatttcttcatgaataaacactattggttctacatatatctctacatttttaaaacaacatttaagataatgaatttgttacttttaccaaacaatatttttaaaagaaatttttgatgaagtacagctccttctccatatttcttttat

SEQ ID NO: 202055 - DNA, 567 bp, Homo sapiens
ggcattatgtattttatacctctgtagtctgctgatcccatgagaacccaaagcggttttgtttcattacttgcctttgttctcaataacatctttgaaaaactgtggaaattgtgagggggtggaatcaatttagaatttaaaaagtcagaggatctgaattcagtactttgacctgccatttaagaactacaccccacaattctctttcttcactatcagggtgaaagcaataatgcatgtcttacaatgctaaggataawcaatgtgacaatgattttcacagagctaaacatgctaacacaaaaatatttatggacaaaacaaaaacatgaaaccccactatctcctaaactccactgtgagtttttttttgtagaactagttgtgaatgttgaaaaaagaaaaagagcatcaaatttcttcatgaataaacactattggttctacatatatctctacatttttaaaacaacatttaagataatgaatttgttacttttaccaaacaatatttttaaaagaaatttttgatgaagtacagctccttctccatatttcttttat

SEQ ID NO: 202056 - DNA, 468 bp, Homo sapiens
tgatgtaattgaatttaagtgtcaatgagtttacaataaagtgttatatctgtaaaatattgcatatagccccaagayaattccaaagaaaaaaacctacagtagacaaacaaaagataaagagtaaggaatcaaagcatcttactatgaaaaactggcccagcatggtggctcacgtgtaatcctagcactttgggaggtcaaggaagttggattgcttgagctcaggaatttgaaaccagcctgggcaaggtgcccaaaccccatctctactaaaaatacaaaaaattagtgaggcgtgatggcacatgcctgtagttcagctactctggaggctgaggcatgagaatctcatgaacctgggaggtggatgttgcagcatactcaagcctgggcgacagaacgagactctctctctcaaaaaaataataataataaaagacaaacaacaaaaacccaaagcatatc

SEQ ID NO: 202057 - DNA, 468 bp, Homo sapiens
tgatgtaattgaatttaagtgtcaatgagtttacaataaagtgttatatctgtaaaatattgcatatagccccaagataattccaaagaaaaaaacctacagtagacaaacaaaagataaagagtaaggaatcaaagcatcttactatgaaaaactggcccagcatggtggctcacgtgtaatcctagcactttgggaggtcaaggaagttggattgcttgagctcaggaatttgaaaccagcctgggcaagrtgcccaaaccccatctctactaaaaatacaaaaaattagtgaggcgtgatggcacatgcctgtagttcagctactctggaggctgaggcatgagaatctcatgaacctgggaggtggatgttgcagcatactcaagcctgggcgacagaacgagactctctctctcaaaaaaataataataataaaagacaaacaacaaaaacccaaagcatatc

SEQ ID NO: 202058 - DNA, 604 bp, Homo sapiens
atgtcctgtgggttctatcaacctgctgtctgaaggaatttattccaataaagcttataactagctcattttccttttcctctaaagcaaaattttaagtgttagcttttgtgcttggcactggaaataaaaagatgaataagactacatgtgatttccaagagtttacagtaaatgtaagaaagagagctgcttaaatgataaacatcacatagtatgggaagtacttaaacaaaagtttgccttaggtgttatggrtctacagaggaaagaactgactctatctgggtgagtctagaaatactttgccaaagagaaaacatctgaacagaattgaatgataattaggcattgtccacaaagagaagagacaaaaaaccattaaggcagtgaaactagcatctcaagtcatagatatgtgaaagaccatataaaggcattaatatggtaaaatatagacattttgggcgaggtagaaacactgtggtaaatggaatgaaaagggtaggcacaagaagagtcatgcctatttgtactgtctggaccatattctccagttaatgatggtttcagtatgggaatattttggaaaaattgatggttt

SEQ ID NO: 202059 - DNA, 604 bp, Homo sapiens
atgtcctgtgggttctatcaacctgctgtctgaaggaatttattccaataaagcttataactagctcattttccttttcctctaaagcaaaattttaagtgttagcttttgtgcttggcactggaaataaaaagatgaataagactacatgtgatttccaagagtttacagtaaatgtaagaaagagagctgcttaaatgataaacatcacatagtatgggaagtacttaaacaaaagtttgccttaggtgttatgggtctacagaggaaagaactgactctatctgggtgrgtctagaaatactttgccaaagagaaaacatctgaacagaattgaatgataattaggcattgtccacaaagagaagagacaaaaaaccattaaggcagtgaaactagcatctcaagtcatagatatgtgaaagaccatataaaggcattaatatggtaaaatatagacattttgggcgaggtagaaacactgtggtaaatggaatgaaaagggtaggcacaagaagagtcatgcctatttgtactgtctggaccatattctccagttaatgatggtttcagtatgggaatattttggaaaaattgatggttt

SEQ ID NO: 202060 - DNA, 487 bp, Homo sapiens
tcgtctccttgtctgctcatctgcttctggagcctgtgttttggggtttatatgggtacaggatagggttcatggaaaaaggcaactttttaagtgtgaaaacagaaatgcctgttcccacttagggccacaggtccaggcttgccaaggaaccaccctcttctacccagtgtttccctgtctcctgtccatatcatgtgtagggctgaggttctatgccagaatggaacccagtcacccaatagtacccaattaaaaagtaaggtcatcactacagggaaagcagacactcccagttctgaagtggtacaagacttctcaaagaacaaggcaattcataaaagacaaagttccacagctaaatctgaaggcactgactttatttggaaagattatggagaaacttatgtctaacagtgatatcwaaaacaagacagatcttggttgaaagcatttaagaagagactggtagctttctgagtaaaat

SEQ ID NO: 202061 - DNA, 526 bp, Homo sapiens
  misc_feature (1)...(526): n = A,T,C or G
actcagactgctgacccaggtcagctggtgctatgaatccctggtgatctgcctgggcatgaagcagagaaggccttcctgcaccagaatctctgcacaagaactgtgtggcatatcaggctcctgattcaggtgattggatgctccaaatgcctggaaatctgcctgggggtrgagtagagagggccctgctgtagcaggatctcagcagtaaggctagggcatactgtactggcacacatagatgggttataggtcaccaagctggccctggctgcaagtcttccagcccaggagaaactgcatctgtagcagctctcctccctgccctacacttgcaacaggggaaagcacaattgcagcatctatctctgaggtgctttccagagttcccactgtggaggcctctactccactccagagcaggtgctccagtatttgacccatagactgaaatgcctgagcagccacagtgccgggtcaccaaaggggggctgactgggtatcctctagtcgtacctcannn

SEQ ID NO: 202062 - DNA, 466 bp, Homo sapiens
gattagtctttagtaaaaatgagaaactggagacagaaatattatttttcaagaactwtggtaaacttgttattaaattctagtctcattagttgtttttaagcttgtttctacaatttaggctaaccctgcttattcctgtgaaccaaccactgatctctgactgctgctcatgagaaacaagagggatatcaccttttgtcaaaacttaagagttgagtggaccttaccatactgatgctttctgactgagcccctctctaccctgaatgcaacagaccctcatagttaggctggaatatcatcacccctattcagcctgaagaagttacagaagatggatgtttatccctctgtaacccttagaattaagggttctcttataaaagggagtggggaaatgtcaggggcatgtgaaccagagcaacttcatcttaaataggagctgggtaaaatgaggctgaaa

SEQ ID NO: 202063 - DNA, 466 bp, Homo sapiens
gattagtctttagtaaaaatgagaaactggagacagaaatattatttttcaagaactttggtaaacttgttattaaattctagtctcattagttgtttttaagcttgtttctacaatttaggctaaccctgcttattcctgtgaaccaaccactgatctctgacygctgctcatgagaaacaagagggatatcaccttttgtcaaaacttaagagttgagtggaccttaccatactgatgctttctgactgagcccctctctaccctgaatgcaacagaccctcatagttaggctggaatatcatcacccctattcagcctgaagaagttacagaagatggatgtttatccctctgtaacccttagaattaagggttctcttataaaagggagtggggaaatgtcaggggcatgtgaaccagagcaacttcatcttaaataggagctgggtaaaatgaggctgaaa

SEQ ID NO: 202064 - DNA, 591 bp, Homo sapiens
tggtgggagtgattgccatctgtagctccctgcttatatatatttttttctatggcttaaactctcaggaaaagtagagtggctttcccactaatattcatgaaagtcctgaggaagatgctaacttgtgttcatccctgaactattaatctctttagaggaaggtaagattcagagtattcaggctgccatagtggggcacagatgaggattcggtttagttcyatctaaaaaaaagtattttgtagaattatgaaattgtggaaacattggctcatagatagaaggaatataggcaaaaaaataaacatataaaaaaatgggacaaaggaagaaagaagaaaaagaaagaaagaggaagaaaggaagaaaggaaagaaagaagaaagaaaagaaatagaaaaaaggaaggaaaagaaaagaaagaaagagatggaaagaaaaaataacaggaaggaaggaatgaacttaacatctaataaatactaaagctagaatgcaacacatctacaattcttacacattttaatacattataaattctagcttgtgtgtattactttttaaatagtaatgtttacactcagatcc

SEQ ID NO: 202065 - DNA, 541 bp, Homo sapiens
ccactaggaagtaatgagattgaagctggaaaaaaaaaaaaaaaaaaaaaaaagcttcccagcaaataaaacccgaggacccaatgacttcactgctgaactttaccaaacatttaaagaacaaatatcaatcctacgcaaaccattctgaaacacagagatggaggatatactgcgaaactcattctacatggccagtagataccaaaaccagtcaaagatacataaaataaagaatgctacaggccaatatccctgattaacactgttgcaaaaatcctcaaaccaaaccaacttcaacaatactttaagaaaccattcatcttcaccaagtaaggtttattccaggaatgcaagtgtggtttgacatatgcaaatcaattaatgtgatacatcataccaacagaatgaaggacaaaatcttatgatcatttcaatttatgttgaaaaagcactgataacattcaacatgacttcatgatgaaatccytcaataaattggttatagaaggaacatacctcaacacagttttcaggaaaa

SEQ ID NO: 202066 - DNA, 487 bp, Homo sapiens
ttggtgcagatgtgaggaaatgagaacccgtgttgcactgttggtgggactataaaatggtacaactgttatagaaaacagtacaattgttcatcaaaatttaaaagttgaattaacatatgatccagggatttgatttttccacaaatacccaaataaattgaaagcagggtcttgaagagattttgtagacccatgctcacagaagcattwttcatatagctaaaatgttgaaacaacccaggtatccatggacagatgaataggtaagcaaaacgtggtatatacatacaatagaatatgactcagccttaaaaagaaaagaaatcctgatatatgctacaacatggatggaccttaaggatactatgttaagtgaaataaactaattacaaaataaaatactgtatgatactgtatgaaagtacaatggtggttgcctggtgttggtagcaagggaaaatggagaattttttgtttaatgagt

SEQ ID NO: 202067 - DNA, 399 bp, Homo sapiens
ctcatgtagactttaatcctagtggcaggtaaatataaatagttaattagacacctaaaactttcagaaatattctgcttaatatcagttctgttaggataaaagattttgatgtcactttatttccacattggtagcatattgaattgctaagtacagagttaagcagattgacaatagtcttcaatttaaacattaatgaaaattagagaatgaagcattaactctaattccttatcctaatccyatgtaattcatgaataaataaagatcaatgatggtttttggaagcacacaccagtttgttaaaatattctttaataaaattgtatctgtgccaaatcacatatctgggattagttttatttaaagaaactttgcaaagagttatttgctttt

SEQ ID NO: 202068 - DNA, 506 bp, Homo sapiens
ctggacttcattgtccataacactataagtattttggtcacaacaatttaaaaagtctctaggaagatccaaactttccctcatcttcctgtttccttctgagccttccaaagtgttccaacctctgcccattacccagttccaaaattacttccacgttttcaggtatctttatagcaatgcccacttttctggtaccaattttctgtattagtctgttcccacacttctataaagacayggctaatttatggagaaaagagatttaattgactaacagttccacaggctgtacagaaagcatggccgagaaggccttaggaaacttacaatcatgatggaaggcacaggcaaaaaggggtcattttcacatgactggaggaagagacagaacaaagggggaagtactacacactttcaaacaactagatctcatgggaacttactatcatgagaacagcaagggggagatccacttccatgatccagtcatctcccaacaggtc

SEQ ID NO: 202069 - DNA, 577 bp, Homo sapiens
ctcgcttagaaaattaagaatcctagataacattgtgtgatgaggatatgaggataacaacctttatgggcaatggatgggaaattcaatggttttaaacatttcagaaaataacatgacaggatccatttgaaagtatgcatactctacaacctgtctcaatgacggkcacatatacctgatatagtttgtatgtgtgtcccctccaaatctcatgctgaaatgtgatcccccatgttggaggtggggcccagtgagaggtattggatcatggggtggatcccttatgaatagtttagcacaggaatgtccaacttttggcttccctggaccacaatggaagaataattttcttgggccacacataaaatacactaaaaatagctgctgagctaaacacacacacacacacacacacacacacacacacacacacacacgaagtctcttatgttttaacaaagttgacaaatttgttttgggccacattcaaagctgtttgacctgcattcagcctgcaagctgcaggttagacaagcttggtttagaaccatccccttgtgagtgagttcttctc

SEQ ID NO: 202070 - DNA, 577 bp, Homo sapiens
ctcgcttagaaaattaagaatcctagataacattgtgtgatgaggatatgaggataacaacctttatgggcaatggatgggaaattcaatggttttaaacatttcagaaaataacatgacaggatccatttgaaagtatgcatactctacaacctgtctcaatgacggtcacatatacctgatatagtttgtatgtgtgtcccctccaaatctcatgctgaaatgtgatcccccatgttggaggtggggcccagtgagaggtattggatcatggggtggatcccttatgaatagtttagcacaggaatgtccaacttttggcttccctggaccacaayggaagaataattttcttgggccacacataaaatacactaaaaatagctgctgagctaaacacacacacacacacacacacacacacacacacacacacacacgaagtctcttatgttttaacaaagttgacaaatttgttttgggccacattcaaagctgtttgacctgcattcagcctgcaagctgcaggttagacaagcttggtttagaaccatccccttgtgagtgagttcttctc

SEQ ID NO: 202071 - DNA, 577 bp, Homo sapiens
ctcgcttagaaaattaagaatcctagataacattgtgtgatgaggatatgaggataacaacctttatgggcaatggatgggaaattcaatggttttaaacatttcagaaaataacatgacaggatccatttgaaagtatgcatactctacaacctgtctcaatgacggtcacatatacctgatatagtttgtatgtgtgtcccctccaaatctcatgctgaaatgtgatcccccatgttggaggtggggcccagtgagaggtattggatcatggggtggatcccttatgaatagtttagcacaggaatgtccaacttttggcttccctggaccacaatggaagaataattttcttgggccacacataaaatacactaaaaatagctgctgagctaaacacacacacacacacacacacacacacacacacacacacacacgaagtctcttatgttttaacaaagttgacaaatttgttttgggccacattcaaagctgtttgacctgcattcagcctgcaarctgcaggttagacaagcttggtttagaaccatccccttgtgagtgagttcttctc

SEQ ID NO: 202072 - DNA, 618 bp, Homo sapiens
tgcatgggtgtatgcatgtgtgtgtatattcagctttgttaaatttatttaactttattaactttgtttaaaatttaatttgaaaattagattggggagcaaaatatcattctttctctctcatcataaaacttttggctcatgggattatgacattctgccatgcttggaaaagttggatttatgaaaccagtagctggactgagcctgcctatgcagctcttacacaagtgcttcctattttgtgcacaagcagcctcaagagcccaaagatagtgattgagagagacaggctctgaagcctttttatttcaacttcttggaatcaccaccttgctaataaatatcaaaatcttyggtgtcatttatcagattaattactttttccataaaaagagtgagttgagaaaataacaagcaagaaactccctgtcccttcttcatcctgaaaacaggagaatcaatatcttaaccctgtttttgagagatgaatgggtaggtcaatattgcttggctatttgtccttccacttgggagagattactgctgcattttcccctcaatctctagaatcatggcttatagaaaacaattatgtactgaattactaattgcatc

SEQ ID NO: 202073 - DNA, 537 bp, Homo sapiens
aggaacatagaagtatggggcaatacacwaatatcagagcagtagattattttccaaggcagagtctgcaggcccctagaacaacttgtgccttcagctggatgccagatccatcatggctccagagcaattctgtgggaagactgcagaatgggttcaggtggtgagtccactatggagcctggctctccattgtctgcacttgttatgacagggatttaagatttcccaaatgctccagaagggatgtggaagtgttgagaaaggagtgggcaactgtcagaagcttggggtcagagtggataggataaagtcggggtggacttgaatacacacaaatgcctgaaaccttggactccaggaagccaaagcttcactccaaaaggataggcagagctagacagagctcagcaatcctcagacaaggagaggtggaccagcctgtccacagctgggcatagagggcatctaacgattccacatgatctgaatttttttctctccactatcacaaggacacagtaaacccctcataca

SEQ ID NO: 202074 - DNA, 580 bp, Homo sapiens
caagttcaaagtttcatagatctccacggcgaggtcaccgtgcagtcacgttctttgctaagaaaacaaaagtaactttgacttctgttcccagtaagtgcttcattttcatctgagacattctaagtygggctttcactgaccattttcctgtgagccttctgatcacaagtgtttaacaattctttacaaagatccaaactttctttcattttcttgtctttgaagccctccaaactctcccgacctctgtccgctactcccttttgaacctgcttctacattatcactatctttgccacagcctggcaatgtggtaaaggaaaacaagtccattttcagggggaaaattcatgaagccttcacatacttgaatgaaaagaagctgagtgctgattgccaagacattgacatttaatggttccactttgcaccactagttttctctatgatcataaagaaaagaggtttaattggctcatggttctgcaggccataaggaaacataatggcttctgaatctgggaggactcaggaagcctcccaatcatatcagaatgtccaggggcaatgagatgat

SEQ ID NO: 202075 - DNA, 537 bp, Homo sapiens
agggcttcaatgcatgtaggtgacccacgtggggtgtcagaatcaaaacaaggtgagggagcatccagacagaagtattatccatcacctggtgtctaaatccctcaggctagtgggaagagaacacccatgtaaggcagtggcacagaatgggataaaaaggatttgcatgtagaagagtcaggtcactgtgggattttctggtgtaaatagactgaaaggggcatctgtataggagggctccaaggtttccaggtatcaaagccaaagaacaggagaaggagtccacacagaagtggtggcagaacccaagcaagatgaaaagggcatcaccgcagtgatgtagcaaggttggagtgtcagagcctgactgagcagartggggtgagcacccatgtgggtttaacccaggaaggatgagaagagtgtctacgtgaaatggatgataatctagggagtagatcagagcccagggatggcatccaagaatgatggtggccaagcatgaggtgttggagtcagagtagagtgaagaag

SEQ ID NO: 202076 - DNA, 537 bp, Homo sapiens
agggcttcaatgcatgtaggtgacccacgtggggtgtcagaatcaaaacaaggtgagggagcatccagacagaagtattatccatcacctggtgtctaaatccctcaggctagtgggaagagaacacccatgtaaggcagtggcacagaatgggataaaaaggatttgcatgtagaagagtcaggtcactgtgggattttctggtgtaaatagactgaaaggggcatctgtataggagggctccaaggtttccaggtatcaaagccaaagaacaggagaaggagtccacacagaagtggtggcagaacccaagcaagatgaaaagggcatcaccgcagtgatgtagcaaggttggagtgtcagagcctgactgagcagaatggggtgagcacccatgtgggtttaacccaggaaggatgagaagagtgtctaygtgaaatggatgataatctagggagtagatcagagcccagggatggcatccaagaatgatggtggccaagcatgaggtgttggagtcagagtagagtgaagaag

SEQ ID NO: 202077 - DNA, 587 bp, Homo sapiens
acaactctctgacaccttgggtgcccagttttctttcaggcaggacatcaatatttatcytcttttaattctggcccatccactggcacagactggtcccttatgttattatcatgagctagtgatacaggaagagaagcattgctgatctgtgaaactggacaatacatttaatctgtcttggtatttaaaccacagtaggcaccatgtttaattgggtttatgaaatgacatcttgttcagggcaaggatcagtattgaagaggagctatatttaatgctaaattaagtgcccaagttaaagctaaattgttacacacacaagtcagtaatttcagaactatgacttgcaaataaatcacaaattgacctctttgagcacactgcaggaaatactttgtgtgacattatatggcactaattgtaaaagccaaatctgacttctttccaattatatgtccaaaaatcataactgagaattctctctctttggattttctgacattctttccttagtattaaggtaatgaatggcttcaaagctaaagttatgggaaatgcaagagcttatccaatagttaatatct

SEQ ID NO: 202078 - DNA, 587 bp, Homo sapiens
acaactctctgacaccttgggtgcccagttttctttcaggcaggacatcaatatttatcctcttttaattctggcccatccactggcacagactggtcccttatgttattatcatgagctagtgatacaggaagagaagcattgctgatctgtgaaactggacaatacatttaatctgtcttggtatttaaaccacagtaggcaccatgtttaattgggtttatgaaatgacatcttgttcagggcaaggrtcagtattgaagaggagctatatttaatgctaaattaagtgcccaagttaaagctaaattgttacacacacaagtcagtaatttcagaactatgacttgcaaataaatcacaaattgacctctttgagcacactgcaggaaatactttgtgtgacattatatggcactaattgtaaaagccaaatctgacttctttccaattatatgtccaaaaatcataactgagaattctctctctttggattttctgacattctttccttagtattaaggtaatgaatggcttcaaagctaaagttatgggaaatgcaagagcttatccaatagttaatatct

SEQ ID NO: 202079 - DNA, 587 bp, Homo sapiens
acaactctctgacaccttgggtgcccagttttctttcaggcaggacatcaatatttatcctcttttaattctggcccatccactggcacagactggtcccttatgttattatcatgagctagtgatacaggaagagaagcattgctgatctgtgaaactggacaatacatttaatctgtcttggtatttaaaccacagtaggcaccatgtttaattgggtttatgaaatgacatcttgttcagggcaaggatcartattgaagaggagctatatttaatgctaaattaagtgcccaagttaaagctaaattgttacacacacaagtcagtaatttcagaactatgacttgcaaataaatcacaaattgacctctttgagcacactgcaggaaatactttgtgtgacattatatggcactaattgtaaaagccaaatctgacttctttccaattatatgtccaaaaatcataactgagaattctctctctttggattttctgacattctttccttagtattaaggtaatgaatggcttcaaagctaaagttatgggaaatgcaagagcttatccaatagttaatatct

SEQ ID NO: 202080 - DNA, 260 bp, Homo sapiens
gatttgttcctggagttgctgaaggatgactcagtttcccttttcttgtgtaattctttgatycagttgtagtctgacttttgaaagctgactgtagaaagaggaatatttcgaaaaataggcaaagtgatgttacggtttaaaatcatcaagtgggaaatccaaaaccacggttctcaaccttagctactcatggaaaccacctgggaaatttttaaaaatactgatggatgggttccatgcccatagacttttaaaaa

SEQ ID NO: 202081 - DNA, 260 bp, Homo sapiens
gatttgttcctggagttgctgaaggatgactcagtttcccttttcttgtgtaattctttgattcagttgtagtctgacttttgaaagctgactgtagaaagaggaatatttmgaaaaataggcaaagtgatgttacggtttaaaatcatcaagtgggaaatccaaaaccacggttctcaaccttagctactcatggaaaccacctgggaaatttttaaaaatactgatggatgggttccatgcccatagacttttaaaaa

SEQ ID NO: 202082 - DNA, 260 bp, Homo sapiens
gatttgttcctggagttgctgaaggatgactcagtttcccttttcttgtgtaattctttgattcagttgtagtctgacttttgaaagctgactgtagaaagaggaatatttcgaaaaataggcaaagtgatgttayggtttaaaatcatcaagtgggaaatccaaaaccacggttctcaaccttagctactcatggaaaccacctgggaaatttttaaaaatactgatggatgggttccatgcccatagacttttaaaaa

SEQ ID NO: 202083 - DNA, 260 bp, Homo sapiens
gatttgttcctggagttgctgaaggatgactcagtttcccttttcttgtgtaattctttgattcagttgtagtctgacttttgaaagctgactgtagaaagaggaatatttcgaaaaataggcaaagtgatgttacggtttaaaatcatcaagtgggaaatccaaaaccacggttctcaaccttagctactcatggaaaccacctgrgaaatttttaaaaatactgatggatgggttccatgcccatagacttttaaaaa

SEQ ID NO: 202084 - DNA, 478 bp, Homo sapiens
aatatttcgaaaaataggcaaagtgatgttacggtttaaaatcatcaagtgggaaatccaaaaccacggttctcaaccttagctactcatggaaaccacctgggaaatttttaaaaatactgatggatgggttccatgcccatagayttttaaaaaattcttccaaaggattctgacatcctaatcagggttgaaagctactgctccaaagagcttgacataatcaaatgaacatttatcaggtgttcacaaggtttaggaaggcccagcacaaagcaaaaccatagagacgttgagtactcttttgcttcagcattcagcatccaattccaactccatgcttttccttacttccaacttccatttttgccccgagcaacctgtgcaggaaaccatcagtttccctgctccactggacatctaaagactatggtggtgatagaaaatgagagtcatcaaaaaggtccaagtttagtga

SEQ ID NO: 202085 - DNA, 573 bp, Homo sapiens
gttccatgcccatagacttttaaaaaattcttccaaaggattctgacatcctaatcagggttgaaagcyactgctccaaagagcttgacataatcaaatgaacatttatcaggtgttcacaaggtttaggaaggcccagcacaaagcaaaaccatagagacgttgagtactcttttgcttcagcattcagcatccaattccaactccatgcttttccttacttccaacttccatttttgccccgagcaacctgtgcaggaaaccatcagtttccctgctccactggacatctaaagactatggtggtgatagaaaatgagagtcatcaaaaaggtccaagtttagtgaagatgcgcaaagggaaccagcccttcccaaagaattcagtgaatgagccaagattctccagaaaccgctcagctttgcagtgataattttctgtgaagacatagactgaaatgggaataagagatagaaagttgaaaaagaattttctcagaatccacatgtaaccttacagaaggcaaacagaagggttagtgagataaatggaatcacgtagctgaggtgaga

SEQ ID NO: 202086 - DNA, 573 bp, Homo sapiens
gttccatgcccatagacttttaaaaaattcttccaaaggattctgacatcctaatcagggttgaaagctactgctccaaagagcttgacataatcaaatgaacatttatcaggtgttcacaaggtttaggaaggcccagcacaaagcaaaaccatagagacgttgagtactcttttgcttcagcattcagcatccaattccaactccatgcttttccttacttccaacttccatytttgccccgagcaacctgtgcaggaaaccatcagtttccctgctccactggacatctaaagactatggtggtgatagaaaatgagagtcatcaaaaaggtccaagtttagtgaagatgcgcaaagggaaccagcccttcccaaagaattcagtgaatgagccaagattctccagaaaccgctcagctttgcagtgataattttctgtgaagacatagactgaaatgggaataagagatagaaagttgaaaaagaattttctcagaatccacatgtaaccttacagaaggcaaacagaagggttagtgagataaatggaatcacgtagctgaggtgaga

SEQ ID NO: 202087 - DNA, 573 bp, Homo sapiens
gttccatgcccatagacttttaaaaaattcttccaaaggattctgacatcctaatcagggttgaaagctactgctccaaagagcttgacataatcaaatgaacatttatcaggtgttcacaaggtttaggaaggcccagcacaaagcaaaaccatagagacgttgagtactcttttgcttcagcattcagcatccaattccaactccatgcttttccttacttccaacttccatttttgccccgagcaacctgtgcaggaaaccatcagtttccctgctccactggacatctaaagactatggtggtgatagaaaatgagagtcatcaaaaaggtccaagtttagtgaagatgcgcaaagggaaccagcccttcccaaagaattcagtgaatgagccaagattctccagaaaccgctcagctttgcagtgataattttctgtgaagacatagactgaaatgggaataagagatagaaagttgaaaaagaattttctcagaatccacatgtaaccttacagaaggcaaacagaagggttagtgagatamatggaatcacgtagctgaggtgaga

SEQ ID NO: 202088 - DNA, 408 bp, Homo sapiens
tctcagtgctaactacatgtcttacccttcctaaaattttacattttctctgtggttaaagtcatcttacaaaaagacccacattttacaaagatttaattgtcttggatttcaaattacaactagtttgatagccaaaaggttaaaaacaaattgattttatgaaaaattcttatagtattaaattygacatggattaccattaataatagaatcctctgctggctgtgagacatgcaaagttgcaaagcccagatccacagattagaaaggattttgacatgtataattgtcttagtcagtttgggctgctataacaagatatcatagactgagtgatttaaacaacagagattgatttctggagttctggagcctaggatagtccagggtcagggtgtcagcaga

SEQ ID NO: 202089 - DNA, 545 bp, Homo sapiens
agataccccacattcttttgctctttctgtaagcctcttccagctgctttgtgctttgcttccraaggcctgcaactgagactttttttttttttgagactgagtcttcctctgtcacccaggctggaatgcagtggcatgatctcagcttactgcaacctctgcctcctgggttcaagcaatcctcctgcttcagcctcctgagtagctgggattacaggcacctgccaccaaacctggctagtttttgtatttttagtagagatgaggtttcactatattggccaggctggtctcaaactcctgacctcttgatccgcctgcctcagccttccaaagtgctgggataacaggcatgagccaccacacccggctgcaactgagactgtctttaaggatctctgcatggagctgggagaatggggagttttaaccctctgtgcagttcttaggcaatgactgactgactggtccaagtgtctgacaatctgactccctggcctcaagctggatgaggctgaagctggactttgacaaaatcacac

SEQ ID NO: 202090 - DNA, 545 bp, Homo sapiens
agataccccacattcttttgctctttctgtaagcctcttccagctgctttgtgctttgcttccgaaggcctgcaactgagactttttttttttttgagactgagtcttcctctgtcacccaggctggaatgcagtggcatgatctcagcttactgcaacctctgcctcctgggttcaagcaatcctcctgcttcagcctcctgagtagctgggattacaggcacctgccaccaaacctggctagtttttgtatttttagtagagatgaggtttcactatattggccaggctggtctcraactcctgacctcttgatccgcctgcctcagccttccaaagtgctgggataacaggcatgagccaccacacccggctgcaactgagactgtctttaaggatctctgcatggagctgggagaatggggagttttaaccctctgtgcagttcttaggcaatgactgactgactggtccaagtgtctgacaatctgactccctggcctcaagctggatgaggctgaagctggactttgacaaaatcacac

SEQ ID NO: 202091 - DNA, 511 bp, Homo sapiens
gttcttctaagggaagctgcagaatgtttctccctcagcctatagcttgacagaatgctaagatatcaagatgaaactctgaaaacccgaggatttttcatggatttcattattctattgaagacctacaaaaaaaagtggctgataaatatatttttagaaattgctttagtatgatttttattaatttaaattaacatttatttaattaactacataaaatctgtgtataaaagaggcaaaagattattcttgctctcagccagacagttgctgataaggtagtttcgacaggaatctcayagaagaagagggccctgactcaacaaccatcaatatggttggaatgtggtatttgctcttcctggaaacaatgcttcccacttatagagtttatattcaatgtggtgttaatacatagacctcatccaactatctctctgtgaaatctgagttcctactcaagtcaatatcctgtaatatgctaaacaaaaaacctcctgtattagtt

SEQ ID NO: 202092 - DNA, 528 bp, Homo sapiens
cctttttatatcccaaatatatctacaaagattctcttttcaaataaggtcacattctgatgttccaggttggaatgctctgaatgtttgcgtacccccaaaattcctatgttcaaactttttttttttttgagacagagtcttgctgttacctgggctgtagtacagtggcaccatctcagctcactgcaacctctgcctcctgggttcaagtggttctcctgcctcagcctccctagtagctgggattacaggtgcgtgccaccacgcccagtacttttastagagacagggtttcaccatgttggccaggctggtctcgaactcctgacctcaggtgattcatccgcctcagcctcccaaagtactgggattacaggcatgagccaccatgcccagcccatgtgttgaaacttaatccccaatatgagagtgttaagagatgtggctttttttaggggggggggtgattaagccatgaacacagattcctcatgaattggattaataccctataaaagaggcttc

SEQ ID NO: 202093 - DNA, 528 bp, Homo sapiens
cctttttatatcccaaatatatctacaaagattctcttttcaaataaggtcacattctgatgttccaggttggaatgctctgaatgtttgcgtacccccaaaattcctatgttcaaactttttttttttttgagacagagtcttgctgttacctgggctgtagtacagtggcaccatctcagctcactgcaacctctgcctcctgggttcaagtggttctcctgcctcagcctccctagtagctgggattacaggtgcgtgccaccacgcccagtacttttagtagagacagggtttcaccatgttggccaggctggtctcgaactcctgacctcaggtgattcatccgcctcagcctcccaaagtrctgggattacaggcatgagccaccatgcccagcccatgtgttgaaacttaatccccaatatgagagtgttaagagatgtggctttttttaggggggggggtgattaagccatgaacacagattcctcatgaattggattaataccctataaaagaggcttc

SEQ ID NO: 202094 - DNA, 634 bp, Homo sapiens
gggcatgacaactttttcctttctctgtcttgctcctactcttcccgtatgagacatctccttgccccttgacattctggtatgattgggaggcttcctgagtcctgtcagatgcagaagccactatgcttccttacagcctgcagaatcattaccctattaaacctcttttctttatgatcatggagaaaattattactgcaaagtggaactgttaaatgtcttcaaggccttctccctaatgtcttggcaatcagcaatgggcttctttttattcaagtatctgaagcctccttgaatttttccctgaaaatgggcttgtcttcctttaccacattgccagggcakggaaaagatagctgataatgtagaagcaggttcagaagggggtagcagatggagttcgggagagtttggaggacttcaaagacagggagatgagggaaagtttggatctttgtaaagagttgttaaatacttgtgatcagaaggctcacaggaaaatagacagtaaggatcagattcagaagctctcggatgaaaatgaggaacttactgcaaacaggagccaaggttacttttgttttgctgtagcaaagaacgtggatgcacagtgaccctgccctggagatct

SEQ ID NO: 202095 - DNA, 279 bp, Homo sapiens
gaattcaggagtcctttattgctggtgaccgagagagcgctagtgctcaaamttctctcggcccctaagaaggggctagattttcttttatactttggtttagaaaggggagggggagccttgctgaagcaatcttacagaagcaaaacaggcaaaaaagttaaaaagataaatggctacaggaaaacaaacacttccaggtgcaggggctttaaatccatcaaaaggtgagagatgtggggctttgggtgctatcaactggacacaaatgtgggggtt

SEQ ID NO: 202096 - DNA, 279 bp, Homo sapiens
gaattcaggagtcctttattgctggtgaccgagagagcgctagtgctcaaacttctctcggcccctaagaaggggctagattttcttttatactttggtttagaaaggggagggggagccttgctgaagcaatcttacagaagcaaaacaggcaaaaaagttaaaaagataaatggctacaggaaaacaaacacttccaggtgcagggrctttaaatccatcaaaaggtgagagatgtggggctttgggtgctatcaactggacacaaatgtgggggtt

SEQ ID NO: 202097 - DNA, 279 bp, Homo sapiens
gaattcaggagtcctttattgctggtgaccgagagagcgctagtgctcaaacttctctcggcccctaagaaggggctagattttcttttatactttggtttagaaaggggagggggagccttgctgaagcaatcttacagaagcaaaacaggcaaaaaagttaaaaagataaatggctacaggaaaacaaacacttccaggtgcaggggctttaaatccatcaaaaggtgagagatgtggggctttggrtgctatcaactggacacaaatgtgggggtt

SEQ ID NO: 202098 - DNA, 360 bp, Homo sapiens
ccctggacattctggtatgattggraggcttcctgagtcctcccagattcagaagccattatgtttccttatggcctgcagaatcatgagccaattaaacttcttttctttatgatcatagagaaaattattagtgcaaagtggaactattaaatgtcattgtcttgcaaatcagcactcagcttcttttcattcaagtatgtgaaggcttcatgaattttccccctgaaaatggacttgttttcctttaccacattgccaggctgtggaaagatagtgataatgtagaagcaggttcagaagggagtagcggacagaggtcgggagagtttggagggcttcaaagacaagaagatgaat

SEQ ID NO: 202099 - DNA, 360 bp, Homo sapiens
ccctggacattctggtatgattgggaggcttcctgagtcctcccagattcagaagccattatgtttccttatggcctgcagaatcatgagccaattaaacttcttttctttatgatcatagagaaaattaktagtgcaaagtggaactattaaatgtcattgtcttgcaaatcagcactcagcttcttttcattcaagtatgtgaaggcttcatgaattttccccctgaaaatggacttgttttcctttaccacattgccaggctgtggaaagatagtgataatgtagaagcaggttcagaagggagtagcggacagaggtcgggagagtttggagggcttcaaagacaagaagatgaat

SEQ ID NO: 202100 - DNA, 549 bp, Homo sapiens
gccctctctcctctgtctgtcttgtgcctacgcctgccacatgaatcatctcatcgcccctggacattctggtatgattgggaggcttcctgagtcctcccagattcagaagccattatgtttccttatggcctgcagaatcatgagccaattaaacttcttttctttatgatcatagagaaaattattagtgcaaagtggaactattaaatgtcawtgtcttgcaaatcagcactcagcttcttttcattcaagtatgtgaaggcttcatgaattttccccctgaaaatggacttgttttcctttaccacattgccaggctgtggaaagatagtgataatgtagaagcaggttcagaagggagtagcggacagaggtcgggagagtttggagggcttcaaagacaagaagatgaatgaaagtttggatctttgtaaagaattgttaaacacttgtgatcagaaggctcacaggaaaatggtcagtgaaagcccgacttagaaggtctcagatgaaaatgaagcacttcctgggaacagaagtcagggt

SEQ ID NO: 202101 - DNA, 382 bp, Homo sapiens
tgtataatagggtgtggccctctctcctctgtctgtcttgtgcctacgcctgccacatgaatcatctcatcgcccctggacattctggtatgattgggaggcttcctgagtcctcccagattcagaagccattatgtttccttatggcctgcagaatcatgagccaattaaacttcttttctttatgatcatagagaaaattattagtgcaaagtggaactattaaatgtcattgtcttgcaaatcagcactcagcttcttttcattcaagtatgtgaaggcttcrtgaattttccccctgaaaatggacttgttttcctttaccacattgccaggctgtggaaagatagtgataatgtagaagcaggttcagaagggagta

SEQ ID NO: 202102 - DNA, 549 bp, Homo sapiens
gccctctctcctctgtctgtcttgtgcctacgcctgccacatgaatcatctcatcgcccctggacattctggtatgattgggaggcttcctgagtcctcccagattcagaagccattatgtttccttatggcctgcagaatcatgagccaattaaacttcttttctttatgatcatagagaaaattattagtgcaaagtggaactattaaatgtcattgtcttgcaaatcagcactcagcttcttttcattcaagtatgtgaaggcttcatgaattttccccctgaaaatggacttgtyttcctttaccacattgccaggctgtggaaagatagtgataatgtagaagcaggttcagaagggagtagcggacagaggtcgggagagtttggagggcttcaaagacaagaagatgaatgaaagtttggatctttgtaaagaattgttaaacacttgtgatcagaaggctcacaggaaaatggtcagtgaaagcccgacttagaaggtctcagatgaaaatgaagcacttcctgggaacagaagtcagggt

SEQ ID NO: 202103 - DNA, 549 bp, Homo sapiens
gccctctctcctctgtctgtcttgtgcctacgcctgccacatgaatcatctcatcgcccctggacattctggtatgattgggaggcttcctgagtcctcccagattcagaagccattatgtttccttatggcctgcagaatcatgagccaattaaacttcttttctttatgatcatagagaaaattattagtgcaaagtggaactattaaatgtcattgtcttgcaaatcagcactcagcttcttttcattcaagtatgtgaaggcttcatgaattttccccctgaaaatggacttgttttcctttaccacattgccaggctgtggaaagatagtgataatgtagaagcaggttcagaagggagtagcggacagaggtygggagagtttggagggcttcaaagacaagaagatgaatgaaagtttggatctttgtaaagaattgttaaacacttgtgatcagaaggctcacaggaaaatggtcagtgaaagcccgacttagaaggtctcagatgaaaatgaagcacttcctgggaacagaagtcagggt

SEQ ID NO: 202104 - DNA, 549 bp, Homo sapiens
gccctctctcctctgtctgtcttgtgcctacgcctgccacatgaatcatctcatcgcccctggacattctggtatgattgggaggcttcctgagtcctcccagattcagaagccattatgtttccttatggcctgcagaatcatgagccaattaaacttcttttctttatgatcatagagaaaattattagtgcaaagtggaactattaaatgtcattgtcttgcaaatcagcactcagcttcttttcattcaagtatgtgaaggcttcatgaattttccccctgaaaatggacttgttttcctttaccacattgccaggctgtggaaagatagtgataatgtagaagcaggttcagaagggagtagcggacagaggtcgggagagtttggagggcttcaaagacaagaagatgaatgaaagtttggatctttgtaaagaattgttaaacacttgtgatcagaaggctcacaggaaaatggtcagtgaaagcccgacttagaaggtctcagatgaaaatgaagcacttmctgggaacagaagtcagggt

SEQ ID NO: 202105 - DNA, 346 bp, Homo sapiens
  misc_feature (1)...(346): n = A,T,C or G
ctctccaacctctggctgttacccacttctgaacctgctttacattttcagctatctttgttgcagcctggcaatgcagaagaaaaagaagtccattttcagggggaaacttcaagaagccttcagatatttgcattaaaaagaagtccartgctaatagccaagacgatggggaaatgtcattgaagatatttcatagctccatttcgcagtactttattttctttatgatcataatgaaaaggggtttaattggctcacggttctgcaggctgtaaataaagcatagtggcttctgcttctngggaggactcaggaagcctcccaatcataccagtaggaaaac

SEQ ID NO: 202106 - DNA, 346 bp, Homo sapiens
  misc_feature (1)...(346): n = A,T,C or G
ctctccaacctctggctgttacccacttctgaacctgctttacattttcagctatctttgttgcagcctggcaatgcagaagaaaaagaagtccattttcagggggaaacttcaagaagccttcagatatttgcattaaaaagaagtccagtgytaatagccaagacgatggggaaatgtcattgaagatatttcatagctccatttcgcagtactttattttctttatgatcataatgaaaaggggtttaattggctcacggttctgcaggctgtaaataaagcatagtggcttctgcttctngggaggactcaggaagcctcccaatcataccagtaggaaaac

SEQ ID NO: 202107 - DNA, 382 bp, Homo sapiens
  misc_feature (1)...(382): n = A,T,C or G
tccaacctctggctgttacccacttctgaacctgctttacattttcagctatctttgttgcagcctggcaatgcagaagaaaaagaagtccattttcagggggaaacttcaagaagccttcagatatttgcattaaaaagaagtccagtgctaatagccaagacgatggggaaatgtcattgaagatatttcatagctccayttcgcagtactttattttctttatgatcataatgaaaaggggtttaattggctcacggttctgcaggctgtaaataaagcatagtggcttctgcttctngggaggactcaggaagcctcccaatcataccagtaggaaaacagcaatgaaatgtttcattaagcaggagtaggagcaagg

SEQ ID NO: 202108 - DNA, 382 bp, Homo sapiens
  misc_feature (1)...(382): n = A,T,C or G
tccaacctctggctgttacccacttctgaacctgctttacattttcagctatctttgttgcagcctggcaatgcagaagaaaaagaagtccattttcagggggaaacttcaagaagccttcagatatttgcattaaaaagaagtccagtgctaatagccaagacgatggggaaatgtcattgaagatatttcatagctccatttcgcagtactttattttctktatgatcataatgaaaaggggtttaattggctcacggttctgcaggctgtaaataaagcatagtggcttctgcttctngggaggactcaggaagcctcccaatcataccagtaggaaaacagcaatgaaatgtttcattaagcaggagtaggagcaagg

SEQ ID NO: 202109 - DNA, 380 bp, Homo sapiens
  misc_feature (1)...(380): n = A,T,C or G
caacctctggctgttacccacttctgaacctgctttacattttcagctatctttgttgcagcctggcaatgcagaagaaaaagaagtccattttcagggggaaacttcaagaagccttcagatatttgcattaaaaagaagtccagtgctaatagccaagacgatggggaaatgtcattgaagatatttcatagctccatttcgcagtactttattttctttatgatcataatgaaaaggggtttaattggctcayggttctgcaggctgtaaataaagcatagtggcttctgcttctngggaggactcaggaagcctcccaatcataccagtaggaaaacagcaatgaaatgtttcattaagcaggagtaggagcaagg

SEQ ID NO: 202110 - DNA, 382 bp, Homo sapiens
  misc_feature (1)...(382): n = A,T,C or G
tccaacctctggctgttacccacttctgaacctgctttacattttcagctatctttgttgcagcctggcaatgcagaagaaaaagaagtccattttcagggggaaacttcaagaagccttcagatatttgcattaaaaagaagtccagtgctaatagccaagacgatggggaaatgtcattgaagatatttcatagctccatttcgcagtactttattttctttatgatcataatgaaaaggggtttaattggctcacggttctgcaggctgtaaakaaagcatagtggcttctgcttctngggaggactcaggaagcctcccaatcataccagtaggaaaacagcaatgaaatgtttcattaagcaggagtaggagcaagg

SEQ ID NO: 202111 - DNA, 593 bp, Homo sapiens
tgttttcatttattttctttaatctacartaaaactttgatttttacactggctgaggatgaagtaagaatgttgcaaatagaaaaatgttaattgaaagacacaatttatcttattctatcaccaaaaatgatcaggcctattttgaccatgaatctcgcaagctgtgctctctaaacttttggatgagagggtgtgggctcagagtctgggaacgctctctccctcactccctctactaagtaggttccatgctctattcaagtttgagagactctgcttggttggggcctgcatttatgttactcctattctttatacttggcacatcacagaccgtgaaaaaataatctggtggaaatggcaactttggatttttaatctcagttgttaaaatttttccaaatgagaacacttggacacagggcagggaacatcacaccatagggcctgttgtggggtggggggaggggggagggagagcattaggagaaatacctaaggtaaatgacaagttaatgggtgcagcaaaccaacatggcacatgtatacctatgtaacaaacccgcatgttgtgcacatgtaccatagaa

SEQ ID NO: 202112 - DNA, 593 bp, Homo sapiens
tgttttcatttattttctttaatctacagtaaaactttgatttttacactggctgaggatgaagtaagaatgttgcaaatagaaaaatgttaattgaaagacacaatttatcttattctatcaccaaaaatgatcaggcctattttgaccatgaatctygcaagctgtgctctctaaacttttggatgagagggtgtgggctcagagtctgggaacgctctctccctcactccctctactaagtaggttccatgctctattcaagtttgagagactctgcttggttggggcctgcatttatgttactcctattctttatacttggcacatcacagaccgtgaaaaaataatctggtggaaatggcaactttggatttttaatctcagttgttaaaatttttccaaatgagaacacttggacacagggcagggaacatcacaccatagggcctgttgtggggtggggggaggggggagggagagcattaggagaaatacctaaggtaaatgacaagttaatgggtgcagcaaaccaacatggcacatgtatacctatgtaacaaacccgcatgttgtgcacatgtaccatagaa

SEQ ID NO: 202113 - DNA, 593 bp, Homo sapiens
tgttttcatttattttctttaatctacagtaaaactttgatttttacactggctgaggatgaagtaagaatgttgcaaatagaaaaatgttaattgaaagacacaatttatcttattctatcaccaaaaatgatcaggcctattttgaccatgaatctcgcaagctgtgctctctaaacttttggatgagagggygtgggctcagagtctgggaacgctctctccctcactccctctactaagtaggttccatgctctattcaagtttgagagactctgcttggttggggcctgcatttatgttactcctattctttatacttggcacatcacagaccgtgaaaaaataatctggtggaaatggcaactttggatttttaatctcagttgttaaaatttttccaaatgagaacacttggacacagggcagggaacatcacaccatagggcctgttgtggggtggggggaggggggagggagagcattaggagaaatacctaaggtaaatgacaagttaatgggtgcagcaaaccaacatggcacatgtatacctatgtaacaaacccgcatgttgtgcacatgtaccatagaa

SEQ ID NO: 202114 - DNA, 593 bp, Homo sapiens
tgttttcatttattttctttaatctacagtaaaactttgatttttacactggctgaggatgaagtaagaatgttgcaaatagaaaaatgttaattgaaagacacaatttatcttattctatcaccaaaaatgatcaggcctattttgaccatgaatctcgcaagctgtgctctctaaacttttggatgagagggtgtgggctcagagtctgggaacgctctctccctcactccctctactaagtaggttccatgctctattcaagtttgagagactctgcttggttggggcctgcatttatgttactcctattctttatacttggcacatcacagaccgtgaaaaaataatctggtggaaatggcaactttggatttttaatctcagttgttaaaayttttccaaatgagaacacttggacacagggcagggaacatcacaccatagggcctgttgtggggtggggggaggggggagggagagcattaggagaaatacctaaggtaaatgacaagttaatgggtgcagcaaaccaacatggcacatgtatacctatgtaacaaacccgcatgttgtgcacatgtaccatagaa

SEQ ID NO: 202115 - DNA, 656 bp, Homo sapiens
gaaatgaagaaatttttcatgttgagctccaattatctccgaaaggtagaagggaagtcattagttgagagtatacatggcattggagttggaagttttgagaaaagtggaggcttataaaattaaaatagttgtttccaataagatgaaatagaactgattaaagaacaaaggagacatgattgccgaggagtctctcagatgagttcacgttgatcattgtagtctattgtttcacaaaaactcattccaaagcaagctgcatattggattcacctgggatcttttaagatataccgattcctgggtcccacctgcagagattrtgttgtaatcactcaggagtctgcatcagcatccagatttcaaaagttccccaagtgattctaaagcgtcctgaagatcaagaaccattgacccagatataatgttcatcacctttattgttttccacaaaaacctacccatgtaaagcatttgtgaggatagaaaagtttactgaaaattagaaattgagagttgaattggcaaacaaatttagtcaaattaaattctgagttttaatgctttcctatggccaccccaagagtgtggaactctccttgggccttcaccccattgtctccaaactcaaatcattccactaactcttctcc

SEQ ID NO: 202116 - DNA, 632 bp, Homo sapiens
acaatgtagcaaatcaatatattaaataatataagaacgccaagttttcttacatataaaactagagtaacctatcaaacaaarctgttccatgtaactgagaactcattaaccctgaggtcctaggactatatgaagtcagtgcaatagcaggcgatagcctgtcatgtgcaactagggctgctggtggggaaaagtacaacatcccagattcgtcagtgatgtagctggattgttgggtgtgagaaatgcacagccctgactcagagatgccctctcttgctcatcttcctgtcattctggtgctgaacacctgtgcccacccatagtgacctatgaccgagggcatgggcacaaacaccttccctatctccctgtcttttttctttccctcttttccctttattcattccactatccttcttcctccccctcacaaccccaactcttttcatattatcaacaaatggcaagtacaggccctgaggaagacacagatgactaagacggagcttctgcccttgaaaagcccctgatctagtctgggagactgacatataatcagaggatcagacagcctgatgaataccatgatcatgtgcctgacatcttagagtaaagaaaatgtggca

SEQ ID NO: 202117 - DNA, 632 bp, Homo sapiens
acaatgtagcaaatcaatatattaaataatataagaacgccaagttttcttacatataaaactagagtaacctatcaaacaaagctgttccaygtaactgagaactcattaaccctgaggtcctaggactatatgaagtcagtgcaatagcaggcgatagcctgtcatgtgcaactagggctgctggtggggaaaagtacaacatcccagattcgtcagtgatgtagctggattgttgggtgtgagaaatgcacagccctgactcagagatgccctctcttgctcatcttcctgtcattctggtgctgaacacctgtgcccacccatagtgacctatgaccgagggcatgggcacaaacaccttccctatctccctgtcttttttctttccctcttttccctttattcattccactatccttcttcctccccctcacaaccccaactcttttcatattatcaacaaatggcaagtacaggccctgaggaagacacagatgactaagacggagcttctgcccttgaaaagcccctgatctagtctgggagactgacatataatcagaggatcagacagcctgatgaataccatgatcatgtgcctgacatcttagagtaaagaaaatgtggca

SEQ ID NO: 202118 - DNA, 632 bp, Homo sapiens
acaatgtagcaaatcaatatattaaataatataagaacgccaagttttcttacatataaaactagagtaacctatcaaacaaagctgttccatgtaactgagaactcattaaccctgaggtcctaggactatatgaagtcagtgcaatagcaggcgatagcctgtcatgtgcaactagggctgctggtggggaaaagtacaacatcccagattcgtcagtgatgtagctggattgttgggtgtgagaaatgcacagccctgactcagagatgccctctcttgctcatcttcctgtcattctggtgctgaacacctgtgcccacccatagtgacctatgaccgagggcatgggcacaaacaccttccctatctccmtgtcttttttctttccctcttttccctttattcattccactatccttcttcctccccctcacaaccccaactcttttcatattatcaacaaatggcaagtacaggccctgaggaagacacagatgactaagacggagcttctgcccttgaaaagcccctgatctagtctgggagactgacatataatcagaggatcagacagcctgatgaataccatgatcatgtgcctgacatcttagagtaaagaaaatgtggca

SEQ ID NO: 202119 - DNA, 661 bp, Homo sapiens
aaaatacatgttaaatcaaaataaaatagtagtataggctaaaatatatatgtacacataaacatttagtgtaaatgtgcatataaaaggagaaaaaaggaaatacattgatgataatactgtaggtaggtagggagattgtggtagtttactttttcacatattccaaaatatttaattactattttataacttacataaattgtagaataacttctcttgtttagtaacagcatagagaggggtaaaactggcagaaatggacatgtttgatcaatgttgatccttcaaactacagtgatccacttctgagaacagggactcacattaatgaaggagtaagaccaggttcttacagagcgtgagattcagcttctcctgtcatgagatggggtcaggctctgggccaggagagcaatggccagctttggaagctatatctcaggtcacattcaaaagcacacatttccaattcttttcccaacgctgcttttgtcacattagaatgaaatttgccctcagtgttgaactattctataaaaagcacaatcttgcctaasttaaaatttaaagttagcttgtctgacagctgggatgtaaagagacagtgaaaagattctgacttttggcattgtcagcagtttcccttgagagtggagcc

SEQ ID NO: 202120 - DNA, 604 bp, Homo sapiens
ctttttcctcatgtatccctgctttgaaacctgtaaatttctatctttctctgcccctttctgacttcttttattattattttcaacctcattgatttcttcaaactactttccatccactaaatatttctaatgagccctgtacatttttctgtaccactgtggaaaaaaagtaaaataatttctgtcttaacaaaggattgccacacccatctagcattaaaaggaaggagaaaaagcgggacacattaaaaacaataagckttgatttctctggctctacctacagacctgttactgtgaggcctttaatccatcttcaccgccgctttcttcccttgctttgtcttttaaagtttcaggggactgtcacaaacagggtcttactcagggcctcctgctgctgctctgtggccttgttgagcccgtggtgggattcctgtggctcctcctggccagttgtccactgcaggtgccatggatccaagaattacctctgctgggcacctccctcccacacaatggcaccctgcttccaggacatgctgagtcctatctcaaggcattcttggtcttccctcaatgttccagagtaatattattt

SEQ ID NO: 202121 - DNA, 567 bp, Homo sapiens
tacaaatgacctgtgttccacctagagagggtgccagccctctcagcattatgmagtgcccctcctctgtctgcatccccaggaccaccatgggtggggaggtcagagattggggagcacctatagaggctctaatgctctaaggtgacagtgatgaggacctgggtgcacccatgagtggagaagctaggcctgtccagagaagcaagacaaacacacacatatgtgcgcgcacacacacacacacaggcacacatgcatacacaaacacattgcatgcacacatgtcagttcaggggatagaggacactgactctgggccctgttgacccaagcaggcttccattgtggtgggttgtgtcaccccacaatgtcactgttgctgagtctccatcgcctctgtgttgtggagcagttagagacacacagcagtgtctgtgagtggctctgttgaaggaccgttttctagatgagaggcacatctcaacacagctcactgatcagactcaggtgagtgggacctgctctcctctcttcctcctggcttggggacagtcactatcaggt

SEQ ID NO: 202122 - DNA, 567 bp, Homo sapiens
tacaaatgacctgtgttccacctagagagggtgccagccctctcagcattatgcagtgcccctcctctgtctgcatccccaggaccaccatgggtggggaggkcagagattggggagcacctatagaggctctaatgctctaaggtgacagtgatgaggacctgggtgcacccatgagtggagaagctaggcctgtccagagaagcaagacaaacacacacatatgtgcgcgcacacacacacacacaggcacacatgcatacacaaacacattgcatgcacacatgtcagttcaggggatagaggacactgactctgggccctgttgacccaagcaggcttccattgtggtgggttgtgtcaccccacaatgtcactgttgctgagtctccatcgcctctgtgttgtggagcagttagagacacacagcagtgtctgtgagtggctctgttgaaggaccgttttctagatgagaggcacatctcaacacagctcactgatcagactcaggtgagtgggacctgctctcctctcttcctcctggcttggggacagtcactatcaggt

SEQ ID NO: 202123 - DNA, 348 bp, Homo sapiens
cagatctcctgggaagggtcactgtgtagccaattactttgctaaggcaaaayaaaaaaaccttggctcctcttcccagtaagttcctcattttcatctgagaccttacaaacctggccttcactgtccatccttctgtcagccttttaatcacaactatttaacaagtctctgcaacggtccaaactttccctcatcttcctgtcttcttccaagctctccaaactctcgaacctctggccattacccaatttggaatctgcttctacactgtcagctatctttgttgcagcctggcaatgtggtaaaagaagaaaagtccattatcagggggaaacatcaagatgg

SEQ ID NO: 202124 - DNA, 398 bp, Homo sapiens
ataggacggtgtggcacctctttcctctctcagccttgctcctactcctgctgtatgaaacatttcattgctgttttcctactgstatgattgggaggcttcctgagtcctcccagaagcagaagccactatgctttctttacagcctgcagaaccatgagccaattaaaccccttttcattatgatcatacagaaaataaagtactgcgaagtggagctatgaaatatcttcaatgacatttccccatcgtcttggctattaacattggacttcttttaatgcaaatatctgaaggcttcttgaagtttccccctgaaaatggacttctttttcttctgcattgccaggctgcaacaaagatagctgaaaatgtaaagcaggttcagaagtgggtaa

SEQ ID NO: 202125 - DNA, 398 bp, Homo sapiens
ataggacggtgtggcacctctttcctctctcagccttgctcctactcctgctgtatgaaacatttcattgctgttttcctactggtrtgattgggaggcttcctgagtcctcccagaagcagaagccactatgctttctttacagcctgcagaaccatgagccaattaaaccccttttcattatgatcatacagaaaataaagtactgcgaagtggagctatgaaatatcttcaatgacatttccccatcgtcttggctattaacattggacttcttttaatgcaaatatctgaaggcttcttgaagtttccccctgaaaatggacttctttttcttctgcattgccaggctgcaacaaagatagctgaaaatgtaaagcaggttcagaagtgggtaa

SEQ ID NO: 202126 - DNA, 386 bp, Homo sapiens
ctttcctctctcagccttgctcctactcctgctgtatgaaacatttcattgctgttttcctactggtatgattgggaggcttcctgagtcctcccagaagcagaagccactatgctttmtttacagcctgcagaaccatgagccaattaaaccccttttcattatgatcatacagaaaataaagtactgcgaagtggagctatgaaatatcttcaatgacatttccccatcgtcttggctattaacattggacttcttttaatgcaaatatctgaaggcttcttgaagtttccccctgaaaatggacttctttttcttctgcattgccaggctgcaacaaagatagctgaaaatgtaaagcaggttcagaagtgggtaacagccag

SEQ ID NO: 202127 - DNA, 386 bp, Homo sapiens
ctttcctctctcagccttgctcctactcctgctgtatgaaacatttcattgctgttttcctactggtatgattgggaggcttcctgagtcctcccagaagcagaagccactatgctttctttacagcctgcagaaccrtgagccaattaaaccccttttcattatgatcatacagaaaataaagtactgcgaagtggagctatgaaatatcttcaatgacatttccccatcgtcttggctattaacattggacttcttttaatgcaaatatctgaaggcttcttgaagtttccccctgaaaatggacttctttttcttctgcattgccaggctgcaacaaagatagctgaaaatgtaaagcaggttcagaagtgggtaacagccag

SEQ ID NO: 202128 - DNA, 386 bp, Homo sapiens
ctttcctctctcagccttgctcctactcctgctgtatgaaacatttcattgctgttttcctactggtatgattgggaggcttcctgagtcctcccagaagcagaagccactatgctttctttacagcctgcagaaccatgagccaattaaaccccttttcattatgatcatamagaaaataaagtactgcgaagtggagctatgaaatatcttcaatgacatttccccatcgtcttggctattaacattggacttcttttaatgcaaatatctgaaggcttcttgaagtttccccctgaaaatggacttctttttcttctgcattgccaggctgcaacaaagatagctgaaaatgtaaagcaggttcagaagtgggtaacagccag

SEQ ID NO: 202129 - DNA, 398 bp, Homo sapiens
atgcctgcagtgctacctactcaggagtctgagctgggaggtcacaggaacccaggaggctgtagtgagctatgytcatgccactgcactccagcctgggagacagagttagaccatttttcaaaaacaaattataaattaaataataaaataaggataaataaataaagacatgtaaactgtgctccttgtaaatgataaatctatgctcccttagtgaagaagatgagaataatggatatagcagggaaatggacagaattggccacattagaccacaatgaaagtcataataggcaccccaaatcggtaccattaaagccacataatgtgaccataatgcaggcaaattgtgaccaattaaaacaaactgacaaaaaaaaaaagggtatcctgga

SEQ ID NO: 202130 - DNA, 624 bp, Homo sapiens
cttacctttgctcctattggtgcctcagtggtgttgccagctgatgaccatttttttatattatttcttcagtttggtgtttcccaagtcatgtatgtatttcaaatatgaacccctaaatgatgtggacatatcctggtttatgaattctcagggaacaaattttccctacctgtagcagaggtcaaaacaatcaagctttctcttaatttctatttgccaatttttctatctcactttttacactggagtgtgtccctttgagactttccactttactgggggtctctcttctaatatcaacccttgcctaagcccaagacctcacttccagcctcatggtggtgggtaaaatcaaagccccttcctaataaacgttggtgactccttccatttgagaagccaaagaaaatgccagactaagcttaatagtcagacgtttccaattwttctttatttttaacttctgctaaaatcttgtactctcccaaaatctacactttgcatctaaaagccctttggttatatttcagccacactttatatattctatggaaagaggggttttaagattatctaatttgcaacattgctagcaatgtgagtgacctatttttttaaact

SEQ ID NO: 202131 - DNA, 601 bp, Homo sapiens
ggccctctctcctacacactcacctctctctctttacatttagaagcacttaaatacaatacagactctatcataataaaagtaataggctcatttctttggccctacatattcatctaccaaatttctaggccagagattctcaaacattttggtctcagaaatactttccatccctaaaaattattaaaggccccaaagaccttttatttgtaagggttatattcattgatatttactgtattcaaagttactgtattcaaagtactgtattcaaagttaaaacagatatttaaataatatttattcattttaaaataacaatgttaactaggtaacatcaataacatgtcaaaaataactatattttataacaaaacatttagttaaaagaatggcaaatttctttaatacttgggttaggaggacacagctatactcatgtcttcygcatttaattcctcatggggtttttgaagtacatgaagaaatctagcctcatacaaatatgtagcaaaaaaaaaagacaagattatcttaatagccttttcagataagtgtggatagtcttctttgatgacttaccaaaatttgaaaaatg

SEQ ID NO: 202132 - DNA, 392 bp, Homo sapiens
gaattctatattttttccaagttttattttgaaattaaatatttaaaaattaatattcaaatktatttctgcactgagattcagcagttgttaaaagtttgccactatagatagctagatagatgataggcggacagacacatagatataataatttggcctcttttcactaagacattaaataatctgttgtaattagtttccactctggctccttgatagtttgcaatcccaagaacttaacatataatcaaacaacagaccattagttagaagaaggtcacactcaacatataactgtcaaatggttcttgtttattgtgaaataatgcaatgcatataaatatgcatatttaaacatgtacataccttttaaaaactaatgacaagac

SEQ ID NO: 202133 - DNA, 562 bp, Homo sapiens
agaattctatattttttccaagttttattttgaaattaaatatttaaaaattaatattcaaatgtatttctgcactgagattcagcagttgttaaaagtttgccactatagatagctagatagatgataggcggacrgacacatagatataataatttggcctcttttcactaagacattaaataatctgttgtaattagtttccactctggctccttgatagtttgcaatcccaagaacttaacatataatcaaacaacagaccattagttagaagaaggtcacactcaacatataactgtcaaatggttcttgtttattgtgaaataatgcaatgcatataaatatgcatatttaaacatgtacataccttttaaaaactaatgacaagacattagccttgttcttatcaccctaatagaattttaatgttggcaggaacttagggttccttgtgggccacagctaaacagccacccctcatcacttctttacacataacccttttctgaaattttgtgtttttaattccctagcatttctttaaagctttcctctatat

SEQ ID NO: 202134 - DNA, 392 bp, Homo sapiens
gaattctatattttttccaagttttattttgaaattaaatatttaaaaattaatattcaaatgtatttctgcactgagattcagcagttgttaaaagtttgccactatagatagctagatagatgataggcggacagacacatagatataataatttggcctcttttcacyaagacattaaataatctgttgtaattagtttccactctggctccttgatagtttgcaatcccaagaacttaacatataatcaaacaacagaccattagttagaagaaggtcacactcaacatataactgtcaaatggttcttgtttattgtgaaataatgcaatgcatataaatatgcatatttaaacatgtacataccttttaaaaactaatgacaagac

SEQ ID NO: 202135 - DNA, 392 bp, Homo sapiens
gaattctatattttttccaagttttattttgaaattaaatatttaaaaattaatattcaaatgtatttctgcactgagattcagcagttgttaaaagtttgccactatagatagctagatagatgataggcggacagacacatagatataataatttggcctcttttcactaagacattaaataatctgttgtaattagtttccactctggctccttgatagtttgcaatcccaagaacttaacatataatcwaacaacagaccattagttagaagaaggtcacactcaacatataactgtcaaatggttcttgtttattgtgaaataatgcaatgcatataaatatgcatatttaaacatgtacataccttttaaaaactaatgacaagac

SEQ ID NO: 202136 - DNA, 392 bp, Homo sapiens
gaattctatattttttccaagttttattttgaaattaaatatttaaaaattaatattcaaatgtatttctgcactgagattcagcagttgttaaaagtttgccactatagatagctagatagatgataggcggacagacacatagatataataatttggcctcttttcactaagacattaaataatctgttgtaattagtttccactctggctccttgatagtttgcaatcccaagaacttaacatataatcaaacaacagaccattagttagaagaaggtcacactcaacatataactgtcaaatggttcttgtttattgtgaaataatgcmatgcatataaatatgcatatttaaacatgtacataccttttaaaaactaatgacaagac

SEQ ID NO: 202137 - DNA, 512 bp, Homo sapiens
taggttcccctcatctccaagttctgaggttgacttggagaagcccattgcttcctcattgtaagccttttattttttacttatcctgagaaaattgttctttctgatggagaagcagtgtagtgtagtatcaacartaagccttgaaaccaagccaacttatctctgtgccacttcctagttccatgttttagaaagtgtttaacacttgcaagcctcagtttcctcatctgtaaaatggagattaaaatacttatatttttcagagttataaatatcagctgtttatgcagcttgccaacactgaacttggacaactggccattatgtaacaagccctaattaagcctgctgtctatcccagaggcaaacatgacctcatccgttaaagcttttcactgaaatccaacctgaagaatggcctgggtgagatggaaggctgtcactcccaacaataatttccctagtctttgaatgagtgaggacacactctagattgtgtatgtgcgtat

SEQ ID NO: 202138 - DNA, 584 bp, Homo sapiens
taacatttcaatttaaaattttgtttctcagagtttactctataataattattgaactcaattgtctcaaatcagcttatccatcttcataacctaaatcagttgtgctttctgttatttttattggtaacaaattgtccataatttcttctgctttaatattatttttctatagtttagttagatagacaaaaaaatcataattttaactagaatgcgaatggtttttattttctaaaaatattctgaatttttattaaaaatctcataaatgaatgggtactatctgcataattataaaaaatatacacactatatattagttttgtgatagatataaaaacmtcctactttactggtttactggatagttgaaatatttgactatcataaaataaagaatattctttattatatgtgtcatgaaatgtaattttcttaattaactgcctttcatcctttaaaataatacaaatgtattgcattttaggctggtataaatatgtgcataacactatatgtatagcaaaataccagtcaagtatttttctactagtcttaattgcattaattatgctttttcc

SEQ ID NO: 202139 - DNA, 617 bp, Homo sapiens
ccacgtataaaaatacaataatgacayctctaaagaatggtagagtaaatcacaagacttgatattagttatgagttttcttatactgtctgtatttgaaaatgtgtaatacttgacacaaatactgtgttagttacatttaaacaattttgtgaaatcagaacacacacacatccttccccagaggagtgcaaatattgatgttctgtaggctcaaagaatgattgctcaaatccacatttccttggttttcttacttaccatatgttattcagaatattttgctcttagttatgcttttgatgaaatcattgatctctactatcagtattcaccatttgtcattttctgaatctccttgccagtatcacttatcttttctccaggttccaaaatgtaagcaattttctgatattctggtctaaatgccattttcttcttttactcctttcttttctactatagaacctaataacttctggggagaaagattgagagtaagagagaggagggagaagagaagtaggagcagagacttatatcatgccatgacatgtatactgagtattatcagtgcacaccaatgccccacacatgtatgcatgtatgtatgcatg

SEQ ID NO: 202140 - DNA, 463 bp, Homo sapiens
gatggttatttcaacagatggtattgaaacaattagatagtcatttgcaaaaatgaactaagactcgtactttggaacacataacaaaattaataaaaataaattatagacaatgttaaaacctaaaactataaaatttgtagaagaaaacataagacaaaatcattgtcactttgggttaggagaaaagttggcaacctacccatggccaatgggacaaatcttaccctctacctgtatttctattatgtatgaactaagaatctttttttagatctttaartgattagtggaatggaaaaagtatactacttcattacatgaaaattatgtaaaattcaaattttaattattagaacatagccatactcattcatttaaatatatttttgtgattgctttcacactacaactacagagatgattagttgaggcagacggtattagtctgttttcacactgc

SEQ ID NO: 202141 - DNA, 447 bp, Homo sapiens
ccccatttttttacttcaacctctggaggctttttattgattactattaactctgagatactctctatatatacctgaagcacagatttgtaaacagactgtctatacctactcacttcttgaatcctattgaaaagtccatccaacttccactcaaaatatcagtattttytatgaaatggtattcaaaagttattatgaaatatggcccttactgaataaatctatttttgcaggaaataaatatctgtaattttaatatttatgccattacatcaattctgtagctagctattttgatgtaatattataccgtgttcccatctctgacatgtgcatgaatgcacacacacacacacacacacacacacacacacaggtgcacacaagaattgttgaaacattgtgatcaataactctatatattttcccctgagttcataagct

SEQ ID NO: 202142 - DNA, 447 bp, Homo sapiens
ccccatttttttacttcaacctctggaggctttttattgattactattaactctgagatactctctatatatacctgaagcacagatttgtaaacagactgtctatacctactcacttcttgaatcctattgaaaagtccatccaacttccactcaaaatatcagtattttctatgaaatggtattcaaaagttattatgaaatatggcccttactgaataaatctatttttgcaggaaataaatayctgtaattttaatatttatgccattacatcaattctgtagctagctattttgatgtaatattataccgtgttcccatctctgacatgtgcatgaatgcacacacacacacacacacacacacacacacacaggtgcacacaagaattgttgaaacattgtgatcaataactctatatattttcccctgagttcataagct

SEQ ID NO: 202143 - DNA, 501 bp, Homo sapiens
gataccctgtctgaataatgtttcaatatgcctgggattaagaataaatcttttaaaatgaaaagtaaagcaggaaatatatataacatactagcctttggggtaaaacttctccaaaagaaaagtattttgactctattttaaaggactgctggggaattacacatgtttttagaaaggcaacttgcagaaagtataaacccatcataaagcttgtaaaagcacagatctttgtcaaaaaaaatcaaatacatttgagacaaacctcaggaactttccttgaaaaggcagctgaaggcaacctcctgactctggtatgagaagtaagagttaaacaccccattgaaattatattcaccatccatggagggtccaaaagagaatcattgtgtgaaagatgtttaaaaakgagaaaacagaacaaaattgctttaaatcatattagctaatgcatagggaattttcataaatgggaaaaggaatagtcactggaaaataaag

SEQ ID NO: 202144 - DNA, 545 bp, Homo sapiens
tttggctagtccatatgcatttagcttttcattggggaggtggattaaggagaggcaatgctgtttcatatggatattcatgcaattaatcatgaactttataagatgacattttaaaagggatatactcattgaaaactgttaaattgatccataacatcactttggaaactataagagaaaagttgctatgatcttttyaagagaatactgcagctggatagcttcaaaacagacggacttttagatattctctttaatacattatgtgtcttttagtgctatagaaaaacacttaatttcctgtcttctatgggaacctagacttcctgagaaggctattcggattagaataataaatctttctcctgaatacagaaggcatggtaaaacttattttctcactcagtcaaacatatttcatattttttcccaaataacatctaagaggagaggaaaggagtattatcaatctctgatgctttctactcctgtgttttttaatatatatgcacattttaaattgccatattaaaaatagagga

SEQ ID NO: 202145 - DNA, 578 bp, Homo sapiens
attaaactaatcatatcactataaatatatatttcaaaacttgcaaacaaataatgggaagcttacacgttcttttcagcagtatgtcctataggttgtgagaaaaatattttcactgttttattcttttatttagtatctattatgagcctagtactaggtacaagtgtgtagtattaaatgacactcagtgactaccctcatggaaattatagtctgaacagttaatatgcactcccmcctcacattaaggatgaaaaaacaaacaaaatttaacaaaagaaagaattgaagttttcaagttgtaacgggtttcataaaagcagtaaattttgaggggagagagtagattaagagacaagaatcagaaaactttctgaagacaatttgcaggaattttctagatgaagactttggggcagagtggaaagtgtattcatggcagaggaaacaaagcattgatacaattacccgaaatggaaaagaacttggtgcattaaaagaagtaaaaaaaaattcaggatggttgtaatatagaagataaaggagctagtgacatgaaaaaagggagcaaggtc

SEQ ID NO: 202146 - DNA, 600 bp, Homo sapiens
aaaacacacacacaaaggaaaaataatccatgcacatggattagaataatcaatattgttaaaatgcccatcccacccaaagcaatctacagatccagtacattccctatcaaaatarcaaagacattcttcacagaaaagaaattccaagatttatgtggaaccacaaaagagacagaatagtgcaagccatcttgagtggaaaaaaaataaaagaaaaaaaaactggaagcatcacattacctgacttcaaattgtactacagagctatagttaccaaaacagcatagtaatggcataaaaacagacacctagaccaatggaacaaaagagagatcccatgaataaatccatacatctacagtgaacatttctgacaaagataccaagaatatacattgggccaagaatttattgaagaaagacagtttcttcaataaattgttttggggaactggatgtttatatgcaaaagcatgaaactagaatcctatctctcactctattaaaaatcaaataaaaacggattaaggacttaaatctaaatttaaggacttaaatctaaaacctcaaattttgaaactactaaaagaggacatt

SEQ ID NO: 202147 - DNA, 517 bp, Homo sapiens
tgattcctttggttcaaatcccagcacagacagttaccaatggtgtaactttgggctasttatttatacctctcttagccccaatttatcatctgtagattgggaataataatggtatctatttagccagtttcctgagtcaggagtatgagagtgggttcacttggttatctgctcagggtcttataaggcagaaaaaagcatgatagccatattgcattttcatttggagtttggggttctcttccaaaatctttggggtaattgacagatttttttgaagttgtagttacagagatctctgttttgccagttggctgctcagctacaggtcagtgtcagcttctaagggcctgtgctcataggcctactcaaaacctgatggtttacttctcctttcataccaggaggataatttctctgatgctttctcttcctttaagagctcacctgattaggtcatgcctaccaaggcaatttttcttttgattcacttaaacctaactgattagtaagc

SEQ ID NO: 202148 - DNA, 517 bp, Homo sapiens
tgattcctttggttcaaatcccagcacagacagttaccaatggtgtaactttgggctagttatttatacctctcttagccccaatttatcatctgtagattgggaataataatggtatctatttagccagtttcctgagtcaggagtatgagagtgggttcacttggttatctgctcagggtcttataaggcagaaaaaagcatgatagccataytgcattttcatttggagtttggggttctcttccaaaatctttggggtaattgacagatttttttgaagttgtagttacagagatctctgttttgccagttggctgctcagctacaggtcagtgtcagcttctaagggcctgtgctcataggcctactcaaaacctgatggtttacttctcctttcataccaggaggataatttctctgatgctttctcttcctttaagagctcacctgattaggtcatgcctaccaaggcaatttttcttttgattcacttaaacctaactgattagtaagc

SEQ ID NO: 202149 - DNA, 622 bp, Homo sapiens
gttgatatgaatagggggagggccagagcaaaaagaacttattaaaatgactttaggttcactgcctcttgtttttttgttttttttttttwaatttttcttttaagcttggcctaatttaaaatgcaactctggtgaaggagattttccaattcgcatatttactttaagatattccaaagtgtcaggcaaattgggtttttatttatatttagcaaactaatcatttgccctgagaaacagaaagctctgatgttctgagacaattttacaagtaaaaaggttgatcttctctcagaatctcttgagctattgaaaaactaaaatttgacagaaaaataattttgttatgccaaagagcctgacaggtgggcaacgtatttgaggggaattgcagtgactttcaattatctatccttagacacttatctgttcctcatggtgtcctacctaatgaataactcttctgcagatggtgaaaaaccaggattcttaattgccaccaggctaaaattaacaacaatcatgagcaatgctaggggaggaacctgccagaaaatagttcatctatcaaaaaaaggaagaggaatatttaataatcactttagcattatgcaacttt

SEQ ID NO: 202150 - DNA, 595 bp, Homo sapiens
ctattgaaactttttagaaaatttatttagaaaattacttcttttcagccaacttttaaaatactgtttatttgttggaatttttataatgctataatttattaagctactcatctcaaagaaatattaaagtgcttttcattaaatggaatgtttatatagtcaattttttgtaatgcctataagtgaaggggttcaaggtattgttcatttaatctattatttttattcatatatctaaaatctctaaccttggaaataagcagtaagcatggaaacattggaaaagcaataagaaaaaagaaaattwaaaaaaaagaatagaaaacagaattgtacattacaagtacctatgtgagtctagggtttctttaaggaaacactgtcttttattctcagtcagcatttctgactatggttggcctactaccagatatggacatgtaacccaagtttgcaaaatcagattattccactctccatcttttaatcaattatttagtccaggtcttgagatgaaacagttacataagcagagctactctgagttgtgtatttttttttccacaaataaaatgttcagtgagcagagaag

SEQ ID NO: 202151 - DNA, 631 bp, Homo sapiens
acaggcatgagtcattgcgcctggtctatttataatattttaaaattatagtatgtgtatatgtttttctgtttttgtttatttattacgagaagttagtactttatatctaaacaccgtgcttctagctccaagactaattggagactttgtaataggtaaatgtaagtctgtgaaagccttggtcataaattagtcaataattgagaggaactgatttcacagattcagagaacagattctataggtgaaaaaggcttggaaaaataggttgacaataatttcgggttaaaaagccattcaagaaatgaatgtctgtataaacaaccaaatctgatgtccatagtgtcacagttatcatctgtagcaggtgagttggatgtgagttttaagaagaaaaattctattttaaaaataaatacatttatcaacakttatttttaagtttattgtgtactgccagacactttggatatcttcactgcattgtacagattcatgaagcaaagtgctcttggttggcttttttaatactaacttaagggttcatgctaagttctttcttatcactcttttctcattcagtaaccctccagggaagaagattgcaagacttcagacttcatttcaa

SEQ ID NO: 202152 - DNA, 564 bp, Homo sapiens
tcttgcttatcagtcagtcacccactaggttagccgtgtctacaaatcatacttcagttttctgccaggcaccagtctcatagagaagactaattaccctgaacttcaatcgtatcagaggctaatacaggcctggccatatgcccaatcccataattactagaataaccaaagaaagtaaaatgggaaattaaataactaaaagtaaaattttgtcaagattttaaggcagaggtctgaagctatgggatgatgggttattaatcaagaaagatgagtrtaagtgaaataagaaagacaaaagaatgcaaaggatcctaaggaactgttacgaataattacacacaaataaattagatagcctacaaggaatgtataaattccttgatgtatacacccttcaaaggctgaagtatgaagaaatgtaaaattttaacaaaccaaaaatgattaaggagattgcatcaataataaaaagtctctcttcaaagaaaagcccatgatctgatgtcttcaatgttgagttccatcacacatttaaagaacagcgattgtcaactcttt

SEQ ID NO: 202153 - DNA, 564 bp, Homo sapiens
tcttgcttatcagtcagtcacccactaggttagccgtgtctacaaatcatacttcagttttctgccaggcaccagtctcatagagaagactaattaccctgaacttcaatcgtatcagaggctaatacaggcctggccatatgcccaatcccataattactagaataaccaaagaaagtaaaatgggaaattaaataactaaaagtaaaattttgtcaagattttaaggcagaggtctgaagctatgggatgatgggttattaatcaagaaagatgagtgtaagtgaaataagaawgacaaaagaatgcaaaggatcctaaggaactgttacgaataattacacacaaataaattagatagcctacaaggaatgtataaattccttgatgtatacacccttcaaaggctgaagtatgaagaaatgtaaaattttaacaaaccaaaaatgattaaggagattgcatcaataataaaaagtctctcttcaaagaaaagcccatgatctgatgtcttcaatgttgagttccatcacacatttaaagaacagcgattgtcaactcttt

SEQ ID NO: 202154 - DNA, 622 bp, Homo sapiens
tttttttttctgttgaaaaaatggaatgaatgaggtgagtgagcctcagggccttttattttcccctgccagtgtaagacagagaaaacagtgtaggagctgctgtcataaaaaaaagccttccccaatgactcctgtttactctttggaactccaagagtttattttctaaaccatggatgctaatcctggatgctcatcaaratcatctgaaaagtttgccattttgttcttactgctattgtgttatattattgtttgatacagattcataattactgaattgttatttcagagaatggggaaccaaattgttttcatgaatgaatgaagtctctaagtaaaccctaatcttcttagaacaatatttccttcataactgactttatacaaattaattcttttctctttcccaattgccaccactttcattcatacaccagcatcatccatgagctattgcaatgggcataatatattatggcacacaggagattgtcttcccatccatcctcaacaccactttcagaatcatatttttagacaccagatagatcctattatttccctaaataaaagctttcagtggctcttcattaaacataagataaaattcatattc

SEQ ID NO: 202155 - DNA, 532 bp, Homo sapiens
ccattttatcactctagtaatcttatgtcataacctttgttaaatagcaaaataytggcattctttatttccttcaaaaacaaaaagactacaaaataggcataattggttgatgtccctatgggtctaatgggtctattttggttccaataagaagaaaaaattgataggaatatatgttttccttttagtgctggccaactctcaaaagtactgaattttacaaatgaatgtcaagtacattgtttaagcaatattaatcaaattatataactgataattcctggcatgttgacattttgatgatttcataaatcaagattttattgctttagattccaaataggtccctgttgtgtaagatgagattgtaaagtaacaacctgtttttaaattgtggtttagtgagagtattctcacttatgcaaaatggtacagatattgcatcattttgtgctcatatccttattggtctgacttacagtaggaaatccaggaagaaaaggtggtatcagttcagcacccatgggta

SEQ ID NO: 202156 - DNA, 532 bp, Homo sapiens
ccattttatcactctagtaatcttatgtcataacctttgttaaatagcaaaatactggcattctttatttccttcaaaaacaaaaagactacaaaataggcataattggttgatgtcyctatgggtctaatgggtctattttggttccaataagaagaaaaaattgataggaatatatgttttccttttagtgctggccaactctcaaaagtactgaattttacaaatgaatgtcaagtacattgtttaagcaatattaatcaaattatataactgataattcctggcatgttgacattttgatgatttcataaatcaagattttattgctttagattccaaataggtccctgttgtgtaagatgagattgtaaagtaacaacctgtttttaaattgtggtttagtgagagtattctcacttatgcaaaatggtacagatattgcatcattttgtgctcatatccttattggtctgacttacagtaggaaatccaggaagaaaaggtggtatcagttcagcacccatgggta

SEQ ID NO: 202157 - DNA, 646 bp, Homo sapiens
ttttaagatgtcctctaaagggttctaaagtatttctacaataaatagtacactagccttggtggcttatgcctataattccaactactcaggaggccgaggagggaggattgcttgaggacaggagtatgagaccagcctaggcaggtaacatagcaagacacctgtattatacatacctatacaaataaataaataatttttaaataataaaataagaggagcccctttctcctctacttagaatttaattttacccagtaacatacattatatcaaacttgtccaacctgcagcctgtaggctgcatgcggcccaggatgactttgcatgtggcccaacacaaattcataaactttcttaaaacattattagtttttttggcaattttkgttttagctcatcaactatcattagtgttagcgtattttatgtgtggcccaagacaattcttcttcttccaatgtgacccagggaagccaaaagactggacacccttgcattatatttagttaaaaaaaaattacctgtatataactaaaaactgtaaaatatgtcataacacattgcaagagaagaaactactaccatcatatgattgttgtgctggttcatgaagcagtgtttggcatctgcttgtgagaac

SEQ ID NO: 202158 - DNA, 599 bp, Homo sapiens
gctaggacaaaatggttgattgggaagtcacagttcaagctattaagtaaactattatgaagaagatgttgacttttttttttttaccaggtattatagactgaattgtaccccctgaaaactcatatgctgaagccctaatcctcattgtaactatagttggagatagggcctttaagggggtaattaaaatgaaatgaggccatactggtgtccttatgagaagaggaagtgacaccaggactgtgtacatacagaggaaaggccatgtgaggatacagtaagaaggcagccatctgcaagccaaagaaagaggcyatactaaaaaccaactctgccagcaccttcattttgtacttcccatgttcaagaattattagaaataaatttctgttgtttaagccactcagtatatggtactttgttatggcagccctagcagactcatagaggagattattaaaaatttccaggtgattttattatcagctgtaaaaatttctgatatttcaccttaataaccatttatttgttcatgcacacacaccagcacacatacactcagttgacacccaagataaaatttgcttactatatta

SEQ ID NO: 202159 - DNA, 570 bp, Homo sapiens
gaatattttcttaatcatggttctagacatttctatttttcttcaatttcccctgtccaactcaccccacaaaggctgtatcagaagagccagctacttgtgtctgggcttttatatcaagttttaggaatgttcagacagtttccaactaattaaaatttacatgttaaattctctgttcatctatggtatttctaaagagaagtgatatttgtttttgttttgcttttttatcttcaggttagcctcyacaaatgtctgcagtctttagagaatattggcttctctttcttttgttcattttttgacacttctttgtctctctctctcacttctgctatggttgctgaatatctttccacctatgacgttttagatggggaaagagtttggccatcagtgtctgcaccagttaccacttcagcccactacatcttgagctgcaatttctactacttgcatgaattcggtgagacaagacactcacacacacacaagttaaatgagggggatttatgacttacatacaaacatcaaaggacaacagaagtctaggattcatgatgagct

SEQ ID NO: 202160 - DNA, 570 bp, Homo sapiens
gaatattttcttaatcatggttctagacatttctatttttcttcaatttcccctgtccaactcaccccacaaaggctgtatcagaagagccagctacttgtgtctgggcttttatatcaagttttaggaatgttcagacagtttccaactaattaaaatttacatgttaaattctctgttcatctatggtatttctaaagagaagtgatatttgtttttgttttgcttttttatcttcaggttagcctctacaaatgtctgcagtctttagagaatattggcttctctttctkttgttcattttttgacacttctttgtctctctctctcacttctgctatggttgctgaatatctttccacctatgacgttttagatggggaaagagtttggccatcagtgtctgcaccagttaccacttcagcccactacatcttgagctgcaatttctactacttgcatgaattcggtgagacaagacactcacacacacacaagttaaatgagggggatttatgacttacatacaaacatcaaaggacaacagaagtctaggattcatgatgagct

SEQ ID NO: 202161 - DNA, 570 bp, Homo sapiens
gaatattttcttaatcatggttctagacatttctatttttcttcaatttcccctgtccaactcaccccacaaaggctgtatcagaagagccagctacttgtgtctgggcttttatatcaagttttaggaatgttcagacagtttccaactaattaaaatttacatgttaaattctctgttcatctatggtatttctaaagagaagtgatatttgtttttgttttgcttttttatcttcaggttagcctctacaaatgtctgcagtctttagagaatattggcttctctttcttttgttcattttttgacacttctttgtctctctctctcacttctgctatggttgctgaatatctttccacctatgaygttttagatggggaaagagtttggccatcagtgtctgcaccagttaccacttcagcccactacatcttgagctgcaatttctactacttgcatgaattcggtgagacaagacactcacacacacacaagttaaatgagggggatttatgacttacatacaaacatcaaaggacaacagaagtctaggattcatgatgagct

SEQ ID NO: 202162 - DNA, 498 bp, Homo sapiens
gaattcggtgagacaagacactcacacacacacaagttaaatgagggggatttatgacttacatacaaacatcaaaggacaacagaagtctaggattcatgatgagctggtccaatgctcaggaaagctgcctggggcggatggggtctcatcagctcgtaccccacttatgccacagctaagggagccaggaaagcagcttgctcttggttttgcaccccaatgtggcaagactctctggtctaaagcactgaaggacatcctttcctaggagagactgaaacagagcccaggatgtccttccttccttatctcaggatattgccttaccagcacatactctgcccttgagaactgcaagtgaggaaagagagagaactaggtaggtccaaggccatcccgagaactgttttccagtatccattctgagtcaaatctgaagaatatcacatcctttacagaagtcrtgaagtctaagaaatagctatctcagtccat

SEQ ID NO: 202163 - DNA, 525 bp, Homo sapiens
ttttttttattaaatgtttttcttcagcagggtttttcatttttctatgttgtttcctttcttctttaagattggcttgggcaaattaaaaaataataattagttactttagatgttagcccatttcctgttccattgtgtgctagactaccagtttcagagggtcagtattccttttcctatgtctttgcttttagaactagacattttatcttataatatctgcttttggttctgttttgtatgatttctttatagggagccatacaaagcsaatactttgcgtgtctgcagagaagtatttatcatcccagctcactgcttatgttggcctatgtacagtcacctagaatgtaacttttgattggtttaatacctctacctgctcgaacttcatctgtatatgttttcttgcctagcatcacttaatgggcctcacttatttggatattctcttacttaagtaatttcatagtattggatgacatgtccctttccttatagataataacttgtagcaccacc

SEQ ID NO: 202164 - DNA, 525 bp, Homo sapiens
ttttttttattaaatgtttttcttcagcagggtttttcatttttctatgttgtttcctttcttctttaagattggcttgggcaaattaaaaaataataattagttactttagatgttagcccatttcctgttccattgtgtgctagactaccagtttcagagggtcagtattccttttcctatgtctttgcttttagaactagacattttatcttataatatctgcttttggttctgttttgtatgatttctttatagggagccatacaaagcgaatactttgcgtgtctgcagagaagtatttatcatcccagctcactgcttatgttggcctatgtacagtcacctagaatgtaacttttgattggtttaatacctctacctgctcgaacttcatctgtatatgttttcttgcctagcatcacttaatgggcctcacttatttggatattctcttacttaagtaatttcatagtattggatgacatgtccctttccttatagwtaataacttgtagcaccacc

SEQ ID NO: 202165 - DNA, 589 bp, Homo sapiens
cctgtcactcttaagtagaataaaactataagaaactcaattagcttttatgatgaaaattatttttattcgtttttaaagtagaaaaatacatcaagctatgctgaactagaaatctacatcatgataacttttaacaaaggttattaatttcaatgacccaaactgtggtttaacaccaatagtgtggttgattttatctataaagtggtaaagagaactaggaccttattacgtgaaggacaaattattttgttagcttagattgcataaaacttaccaaaaggtaaaccatgctgaaaataggaaaaacatattaatcgttacaacttcataataaaataataaattgtgcaaycttagaatttaaaacaccatatttaattgttaaagtacaaaggtatggaattcaatgcaataaaagtaaataatttgaaattttgctgaaactataggtctgtaaaaatcacattaaaatatgttaaacatttcaatagaaaagaacagagattataaagctcagcctcatttttttttcctttggcatactgtattagtcctttctcacactgctataaagaaaacctga

SEQ ID NO: 202166 - DNA, 608 bp, Homo sapiens
ttggaattattttactcattaaaatataagcagacaaattaaatttatcagagtttatttgaacaaagaatgtttcatgaattagcactcagatacagaagttcacagagctccactcagcaatatgggcaggctgtacttagagtaagaaacaggaagtcaggtacagaaacagcttgattggttacagctgtgtggttgccggatttcggcatgaggcaktgctttatgtggacatggtcttatcaactggcagcctgtgactggctataacttggttgctgtgattggctgaagtcagctagttattacaagagtatatttcaagttgggctgcattcgtttatatactaagttagattttagttcactacttatgatttaaaatgcagaggcagctttggacttctgcccttctctgccaccttcctccccattctgagttgtctctctctttctctctcttcacctgtaaataacttgtttttaacaccgtcaccttcttttggggaagctgtgaccacatgaagattacatgtgtaggtgctgccatttacagctgcagccagtctcctagatggtaccaaatgtaagatttatgagcgaat

SEQ ID NO: 202167 - DNA, 480 bp, Homo sapiens
cttggtggcttgcaattacctattttaatgctkcacaagaaacctaggcaagccaattgcttcctccattctcacatccttccccactgtggcccacacctctgctgactgcagtgatctgaactgagtactcacaaaggccactcttctctctctgcctctaataacccggtataacaattgtggtgagtaatttccttaccacttctgttgttaacaaatgctaataatactgcacggtacagatcaagcccagctactgaaaaagaaactacacaaattattttttaaagttatcatcaaaagaaatgcttttctgcaggaaatttttttaactgctcaaggcgtttgcctagccctgcttaactgaccgcttctttgttaattaacaagtgcatctgcttcacgaatgaaaacggttcatcttatctaaagcacacttgcaggcttttttgggtggatgtaactatagggaagtca

SEQ ID NO: 202168 - DNA, 285 bp, Homo sapiens
aaggctaataattggactactttatttttatggttgtgtattggtggctgcagggccaagacaaagggtgctatagccacctgtcgccytagggaaggaaacagggatgggtcttgagtccagagagaagaggatttctctgatcatattagacaggaggctggagaggctggtggaacttgcctcaccttgtgggatggagttggagtggactcaggttgaagagtgcagatgttccacttctttctctccatcctctaggcttagtggtcaaggaatgaagga

SEQ ID NO: 202169 - DNA, 491 bp, Homo sapiens
aaaccaaaaccctttgtttttgtctgcctaacatctatcctccttcttccattatcagaatccctctttttctttgcaaatccctcattgctcaactatcagcctatgtggtcaactggggttggtctcactccatccccagctccaggtgtgagtacataacacaagctagagcaatgggaagactttctgtactatttcttgtaattatttagagagagatattattttcttactggggttgctaagctgatgagatttgggctagagtaccagtggccatctttatcattctytggggaatgccttccgactccagacaaaagccgagtaagagaaagggagatagattgtgcctgaaggttcaccattaacctatttatgtgagccaaaaagaaaaaaaaatcctcttttatatttaagcctgtttcaattgtatttctgtcacttacaattgaagagtgctgaattcatagactcctcaattccac

SEQ ID NO: 202170 - DNA, 490 bp, Homo sapiens
aaccatataactaataatattaaatgaaaatggactaaacactattaaaaagcagaaacagactttgtaaaaatacaaaacacagctatatgctttctacaagagacacactttcaatataaaatcataggtaggtttaaaggaacagaaaaagatatgtgataaaaatattaagtattagaaggtgtgttctaatgttaatatcagataaaatacacttcaaagcaagaagtagtaccagtgaaagagatgcacattgaacatttcataatgataaatgaatcatttcatcaggaatamgttacaattataagtgtgtatgcgtctaacacagagcttcaaaatacatgaagcaaatactgaaaaaactaaaggaacaaataaccaaatccacagttataattggcaatttttaacacacctccctcagtaatttgtagaccaactagacaaaaaaaaaaaaaaatcaccgagtatacagaatatttga

SEQ ID NO: 202171 - DNA, 439 bp, Homo sapiens
tgccttttctatgggctttcatttctcacacctccttctcccatttgaaaattataatagtaacagtaaacacaatgacagttgtcatttagtgaaggcctgctacataccaagcactgtgctaagtcctttargtacattatccttcagacaattcagagaggtatgtatttttatccacacatgcactccttgatagcaagaaccatccctttcaaggcaatcttcctgaaagagctggaatttccttagaagcaagtttcctggatattctggttttgcaggccagaggtgcccccatctgcagggatctcttacaccttctgccattagaaagaacacttgacacccaggccatgtggtgagttctcatcctgctcagccatgctctatggctatactttctaggcccctccttcaagcctaggttggaggaaaa

SEQ ID NO: 202172 - DNA, 393 bp, Homo sapiens
gaaaattataatagtaacagtaaacacaatgacagttgtcatttagtgaaggcctgctacataccaagcactgtgctaagtcctttaggtacaytatccttcagacaattcagagaggtatgtatttttatccacacatgcactccttgatagcaagaaccatccctttcaaggcaatcttcctgaaagagctggaatttccttagaagcaagtttcctggatattctggttttgcaggccagaggtgcccccatctgcagggatctcttacaccttctgccattagaaagaacacttgacacccaggccatgtggtgagttctcatcctgctcagccatgctctatggctatactttctaggcccctccttcaagcctaggttggaggaaaa

SEQ ID NO: 202173 - DNA, 439 bp, Homo sapiens
tgccttttctatgggctttcatttctcacacctccttctcccatttgaaaattataatagtaacagtaaacacaatgacagttgtcatttagtgaaggcctgctacataccaagcactgtgctaagtcctttaggtacattatccttcagacaattcagagaggtatgtatttttatccacacatgcactccttgatagcaagaaccatccctttcaaggcaatcttcctgaaagagctggaatttccttagaagcaagtttcctggatattctggttttgcaggccagaggtgcccccatctgcagggatctcttacaccttctgccattagaaagaacacttgacacccargccatgtggtgagttctcatcctgctcagccatgctctatggctatactttctaggcccctccttcaagcctaggttggaggaaaa

SEQ ID NO: 202174 - DNA, 489 bp, Homo sapiens
ctgcccctctgcctgtcctctagaagtaattattatcctgaattttacactatttttctctctctctctttctctctctctcacacacacagttctatcacttatataggcatctgtgtactataaccagctcatactagttcaagagaaccaagtgtatgcgtcccttctgaactctggtgagatcatgttggtaacttgaaatcagccrtggtgggaatatttacaacatataattagcaaggactgcacagcagagcccttttctccataaggccagttttaaacctttaccaacacgccactgcatgcatgttcctaaataaagaatgtttgcctcttttgttcacttgctgtattcctaacacttagaacaatgcccagcacataatagacaggaagttgtttaatgtgtgagtaagtatctttctctatctctgttcctggaccaaactgaggatggggctgctatttctcatggcccaataa

SEQ ID NO: 202175 - DNA, 489 bp, Homo sapiens
ctgcccctctgcctgtcctctagaagtaattattatcctgaattttacactatttttctctctctctctttctctctctctcacacacacagttctatcacttatataggcatctgtgtactataaccagctcatactagttcaagagaaccaagtgtatgcgtcccttctgaactctggtgagatcatgttggtaacttgaaatcagccatggtgggaatatttacaacatataattagcaaggactgcacagcagagcccttttctccatarggccagttttaaacctttaccaacacgccactgcatgcatgttcctaaataaagaatgtttgcctcttttgttcacttgctgtattcctaacacttagaacaatgcccagcacataatagacaggaagttgtttaatgtgtgagtaagtatctttctctatctctgttcctggaccaaactgaggatggggctgctatttctcatggcccaataa

SEQ ID NO: 202176 - DNA, 496 bp, Homo sapiens
atgtcttccagccaagattttatcagtttaaaaagaaagcttcgttttaccttcagatgccaacaaactcctttatatctgttttttattacttcagaacttgtatagggagaattttttttattatttgaaaaacaaactacgatagaatattggagttcatcttaacacctggagataaaagcatttggcagggccagggagagtaactttaagtttctgtaggtcgtgctaggtgttaggggttgtgaattgtgcctcccacactctggcaaagaaacactgtgttgatatcctaatccccagtacctcagaatgtgaccttatttgaagacrgggttgttgcagataaaattcgttaagatgaagtcatgcgtagggtggagccctaatccaatgtgactgatgtccttatgagaaaatggccatgaagacagagacagagggagcaatgaaagcagaaatcaaagttgtgtcattgcaagttaaggaattc

SEQ ID NO: 202177 - DNA, 478 bp, Homo sapiens
cctggggcttcaagcagcatgattgctcctgccactaatcccaagcttctcccatctctgcttcctgtccgctgaaaggactgaaaggaaaagaggtatagctttcctctccccaaagctcatggaaagggagaaaaaaaagcaaccagaatttcttctaaagatccaggtgcctacaagaagaggaaacaatatattttttttaagacagggtcttgctctgtcacccaggctagagtgcagttgcataataacagctcactgcagccttgaacttctgagctcaggcgatcctcctgcctcagcacccacagtagctggaactacaggcacatgccaccagctaagttgttcaaattttttagtagagatgcagtcttgctctgttatccagrctggagaccagcatttttatcatcataatggggatttgcttcaagagtggacatgttgcttaacccccatgtaactggaatag

SEQ ID NO: 202178 - DNA, 648 bp, Homo sapiens
ttggtttagtgtttctaatattgcatggatagtgaatatttggctctgtacttctgcaaagtatggcttgtggttccatttggtttttggttttggtgagcttttctgtttccaktcataactctagatgaaaatttctctttatgcggcaaccatgggatagcctgtagagatttcccaatctccatgctgtgcacgaagcttacagctgggatcctgttttctggacaggtttagaactctgaaccccaggtctctattcagttccaggacctcctgagggagcctcagttcctatttccagcttagattatgggttccttcttcattcaggtacctgtatatttatttttattaatttgagttttgctttgtatgtaagtaatttttttacataattttaagttgatttagaaaagggagtgaacttctgtatctacagtaatggctttgttggaggtcctggggtctcatactacttagcagtcatcagcctaaagcataagtgaccgtgataaagaggacatatatatgagttttggaatctgatagacttcagctgaatctttgttatggactgaatgcttgtgttctcttcctgaaatttatatattgaaacttaacccctagtgttggctgtttttagag

SEQ ID NO: 202179 - DNA, 505 bp, Homo sapiens
ttcgtgtgtggtgagaatacttaagatcaactctttcagcaaatttcaagtatacaacacagtattactaatattttctttgatttgagtcatacaagaggaggccaagttgaaccattaaaccataagacatgatgctgtctgacactctcattcaaaacaactccttttctaaaagacacagcctcccagccaatgctatttgtaaacagatgactgaagatattggcttaatactaaaaggatamtcaacactttctttttcattagattttcttgcagaagatcactgatgtgtgggttcaatagggtatttattcttcagaacttacatatagctagggttgtgtgggctgcgtattattgagattgtaatctttggagagatgactacttcagatatccccttctgcttataagaaagggatgagcagcagttcataacagtgggaatatcaaatcatgggacagcaggctattgccactcacttctgtgttccataaa

SEQ ID NO: 202180 - DNA, 590 bp, Homo sapiens
atggagtggaatggatgttgactctgaagaactgaaaaccctagtgtcctatgtgattaaatatgtgatcttgaaaagacagtttgagggttttaattctttcctgtcaaaaatatcagcaaataaatatttttaaataaaattttcagaatatagagtttgggagaagatttgaaagatactgaagttacactaagcacacagccatgtacagtggtccttagggtttcagattaaagtttgtgggagagaagagatttccagagagaggaagtgcatggccctggggcagggaccaagtaagatgtgaggctgggatgmctcatcactgtgataaacagagttgcctttaccctcatagtaatgaatgatgtgaggctgggatgcctcgtcactgtgataagcacagttgcctttactctcatagtaatgaatgatgtgaggctgggatgcctcgtcactgtgataaacacagttgcctttaccctcatagtaatgaatgccattgaagaatttttaaacagctgtcactttagagaacaaacaggttaaaagaggaagcagggagatccaagaagctatgacaacag

SEQ ID NO: 202181 - DNA, 476 bp, Homo sapiens
atcatactttatctcacatattcagtgctttacatcactgttggcacatgatatgtttagactgcacaagggtgaattatgtcaaatttatctatctgcaggaaagaatgtagcccaaggtaccttgtttagctgagccaaagtttgcatttattaaaaatgtaatttttgtcttgaaatgatgcctgatctcacagaactatggcttccaatctctaaatcactgtgctcagtagtacaactatgtactctgtgtccgtcctagtagctatattgctgggatctggagcgtgacttttgggtctttctgtaatgccttacctctcrtcaaaattcacaagacctgctctctggattgtgagacttatgcattacaaataaaaaggtgctgtcctgatggcattccaaagccatttgaaatgagttgctttggtttccagtgagtcattttttatgttgactatcattactttacc

SEQ ID NO: 202182 - DNA, 572 bp, Homo sapiens
caagctatctcatatcttcctgtcttctgagcactccaaactgtactaacttctgcctattactcagttccaaagctgcttccacattttcaggtatccttatagcagtacgtgactcctggtgccaatttactgtattagtccatttttacattgctataaggaaatacctgacactggataatttgtaaagaaaagatatttcattaactatacatggctgaggaagcctcaggaaacttacaatcatggtggaagccacttcttcaaagggtgaagagagaaaatgagtgccagcaggggaaatgccaaatgcttataaaaccgtcagaacttgtgagaactcactcattatcatgagaacagcatggtggaaaaccaccctcctgattcagttacctcccactgggtccctcccatgacatgggattctgggaattaaaatacaagttgacatttggatggcgccacagccaaaccrtatcaatttttttgtttaagtgttgaaaaagtctgcagggtgatgacaattttgaaattacaagaatgaaataaggcaccttcaaaggtgg

SEQ ID NO: 202183 - DNA, 551 bp, Homo sapiens
ttaggtttattgagattatgtaacatgaaattatttaattatgaaattatgcgaattcaagcatgacagtcagttcttcttccccaccactaccctgtaaaagggtggatggaagaattgcttccttatggcttcagggtctgagtagtataaaacatggtcttgatgaagtggraactatacagaaactgtttttggttctgaaatgtactccagctttaccaatttgttctacacatataccattgagggtagaagctgaattttgcttacgattatatttctactacttaacattgtgccagatactgagtagatgcttagaaacatgtttaatgatttgttttattgctagatacctaattatctgctgtagtggtgctacctcattcagaataattttgacaaatctttctccatcatgaataaaacattatttacacacttgtgtacatgcacatctgcatagaaacacacacaccctttgcagagacaaactgcattgaaagcattacaaacattatagtatatttgttgattctgacctgatt

SEQ ID NO: 202184 - DNA, 643 bp, Homo sapiens
aattttttattataataaacataaattacatcaccataactcatatgacgttttcttccctccctcagaaagttgtgaccaatcagggttttaatagactgcagtttttgtagaactcctctaccaacactttcatagctagttactgtttaaatgcacacttactgtgctaatggttggagaataagaggtcaagatggtggcttttacarggaacacatatttctgagcatatggcctgcaaagctaagataaattttaagagagagaaatatatcctaagtatttatatgtttaattttgttatatttgaagtcacatatttagaaaataaaaggtgttttcaaacaatgtcagtttctatcagcatgcagcaggcgtatccctctccatgcacagatgcacagaaacaagagaaaaattaagtactaaattctagtggctattataggatgatgcaagtttcaagatgtgtgaaagaaaacacaaactaaaataattagtaaggactgtgatgtccaataaggcaagcaatgaattctctcttagcctcatcttcttcatttgtaaaattgttaaatattttgcatgacttcttcatactcagactttaattgtggttggcttagaactgtttctcttt

SEQ ID NO: 202185 - DNA, 205 bp, Homo sapiens
aagattttgtgttccagaaaagttcaataatattttccttaaaggttggcatgtaagaagaaaatttatttccaacattttaatctttgactctgcattagccattttcaattagataaattatttttttcacttgagttatttgttgaaaattggtaaacttaattgmtgaaaagctttagcttttgctatttttttttctaat

SEQ ID NO: 202186 - DNA, 366 bp, Homo sapiens
gaagatagctcctttttgcccccaaaggttttattgatcatgctgataatgcatttattgttattttaatctcttactgttatactcaggcttaaattctctaccctacacacttsagttgacataattttaatttccactatgatgcttctctcttttctatcaacactctctccccacagggtttcatctagatcaggagtcagcaacatttttgacaaagagccagacagtaaatattgcaggctttgtgttgccaagaggtaaatttatggaactttccttgctgaaaaattttcctatattttacattttagacttataaatgtaacacgtacttataactcatgagccatacaaaaacag

SEQ ID NO: 202187 - DNA, 568 bp, Homo sapiens
cagaacaatgttggggcccaatgtcagtcccaaagartacagtacacaatcaaggaatcataaactgaggattggccccctaaaatcttccagaaacaaagccagtcaactgagctcacattgtaccacaatcaaaccctcaggccatcaaatagaataaaagaaaaaaaatacaaaggacagcaacttgaaagactgaaggaacatcaacccacaaatatgagaaggaaccagtgcaataactctgacagttgaaaaagtgagagtgtcttctttcctccaaatgacacactagttctccaccaaggtttcctagtcaggctgagatggctgaaatgacagaaatagaattcagactatggatagaaacgaagatcatagagattcaggagaatgttgaaacccaatccaagaaagctgagaatcacaataaaatgatacaagaggctgacagacaaaatagtacagaaaaaaatgaaatcgacctgatagagctgaaagtcacattacaataatttcataatgcaattgcaattatcaatagtagaatagatcaagctgcggaaag

SEQ ID NO: 202188 - DNA, 568 bp, Homo sapiens
cagaacaatgttggggcccaatgtcagtcccaaagagtacagtacacaatcaaggaatcataaactgaggattggccccctaaaatcttccagaaacaaagccagtcaactgagctcacattgtaccacaatcaaaccctcaggccatcaaatagaataaaagaaaaaaaatacaaaggacagcaacttgaaagactgaaggaacatcaacccacaaatatgagaaggaaccagtgcaataactctgacagttgaaaaagtgagagtgtcttctttcctccaaatgacacactagttctccaccaaggtttcctagtcaggctgagatggctgaaatgacagaaatagaattcagactatggatagaaacgaagatcatagagattcaggagaatgttgaaacccaatccaagaaagctgagaatcacaataaaatgatacaagaggctgacagacaaaatagtacagaaaaaaatgaaatcgacctgatagagctgaaagtyacattacaataatttcataatgcaattgcaattatcaatagtagaatagatcaagctgcggaaag

SEQ ID NO: 202189 - DNA, 545 bp, Homo sapiens
ttgctgagaaaatgtaatgtttatacactgttgatgggagtgtaaattagtttacccattgtggaaagtagtgtggtgattcctcaaagagccgaaaagagaactaccatttgacccagcaatcctattactggatgtttacaaaaatttttaaatgtccttcaaagaaaataatgtatagactaattgatttttaaaaaactacctatcaggtactatactyactacctgggtgaggaatcaatattccaaacctcagcatcacacaatattcccaggtaaaaatcctgcatatataccccatatctaaaataaaagttgaaataaaaaaaacctattttattagaatctttgtgaattgctagtaccaaaatgacatacatatctactgacttgaattaacttttttatgtagtagaaataaaatacatttgcttcttttaatttaaaggcaaattaagctaaatatgtgtctctaagattatagatcatattttttatacattatttcttttatttcatttgtttaggattattgggagcct

SEQ ID NO: 202190 - DNA, 404 bp, Homo sapiens
tgcaccttgtaaactgcactctaaaaatgaagtatgaattactgatttgcctatatccttttggaggaatattacagaaaccatctgtgctaaaattatctgagctttttatgatttgtaaaagaagaaaaaaatgtagaagtagagtctctgttaaatgacattcaacctaaaattgctaacatttaattaatattgtataacatttaatgttggaagatgcatttgtagtgatttacatccacatgacactgcataaaatctactggtacctttatccacattcaatttctgcttttatgttatctgtatatatttaaattcaattgtatgtacattttgrtattaaaattgtttctatatttttaattcctttttggaaaccataaaacttttgacattaa

SEQ ID NO: 202191 - DNA, 541 bp, Homo sapiens
taccgacaggttgaattaaataaattccagtatttgattgtcaattacacaaaatcaaacagcaggatgaatcccgaattacaatctgtgctataggacaaaatatttatattttatataatgacttttataaattaataatgggatacaaacctcaaagccaaatgttaccaaaaatgtatggataatattttcattccgtaaggatcagagaaagtacaaaaaatgaagaaactatggtattgtcttagaatttttaatatacaagaytgattcgatgttcagtaaataagcacaacaaaattttgatttgtacaattgtaccatgtctctagaagacagtcgtgattacatttctagtaagaaatgtgtgtgtgtacatatatatatgtgtgtgtgtgtgtgcatagatacttacacactccacacagaaagatgaaaaacttgaacaagtaaaatactttactgtgattcttaatgaaagatgagatgatggaagagtcccattcatttaaaagtaaaccttttaaataactccaaa

SEQ ID NO: 202192 - DNA, 541 bp, Homo sapiens
taccgacaggttgaattaaataaattccagtatttgattgtcaattacacaaaatcaaacagcaggatgaatcccgaattacaatctgtgctataggacaaaatatttatattttatataatgacttttataaattaataatgggatacaaacctcaaagccaaatgttaccaaaaatgtatggataatattttcattccgtaaggatcagagaaagtacaaaaaatgaagaaactatggtattgtcttagaatttttaatatacaagactgattcgatgttcagtaaataagcacaacaaaattttgatttgtacaattgtaccatgtctctagaagacagtcgtgattacatttctagtaagaaatgtgtgtgtgtacatatatatatgtgtgtgtgtgtgtgcatagatacttacacactccacacagaaagatgaaaaacttgaacaagtaaaatacwttactgtgattcttaatgaaagatgagatgatggaagagtcccattcatttaaaagtaaaccttttaaataactccaaa

SEQ ID NO: 202193 - DNA, 595 bp, Homo sapiens
ttagttgtcacagtatgagagaaaactgcagctgctcatagaaaactggggcttttgttcatcgtgtctattagatatacatgtaaaaatgctggtaattcagatggatgtagatatcacaatgtgagttgaagtttgagggtgatcgtrtatgttcttgaatcatgggtccatgaattgcatttaaagatatggacctggatgaccaagaagtaagtctatatagagaggagaataaataatagaacctaaaatggtacgcattttaaagtttaagtaggtgataaggatgataagagcgcgtgtataaccagtgtttgtgcaggctgaatgccaatggaaagatgttagcgaaagcacacaaagattgcggttcaaaaagagggagctatcaattaatgtgccaaataattatcagcatacagccaaataaagattgacatttcccactggatttgaacaaataaacaataaacctgcatcagcaaataaacttttttcttcaatacaggcatttctcattagtttaatttcttcctgcaaatttgccggatagctaatttttagaaaacaatagtacatattcccttatttt

SEQ ID NO: 202194 - DNA, 595 bp, Homo sapiens
ttagttgtcacagtatgagagaaaactgcagctgctcatagaaaactggggcttttgttcatcgtgtctattagatatacatgtaaaaatgctggtaattcagatggatgtagatatcacaatgtgagttgaagtttgagggtgatcgtatatgttcttgaatcatgggtccatgaattgcatttaaagatatggacctggatgaccaagaagtaagtctatatagagaggagaataaataatagaacctaaaatggtaygcattttaaagtttaagtaggtgataaggatgataagagcgcgtgtataaccagtgtttgtgcaggctgaatgccaatggaaagatgttagcgaaagcacacaaagattgcggttcaaaaagagggagctatcaattaatgtgccaaataattatcagcatacagccaaataaagattgacatttcccactggatttgaacaaataaacaataaacctgcatcagcaaataaacttttttcttcaatacaggcatttctcattagtttaatttcttcctgcaaatttgccggatagctaatttttagaaaacaatagtacatattcccttatttt

SEQ ID NO: 202195 - DNA, 430 bp, Homo sapiens
ggtcttctctctttttttctttgttaatctagctagtggtccaatgatcttgtttatccttcaaaaaaccaaccttttgtttaattgatccttagtatggattctgggatctcaatttcatttggttctgctttaattttagttgttttttttctgctacctttgtggttagtttgttyttgtctttaaaatttctctgagtgtgatgtcagattgttaatttgtgatctttctaacttcgtgttataggtatctagtgctataaactttcctcttaacactgtttttgccacatctcagagattttggtatgttgtgtcactttttgtcatttatttcaaagaattatttttatttctgccttaaatttgttttttacccaaaagtcattcaggaacaaattgtttactttctatgtaattatgtgatt

SEQ ID NO: 202196 - DNA, 353 bp, Homo sapiens
tttctggaaataatagcatacatgcttttatttaatttattttcttattttaaagatttattaatttaatttttaccatttaaaaatatacaggaaaattcacatgttttgcttgaattacaacagtaggcaccaacaaatagtgtattaggtataaaatatcagtttataagcgtattagattgactgctaatgcagaacaaaaggtaaacagagtaatgactcaaattcaaatggataaatctggcaagtcatgaataagttgtctcatattatctaaaaaaggagstaaaagattgtgggtaaagaaggagaaatagtgatttaaatgaataataaagtcatattttaga

SEQ ID NO: 202197 - DNA, 394 bp, Homo sapiens
cacgccacctgcgactgtggtttgaaaaaaaaagaaaacataataatgatgctgtcaattcacttgagattccatgatcaaaattaacctacgaacaaagcacagactttattataattacaaaataggatgtaatttacataaaatgtgaaaatataagcatagaaygaaatttgatacaagtcgaaagctatgacagggactgttggaggggagggaagttgtacactaatctccacatcctactgagccaatcagtggtgttcaaattggatggaccatatattatctaaacagtatattatttaagcaaagaattaagcactgtaagtatattatttagagaaagcacccccttcacaatcccctacccttatatattaaagactaaatt

SEQ ID NO: 202198 - DNA, 507 bp, Homo sapiens
  misc_feature (1)...(507): n = A,T,C or G
nnnnnnnntcccccccctgcccaggggccatgccactgcctggatgccctcatgcctatgtgccccatcagacttgaccagcatgtgagagctctgtagacggtggagggggtgcactgggaggggttttcagcacactgcatgttgtacgtgggctacaccatcttcgcccatctactgaaatgatgaccatgtcccctgaccgcccagacaccactccctcctccctccagagccatcctgagaaccaggccagcccagcccaggacccccatgtgataygtgggagcagctcctgtgggtaaagaaggaggagacaaacccttctaaacagaacgagtaatagcctcctcactagcccagtgttggcgacagggggcaagaggccagtttggaaatattacttgtaccatgtggcaggtggacagtgagggccaggcatcctcagggaatgtatgtgcccaagctctgctgtattaatgcatcccccaggatttagccccatga

SEQ ID NO: 202199 - DNA, 620 bp, Homo sapiens
aactgtcaagtcaaaaaatctcatggtttaacttaaaataacagaggtctgggtctaggactgagcattttaaaatttaatctgtaatccaggcttctacatgaaaatgcatatagtatggcaacrtatagacagttaccgaaggtggaaagcatttgaaatttcatgaggtttgcatactcagtgacctaaactactaaccttttaaaggcaatcagaatccaatttttttcaatgttgctgagaaatagaatcattaaggagaccagatatttattccttcagcatgaaaacagtattattatatctgcctaaacatgagtaacctgagaaaacaaattaactaaaatgtatatgtatagttattttcctttgaatttaaaataaaaatcatgtaaatattattttctcatattaagtaattaaatatattaaaatatgacagtgttttctgtttatatgctgtgaacattgtgaaagtttgagtattaaccgcctgtttcttcatttctaaaactgagtcaagcatcgagaattataaaatgatgacatgaaaagtatgttttagaattctcttgtattatatatagaataaacaccatgcacatcaaccacactta

SEQ ID NO: 202200 - DNA, 486 bp, Homo sapiens
cagaactactcatttgaaagaggtgctatataaatttaggtatacacaacaatactccatcaagtagccttagtataaacaaaactgggatcaagtgaaaactaaaagcagaagtgagtgttgtttgatcactcagtacttatagttccaactggtagacctcctcttataaggttgaggtactgttcaatggtagggaatttatattcccagccaatggccaatatatgatgctctttctcccacatgagtttcaggatggatgaataaactgcatgcacagagtatagaytgtaactgaagacactcctctaacagcataccacagcacttaaccctactataatgttttttaaataatttgaacaaaagcttaaaaatcaaattttagattatgcaatagccagagagacagatactgtgagtagatcaagatgattcaaataaactctctaagctgtaacaatgagtcccaaataagtaaaa

SEQ ID NO: 202201 - DNA, 561 bp, Homo sapiens
tgtttcctaaaaaaatgtctcctgtgggcttggagatggggcagccagtgatttctgttagactgtgacttgggaaatgacttgttcacactaatgtgattcttttgagaatctggaaagctctggggccctccctaacaacctttaataacagccatctgtcagtatgtagagcaaattgtgcctatttatgaccarcttctcaaaggcaactgcttaataaacggaatttcacttccttatcattggggagtggatgacatttgaatagatgtcaaaaataaataataagaagaacataatattttgttaggtcaaaagaatgtgggaggctgtagaaaccatatgccttctgattttataaaaatcatttttatccttgagtcactgacatttgtttaaagatgtatacacatttctaatatcagatacatcaaattataagaatataatgaaaaaatatgagtgccacaagctcacaactgaattctgtaaaataaaatttaacaaaaaaagttgagatcagaggtacctaattatcactgaacaagtgaacaagtg

SEQ ID NO: 202202 - DNA, 561 bp, Homo sapiens
tgtttcctaaaaaaatgtctcctgtgggcttggagatggggcagccagtgatttctgttagactgtgacttgggaaatgacttgttcacactaatgtgattcttttgagaatctggaaagctctggggccctccctaacaacctttaataacagccatctgtcagtatgtagagcaaattgtgcctatttatgaccagcttctcaaaggcaactgcttaataaacggaatttcacttccttatcattggggagtggatgacatttgaatagatgtcaaaaataaataataagaagaacataatattttgtkaggtcaaaagaatgtgggaggctgtagaaaccatatgccttctgattttataaaaatcatttttatccttgagtcactgacatttgtttaaagatgtatacacatttctaatatcagatacatcaaattataagaatataatgaaaaaatatgagtgccacaagctcacaactgaattctgtaaaataaaatttaacaaaaaaagttgagatcagaggtacctaattatcactgaacaagtgaacaagtg

SEQ ID NO: 202203 - DNA, 477 bp, Homo sapiens
agtaataattaggttgtcctgttagatgaagccccagtatgtcactgactggacaatcaaccaacctttgccttatttccagaatttgatagtatatcttaacacgaaataaatcagcaaattttaatgtaatgcagaattcgtaagaaagaaagagaggtcctcaatggtcaaaagaaaaagaaaaatataaacagatataacattaaatcagacaataaactttcagaaaaagaataagctggggttgctctgctggcaaaaagcatcaccagcacaaaattttcaaataagactttggcctttattaagtaggagagagactaacatttytaagatgaagcctaaattagtgaaatgtagagactggtaaagatctaatgtgccagcacaaatcacccccaataattaataataataataccagtaagcagcacgattttttttttttttttttttttttggagagatggcatt

SEQ ID NO: 202204 - DNA, 562 bp, Homo sapiens
ccaatatttaacaaaaaagaaaaagtcaactcatcattcttctgacatctctaatttcagccaaatatcaccttagatcactactaaaaagtgtatctgacctatattggccagtttgccttcagaaatgcctctattaaattatgatttaatgttatgccctttaatgaccaggaaccaatagaacagataaacaattgaagaatattattattgctcacatgccatggctacagatattatcctttaataacatggatctcggatattagttataatttgcctaagtttgttaacatctggctcctcacagtgataagcaatataaccctcagaagaaagaaagcctgtctgtgtgactgattgccttggttgctggaggagagggcaactttggagatagtgcactctactcrgcaccctttcttgtgggggttagaggatatggtggaagtttgtcaaagagcttaaaaagtaacaccaaggggccattcaatcctacacagtagtcacagtaatcctcttaaggaggcttaaaatgaagaaatgagctcgcactatt

SEQ ID NO: 202205 - DNA, 522 bp, Homo sapiens
gttatcttaaaaggtcagatacgaaatatattaggctttgcagaccttacatttctgttggaactacccaactctgccattgtggtacaaaagcagccatagacaacacataaacacatgggtgtagatgtgttccagtaaaacctgatttacaaaaacaagtcgtaggctggatttgacccaatagcatagtttgccaatccctgatctcttaataaacaaattccataaaacagtaattgaagctctgtaacaaccaaattcctttaaattaatgatctaagacattcagtaaatatgacctcaaagcacccatatacctgtatttcctgcrcaactccatgctctagaagttcctccatttttattttttacatcaccatggccttgataaatcattggttcaatacttattaatattccaataaccagaacaagtatccctttatatataaaactttccctatattctatacataccctgaatcttggcagggtgagaatcaccccatagaaatacct

SEQ ID NO: 202206 - DNA, 605 bp, Homo sapiens
ccggtgatcactacagcatcttaaaacttcagtagtacccatattaaatcatcaaaaacaaagatattttgttctttcagttatttattggtgtgtgtatttattctgaaatcagttgcctctatagcacagtggttctccatgaacaataagcattagaattgcctgtgaaacttagaaacttcacattcccagagattcagtgggtctggctgggattcatgcatcactatttaaaaaataggctaaagattactgccaattttatgtcagttagcagaaaaattggaagaagaaatgcacactggagttctctgtagcggtttaacttgatttctcttaattcaattatttaagattagattgctataattgctataattgctatatattcagtattattctccaaggaacgtatcttctggcaaaatataaaaactaaacaacagtaaacatatattgataagtggacatacacaaattttgtttaaatgtagcatgaattactgttcaaaygttctgatttgagttgatttgattttatttgaaatcatgaaaagaatatcctactggcaacattaaattcctaacattttgttcaactt

SEQ ID NO: 202207 - DNA, 607 bp, Homo sapiens
ttacaagacttttcttatcaaagatcactaaaatttagacctaaagggaaaccttgccccaaggaaattcccaaagaatcaaaaaatacagaagttttagtttgggaagaatgtgtggccaatagtgcggtgatattacaaaacaatgaatttggaactattatagattggacacctcaaggtcaattctaccacaattgctcaggacaaactcagtcgtgtccaagtgcacaagtgagtccagctgttgatagcgacttaacagaaagtttagacaaacataagcataaaaaattgcagtctttctacccttgggaatggggagaaaaaggaatctctaccccaagaccaaaaataataagtcctgtttctggtcctgaacatccagaattatggaggcttactgtggcctcacaccacattagaatttggtctggaaatcaaactttagaaacaagagatcgtaagccattttatactgtcgacctaaattccagtctaacasttcctttacaaagttgcgtaaagcccccttatatgctagttgtaggaaatatagttattaaaccagactcccagactataacctgtgaaaattgtagattgc

SEQ ID NO: 202208 - DNA, 407 bp, Homo sapiens
taaattccagtctaacacttcctttacaaagttgcgtaaagcccccttatatgctagttgtaggaaatatagttattaaaccagactcccagactataacctgtgaaaattgtagattgcttacttgcattgattcaacttttaattggcaacaccgtattctgctggtgagagcaagagagggcgtgtggatccctgtgtccatggaccgaccatgggaggcctcaccatccrtccatattttgactgaagtattaaaaggtgttttaaatagatccaaaagattcatttttactttaattgcagtgattatgggattaattgcagtcacagctacggctgctgtagcaggagttgcattgcactcttctgttcagtcagtaaactttgttaatgatgggcaaaaa

SEQ ID NO: 202209 - DNA, 407 bp, Homo sapiens
taaattccagtctaacacttcctttacaaagttgcgtaaagcccccttatatgctagttgtaggaaatatagttattaaaccagactcccagactataacctgtgaaaattgtagattgcttacttgcattgattcaacttttaattggcaacaccgtattctgctggtgagagcaagagagggcgtgtggatccctgtgtccatggaccgaccatgggaggcctcaccatccatccatattttgactgaagtattaaaaggtgttttaaatagatccaaaagattcatttttactttaattgcagtgattatgggattaattgcagtcacagctacggctgctgtagcagragttgcattgcactcttctgttcagtcagtaaactttgttaatgatgggcaaaaa

SEQ ID NO: 202210 - DNA, 607 bp, Homo sapiens
actcttctaactttgaatataccaaaagaggtatcactctcaaatgcgtgaaattataaactaatgagaagattcgttttagctgaattgtcttcactacctgagcttcaaaaaacaacacaaaagatttgtgggtcagcttggctctaaactatttgacaatacaattccctttgcctttaggtgctcaaattctggacttccctggttgtcactttctctccgaaaccatcctttaactctccaacacaaaccttcctccttgctgtgcttttgatacaacccctcattccagtttcgtggatgtccccatctttctcactgcctcaaagaattcttttaggcagatgactttcttatctgtatttctaatcctgacacttctctcaagttcaagtcaccagctttccttscttgctactatctcaatatgacttgacttcagaagctgaaacctcattcgtccaaaaaaattcaccatttccacttactcttggtacaacttcctgctagtactgctactaccctccagtctccaaggtttgaaacctgagagtcaaccttgacttcttccttgacctccatatacattccattgacagatgat

SEQ ID NO: 202211 - DNA, 601 bp, Homo sapiens
cataaaactcattaggtagtttttcagcctaggcctcctccttctctcccctctctaacagttcccagtgtctatggatgccatttttatgtccatgtgtactcatagtttagctcccacttataagtgggaccatacagtwttcagttttctgttcttgtgtcaatttgcttaggataatggtctccagctccatccatgttactgcataggacatgatttcattcctttttggccacatggtattccatggtgtcagtatatcatgttctctttatctaattcacgatggatacacacctaggtagattccatgtctttgctataaataataattttttaaaagcttaaaatttatttagaaggaatttgaaggaaataatttcatacgatacatattgcttttaattttaaaaatcatttattattctctatcactatatatgtatgtgtgtgtgtgtgtatatatatatatgatacattttagttccaaatcagaacacattcctttactgatttatttacactaataaaaataggcgatgattaaaataatggcaagcttttctataattttacttcttagttgttattttcttgt

SEQ ID NO: 202212 - DNA, 595 bp, Homo sapiens
aggaagagacaacttagagagtagagacattgttgggattttcaaattaatccagaatcttaaatcaggctggaatgttaggcacagacacacagagagttgggtttttagcggttccgattctttggtttctttattatatcatcatttgcagtattttctgagagcagtagattttctcttccagtctcatcttattgaaaattctttgtaaatataatctattctcacttgttcactttctggtgtatcttctaatttgaaatttgactttcgttctcagcgtgctactaaaactcctttttaaawttttccctcttacttgttgaatccaacagctttttcatttgttttcagctctccaactttttttaaacttgattgtaaagcttagatcctttggtttttacagtagcactctgctgactttattgccatttccttcaagctagttcccgggctcttttgccagccccttcaaggcattcacaaagttttgtcctcagtcttctactagtcccatttgtcacagcaactttaccatcccacatatttacatagttcaaaccaccacatttatgctgaagacaacaag

SEQ ID NO: 202213 - DNA, 595 bp, Homo sapiens
aggaagagacaacttagagagtagagacattgttgggattttcaaattaatccagaatcttaaatcaggctggaatgttaggcacagacacacagagagttgggtttttagcggttccgattctttggtttctttattatatcatcatttgcagtattttctgagagcagtagattttctcttccagtctcatcttattgaaaattctttgtaaatataatctattctcacttgttcactttctggtgtatcttctaatttgaaatttgactttcgttctcagcgtgctactaaaactcctttttaaaattttccctcttacttgttgaatccaacagctttttcatttgttttcagctctccaactttttttaaacttgattgtaaagcttagatcctttggtttttacagtagcactctgctgactttattgccatttccttcaagctagttcccgggctcttttgccagccccttcaaggcattcacaaagttttgtcctcagtcttctactagtcccatttgtcacwgcaactttaccatcccacatatttacatagttcaaaccaccacatttatgctgaagacaacaag

SEQ ID NO: 202214 - DNA, 388 bp, Homo sapiens
tgtttttccaggatttcttaaattccatattgtttatcaaattactgattgtttgttggtgtacaattacaagaacaaatataagagaatcacaatttttttataatgctttgtattttctrgggtctctaataacatccctacttacattttagtaatgtgaatctgttctattttttctttttcagcctaacttatggtttgactttaaaaagacatttcaaagaactaatgttctttttgtgtgtgatatctattgctttctcattctttatatcatttatttgtttgtttgtttctattaaaccttttctatttcctcccctctgcttgctttgagtttggtttgctcttcttagtctagtttatttaaatgaaatattgttat

SEQ ID NO: 202215 - DNA, 388 bp, Homo sapiens
tgtttttccaggatttcttaaattccatattgtttatcaaattactgattgtttgttggtgtacaattacaagaacaaatataagagaatcacaatttttttataatgctttgtattttctggggtctctaataacatccctacttacattttagtaatgwgaatctgttctattttttctttttcagcctaacttatggtttgactttaaaaagacatttcaaagaactaatgttctttttgtgtgtgatatctattgctttctcattctttatatcatttatttgtttgtttgtttctattaaaccttttctatttcctcccctctgcttgctttgagtttggtttgctcttcttagtctagtttatttaaatgaaatattgttat

SEQ ID NO: 202216 - DNA, 428 bp, Homo sapiens
tcttcttgtttatttgagttggtctagtgtctgttcatttaaatgactaagactcccttaatatttcttgaatttctcaattttgtctatctggcaatgtcaatatttattaatttattctttttttgaaggctagttctaatgaatatacartttgccattgacagcgttttccttttttcacttggaatattcaattgcatagctttctggccaccacgatttctgatgagacatcagctgtaaatcttattaaggacctcttgtttatcatgagtcacttttcctttcttgcttacaagatagtctttttgtctttggctttaacagttttacgatgatgtatctaggtgcaaatctctttgactttatcttactttcagtttgttgatttggatgtaaagattaatgttgttcttcaaatgtgt

SEQ ID NO: 202217 - DNA, 455 bp, Homo sapiens
gtatgtaaagagaaggtagcctgtggtcttcattattttgttacagcatctcccttgggcagcatytcattttggtttattaatgtggtagtaacttcaaaagaaatggattctttgatctctgattatatgcaatctggaagcaggtgttttatcagtcactaacaattgaagtgaatgcgttacatcagtaaagctaataatgtaataacatttacattccaatgatcttacagcaatggttctcaaagtgtggttttcagatcagaagcatcagcattgttagagaacttgttagaaatgcaagttcctagacccatcacataacttttggcatttaaggattaaaatatgtatgtttactagtcctccaagtgattataatgcacattaaattttaagaaccacaatattcaagtataatttgatgaatttatacaatagatgcaaagcca

SEQ ID NO: 202218 - DNA, 608 bp, Homo sapiens
actaacatgttcttcagtcctttagatataaatatcgaagggctccaatgcatatattcatttttttaaaagcccaaaacattcatgtaacgtttctaaggtttcttatataaattgttattttacataacagttatttatgtaattgaatattcatataccacacattacccttcgactagaattgatccaacattatgctatcatactgtgcgtattgttggagcaatttcatgagactttgattctctgaaaataatacaaactttagtgttctggagtaaattttactttyttaaaaataaaaaatgttacagctaggcaaaaacaaaactaagcacccctctgcaaatttttttcttttttaattaagatacagtattgtatgtcttgcaattttgtaggaatgggctttcattaacaataaactctgtcattcttttcattctgtttcactaattcaaatttatgtcattctattatcccaatagttacaactgtcttgattggtttgaggtatattatccatttttttttgtatttcatttgttttcacagatttcttattcaatgtagaagttcatgctaccaaattaaatattttaaag

SEQ ID NO: 202219 - DNA, 423 bp, Homo sapiens
ctttctttttatttctttaaaatcatctttcaggcagttcaagcatttaaatattctagcacattgctgtaggtcagaaataaaaatgatactgggttacattcaggaacttgaaaaatcttatgtagcaaataaataagttgaatttttaaacatgatattctgcatgtgtgtcttaccttagaaaackccgactagccacttagtgaccttgtttgtggtatcattacaactcctggcaagctctggctaaagaaaccttcaaaaattaacaatagttacaaagcaggaggcgataattaccctcagtaatgagtctgcttgccagattccacaacggtagcattcccaacaggagacccaggctatttttatgtcagatgtatttacccttgacaatccttaattactttcctagttttt

SEQ ID NO: 202220 - DNA, 614 bp, Homo sapiens
tgcaggagctttgctaaacctacagtgcataagacacagccctaccagaatttttctccaaccattccctctgctgggaaacatctttctccagctactctcttctcatcctcatttccatcaagccttagcttcacaagagaccccaaggggtcttagcttctcaaagagacccccatcacacttagcttctcaaagagaagacccccatcacacttagcttctcaaagagaccccagggggtctatttcccctcagcctgcttctcctcactctaccaccaacactcccratgttttttaacctgctctaccctctatttatttttcagtctgtgtcaacttctaacatactctaaaatttatgtgtgcatttcatttatattttatttttactctctttttgctagaatgaaactctataagaacaggaatgtttgactcttgttcagtgacggaacagaactgtgcctggcacattgtcaagacgcaaaaaagtatttgtttaatggataaatggaaaataagtgaaatgtaaaagggactgtgacaaaatatatcactcaagaaacactaaaaaatgaatgcactagtagctttgtaataaatagaaaa

SEQ ID NO: 202221 - DNA, 614 bp, Homo sapiens
tgcaggagctttgctaaacctacagtgcataagacacagccctaccagaatttttctccaaccattccctctgctgggaaacatctttctccagctactctcttctcatcctcatttccatcaagccttagcttcacaagagaccccaaggggtcttagcttctcaaagagacccccatcacacttagcttctcaaagagaagacccccatcacacttagcttctcaaagagaccccagggggtctatttcccctcagcctgcttctcctcactctaccaccaacactcccgatgttttttaacctgctctaccctctatttatttttcagtctgtgtcaacttctaacatactctaaaatttatgtgtgcatttcatttatattttatttttactctctttttgctagaatgaaactctataagaacagraatgtttgactcttgttcagtgacggaacagaactgtgcctggcacattgtcaagacgcaaaaaagtatttgtttaatggataaatggaaaataagtgaaatgtaaaagggactgtgacaaaatatatcactcaagaaacactaaaaaatgaatgcactagtagctttgtaataaatagaaaa

SEQ ID NO: 202222 - DNA, 614 bp, Homo sapiens
tgcaggagctttgctaaacctacagtgcataagacacagccctaccagaatttttctccaaccattccctctgctgggaaacatctttctccagctactctcttctcatcctcatttccatcaagccttagcttcacaagagaccccaaggggtcttagcttctcaaagagacccccatcacacttagcttctcaaagagaagacccccatcacacttagcttctcaaagagaccccagggggtctatttcccctcagcctgcttctcctcactctaccaccaacactcccgatgttttttaacctgctctaccctctatttatttttcagtctgtgtcaacttctaacatactctaaaatttatgtgtgcatttcatttatattttatttttactctctttttgctagaatgaaactctataagaacaggaatgtttgactcttgttcagtgacggaacagaactgtgcctggcacattgtcaagackcaaaaaagtatttgtttaatggataaatggaaaataagtgaaatgtaaaagggactgtgacaaaatatatcactcaagaaacactaaaaaatgaatgcactagtagctttgtaataaatagaaaa

SEQ ID NO: 202223 - DNA, 614 bp, Homo sapiens
tgcaggagctttgctaaacctacagtgcataagacacagccctaccagaatttttctccaaccattccctctgctgggaaacatctttctccagctactctcttctcatcctcatttccatcaagccttagcttcacaagagaccccaaggggtcttagcttctcaaagagacccccatcacacttagcttctcaaagagaagacccccatcacacttagcttctcaaagagaccccagggggtctatttcccctcagcctgcttctcctcactctaccaccaacactcccgatgttttttaacctgctctaccctctatttatttttcagtctgtgtcaacttctaacatactctaaaatttatgtgtgcatttcatttatattttatttttactctctttttgctagaatgaaactctataagaacaggaatgtttgactcttgttcagtgacggaacagaactgtgcctggcacattgtcaagacgcaaaaaagtatttgtttaatggataaatggaaaataagtgaaatgtaaaagggactgtgacaaaatatrtcactcaagaaacactaaaaaatgaatgcactagtagctttgtaataaatagaaaa

SEQ ID NO: 202224 - DNA, 552 bp, Homo sapiens
cattttgaagatctgaactatattagtgagagctccctaaagtatactggggacattttgaagtatatttaatttacattttaatgtgrcaagaatttttaccactttgaaaatgataattaatacataagttaatcattatatataaatgccaattttccccttgggtgttctccacagaatgagtctcaaattcattgtaaattcactacatatcacatctcacacttcacaggtaaattcactttgtttttgttctttcaaaaatactcatactctttttgtttttaaagacacagcattgaggggaacattgccacttctgaaggtcctggcaatgccaaccgtggcttaacagaaaatatggggaggaagcacgtactgtggccaactcatcctggtttgcctgggaatttcccagattaagcatgaagaatcccacatcttggaaaatatcccagtcctgggcaaaccagaatggttggccaccatcaacaatggaaaaaatatatatatgtgtactatccagaaaacaaccagcaggaaacctcg

SEQ ID NO: 202225 - DNA, 552 bp, Homo sapiens
cattttgaagatctgaactatattagtgagagctccctaaagtatactggggacattttgaagtatatttaatttacattttaatgtggcaagaatttttaccactttgaaaatgataattaatrcataagttaatcattatatataaatgccaattttccccttgggtgttctccacagaatgagtctcaaattcattgtaaattcactacatatcacatctcacacttcacaggtaaattcactttgtttttgttctttcaaaaatactcatactctttttgtttttaaagacacagcattgaggggaacattgccacttctgaaggtcctggcaatgccaaccgtggcttaacagaaaatatggggaggaagcacgtactgtggccaactcatcctggtttgcctgggaatttcccagattaagcatgaagaatcccacatcttggaaaatatcccagtcctgggcaaaccagaatggttggccaccatcaacaatggaaaaaatatatatatgtgtactatccagaaaacaaccagcaggaaacctcg

SEQ ID NO: 202226 - DNA, 552 bp, Homo sapiens
cattttgaagatctgaactatattagtgagagctccctaaagtatactggggacattttgaagtatatttaatttacattttaatgtggcaagaatttttaccactttgaaaatgataattaatamataagttaatcattatatataaatgccaattttccccttgggtgttctccacagaatgagtctcaaattcattgtaaattcactacatatcacatctcacacttcacaggtaaattcactttgtttttgttctttcaaaaatactcatactctttttgtttttaaagacacagcattgaggggaacattgccacttctgaaggtcctggcaatgccaaccgtggcttaacagaaaatatggggaggaagcacgtactgtggccaactcatcctggtttgcctgggaatttcccagattaagcatgaagaatcccacatcttggaaaatatcccagtcctgggcaaaccagaatggttggccaccatcaacaatggaaaaaatatatatatgtgtactatccagaaaacaaccagcaggaaacctcg

SEQ ID NO: 202227 - DNA, 472 bp, Homo sapiens
tttgcttttcttgagacgagatctcactgtgtcccccaggttgagtacattggcatgatcttggctcactgcagccttaacctcccaggctaaagtcatcctcccacttcatttttgtattttttgtagagatagggtctcgctaagttaccctggctggtctcaaatgcctggactcaaaggatcctccsactttggccttccaaagtgctgcaattacaggcatgagccactgtacctggcctaaatattacttttatagttatttgatagtctatgtttgaatacattataatttatttaagtatgctactgttactatacttacaaagttgtttccaggcttacctcttccaagttaagctattgtaagaatctttacacaataatgggtctgactttagtgtggactcttaaaatggatcatgtcatttaaataaatgcttcaagcccctgttctatattcctaaat

SEQ ID NO: 202228 - DNA, 646 bp, Homo sapiens
ttttgaaatcctaacctacaaggtgatggtgtaaggaggtggaagatttgggaggtgattagttcataaggatagagccctcatgatgggcatagtacccttataaaagaggtcccagagatcttcctcacatctcccaccagagtgcacacagyaaaatggcaccatttgtgaaccaggaaatgggccctcaccaggcacaatgcagcttgatcttgaactttccaggctccaaaactgtgagaaacaaatttctgctgttaataagccaagcaggttatggtattttgttatagcagcttgaacagactaagacagatgcaaaaaaagatctgatgaaatgtcctcactcattcacataaaaaaaactactttcagaaaataagaataggtggtccttgcataaatattatattttctagtagcaatatttttaaaaagtaaaaagagttaggtgaaatcaatgtaataatatactttaacccaatgcatattattattataaaaactgtcagcataaaaaaatcgttaagatattttgcactcttttttgtactctatgactgccagtgaatatttatcacttacaataaaccttaggtagatgtagctgtatttcaagaattcattcgcaatgtgtggctat

SEQ ID NO: 202229 - DNA, 186 bp, Homo sapiens
gggaagatattctagaggtagaaatgactggacttygtggtaaattggacattggaattgagaccgaggaaagatatgtttttaaaatttcaagcctgattaataaggtgggggatataatagcatttgctaaagttttgcatatattcatatgggaactattttggaagtagtcataatgaattc

SEQ ID NO: 202230 - DNA, 525 bp, Homo sapiens
aggaaataggaaaacttctcttatcagctcaaattgatttttaactaattaaataagaaaaacatttagcattcctaatattcagcataaggaatggcactggaaaccacatttggctaggatgtcagacacggtgtagagtacttgagggaagagtgggggtactccacatttggaggcagaggttatcaggggccttcattcttcagttcacttttcacatatttcaactaatcacagtttgtttgtgccratttaaatttgtggtttatagcacctagttttaattaataaaatttcacaaaatacaaacatgcctggagaaaatctttaccaagacaatatacaaatgaggtaatactaaatatgtatgcaaaagagaataataaaaaaatgcagaatgcagaacgaacatgcctctactttgaatatgagttccctatcttctacattaagagattaaaaggaaaaaccagaagaaaaaaaatgatgtaatcaaaaaacttaaataaattcttttataca

SEQ ID NO: 202231 - DNA, 584 bp, Homo sapiens
tgactgtgtagtgagtttagtgtgtaggtgtagcctgtaggtgcaagtagctgcttcagtattttttccctttagctatctgaacactggatgcattccaggttggaggaaatctcttatggtaaaaagttaaaccatatcacaagagagataatattaccagaccaaactgatttagatcaatatctatccaggcacaggttgactctgaaactgtgaatataatgcttctggcttcaacaacataaaagatgaagcttcttaggaggtaaaatattcctcatatagttacactaagtttagttccttttaaaatcatgtgatgaggcttgttgatattgtgatattcagagtagcttgctcatatcttaatttcccatgatctaatattaaagaatagatatatgtataatacagatacatattacrcagattatatataatatacataatgtatataatgtatatatatagcaagaggtatatataaggtgtgtacacacacacacacactcacacacacacatatagcttaaaatttttgtataacagccgtcctgttcccagactagaatatggaacat

SEQ ID NO: 202232 - DNA, 580 bp, Homo sapiens
ttcaatcaatctagccatgcaaattcccatagtgatttgcrtgaagcacaccagaagtagcccccttgggcctcattcttaaatttggggtaagttggatcctcactttgcacttttttttttctccatggaagaaattgtgggccagtgggatccctcttggcactgtgcttttgtcagcttgtgggagagatggtttcggtaaagtggaactggtgttcttaccctttttaataaatcttttatcctttctgtgccccacctgggtgttttaacctctaatctgaattctagagacctcatgaaggtatttttcccatgaatagttgttaaataagtctttctgtgagtgataaaggctgaggccgcctatcctaccatctttatgacctctttcccattttttaaatcaaagcttatgccgatttcttaacaacaaagattggaagttaatactcttttcctgtgtatgtgtgtgggatgtacataaacaactaataatgcttcactaaattttttagattgctgcagattttttttactacaaaatattcagaacagtctaaaatgctgtaaattt

SEQ ID NO: 202233 - DNA, 403 bp, Homo sapiens
aatgtattatggagttaaaacatgaattcagatcctgtataacagaagaaattgaactgaagcaatctctattgttggctatgaagggtttctttgttgtttttttkttgttgttgttgttgttggttttttttttcacctgactgagtactctgtcatgagcaggaggtcaatttatggtcctttaaggtggataaatccgatagtttttctttcttttctgttgtattttttaaacctaccttagaatactgagaattcacttaatatacggacttcaagaatgattttctctaaagaggaagctttatgcctaagaagtggatctctcactgatactcattttctggggactggtttgtgactccatataacactagctcttttaatagccacaggaaga

SEQ ID NO: 202234 - DNA, 592 bp, Homo sapiens
ttattttaagcaggaaattcatatcacattttgcatctctaggaatgtgggtacttctatcttgctaataacaggtcacaccacaaaatacacatttttataattcctcctgatgaagatttgcattcaacatagaaatttagtagatggcactcaatctactaattgaacacctgactggtgatctttcaagttcttttggaaaarctatcatggaagagttaagcctctttcttagaatctttaaacagtaattttgctcaatattgggagtgttaactattgacttctaaatgttgttacaaagggaaatttatcctgcctactacctctttcttacctacaaatcatgcagtactgtaaattgttttttccattatgataatttgtcaagcaaatgaaatttcacatttatattgatggttatattacactggtttcacacaatttataagaaaggaatgatttggttattatttgatttacttaaattatgtagtcaacccaacaatgtattttcttaatgctaaattttttaaattgatttaaaaaattctaaggacacataatgcacatatttacatatacaaac

SEQ ID NO: 202235 - DNA, 592 bp, Homo sapiens
ttattttaagcaggaaattcatatcacattttgcatctctaggaatgtgggtacttctatcttgctaataacaggtcacaccacaaaatacacatttttataattcctcctgatgaagatttgcattcaacatagaaatttagtagatggcactcaatctactaattgaacacctgactggtgatctttcaagttcttttggaaaagctakcatggaagagttaagcctctttcttagaatctttaaacagtaattttgctcaatattgggagtgttaactattgacttctaaatgttgttacaaagggaaatttatcctgcctactacctctttcttacctacaaatcatgcagtactgtaaattgttttttccattatgataatttgtcaagcaaatgaaatttcacatttatattgatggttatattacactggtttcacacaatttataagaaaggaatgatttggttattatttgatttacttaaattatgtagtcaacccaacaatgtattttcttaatgctaaattttttaaattgatttaaaaaattctaaggacacataatgcacatatttacatatacaaac

SEQ ID NO: 202236 - DNA, 552 bp, Homo sapiens
acaggatttcattcttttttgtgaccaaatagtattctattgggtatatacaccacattttctttatcaagtcatctattgatggacacctatgttgattctatatttaccttattgtataatattgcaataaacatgggagtatggatatctctttaacatattgatttccttttctttggatatataccgaggagtgtgattgctgattatatggtagctctatttttagtttattgagagatctccatactattttctataaccactgtactaattttaattcctaccagaggtgtataagggctcccttttctctgcatccttgccagcacttattaatttttcattttttgataattgacattayacctaggatgagttgatatctcactgtggttttgaaatgcatttctctgatgctttcgagcatttttacatatttattggctagagtttatcttcttttgagaagggttcattcagattatttgtccctcttttaaatttgattatttggatattttttggttttgctatggattgtttgag

SEQ ID NO: 202237 - DNA, 601 bp, Homo sapiens
gcttgctattctctctccctggaatgctattccccctctggattgtgctaaaatatcacctcgtcaaagacaccctgaccctatctgaactattattcttattattctctacccttttatcctgcttcatttttgtttactgtaatactactaacaatattacatatttgtttgctattagtttcaatcataggaaaaggaactttgttttctgagatatccccaaaatctggccatagtaggcactcaataaatataaattaaaaactcaaactacctcatcataaagagtaaatgcatttggatttggtagaacactacagaaatgcaacataaagtgaatttccttctctggatcaccttgaaaaaacctgcctgatcttaagaaagaagttcagtggtcttcataagcactactagtgtaaatccgtaacagccatagatgagtaaacttacagtcaccttcagaaaagyacatttactaatagttactgcatgcctaccatgtacatcagaaacaaaaggtttggggcattttgcagggagtaggtggagtgatttcccagcatcagaaattttttaaactactacataaatgcta

SEQ ID NO: 202238 - DNA, 398 bp, Homo sapiens
aaaaacatttttccttgtaagtgaattattacagtgytatataaaggaccatatttgaaagtcaaattaaggagaaaaacttcaaaaaaaggttatcgaattctggtgatcctttataaaagccaaagaaaccccacaaaaaaaccttcaactattcgaacaatggtaaattttagaaaagactacattagcattaaaaaaagatctaagttccttcagaaattgactttcatatatgccacactgcagcccaaagacagaaaaataatagtggtttatgactatatgttatgactttcctaaatctatggagtaagtcctaaacatagaaaagaaagacatcattcacatctctctgtaacaaacttcttaccttcttaaaggaagcacagaagctt

SEQ ID NO: 202239 - DNA, 398 bp, Homo sapiens
aaaaacatttttccttgtaagtgaattattacagtgttatataaaggaccatatttgaaagtcaaattaaggagaaaaacttcaaaaaaaggttatcgaattctggtgatcctttataaaagccaaagaaaccccacaaaaaaaccttcaaytattcgaacaatggtaaattttagaaaagactacattagcattaaaaaaagatctaagttccttcagaaattgactttcatatatgccacactgcagcccaaagacagaaaaataatagtggtttatgactatatgttatgactttcctaaatctatggagtaagtcctaaacatagaaaagaaagacatcattcacatctctctgtaacaaacttcttaccttcttaaaggaagcacagaagctt

SEQ ID NO: 202240 - DNA, 398 bp, Homo sapiens
aaaaacatttttccttgtaagtgaattattacagtgttatataaaggaccatatttgaaagtcaaattaaggagaaaaacttcaaaaaaaggttatcgaattctggtgatcctttataaaagccaaagaaaccccacaaaaaaaccttcaactaytcgaacaatggtaaattttagaaaagactacattagcattaaaaaaagatctaagttccttcagaaattgactttcatatatgccacactgcagcccaaagacagaaaaataatagtggtttatgactatatgttatgactttcctaaatctatggagtaagtcctaaacatagaaaagaaagacatcattcacatctctctgtaacaaacttcttaccttcttaaaggaagcacagaagctt

SEQ ID NO: 202241 - DNA, 610 bp, Homo sapiens
ggcaaattctctcagcatatgtttgtctgaaaaatacagtatctttccttcatttctgaagcttaattttgctggatacaaaattcttggctaataattgttttgtttaaggaggctaaagatagaatcctaataccttctggcttgtaggatttctgctgagaagtttgctgctaatcagataggttttcctttagaggttacctgatgcttttgtcrcccagctcttaagattctttccttcattttggctttagataacctgatgactatgtgcctaggcaatgacctttctgcaatgaatttcccaagtgttatttgaatttcttctatttgaatgtctagatgtctagcaaggcccaggaagttttcctcaattttttcctcaaatatgttttccaatcttttagatttctcttcttccttaagaacaccaattattcttatgtttgggcatttaacataatcccaaacttattggagactttgttcattttttaaaattcttttttctttgtctttgttgtattgggttaattcaaaagccttctctttgagctctgaagttctttcttttacttgtttgtttgattctattgctgagactttc

SEQ ID NO: 202242 - DNA, 501 bp, Homo sapiens
aggtgaaagagagatagttgaagggaatgccaataaaaatgttttgtcgagctatgagctattcctcttactgactattcgaaattaccatgtctccaacaactttttaactcatttatgtcaatgtgaacttttaaaaaaaataaattagatgtccttgtgggtattactgtgcacaaaaattagcttagagctgctttattttttatattaatattccatttactaaaatttaaatgtaaaactcttaaaactctgatttatcatttagcttttawctacatatctgattatttccttggtaaagctaatacattttaatgattatattaaaggcagttttacaaaaggattcaaatatataacatattttactatttttaaaatcttttataattttagtacatttgattcttattttaatgggtatcattttcctcatccaaaattaaaacaaaattcccacacttaaaaataattattggaaatctagaaaattaa

SEQ ID NO: 202243 - DNA, 631 bp, Homo sapiens
tctcagataatcagtccttaatatacatgtagtgctttgcagacctttgtcttccagatgcattccagcctttcagggttcctcttaagtgacgcaccatggaggaaaaacatttcccaggactgtttgaacaacacagagctacactcattgtcagttcttgtattctgagtacagtgttttcttaatgcatttcaggaaggcattaacattttgggcagttttatcactctgttgattcatactgagcatgtagaaagccaaatgaagagtttggatttagtcaaataaaattcaagaatacttcagctgtcctattcaagcgttgtggaatttgaatccactaagagtttttcacatgcactatttgtaataaaattcttcctgtyctgtcctatacaggcaattaacctaggcataggtattcacatctgttctaagtttattttattagataaattcaggaatttctaccatccattatattagcattagtataagctatgccttgtacttcctgccactttggaatttcataagtatgacagcaatatttatattacaactattgaccaaaatgcatagccaccacgaaagagatgtcacaagataggttaaatcaatcatcacc

SEQ ID NO: 202244 - DNA, 592 bp, Homo sapiens
aatgattatcctgctctgccaaaacattcagaaccatttgaagtcatttggactatttattcaacctctagacaagcaaaacctgcactctatcagtactgaaactggttgcccttcctctatctttgaaactaaagtgcaaatttctcaatgctcaaaaagcaaaactttcccttcccctcacattctcctttgcaacaccattgttcctaatacaatcctcctttactgcaattactagattgacggcaattatatgttttcaggtctgtctccactactacgctgctggcccttgattgaaaataatactactactttcttgatctaggcaggggttctcagactttagtgttcaccagaagcacctggagggctcatcaaaggacagattgtcaagcaccatcctagagtttctgtctcagtaggtctggggtgtggactgagaaggtgctgctcaatatgttccaggtgctgctgatgctgctgagaaccactgccctagtgaagtggttaggggcatgtttgctggagcaagtctgcatatcttgaaccctgcccagctacttgycagctgtgtgctcatgggcaa

SEQ ID NO: 202245 - DNA, 616 bp, Homo sapiens
tagacaggcagctatatgcagcaaaaccaataaagttatttttcaactttcatagttgtaaaatatyttataacagaatacaaaacagctaagaaaacatgccacattttattttagcattttcaaataatttgtttttggtgtaagcacaggataaaaaaggagagcgtcaaagaaaagagacatttcacctaacattcataaaaattaacaaagtattttttggatgatgtttttacaggaaatattttaaataagttggtagaacttttaaaatggtactgcattagctaataaaatattcagtacaaatatatgtttggatttatgcattaaaaaactaataaaattatttccaacttttgtatttgtaaattattttggtacaggagacaaagcatctaagaaagcatgccacacattttacttattttagcattttcaaataatctgtttaagtgatgtgtggggcaaaaaaggaaaagagacataacacctaacattcataaaattaaagtaacacatttcagatgatgttacagtagcaaagacttgtaactaacccaaatacccatcaatgatagactggataaagaaaatgtgtcacacacacacc

SEQ ID NO: 202246 - DNA, 465 bp, Homo sapiens
cccaactacccaggaggctgaggtgggaggatcgcttgagccctggaaggttacagtgagccatgattaccccattgcactccaccctgggtgacagaagaaatgaactgtatstttacatgttatatattgaaaggataagtctggaaatgttacaagttgaggaggtaggttcctacccacaatacaagagaacaaaatggaaggagttgctattttctccttgttggaggcattctcccatcctttatggtgaaaatatagaaagatttgtccactaagttgttgaatgaatggcatgatgctttttttgtctttttattattctttgttggttctaccaatttgactctttacccaggtcacctgtccttagacatgcaggctttgtagaaattcacatatcgacattacacttgtaatatataattctttcacttcagaaaaattgagcaatttaataac

SEQ ID NO: 202247 - DNA, 570 bp, Homo sapiens
catagctgactccaggcttcagggagctatgatcacaccactctactccagcctgggccacagaatgagatcctgtcccaaaaataataataaataataaaattatatatatacatatacatatatacataaactccctcaaaaatcattgattttaactaattctataaattctaagaaagcactgcaagaagtacaaaaagaatgttacaggataaaatagaaacagcataaatgtccatcagtaagatctaattaaatgttttaaaatatttatacaatgctaagataaacctatacttttggtttagaaaatggcatcaaatattaagtgacarcaaaagaataacatcatagaaaataaaaggctattcctgtgaaagaaaaattaatgatataaaggatatatactatctcgttcgtgtgtgacaaaataagcatggggagagatacataaaatattatttgctatcttttagtgaatatatggacatgatctttatttctttatactgttttttcaaattttcacaatgggcaatctggaaactaaaactttctttttgtagc

SEQ ID NO: 202248 - DNA, 459 bp, Homo sapiens
ttgtgctttttattataactagacaaattgcwttattatataatataccatctttttaaaaaatcaacttttattttagattcagggggtacatgtgcaggtttgcgacatgggaacactggatcataacactgagatttagagtgcagatgatcccatcacccaggcagtgagcacagcacacattaagcagtccctcacccccttccctccctctctcctctagcagtctccagtgtccattgctctcatctttatgtccatgggtactcaatgttcagctcccacttataagtgagaacatgcagtatatggtttcctgttcctgcattactttgcttgggataatggtctggctgcaaccatgtgctgcaaagaacataatttcattttttatggctgcataatgttccatggtgtatataatacatctttttatttttatttttttttaattta

SEQ ID NO: 202249 - DNA, 489 bp, Homo sapiens
gtcccccacttcccagggctcagcggtgaaggatccaggggtctcacctgcacccacaaagcagccgttctaacacttcacmctcccctgagcccatgggcgttttcttaggctttgggaatagaaaaccctactctggcttatttcatattctaccttatctgacatccacaccccgagacgccaccttccaccaaagtcctggcctttagaacacaaagcccatgacaggactcaaatttccctgctttctgctctcagatttcttcaaatgcaataaaacaccaaaaaaccctggcagcccgaatacagcaaaggtccaaaggtgaaagagggagtaggaatacagggaggggcattcaagcatcacttcctcttggaagccaatttgaggctccctctgcctcctcctccttcctccagcccactactgattcagctacctctcttctgtatggaggctccccgctgctttagttccataaccca

SEQ ID NO: 202250 - DNA, 444 bp, Homo sapiens
ctgttgacccttcacatgcattatctcatttcaccaacccaagggactttttatcccctccttagagtggaaactcatgctcagagagtataagttatggccctaataacttaataktaagtcagtaggattgtgagggtgacaaatagaatgcgaacccaagcagtattgctccagaggctgtactcctaattaataataaattggcatgctttgggggttgggaggaggcgtacacacctataatctgtgggaaatcaattttaaaataaactacaaatcagtatatttagcaagtaggtatattatggagcgtcacactgtttttcctcttagcaaattttatgcttggctttcagaatatttttcagattttaaatcaagcaaagtgcaatttcatgaggtggactcaaaacactcatgacagataaccatttcactgcc

SEQ ID NO: 202251 - DNA, 363 bp, Homo sapiens
ttaactaattagtttacaaagaactttgagaattgaaggaagccatctgtcagtacaggttgaatatccctaatccaaaaatccaaaatccaaagtgctccaaaattcaaaacttattgaacattgacatgatgctcaaaggaaaggatcactgtagaatttcagattttgaatctttggattagggatcctcaactggcatatatatatatatatatatatatatatatatatattcagattttggaatatttgccatatacatacatayatatatatatatatatatatacacatatatgtatatatatataattgaataacccagtacaggttgagtatccctgtatcccttatccgaaa

SEQ ID NO: 202252 - DNA, 589 bp, Homo sapiens
tattttggcctgtttttccctgctctctacttccttgagccgccaactgcttggcactatatttgatctgacacacacctacggcccctttaaatgtaacagtttttgtaaacaccatctctgacttcaatcctcagtctctcacatgctatttcatagttaccccttggtccacacagctaatattacttgtaaaaggcatcctcacttcctactcaggactcagggtctgtgtaagttgtaagagcatccccttgccccccagcgggaaaaggggaattatgagaggaagataaattgtaactcattttaagggtctgtgatttctatggccccttataagtttaccacaaaattaaatgaattcgtgtgtcaattcacataygcgtgcatacatatacacataaatagaggatacagaagccatctttttttatttttatctattgttttatttatttattttagagccaaggtctctctctgctgcccaggctggagtacagtggcaccatcacggctcactgcagcctcaaccccccgggctcaaatgattctctcacctcagcctccctagtagctgagacta

SEQ ID NO: 202253 - DNA, 557 bp, Homo sapiens
gaagtcattaacataaaaagtaatactaggttggtaacgccctatgatactttacagaaacgaaggcaaaaactttctgatgcacatactctcagcatatacctcacagatttccatagaaaagcccagccagggcaaagcaagagagccgactagagaagccgaatgctcatacttcccaccaaaaaaaagagccaaaacaacaaataagaaagtatgtttgaactggagtgtttgagggagcrcactggaatacagtaggagagagacagaaatcctgtgagacaaggagacctttagtgagggtcacatagagaagagaatgaagcactctgcctctgccacaccgccatctccccagccagtattagctcagaacaaggagatgcatccccagtggggactaggcaagcaagaggccccagcagcccccattaatgtcacagacatctgcactctttgttgctgagaatcctgcagtttctacagaccctgagtccagtttagggagctgcctgacagccacatggctgcaatgccccagagaaggagcccac

SEQ ID NO: 202254 - DNA, 557 bp, Homo sapiens
gaagtcattaacataaaaagtaatactaggttggtaacgccctatgatactttacagaaacgaaggcaaaaactttctgatgcacatactctcagcatatacctcacagatttccatagaaaagcccagccagggcaaagcaagagagccgactagagaagccgaatgctcatacttcccaccaaaaaaaagagccaaaacaacaaataagaaagtatgtttgaactggagtgtttgagggagcacactggaatacagtaggagagagacagaaatcctgtgagacaaggagacctttagtgagggtcacatagagaagagaatgaagcactctgcctctgccacaccgccatctccccagccagkattagctcagaacaaggagatgcatccccagtggggactaggcaagcaagaggccccagcagcccccattaatgtcacagacatctgcactctttgttgctgagaatcctgcagtttctacagaccctgagtccagtttagggagctgcctgacagccacatggctgcaatgccccagagaaggagcccac

SEQ ID NO: 202255 - DNA, 459 bp, Homo sapiens
ttgaactcctgacctcaggtgatccacccgcctcagcctcccaaagttctgggattacaggcataagccactgcacccagcccacagagtttctttttatgatgatgaaaatcttttaacattgtttctgttgatagttacacaactctttgaatataataacaccattgaatcttatacattacattggtgaaatatatgtgagaattatatcaaaataaagcttttatataaaagaacatacccctaaaataaaaataatagcatgttatttattcttaacctcaaactaggggtccatggtcccagggaagaagaaattttgatattagtaaatttaactacaattttcaaacttatgtatcagcttcttgrtatgttttaataaatggattgtgtgtgtgtgtgtgtgtgtgtgtgtgtgtgtgtataatatagaccaggcacttaggtgaaagt

SEQ ID NO: 202256 - DNA, 664 bp, Homo sapiens
tatttagattgcatcttcctctagtgagttgagcaaagagacacagaggtagcagacataaaaaatagaagtgtaaagctcagggatgaatgaaagagttggtttaaagtatatagactatttaaatgccatattcttttatcaaactgaagaatctaggcaattacctcctcttcatctcacagagttgaggaatttttgctgaaaattttaacctgagagatctagacttataacacagaagataagaagatcaagagctaacaaaaatatgcatagtaaacagtgggggtaaccagctcccatttcacctttatgccaagagccaggtctcacctctcagaccaaagagttgataattcttctctagagagactgaccacttacaagaggatcttacagacactggatcttggaatctcccaaaagaaaagctgttcatacctgatcacccttcagagggagtcaccagagttcccttctccaatggaaaatattccaatgagctttttattgcttgacytaaatacgagtgggcaacaaggatcactagacacttaagcaaaaccttcattatgaagaaactaaaacaagcagaaaagaaagaaacataggtaagacagacaatacagaaggcagaaaaagattttagaataagcatatt

SEQ ID NO: 202257 - DNA, 465 bp, Homo sapiens
gaaaagtatactataaaaggaacagtcaggaaacaagaaagaactttctgaaattacacattttaaattgatataaattcagtagaataattgaacaagtcaatcaagaagctcttgaaggaacaaaaaagagatgaacaataaaaaagaaaacataagaaaattagagaattaatctacaaaaagtaatatccaatgaaaagaaatctagaaggagaagacaatattttaaaataagtaatacaggaaattttctccaaattcaatgacatcaaatgccrtattaaagcaccacttcagcttaaaatgtagacacttcagcttagaatgtagaaaatccaaaatgatgtcactctcattctaacaataagaaatggataacttacaaatgataaaagaaaaacttcaaccaaattaaatttaaaggagtttaattgagcaatgaatgattcgcaaatcgggcag

SEQ ID NO: 202258 - DNA, 574 bp, Homo sapiens
gcttgtgaacttaagaaggggaaatgataggtcactagaagacatcgtggatgcactaagaacacattatatgaggctgagttcatttccatttttgagaattcaactaagtatamgagcagaactccataactattgtgtatttagagtttataatacatttcatctttcataatctccatgaataccagtgaagaagtagaggctaaatgctagtggcgttcagtggtttaacgtagagttgaatgactaaactccccaggctcagaatctgtgcccacctgagttagttgcccagtggcttgacacagggctcattcttatctctttgctacttaacccatttatcaagaacttccatagcttccatagggacctagatatcatggatatcaaatgtgataacctaaaattataagacttgttgataattagctccaaaaatatctcagcaagatgaagtaatggtcttgattttcagttcactaaccacgtttcaggtacagtttactgagatggaaataagtgtgcttccttatctggtacaataaaacagagctctattttaaaataa

SEQ ID NO: 202259 - DNA, 574 bp, Homo sapiens
gcttgtgaacttaagaaggggaaatgataggtcactagaagacatcgtggatgcactaagaacacattatatgaggctgagttcatttccatttttgagaattcaactaagtatacgagcagaactccataactattgtgtatttagagtttataatacatttcrtctttcataatctccatgaataccagtgaagaagtagaggctaaatgctagtggcgttcagtggtttaacgtagagttgaatgactaaactccccaggctcagaatctgtgcccacctgagttagttgcccagtggcttgacacagggctcattcttatctctttgctacttaacccatttatcaagaacttccatagcttccatagggacctagatatcatggatatcaaatgtgataacctaaaattataagacttgttgataattagctccaaaaatatctcagcaagatgaagtaatggtcttgattttcagttcactaaccacgtttcaggtacagtttactgagatggaaataagtgtgcttccttatctggtacaataaaacagagctctattttaaaataa

SEQ ID NO: 202260 - DNA, 574 bp, Homo sapiens
gcttgtgaacttaagaaggggaaatgataggtcactagaagacatcgtggatgcactaagaacacattatatgaggctgagttcatttccatttttgagaattcaactaagtatacgagcagaactccataactattgtgtatttagagtttataatacatttcatctttcataatctccatgaataccagtgaagaagtagaggctaaatgctagtggckttcagtggtttaacgtagagttgaatgactaaactccccaggctcagaatctgtgcccacctgagttagttgcccagtggcttgacacagggctcattcttatctctttgctacttaacccatttatcaagaacttccatagcttccatagggacctagatatcatggatatcaaatgtgataacctaaaattataagacttgttgataattagctccaaaaatatctcagcaagatgaagtaatggtcttgattttcagttcactaaccacgtttcaggtacagtttactgagatggaaataagtgtgcttccttatctggtacaataaaacagagctctattttaaaataa

SEQ ID NO: 202261 - DNA, 430 bp, Homo sapiens
acccaccttacctctatctcctttgccatctcactcatggcttcagttctcacttcattaaatactgcccatatctattccttgaatcttgagcttcagatccgcatttccacccataacctggatatttccacaaagatgttcagtaagcacttcacatttaacatgttygaaatggaatttagcatctgcttatgtattcttccatgtcctccttctttctctcaactttatattttggagatttattcatgttgatgcatgtagctgtaattcatgtatttttgctgctctgtagtatttccttatatgaatatacttcaatcgacttatccatgtatgggtttttgtaattttttatgtctgagtacacacatgcaagaagagtttccagtgaaattgctatatcaaagagcacacacaagttcag

SEQ ID NO: 202262 - DNA, 587 bp, Homo sapiens
cactaaagatttacagtcctaccctcactgagatggtaaacttgaccagttacaaacaattatactttgggattttattgattaagtaatatgctctcaaagtgataatgttgtgtgataaaactagctgtggaggagaaaccaagtgtggctgttaaacctttctatggcctatcatgcaaccagcrtggagttacttagtgccatgtgagagacaaatttcagagtaggcacaatgtggaagaaataattttcattccacacagcagtacccaactcctacccccagcaagaacgaaaactagagaagaagatacaaatatctattggctgatgaagagtctactccactcaggaaagaacatgtggaaaccatgagaaatgaaagtaccccgccaaacccagccaaatccaacctcacctctcctagacacttccccctacagtttctggagtttcccaggtatgttctttgcataagtcactgtttcatgtctatcattacctaaatattttacatcagggaagaataagtgtcttgaggcaaggaatctccaaaattgttttgaggttaattaactgcatag

SEQ ID NO: 202263 - DNA, 567 bp, Homo sapiens
cttatttcccttttgagctctctttttttacattttttcctactgactcatcaagcttgatcccttttgatcgtttctttgacccaatgggcaatttagaagtgtcttatttagtttccaaatatttgaggatttgccagaaaatcattctgttattgatttctaatttaatttcattgtagccagagaacagactttgtaaaactttaattctttttaaatttattgagatacgttttgtggcccagaatatgatctttgtaaatattctatatacacttgaaagtaaatatctatgctgctttttcrggtgaagttctgtataaatacttcttaatatgaattaagtcatttgattgttttgtccaagtttcttatatttttactgattttctgtctctttgttctatcaattgtggagagaatgatcctgaaatatctgattataactgtggatatgtctatttgttcttgcagttctatcggtttttgattccagtattttgatgctctgttattgagcgtatgaacattcaggaatgttcttttcttctggtaaattgacat

SEQ ID NO: 202264 - DNA, 530 bp, Homo sapiens
gtgtaatgacatgaggtcatgagaaaatttgctttaaaatacttcagcaaaaagtgaaataaaccaggcacagaaagacaaatactrtgtgatctcatttttgtgtggaatctaacaagtattgaactcatacaagtagagagtagaatggtggttaccagagagtggctgggagaggcaatagggagctgttgatcaaagggtataaagtgtcagacagacaggaggaataggttttaagatctattgcagagcagggtgactatagtcaacaataatatgtatttcaaaataacagagtaaacttcaaatgtctcaccataaaaaatgatacataattgaggtgatggatatgttaatttacttgatttaatcatttcacattttatacatatatcaaaataccacattgtacctcataaatagttataattatgatttgtcaatcaaaataatatgaataaaaaagaccagcaaaaatgtagatttagtaataaagcaagtatggcaaaatattactaattattgaa

SEQ ID NO: 202265 - DNA, 587 bp, Homo sapiens
gaattcaacttactgacattttaatggggtcaagtrtataattaatctgtaatcaaagaacatgtagaaataattattttatttatagaaaatttatttaatttataaatagaatacaaatttgaaggctaaacttaatagcttaagaaaaatgttttgtaaatgtcaactttaataaaataaatactaacttaagacccaggtaaccacagataaatagtcctttccaaacacaaaagcctctcccagaaactaaaaaacttaaatgacactgttattgtgacttcacacagatgaaatcagaacaaaacatcttaaaaatactacttgctaacaaaaaaaaagagtacagggggacacttagacgtcatttcttcatgaggttgtgtctctatgagatcacaataaccaaagaagagaataaaaaatacatttatttttattatatgaataataagaaataaatggttggactaatttattcttagttttcaggatcaggttgacaagtgaaaccaatagacccgtgttttcagaatacaggtaaagatccattagtagactgtgaaattgatttcatgggtcac

SEQ ID NO: 202266 - DNA, 593 bp, Homo sapiens
acatttgaagtgtttgagaaaatcaaggtacttatgttctatacgtatcttttttaatgtttaaaggaattcaacttactgacattttaatggggtcaagtatataattaatctgtaatcaaagaacatgtagaaataattattttatttatagaaaatttatttaatttataaatagaatacaaatttgaaggctaaacttaatagcttaagaaaaatgttttgtaaatgkcaactttaataaaataaatactaacttaagacccaggtaaccacagataaatagtcctttccaaacacaaaagcctctcccagaaactaaaaaacttaaatgacactgttattgtgacttcacacagatgaaatcagaacaaaacatcttaaaaatactacttgctaacaaaaaaaaagagtacagggggacacttagacgtcatttcttcatgaggttgtgtctctatgagatcacaataaccaaagaagagaataaaaaatacatttatttttattatatgaataataagaaataaatggttggactaatttattcttagttttcaggatcaggttgacaagtgaaaccaatagacccg

SEQ ID NO: 202267 - DNA, 593 bp, Homo sapiens
acatttgaagtgtttgagaaaatcaaggtacttatgttctatacgtatcttttttaatgtttaaaggaattcaacttactgacattttaatggggtcaagtatataattaatctgtaatcaaagaacatgtagaaataattattttatttatagaaaatttatttaatttataaatagaatacaaatttgaaggctaaacttaatagcttaagaaaaatgttttgtaaatgtcaactttaataaaataaatactaacttaagacccaggtaaccacagataaatagtcctttccaaacacaaaagcctctcccagaaactaaaaaacttaaatgacactgttattgtgacttcacacagatgaaatcagaacaaaacatcttaaaaatactacttgctaacaaaaaaaaagagtacagggggacacttagacrtcatttcttcatgaggttgtgtctctatgagatcacaataaccaaagaagagaataaaaaatacatttatttttattatatgaataataagaaataaatggttggactaatttattcttagttttcaggatcaggttgacaagtgaaaccaatagacccg

SEQ ID NO: 202268 - DNA, 397 bp, Homo sapiens
agataattgtgattaattaatgagctttatagctttttagatccatatttcagtggacctaaaaaggagctgccttattcactatttgaaatattgtcttgttattgcaagccagttaagagtaagataagacattgattgactctagagatgctctagttgttgcttagaagtaaaggtaaatagtcttctgtgtgcctacccttctgcataaccagcagcaattacagcaactaaaactttctatttttcagcatggattttgtgcctatcattatttgctatgtgatgctaycataatacctgcgtaagctcacagccatgaatgtaggaggtgtaataggaaaatgagactgtggatcaaaaaaatattgaaacaggatagaaagtcactgat

SEQ ID NO: 202269 - DNA, 587 bp, Homo sapiens
cttccagtccagtgactgcatgttttaaacacaagcaatacaccacagttttgctttagatggttggagctayataatagaaaatgtaaaaatttactgtaaattctttagtagaaactttaaaggaggaatcattttctatggtgctgattatccagaaatccttggagcactcctgctgccaaatagaacaaaaaataagctttgaaaacacacagcttaaatgccttaattctttggaaagtttctctttatttaattcccaagctccaataataaagaaatattgcttcaggaaagaatagagaagccacatggttatgatctgttgacatgtttgtcataggatgcaatgtctgaaatacagcactgcaggtctgactggttctattgtctggaattaaatggcaaggaatgggagccaatgccacaggatatcagggattgagcaatgaagggaagctctatcttcaatcctaggtttttcttcctttctccctgctccactcccctacccctgccccactcccctaccctgccccgctcccctacccctgccctgctcctgccctggtttccaaaactac

SEQ ID NO: 202270 - DNA, 587 bp, Homo sapiens
cttccagtccagtgactgcatgttttaaacacaagcaatacaccacagttttgctttagatggttggagctatataatagaaaatgtaaaaatttactgtaaattctttagtagaaactttaaaggaggaatcattttctatggtgctgattatccagaaatccttggagcactcctgctgccaaatagaacaaaaaataagctttgaaaacacacagcttaaatgccttaattctttggaaagtttctctttatttaattcccaagctccaataataaagaaatattgcttcaggaaagaatagagaagccacatggttatgatctgttgacatgtttgtcataggatgcaatgtctgaaatacagcactgcaggtctgactggttctattgtctggaattaaatggcaaggaatgggagccaatgccacaggatatcagggattgagcaatgaagggaagctctatcttcaatcctaggtttttcttcctttctccctgctccrctcccctacccctgccccactcccctaccctgccccgctcccctacccctgccctgctcctgccctggtttccaaaactac

SEQ ID NO: 202271 - DNA, 629 bp, Homo sapiens
ggtgggacagtgaagatgtactgcaggctctgccagctgaaagcatactgcttctggtggtctttactaatgggtatcaagaaataccaggaaaatacaaggtgtcaggggatgtgttggtgtgttcaagttatgaaaccacacctggtatagcagctgtagttagagtcactgtactaatctcacaatgatctgtcattcatctgtcttttacaaaggccaaataggtgagttgaatgaggatatggtgggaatcaccacccctgaatctttcaagtccttaatggtggactgatctctgcaatccctccaggaatgtggtattgcttttggttactattttcttagatagaggcagttttagttgcttccatctgtccctttctactgtagtagcccttacaccataggtcaatgaaccaatgtggggaggctgtcacctgatgagtatatctactccaattatacattctggaactgggaaaataactacaggataggttcaggggcataccaggccactgtgatatagacmtgagttaaaactccattgattagcagaccgccataagccccttctctgactgatgaaacacagtgatgtttgaagtgtcctggaattagtgtca

SEQ ID NO: 202272 - DNA, 413 bp, Homo sapiens
taggatttaagttccaggaaaacttgggggtgggtttgaaataaaatgcctctgtatgaaacatggcaccatgatttctttctaaggctgatgtggcccaatggctacagatattaggtcaacccaaatggaattgagtaagtgatctctttataaaggtggtgtattgaaacatcctcatattacatttataattttatatttggatccttaagtggttaactgggtaggggttgtggtgatgaggaataccatggaaggaactgcagaaagtagtaatggggccagtatgtgacccccaaggtacatctccycctttggaagagacacttccaggtctttggttagggatagcaaaatgttagttgcaataaaagctggaacgtgtttggtttggggtttgccctgggcca

SEQ ID NO: 202273 - DNA, 516 bp, Homo sapiens
cagtctatttcaattgagttttagcaaagtggaatcaattgttattgtatgaaactggatttgacccttgacttttaaacatttgcagttttcagtgactaactcctctactgttatcattccaagatcagatgccgtaaagcataggattttaatttgatttgggatcatgttgcttctcacacagctctaggtagtgtgatccaaggtgaagagcagcagattcattcacatgtgtaccagggagcaaaatgacaagagacaattataaaagctttgttggaagtttaggatacttaaagctcttttaatcattatcataatttttkagttacagctcaataaatatttttgtttctcttaaagtttatcaatggtaaatgagttgcctggtcaatgtttagtattatagctaataaatgaaatagagatattttaccatacattagatcaataataatatgtaaaagataccatagattctgaagacaggctataggattgctcagaaagaaa

SEQ ID NO: 202274 - DNA, 428 bp, Homo sapiens
atattcattctggacttgaaatgcagaagtgtgtgctcagttagtttaattaaaaaatttctcagttaacatttaaaaatatttttgaatattttaaaaattttaagtactttatacactggccagttattgaatgcttgaatgtttgttgaagttccctgtgttcaagactgtttgcttccctagaggagaaaataattaatgttctaaaacacagcatgaacatattttatatgttgagatagataggcagcaataaactataaactagatgagatagtatatctacacagcctctgagttgagaaaaattaaagaatccttaagttaaacacacacacatgtgcaygcacacacacacacacacatacccagaaacacagaaatgggtcccataaggaaaaaggtaatttattgtacatgatgct

SEQ ID NO: 202275 - DNA, 664 bp, Homo sapiens
tatttagattgcatcttcctctagtgagttgagcaaagagacacagaggtagcagacataaaaaatagaagtgtaaagctcagggatgaatgaaagagttggtttaaagtatatagactrtttaaatgccatattcttttatcaaactgaagaatctaggcaattacctcctcttcatctcacagagttgaggaatttttgctgaaaattttaacctgagagatctagacttataacacagaagataagaagatcaagagctaacaaaaatatgcatagtaaacagtgggggtaaccagctcccatttcacctttatgccaagagccaggtctcacctctcagaccaaagagttgataattcttctctagagagactgaccacttacaagaggatcttacagacactggatcttggaatctcccaaaagaaaagctgttcatacctgatcacccttcagagggagtcaccagagttcccttctccaatggaaaatattccaatgagctttttattgcttgacctaaatacgagtgggcaacaaggatcactagacacttaagcaaaaccttcattatgaagaaactaaaacaagcagaaaagaaagaaacataggtaagacagacaatacagaaggcagaaaaagattttagaataagcatatt

SEQ ID NO: 202276 - DNA, 549 bp, Homo sapiens
cttgcttttgcatgccatgttttgactttctttgacagtataaataaaacttttgaaatttttatatctcattcattgtctatatctttcatatttaagtgtttttcatgtatgttttgagatttaattgaaggccaatgaaaaattttattttccaggtttaactagaatctgaaaatactaccagtagctatagtcaaatggcatgttgacaatatcttctaaaactaaaacccaagtttaaggtgttctacttctccaatgcatctactgtctcttaattttgcagtaatgtttttatcaatgcgattttaagrgtgaattctaaattttgaagataaatgacttttacagtgtgattttctaaattgtgcttctgatccttacattttatataaagaaagcatattccacaggtttatcgccttgattaacaaagaagctaattaaaaaaaaaacattaaatcaaagctcatgagaatattcatagaaaaatgtttgctctatcgtgataataaataaattacctcaaatcttcacccttgcctt

SEQ ID NO: 202277 - DNA, 464 bp, Homo sapiens
aaaaagacaattgtcagctcaaggcgggcaggcaagaggagttccctcttacttgtgagagaatcagccttcatgttctaatcaggccttcaactaattggatgagacccacacatgttaaggagggtactccactgtaattggtttatgcatttaaatgttagtgttctccaaaaataccctcacagacacactcacaatgtttgaccaaatarttgtgcatcccatggcccagaagtggttgacacataaaattaaccatcatgactagatagctactacctccccagaatgacctaaagtagacccgttccagttaagcccaaccagacccacaacttgaagcagaaccactatccaagcatagcctgtataagtagactctctgggaatccacagatttcatgtgaataaataatttgtttgctaagataatgagttttgggtggttgatgatgtaacaa

SEQ ID NO: 202278 - DNA, 602 bp, Homo sapiens
taagttttcatggttatactgttttcctgacagaatgactctgaacaaattaattactttattttgtataaagggtttcttttctttctttttccattaatgcaaaggaataactagagagcttgagtcmtggtctaaaagtcactggtgatttaaaggattacacttacatctgtaatgcaaattttcattatatcttaggcctttgggaaccggccctggaaaataacattctgccagaaaaagagttatcaggaagctaaaatgacacgttttagagatactgacttgcaaagacccccttcaaaggcactgtgtataattatatatttgtaagtttatattatttttcttagagtgggttccctaaagagtctgagtttcaggatgcataaaacttggttttgctcttgtttttcaacacatcaataggaatttgtctttagtttatagtctcagatacaaagcaacatttctagtcctagagggtgcttcctctcccattgctcttaaagacatctccctggttttcttttgttgaaatgtgctatctttgttttacaacattgtaatatgataattttgaagttactatctttgtg

SEQ ID NO: 202279 - DNA, 469 bp, Homo sapiens
attcaggaaagaggtagtagattccagtgacaatgcatgagttagcagaacacaggaaagacgcagaagaaaaaaaataatctctcagttgtgaagtcaacattaggggcaacacaagttagaacaatcatgaataaaaatagaatgaaaatacaacaggactgaaaagtaaactaaataaaataaaaggaaaaaagtttttttaaaaaacagataaaacatgtaagaaagatttttaaagaaaatccaataaaayccgcacactaaaatctgaaaaccgaaattgcaggacaaaaaaaaaataaaataaagatgtaattaaagaaaaaagtgtattaaatgaaacttttgtttgtaagttaaaaaagagcactatttctcaacgggaaaaaagtgttagagtagtacatatattttagaaactctactaagctttaaaaaactctactttattagaaaaagattagaa

SEQ ID NO: 202280 - DNA, 469 bp, Homo sapiens
attcaggaaagaggtagtagattccagtgacaatgcatgagttagcagaacacaggaaagacgcagaagaaaaaaaataatctctcagttgtgaagtcaacattaggggcaacacaagttagaacaatcatgaataaaaatagaatgaaaatacaacaggactgaaaagtaaactaaataaaataaaaggaaaaaagtttttttaaaaaacagataaaacatgtaagaaagatttttaaagaaaatccaataaaatccgcacactaaaatctgaaaaccgaaattgcaggacaaaaaaaaaataaaataaagatgtaattaaagaaaaaagtgtattaaatgaaacttttgtttgtaagttaaaaaagagcactatttctcaacgggaraaaagtgttagagtagtacatatattttagaaactctactaagctttaaaaaactctactttattagaaaaagattagaa

SEQ ID NO: 202281 - DNA, 478 bp, Homo sapiens
ccatcattagctggaataagttcattctgaagcagctagctaccatggcccaccaccaaaatgagtttactctgtttctattcataactctacattgtgatgcacagtccttggtggattctccttattggtccacctacattatatgtagtatggaaactctaactgtaagaatttagcrattttttaacttctatagtgcatgaaggagtttagcgtcccaacaagaaccataaagaaagacattttctaaatattgaagtgaagttcatatgattagcaccaaaaaattacaagtattcagtaaacatgcataatttttttttctgctaaagaatcctgtaaagtcataactaggggttatagagataaagagcaaagtacttttcttgttatcacacaccactcagcacaatgcttctgacagcagagtctccagcagacaccagctatgtgtcctataattcagttctgacat

SEQ ID NO: 202282 - DNA, 478 bp, Homo sapiens
ccatcattagctggaataagttcattctgaagcagctagctaccatggcccaccaccaaaatgagtttactctgtttctattcataactctacattgtgatgcacagtccttggtggattctccttattggtccacctacattatatgtagtatggaaactctaactgtaagaatttagcaattttttaacttctatagtgcatgaaggagtttagcgtcccaacaagaaccataaagaaagacattttctaaatattgaagtgaagttcatatgattagcaccaaaaaattacaagtattcagtaaacatgcataatttttttttctgctaaagaatmctgtaaagtcataactaggggttatagagataaagagcaaagtacttttcttgttatcacacaccactcagcacaatgcttctgacagcagagtctccagcagacaccagctatgtgtcctataattcagttctgacat

SEQ ID NO: 202283 - DNA, 478 bp, Homo sapiens
ccatcattagctggaataagttcattctgaagcagctagctaccatggcccaccaccaaaatgagtttactctgtttctattcataactctacattgtgatgcacagtccttggtggattctccttattggtccacctacattatatgtagtatggaaactctaactgtaagaatttagcaattttttaacttctatagtgcatgaaggagtttagcgtcccaacaagaaccataaagaaagacattttctaaatattgaagtgaagttcatatgattagcaccaaaaaattacaagtattcagtaaacatgcataatttttttttctgctaaagaatcctrtaaagtcataactaggggttatagagataaagagcaaagtacttttcttgttatcacacaccactcagcacaatgcttctgacagcagagtctccagcagacaccagctatgtgtcctataattcagttctgacat

SEQ ID NO: 202284 - DNA, 585 bp, Homo sapiens
agatcttagtcattaacagattaccatatcaagtataagtagacaagagagaacagtttgagttgaagacaatatgagcgcaaaaaacttctcatattaatagtgaaatatattttacagttagtactatactcacctaatgaataataaattacacattgagaaatagactctattgaaagcaccatataagggaggaaagactttccctctgctctcctggttcaacagctggatgtatgaaataaactgacacctggcaaattaacagaagaaaaggcatacggacttgccagtttttaatattacatgcatgggacatcacagaaaaaaaaagtgaatacccttcaaatcggtaagatttgacaacatatagaccatcttaatacgggaaggagaggaggctgtagatcatttggggagagtaaatgacttttagaaaagatcagtgggyccttagaataacagatgggaattctgataatttgtgacaaagtttgtctcggtgtggtgttgacttctaatcttttctctgataggagtcaattttttctgctgattaaacaatagccagggaagggattt

SEQ ID NO: 202285 - DNA, 600 bp, Homo sapiens
ttttgctggacacaattcaacccataacagtctcccaaggctgaactcaaggtatcataagacctggactcttatgtggaagctgtagtgaagaattcattcccaaactcagtttgttagcagagtttagttctctgtggttctaggaatgaggtctctgcctccttgctggctgtcagctggcggctgctctaagcttctaaaggccatcaacatgcttcatctcatgaccatccatcctcaagccagtgttggtgcatcaaatccttcccattcttggagtctctctttctctcagctaaaggctggagaaaatgctcttctttgaaagggatcctataattagattaggacaactgagataatagaacttagcattatcaagggaatgctatcatattaacaggttctactcacacacaaagcagaggggattatttaagggcaagtgtcactgcgggcattcttawaattctgcctaccacatcacccttgatctttttcaccttccctcaaatgcctaattacttattaaacattttctttccatgttagattatacactccatgagggtagagaataaatgcatgttattcaca

SEQ ID NO: 202286 - DNA, 337 bp, Homo sapiens
caagtgtcactgcgggcattcttaaaattctgcctaccacatcacccttgatctttttcaccttccctcaaatgcctaattacttattaaacattttctttccatgttagattatacactccatgagggtagagaataaatgcatgttattcacagctggtgtcttgagcaccaggcatgaggcagagtaggcacctgaataaatgaatcaatggatggatggatgaatagatgggaaaayggatggatttctcctaaatattctaacagacctattagcttgctcatttgatatagaaacattaagagacaaggtcagccaggcatagtggctcac

SEQ ID NO: 202287 - DNA, 511 bp, Homo sapiens
atggcagcaactgaaagattcactattttcagacactagtctcacagtcttgatggggttaggactggcctcacactgcctctgtgtggggcttgactggcttttttgatagctcaagtgctgcaaatttatttaaaagagaacagaacgctgactttcttcactaactcactccagctgggttcctgcctgcttttcttytgtccccaccccccgccactgcccctcatcttgcagtacccctcatccctttctccagctaaagaacagctgatagaaataggcgcctttttttttttttttttaacatcaaaggcagcccagagctatgtcagccttgccccagcctcagacagaaaaagcttttgatgcctcagattgcgaagctttttgcagctgtactttatcaaggcagcagtggcagggcttggaggacccaggcgagccagaaggtggcggcgaagtcaccttgggaagaggagaatagggtcaaagacaggacggcggaggg

SEQ ID NO: 202288 - DNA, 392 bp, Homo sapiens
ttggaaatgaaggtcagtcattctagggatggtagatggggccagttgaaagccaccagcttgtcccacttatggaaatgtaagcttggaggtgccccaaagcaggtgcttccaggcctgaagtagggtattatcctcaactgrcatgtctagaagagcacctcttcatgttgtatggggtctgaacagcaccccacctttacttcactgaggagttctcaaaggtccacatttgttgaaaacatgacttttactgatacgcatgattttctttttcttacaaagacccatgacagagaacttacaaaatacaaatgtgcaaaacagcaaaaatatgaatcattataatcacatcaggaagagatcatttggtgcacatgtttctagtgccc

SEQ ID NO: 202289 - DNA, 575 bp, Homo sapiens
catgtatgaactgctcctttaagcactttttgtatattccctagttactcctcacagtggtccacaggatgtgcagttatctgctccctgtctccactatacagatgaggatataaatacacatatatttagtaacttgcagaaaaacaacagagctggtaagtggagcaggtagtgttcgaactcaggaggccagactccagagcccacatgtaaaccattctgcataagatgtttgatatagttacaggtatttagtaaataatcataatcagtaaatattagctattcttgttattgtatttatggtagatggtaatgaaaactataacaaaaactattgctaatgtccctcattccatcatcttttttccctaaggatgggagggccccgcrgatacgtttctgtgggctagagaatctgttgttcatgtttacaagacagacgcaaggtggtaaaaaaaaaaaaaaaaaaaaaaagaaaaaaaaaaatgcaagagctcttcctgatgaatattctggtctcagtagtctaggtaaagaatttttaaaaatctaatttctcccttgtcttg

SEQ ID NO: 202290 - DNA, 557 bp, Homo sapiens
gcagtgaaggagaacaaactactgttacctgcacaatataaataaatctcatagatgtgaagtcaatcaagagaaggcagacacaagagggtagatattttacaatttcatttatattaagttcaaaataggcaaaactaatttgtaagaacaggtttagttggtgagaaatctgtggagcattgttgattttacaggcccaatacccagcttttctctgattttgcagttgtctccatagcaatagtcacagactctaaaatgggtagcctcttcaacaaaagaaactgtcattctcaacagctgtctgtgaaagtgtgcaatgccctkttaaggaggcacctgcagagatgtggggcttttcctcatttagaggaattattttgcaaacaataatactaatacaacactggatgagaaaaccatgggaggcctcttataaccattgtcttgagggacagaactaccaccattcacttagaagctaacatttccattctgagagtttgtgattcatctgatgggaattggataaaggaaatggaaattctgatgaa

SEQ ID NO: 202291 - DNA, 557 bp, Homo sapiens
gcagtgaaggagaacaaactactgttacctgcacaatataaataaatctcatagatgtgaagtcaatcaagagaaggcagacacaagagggtagatattttacaatttcatttatattaagttcaaaataggcaaaactaatttgtaagaacaggtttagttggtgagaaatctgtggagcattgttgattttacaggcccaatacccagcttttctctgattttgcagttgtctccatagcaatagtcacagactctaaaatgggtagcctcttcaacaaaagaaactgtcattctcaacagctgtctgtgaaagtgtgcaatgccctgttaaggaggcacctgcagagatgtrgggcttttcctcatttagaggaattattttgcaaacaataatactaatacaacactggatgagaaaaccatgggaggcctcttataaccattgtcttgagggacagaactaccaccattcacttagaagctaacatttccattctgagagtttgtgattcatctgatgggaattggataaaggaaatggaaattctgatgaa

SEQ ID NO: 202292 - DNA, 605 bp, Homo sapiens
ttgaggaaaaggtggtttttggttacgtggataagtcctttagtggtgatttctgagatgctggtgctcctgtcacccgagcagtatacgcgatacccaatatgtagtctttggtcccttaccccaaatcctacccttcctccagagtccccaaagctcattatatcatttttatgcctttgcatcctcacagcttaactcccacgtaaaagtgaaaacatgtaatagttttccattcctgagttacttctttcattccgttttacggtgagtagtattccatggtgtatatgtacaacattttctttatctacttgttggttgatggacatttaggttggttccataatttttgcagttgtgaattttgctgctataaatatgcatatgcatgtgtctttttcatataaygactcctaaaagggtgagctttatgggcacagtttgacgaatttttacctatgtacccattcataaataccacccaactgcagatatagaccaatgctgcacaaaagagctttctgtgatggtggaaatgttctatgtctgtgctgtccattttagcagccgcaagtcacatgtggctcctgagtagtagatat

SEQ ID NO: 202293 - DNA, 605 bp, Homo sapiens
ttgaggaaaaggtggtttttggttacgtggataagtcctttagtggtgatttctgagatgctggtgctcctgtcacccgagcagtatacgcgatacccaatatgtagtctttggtcccttaccccaaatcctacccttcctccagagtccccaaagctcattatatcatttttatgcctttgcatcctcacagcttaactcccacgtaaaagtgaaaacatgtaatagttttccattcctgagttacttctttcattccgttttacggtgagtagtattccatggtgtatatgtacaacattttctttatctacttgttggttgatggacatttaggttggttccataatttttgcagttgtgaattttgctgctataaatatgcatatgcatgtgtctttttcatataacgactcctaaaagggygagctttatgggcacagtttgacgaatttttacctatgtacccattcataaataccacccaactgcagatatagaccaatgctgcacaaaagagctttctgtgatggtggaaatgttctatgtctgtgctgtccattttagcagccgcaagtcacatgtggctcctgagtagtagatat

SEQ ID NO: 202294 - DNA, 608 bp, Homo sapiens
tttttaattcttctcaagaagtaaaggatgttcaaatcatgtggtattggttttcctggaacagaaaatatagtaagccaatcaattgatcaacaacctttatccagcaccttttaatgaagtaacacattgttctaggtgcttgggatagatagaatttttagaaggcattctcttaaagagtctataatctcctttgggagctacaacataaacatgtgaaaaagattgacagcacttattctgaggcaacatatcaacaaatccaggtcagtaaactgcaaaaagcttgcgtgaatgaagcaacttgaagtgaagggaatcatatatttctcaaagaagagaaaaaaatattaagggaacataccatatacatgggtggtgaaaagagaaggtattgcaagtggaataagtggtttgcaatgccagagtaatagggcaagggatcaagtaaggttaaagagtgttatggaaacagggtatgggtaggtgacaggaggaggaaagagctgaaattataatccatttggcraaataaagggaccatgtttaggacacaaattaaggagtatgtgatgatttggggaggagatgctgttgaaggccag

SEQ ID NO: 202295 - DNA, 550 bp, Homo sapiens
gtatgggtaggtgacaggaggaggaaagagctgaaattataatccatttggcgaaataaagggaccatgtttaggacacaaattaaggagtatgtgatgatttggggaggagatgctgttgaaggccagaaacaggtcattcacagattaaatatttcttctaaggtctctttaggcatttaaatactgtcacatcagacattggtggcaaagtggccatgaattccatctacaaaaacacttggaatttcacaattgctgtaataaagttttgtttcatatttttacaaactcctttgggattatgtgggttttttccaggtatagtcattaatatagaaacttaatatccaccttttgtaaattacataaacctatgatttgggtrttaaacataacattgcttacataaatctaacaatcttctcaatcccccccaagagtattcaatcaaagaggcttacatagattttaccaaaaatatttccatatttttttcaaatggtgaacattgctgtctttcaaaatatacaccctttcaaagacatct

SEQ ID NO: 202296 - DNA, 494 bp, Homo sapiens
ggccagctttaatctagttcacaaatcctaacagtataggaccaaccaaggcatctcacaggatttcttgctcagaattccttctaaaacagtgtgaataccagctttgcgtgattttgggagtggggtgggatgatggggcaggagaggaatggaggcctatagacctcgcttttgtcttaaatgattaattgaaataaaattatgcacataccatatgaatgatcaagattgattgttgacccaggccaaatctattatctgtctaacctttccttaaataagcatggtgctcatttagttaagaaatatttatagatcacccacactctgccmagccctgcaccagacactacgggttcagtggtcaacacactcaacccctgatctcacctgttacttcttagggctgggcactaaggaatcaaaagaaataagggcttttcttcagggatcttatagtctaggtggagaggaaaaggcaaacaaaaaag

SEQ ID NO: 202297 - DNA, 564 bp, Homo sapiens
ctacaaatgtgataagaagataataacgcttatggcacagggcagtgagaattaaatggtaatgtgttaggaaacatctgttatgtagtaggtgctcaaaacagttttagcttccttccctttttcccttgcagtcttgtttaaggtatcaaaattagagcagaacattgccactgccatgtgggcggggggagactgattcctcgtggactgagggaggttctactaaggagtggggtgagtgctgtgaggcccaggacaaagatctgtctcgctgcaaccctcccctcccccagcacaccaattcctgtatcagcatttgctaggttgctctaattttcctttttatatgttcttttctgtctgatgtccttgaatgttgggagacagaaattgccctgggacttctatgtaatgaaaagagagtaacagtgaggatgctgatgctggmtggagcttgggatggccataggctaagaatcctagaagagcctagacaaagaatccttggaaatttcgtataatatgcaaggttcagggaagcaccagtaaatattaacttcc

SEQ ID NO: 202298 - DNA, 578 bp, Homo sapiens
ggattataggcgtgagccaccgcgcccagcctagacttcttaatacgtatgcctctgatagactgccactttctcctttaatgataagtttctatttgcctcaccccccccaggagttgtttgctcttgagtaggacctatgcttaaatttgtacctgccactgctgacactactaccaaatcaattgttcttactaagttagtatcttatccgagaaagaggcactgggttttcttcatcatycaatcaatctctagaggcagctttcagtgtctctcaaattctatcagtaaattgaagtttctcctgcctgaactgcaccctgacctcaccccttggtgagggtgccccatatctcatccatccatgctcagacaaatgtcacagatctctaattcaactcttattatgtcatcgtaatggatgaacaaatgaagtgaatttacagacagcaatcctgggcttcccgtctttgactctcgatgtatgggcccctcctgctgcatatttacatacaattagcaataaagtagggttctcacagttattttgtttctttgtacataaggcaatttta

SEQ ID NO: 202299 - DNA, 578 bp, Homo sapiens
ggattataggcgtgagccaccgcgcccagcctagacttcttaatacgtatgcctctgatagactgccactttctcctttaatgataagtttctatttgcctcaccccccccaggagttgtttgctcttgagtaggacctatgcttaaatttgtacctgccactgctgacactactaccaaatcaattgttcttactaagttagtatcttatccgagaaagaggcactgggttttcttcatcattcaatcaatctctagaggcagctttcagtgtctctcaaattctatcagtaaattgaastttctcctgcctgaactgcaccctgacctcaccccttggtgagggtgccccatatctcatccatccatgctcagacaaatgtcacagatctctaattcaactcttattatgtcatcgtaatggatgaacaaatgaagtgaatttacagacagcaatcctgggcttcccgtctttgactctcgatgtatgggcccctcctgctgcatatttacatacaattagcaataaagtagggttctcacagttattttgtttctttgtacataaggcaatttta

SEQ ID NO: 202300 - DNA, 626 bp, Homo sapiens
catatgcataaagtttggggcatgatagagctctttggtttccatcatgaaatgtgttcacgttattatatatccctgggaccaaacaattcaattaatccaaaacttatgcgttgaatctgacatacccaatggtcctctttgagaamtaaatgttgaaaatgtcaattccataatgtggtaaaacctgatttctctctatttgaggcatcacaaaccatttattgattttttaaaagaaacagaaataagaagaaacatgtaccaattgaataggaagtcagacaatccaattacagttatgaaactgaagcattgactctgacaggcctactgatggcaaacgactgctggaaaatgcaagagaatagctgcccacccagagatgcacatacctgaggacatgcctcatggggtaatgaagtagctgaaactagtagtcacgggaggtcaaaggccaacattttattacctgtttagtacagtcgtattgaactgtattatatatttgaacatttaccagtggtcagtggcctctgagggaatttgctttcaattatgctctactgtacaatgatctgaccatcagaaatctgcacataaaataaaaatattatttattgtgc

SEQ ID NO: 202301 - DNA, 388 bp, Homo sapiens
actcaataagtacttgcaagtaaataaatactcttagaagactacgagtctctatgggttagtttgggtattggcacactgaggttctgaaaccagggcttcttatacacccttgtgtttctttgtattccactaataatatatgacctatccccrtcaccctcaaagctgcaaaagagaaaatgttggcgatgatggataaagccagagagagttatgatgtaagacattcagccagtgttgctctaaagcagtgcctgcttttgatctgtgaaacaggcatttctttctccttcatcacttagaagcaaaatgagcatcattttcaatacagagaaaaaatagggagacaaaaagaactggaaaaaaaggaacaagaaacttccgt

SEQ ID NO: 202302 - DNA, 570 bp, Homo sapiens
catttttggcagtgtgcctggtgccagagctgtagctcagaccactgatatttgatgggatattcatatcctgtttaaaagcctgtgaaatacagccctttgtcctgaaaaggaataatggactggaaatagatgttaattgttcctcaaaggtaatgcttttgattttctcaaaatcagagtaacagaatggccatccaactatgagaaaatgtgataacacagttcttttccagtgttggtcggttctgtgctttgtgtggagaagaagtagagtgggaagggcagctggttggcttgcgacagagattgggggaacctagaggtttgtgtcttattcaatattttatttacgtaattacctgtagatttaaaaatccacgtgttccataaattacagcaaaatgcaagaaactatgtccaatgaggcttccctctgcttctccaggaaacatcccaaatgcctgctactattggtttatcagttacgagatccttcccacggagcartgggagtgatgggacagcaagcattggcattattatggaatgctgccattccactggctg

SEQ ID NO: 202303 - DNA, 610 bp, Homo sapiens
  misc_feature (1)...(610): n = A,T,C or G
atctcattttcaggcctatgtaaataagctggatagaattggaatgataacaccagaatgactgtccccttcctttgaatcttgcttatcttgtggtgtgagacaactttgccactgcacttcttttcattaaaagtggaaactgtctcatttcctttatcagtggtgtaatatcaacatccaagctctctaatttaaatgacacacaagccagcacagcttcccttatatcttctcactttttgcacaaattccatgaactctactgcagaaatgggacacaatctcttctgaggcaagcttgagttttctcttttcctttgactttgaaactttcaagctttatattttttttgctttcctaaraatttacaagttcatgaagatacaggaatgggaaggataaatgtggaaagcaaaaaaatgaaancaaaacacatatagacaggaaataaagaagagatttttttattgtgacaacaggaagagacaactggaaaaagctgcagctgcagccagaagaacaagtcaacataactattataaaaatagagagctttgggaggctgaggcggatggatcgcctgaggtcaggagtttgagaccagcc

SEQ ID NO: 202304 - DNA, 575 bp, Homo sapiens
ttcgttcttccacggacttaacagcaatatataaaccaaaatgcctccatgaagactctagaagccagttaagaagtctcagtacccaaatgagcacaaggccaagaacagctacattaagatgtataagaaaaagtcattttattctacctatgattgcccctcctccaaactggcacagtttggcatgattgagaaaaagtacccaattttcagcccctccaggtggaaacagaatagtrgaacatgcattcagtgttttggttttatggggagctgagtgagggagtaatttctgtcttctctgactcagggtgctgatggaaatgccatactttggatgcctgagtgctgctgaaaacctttgatatggaagagtgacctcttcctgtatatcagtgataactggatgtatgggcaaaaaacaatcatagaatgataataaattagggagtgggtagatgagaagtagttttgctgtaactgttcatgtccttactctaaaatgaagagttcatgtacagctaatctagggaaacctgaagaaccgcagacagacaccagaggaagcaaaa

SEQ ID NO: 202305 - DNA, 578 bp, Homo sapiens
tcatttggcatatgtagcaagcattcatttttatcatagtgttaattgttagccatggcagtaacaagccagaaaaaagcacaggcagaaaaaaagccacgtctgctcaattaaaaggggtaaatggcttggcggcacggcagggtgctgcggacacaaagagcaggtaaaggaagtgacctgtggtgttgaagtttatttgtttgaacagctgagaattatctcctgacctaagtcacctccataacaggtggccctttctgtctgagtcccacagcacttggcttgagagagtgtccaatctcattcatgtggaaaagatcaactcttttttccccctgtaaggaaaaaaaaaaaggaatgtgactggctgttcaattgtaatcatttctttgagtgcctctgtgtggaaaggatgctgcctcacctattcctcagtttccacatctgtaaaatatggaaactactacttgctctatttcccttcgagggctttttgggaaatccatacagtamcaaaaaaaaaaaaaaaaaaaaaaaagacgacacattaccaatgctaagtgcaaagtcacaaa

SEQ ID NO: 202306 - DNA, 609 bp, Homo sapiens
agctaaacgtgagttcatactgctgtcttcaattctgatccattaccacaaaggtcattataaccccctcctccttattttctcaccctttcaatgagtttgtttcatacatttataatatacttagaatatcttttcacattctgtattccatcctggaattttccaaccttctaaaggacattttttaaaaaaccttaaaaaagaagcttcactttttgtgttgtaaaacactgtaggttttgataaatgcttaatgtcttctgtccatgattacagtattgcatagaatagtttttaccctaaaaaattccctgcacttcatctattcaaccctcctctgccctactactccagcttctggtatccactaatttgtttcctatagttttgccatttccagaatgtcatatagttgaaatcatatagtatatagccctttcagatagcttctttcacttaacaattttcatgtaagakttattcatttctctgtctctctctctctctctctctctctgtctgtgtgtgtgtgtgtgtgtgtgtgtgtgtgagagagagagagagagagacttgacagctcatttattttaatcactgaataatgtt

SEQ ID NO: 202307 - DNA, 434 bp, Homo sapiens
tacaatcattaggaaaaaaatgggaagtcagtaacgatgtgattactcaacaagtagttgtacccagaagcaaatatgtttaagagacatttcaaatgggacaaagttattctgtcactaagaggagccattcaaacctgggtatcaagataatctgaaactataagtttgaagaagttactgtacagggaagaaattttgaaaaatcaggactttgctactctgacattgatttatacccttcaaataaaaaatactccattaattacccaatagaacacagccaaataaaagcctcatgaaatgttgcttgaaataatcatgaagagtagcaacaactgmgaaatttgggagaaatttctttgcttctttgagcatgtcaaggggagaaaaataatcatttgtttctgtacttgtcattaagaactatagac

SEQ ID NO: 202308 - DNA, 554 bp, Homo sapiens
gaaaaatcatgatgatgaattaacattggccttgcctacttgcacactycacatgaactaagcttcaaatatcagcttctgtacttagaaaaacacagagtacagtgtgttggttgggactgagaggatcataataatgaaaacaaacggtctgatcactccagtttttttttttgccactgcctattcacagatatttgtaagatggccaatttgtatctcctgactttctgttttattttcaatatgaccatgctaagttactcaaatacgttactaaaaatgaaagaggattactaaataacattgtgaaattcaggattgttttttatttaatttttttgaggtgtcaagaaattaaggtcttcaccttttctatattatttgcttaattgataggagttcataggtttttatttgggattgtaatttacctactgttgctaatgctaaatatttacatggcatgttcaagttttttattttacctggctcaataacatagtacaatactttgagcatcatcatattatgatgtgatatcactgggaatt

SEQ ID NO: 202309 - DNA, 554 bp, Homo sapiens
gaaaaatcatgatgatgaattaacattggccttgcctacttgcacactccacatgaactaagcttcaaatatcagcttctgtacttagaaaaacacagagtacagtgtgttggttgggactgagaggatcataataatgaaaacaaacggtctgatcactccagtttttttttttgccactgcctattcacagatatttgtaagatggccaatttgtatctcctgactttctgttttattttcaatatgaccatgctaagttactcaaatacgttactaaaaatgaaagaggattactaaataacattgtgaaattcaggattrttttttatttaatttttttgaggtgtcaagaaattaaggtcttcaccttttctatattatttgcttaattgataggagttcataggtttttatttgggattgtaatttacctactgttgctaatgctaaatatttacatggcatgttcaagttttttattttacctggctcaataacatagtacaatactttgagcatcatcatattatgatgtgatatcactgggaatt

SEQ ID NO: 202310 - DNA, 493 bp, Homo sapiens
cgctgcaccctgtgtaaatcttgttttcttttacataattccttcatctctttgtgatttttctcaacacctgtgtgcatgcacctctgagcattccccagaggcttttccacaaatgcacctatttcttactatctccattgcttaaatatttttgccaagagttcaacatttttctttgaccttttttggtttagttcaatgaatatctatcagattcctacaatggcatttactgtattaaacgctggagacatagcaatgaatacgtgattyccataggagaaacaatcacgcaaatgtaatttgagtatcacttcagtgctttgtgggcattctcagcatagttcctctttggcttgcttataacctaaaaagcaccatacatttttacctttattgtccccacactggctttatgactgtctttgaacgacacagttaatgcttctttgcctctgtgcctggaaacaagtaattaagtcccccaaac

SEQ ID NO: 202311 - DNA, 493 bp, Homo sapiens
cgctgcaccctgtgtaaatcttgttttcttttacataattccttcatctctttgtgatttttctcaacacctgtgtgcatgcacctctgagcattccccagaggcttttccacaaatgcacctatttcttactatctccattgcttaaatatttttgccaagagttcaacatttttctttgaccttttttggtttagttcaatgaatatctatcagattcctacaatggcatttactgtattaaacgctggagacatagcaatgaatacgtgatttccataggagaaacaatcacgcaaatgtaatttgagtatcacttcagtgctttgtgggcattctcagcatagttcctctttggcttgcttataacctaaaaagcaccatacatttttacctttattgtccccacactggctttatgactgtctttgaaygacacagttaatgcttctttgcctctgtgcctggaaacaagtaattaagtcccccaaac

SEQ ID NO: 202312 - DNA, 588 bp, Homo sapiens
tcaggttttctggagagttctgattgaatgactgcactatattattagagtagtttattatataattcaagactatataattacataatttccaaattaactgtcaccaataaaaatgcaacaatgatgaaaatggaaatgaattaattgctataaattcagatgagtggttcctattatccagtgcattccttcatatgcaatggtcaaggaggtcatgtctaaagagaattttgaagtagaacacattattttacaaatagccactaatgttatagctataactagtgatggtggacccacagtatcattactcttctcaagggattaaaataatgaaagctgatattctaataaggatcatttcacagacaacaatgtctactrtttactgtcacttaatagaaaagtagttggtgggcttaatctatttctctgtagaatggtaattgacagaaagaaaccttggcagtggtagcagctaattattaataagaccatggaaaactgaaacagcaacacaacttcagtaattgctagagagagataaattctctttctccaatctacaatctgactttgtaacag

SEQ ID NO: 202313 - DNA, 538 bp, Homo sapiens
aggattttaaaggactcttgtaactgcctaagtgtttgtgtcttctttagcctaaaaattgggaaacaggaagaaggtactaaggagagagctcatttaactcctcattctggaagaatcagttttcataacaactgcccttatttgtttattcatgttcttatgttatattttcttgtcacacttacaacctcttttgccacaayaataagtaacacagaaaaggcagccagatcttgttggtaagtcacagcatcttttgctttgcaagcaaatgcactattcttttaaaaggtttttaaaaaatatacaaataacaattggcctggtaatattttactatcaatggagatactgattccttcaattacgtaaaatacatactttaattgcttactcaaaaatggtaaaagtaaataatactccctaaagttaaagatgcatcaggaagaacagctcagtttatgatttttatgactcagtgacatatgggagcatttattattttagtgggtgttgaccccacacggttttatca

SEQ ID NO: 202314 - DNA, 605 bp, Homo sapiens
gggaggcagctccccttgcctgctctcaggtgggctgcggcacaacaccgctcttccttctcttcgtgggtcacatcaaccttctagacaattttgatgagagaacctggataccttggttgcctgtgaggattcacaggctttttatgtttttttcccattggcgcctcygaatgcagctgcttctagtcagccatctttgccccgccccccacagctaccaagtttcataatcaagtgttggaattcaaattttctgattctgagtaatgccatccatctttacattgacagatttttaaataatagggagataagtggttttcttaactaatttcaataatagccttctcagaataatagagacgtatcttcctgggaggttcagtttgcttaccctaggggacaatgaaacatttgcttggtaacctgcatctgtggcctgaccagaaatgaatgcagctctcttagactgtatgacatgccctctgactagcaagctggtaactgctgaatgccaagctctgctttcaaaatgcccatgtcacaattgccagtggatgacctgatatcatgaccaatgctgttttggtaaagtagagaca

SEQ ID NO: 202315 - DNA, 605 bp, Homo sapiens
gggaggcagctccccttgcctgctctcaggtgggctgcggcacaacaccgctcttccttctcttcgtgggtcacatcaaccttctagacaattttgatgagagaacctggataccttggttgcctgtgaggattcacaggctttttatgtttttttcccattggcgcctctgaatgcagctgcttctagtcagccatctttgccccgccccccacagctaccaagtttcataatcaagtgttggaattcaaattttctgattctgagtaatgccatccatctttacaytgacagatttttaaataatagggagataagtggttttcttaactaatttcaataatagccttctcagaataatagagacgtatcttcctgggaggttcagtttgcttaccctaggggacaatgaaacatttgcttggtaacctgcatctgtggcctgaccagaaatgaatgcagctctcttagactgtatgacatgccctctgactagcaagctggtaactgctgaatgccaagctctgctttcaaaatgcccatgtcacaattgccagtggatgacctgatatcatgaccaatgctgttttggtaaagtagagaca

SEQ ID NO: 202316 - DNA, 555 bp, Homo sapiens
tggtctcctctttatctctgcatcagcagtttccctggagagcctgtctccctcagtgtggaccagctttgacaaatatttactgacaaatgactattattttaataataatcatcatttgcaatcatttgctgacttacagccaacaaacactgtcatagatgctgtcttacttgatcgtcacaactctgtgaagcaagcatgcagagcagggctcattaagttatttaactgggtgaaagtttgcactgatgccaagtggtaaagctgggagcaaacgatccagtgttatcgacttgccagatacattttcctccagtccttttgtcatgaaggaggcagacttgcaactgttagaatggcactgggatggttcaggaccaagaaaaccaggaacccctcaccagcctaccttgaaatccctggcatgtcctaggctcccgctgaagaccrcagctgaacttgacaacatgcaagcctctgtaatacacacatggttgccctgtgaaatggaagttccttgccactgaagatggtgaagcagaaccctgataa

SEQ ID NO: 202317 - DNA, 580 bp, Homo sapiens
ttaacctgggtgtccactcaatctatgcagtgtacatggaacaccggaaagagcctgggtggccaggcctgcagggttatctccttgtcctccaggctccctgccttgaaagtgtatccttgttatatgctacagagggggaagcacccagctagagaccaaaaatgtcactttaaattgaggcaagtgggactgggctgagacctggttggctcagaccaaaaaggatcaggactttctagcagctgttggggcaactactcctaggagactcctctctctcctaactgctgggactgaaccctttgagccccagtgcttgattttgctctccagataaatgtctaggtatgaccacgctgctctcagtctttgcactcttgctsgcttcacacttatagtggtgtcatcatgtctttggggatgaactgctcagttcctccttctccatctttgccaactccagtgatttggaccagaatacattaaaatatggaactcttaccaggcgccatctcctggtagaccatggcaaacataacagaatgatagagaaatcttggcatccccccacagatta

SEQ ID NO: 202318 - DNA, 572 bp, Homo sapiens
tcatcttgtgacaatttagagaagggtttcaaaggggcgtaagagggatgggctgagacttattcctgggcctctatcttgggtgggtaatgacatcactaagtgatgtgagaaaaagagaaggagttcagtaatggtgatgccatcagtccacagagatcctctctttatcaatacttattgagcacttgctgtgtgtacacactgttctaagcattggtgctacagcagatgaaaagcttcttttatggggcttacattccagtgagaagaaatgatgacacataaataaaatacatagcaggtcagatagcagtatatcctattgagaaattatgcargagaaagggatagtgagtgatacagtggtattggagtggaagtattatggtgaatagtgtgaccgctataattgtgaggtctctattatgggtgatatctggtctgcctaattttgtttcttttccattttttgtttgtttgatgaattattatttctcgtaaacaaggcaaataaacagcaatagcaacataaacatttacaagcacatagatgtaggcataatagtttg

SEQ ID NO: 202319 - DNA, 577 bp, Homo sapiens
cattgcttccaagtctgttattcctttgaacatccacacatcctgcaatagtttcatatactgtagggttttgagtctttcagggccacggttctcgttgttcatgcagtattctgcgaagctccagcattcttaaattgattaatgtggcatctggcctacatatggacatcaggtttcagtttttaaaatttgcagtaagctttaaataataacaataaaatataaattcagacaaatagttatgtcagtgagaggcattatgctggttgccatccatatctctawgtggctccatcatgggaatcttgagctagacgtcacgtccacatctagtttcccttcttagtctttgtttctactaagttaaaaaaaattctatctaataattatagaacactgggaatgttagccagaagctgtaggctttgatagataaggtatagcaaatgtagtgcttcacatatgtcagactttttctaggggctttagatatattaactcatttcatattcacaacagtctatatgcaggtactgttattatgcctatttcacagatgaggaaactgagtcac

SEQ ID NO: 202320 - DNA, 577 bp, Homo sapiens
cattgcttccaagtctgttattcctttgaacatccacacatcctgcaatagtttcatatactgtagggttttgagtctttcagggccacggttctcgttgttcatgcagtattctgcgaagctccagcattcttaaattgattaatgtggcatctggcctacatatggacatcaggtttcagtttttaaaatttgcagtaagctttaaataataacaataaaatataaattcagacaaatagttatgtcagtgagaggcattatgctggttgccatccatatctctatgtggctccatcatgggaatcttgagctagacgtcacgtccacatctagtttcccttcttagtctttgtttctactaagttaaaaaaaattctatctaataattatagaacactgggaatgttagccagaagctrtaggctttgatagataaggtatagcaaatgtagtgcttcacatatgtcagactttttctaggggctttagatatattaactcatttcatattcacaacagtctatatgcaggtactgttattatgcctatttcacagatgaggaaactgagtcac

SEQ ID NO: 202321 - DNA, 394 bp, Homo sapiens
ccctcatctgtgaaatgggcatagtgaactttggagtgatgtgaggaataaaagaggtacagcacctgacaaacagtagctgcccaataaatgacacctacaattcttcctcttttatccagttttatgtcactgttattatgtcagagaaacagaagtagtaatgccctgcattgtgattctttttccagcttctgatttctctactgaccaatgtgaggagacttcctaacacaatttgtgaggaagtattttcaatgagttattattgttctctggtcctgcatgagttctaattggatctacgaaagggggattagttccaagagcatcagaaagacmttactatagccgaaactgaggccccagacctttagggtgagagtcatagatg

SEQ ID NO: 202322 - DNA, 603 bp, Homo sapiens
gttaataataataattctttctctcttatctatctatctatctatctatctatctatctatctatctatctatccatcatctatcatctatctatatatgtgtgtgtgtgtataaccgaaaggatatctctttctrtatgtgtgtgtgtgtgtgtgtgtataagctgaacttcatcaaaatttcaatgcatgagactttgcacaaaacactgccaagagaatgagaagtcaagccacagagtaagaatatgttggcaaaagacatatttgataaaggactgttaccaaaactatacaagaactcttaaaattaacaataagaaacaacccggttataaaatgggccagagtgtttaacagatacataaccaaagcagatatacaaatggcaaatcagcatatgaaagatgttcaacattatatgtcatcaggtaagttaaaatttaaaaaaaatgagataacactacacacctattcaaatgtttaaaatccagaacactgagaataccacatactggtgaagatgtggaacaacaggaactctcattcattgcctgtggaaatacaaaatgacatggccactttgggagacagtttggcagt

SEQ ID NO: 202323 - DNA, 603 bp, Homo sapiens
gttaataataataattctttctctcttatctatctatctatctatctatctatctatctatctatctatctatccatcatctatcatctatctatatatgtgtgtgtgtgtataaccgaaaggatatctctttctatrtgtgtgtgtgtgtgtgtgtgtataagctgaacttcatcaaaatttcaatgcatgagactttgcacaaaacactgccaagagaatgagaagtcaagccacagagtaagaatatgttggcaaaagacatatttgataaaggactgttaccaaaactatacaagaactcttaaaattaacaataagaaacaacccggttataaaatgggccagagtgtttaacagatacataaccaaagcagatatacaaatggcaaatcagcatatgaaagatgttcaacattatatgtcatcaggtaagttaaaatttaaaaaaaatgagataacactacacacctattcaaatgtttaaaatccagaacactgagaataccacatactggtgaagatgtggaacaacaggaactctcattcattgcctgtggaaatacaaaatgacatggccactttgggagacagtttggcagt

SEQ ID NO: 202324 - DNA, 478 bp, Homo sapiens
tgttttttttttttattttgcagtttttgtccagtctggttcatttgacaaaaactcataaccctttttgtgaaccactctgtgggagaatgtggatatttactaatgggagacactgcagtggacacatacactggaagaaatgtacctgctggtttgtttggagtgttgtctccacagtcaaatcaagaccacttatgattacctcatatagatgccacactaacatacacaaaattaagaccatcctgaagtgaggtgatgagtcttcacatgagactgctgagaccttgccttcctccccctcagaatctctcatctactkttctttgtcctttgcccttcctctactctctctttcaccttgagtcttgagcagatttgaaacaatgttccttgtgctttcttatctgcccttttctttttcaatttgttcctttgcagtttccaagtcagtcttcctatggaaataaatcca

SEQ ID NO: 202325 - DNA, 459 bp, Homo sapiens
aaattcttttgtgcaccttccctatgaatcccactgcaccaagcaaatactgttttgatttttccaccaaagaatcatagggtgtatgcatactgcacatgtgccatttatatacatgctgtatgtgtctggcttttttcactcaacaaaatgtttttgagattcatccaggttgttgttcgtatcagtatttcatgcttttttacagctaagtggtgtgctgctgtatgaatataccacagtttgcttactcattyctacagatgagttcctgggatagttccagtttggggttactgtgaataaagcagttatgaacatatttgtgaatatttctgtgggcaaatgttttcattttgcttaaataaatacctagaaattcaattgtgacatcaagggtcaatgtgtattagctttccaaattaattgtacaattttttaaaatagactttatgaaca

SEQ ID NO: 202326 - DNA, 635 bp, Homo sapiens
agttcttgcatattctgttcttcttttctcagtctttttttatttttgcttttcagttgagaaagaactgaaaaaacagttctattgacataccctcaagctcagattctaatgtcagctgtgtctagtctactaatgagcccacaaaaggcgttcgtcatttctgttataatgttttttatctctagcatttattttttattattagaatttctgtctatctgctttcattacccatctgttcttgcatgttgtgtaccttgttcatttgtgctcttagcttgttaatcatggttgttttaaattcccgatctaatwattccaatatccctgccatatctgagtgtggttctggtacttgctctgtcttttcaaactgttttctaccttgaagtatgctttgtaatttttttgttgaaaatggatggaagaaactgataaataagctttagtaatgtagtgatgaggtatgaggtgaggggaggtattctatagacctatgagtagaattaggtctcagtcttttagtgagcctgcgccccttggctgtgaacttcacaagtgcttctgaggcttttttcacctctttaagtagggtcagcatagctggagggagctggggttgggtatttccc

SEQ ID NO: 202327 - DNA, 560 bp, Homo sapiens
ggcgagggctcattggttaatatctcactgaaagcccttgctttcacagggcagcgttgagcaaggagcagcgtgtccatcagaagatacaggtgctgggggccgcagagtactgggcaggggtaagtgggggaaggcttcctggaggagggaacatgctaaccagtttggaagaatgagactgttaaagatccagcttggcaaacgaggaaggagcacatggagcgaatgccctgtgggactctcagaggaaccaggatgtgaactgccctccccaaatttgagtacagctttacaaatgacaaagcgctccaatctgcatttcctcagttacccttgagagcagtcttggagccagatgcacttaaccctcctcttacatgggaggagaacgtgagtggtttccccaaacattccctaaacccagagccagagataaccctctgcccactgcccagctcactgggcatttgtcctaagagtcaggccagaggctggaggagcagagagcaagttccagagttttgttggggtgaytctgcttgatatgaccaagaaca

SEQ ID NO: 202328 - DNA, 601 bp, Homo sapiens
aaaatcccaaaaggttctgctggttgtagtgaggactggcaggtgcctttatatgtgcttggcactggggcttgtggatgggcagtcaagagcttaattcgtgggtttggcttgcctgggagcaagaagtcattttctctatgctgagctagagatcaagccctctccacctctgaaacaacatgaaaccttcaaattgctgggcttgcaagctttgctcatgtaatttgggtcttatctaattaacctgctgttatagggtaatttgcccyaggccctggcctctccagggggatgtcactggcactgcaccatccctatcctgattaatcttctctgggttgttggcttcctcctggggatgcagcaggtgaagacaggatggactttcctggatagttcaggacactgggtagagtactggggcctccaacttctgttctcctccttcctggaaagggactgatcaggcattacctctccccaggcctcctggaaacataacccatagagggcagctgctctcactcatggggtattaggaggtggagtgaccctctcgctagcatgggacagaagcagcccaggccagagccaacca

SEQ ID NO: 202329 - DNA, 398 bp, Homo sapiens
cccatgccaaggccccaaaggctctcaggaccacaggctctcccccacctcagacactcaccttgtcaacaaaggaagcaaatttgttgagggtcttccttggtctttaccttctcaatctaggggtcaatccccacattcaggggctgcagggagctctggttgatggtcacctcctagatgccaaagagaaaggcccccgaacccccaaagccccaggctccaacaggagctcctccaaagctgccaggtctcctccaatactgaaggagattcctctaaagccacttattgtgccctttccttctgccccacacaggctgcccycaaagacacctcagcacccccatgccctgccctagcctggatggcacctccagccaccctcagtgagatct

SEQ ID NO: 202330 - DNA, 556 bp, Homo sapiens
caaccttcagtcttcatgccaccaggtctctctactgcagctgaaatgtggtatatgcataagccattctttgcagtatcatcacaacagtaacttgcacatgttttttaaatccctacattccttaaaagtgtgcattaataggtttccagcttcattctggcacaacttggcaacttccttgtggatgtggtggataacccatgggsaggtccagtttgtcaagaacgtgaacacagtgctccttgatgaaatgaatctaaaaccaggagattctaaagctcctagagtggcaatgagccactggagagcaggtatacagaagttgtggtgtcattactatcttgttctagaaaggcagtgctgaccttacattgagtggtgtggaggcaggccagctgcagaaactgaggactgaggagattcaacattagattgaggaaaggcccctcttctccagatctcagggctcaggatagtgacaatctaacacaaaaccaccagaccaccatgtcagttgtgtgtattgtgtcatatataagagttccaggccaag

SEQ ID NO: 202331 - DNA, 523 bp, Homo sapiens
tcactggcacctgaccttattcttcccatataacacagagagtagaattttttttctcaggtttcgccatgtgaactcttagtacagcaaagatgtgagatgcctccatacacatatccccacccatctccactcccgccctcaacgtcctgccaaacggttagccaatctctgcttgaaacttgatcactccccaggtagcctctcccatgtcaggatcatagaaaggtgcttcttatattgagccgaatatgttgtagcttcctgaagcgatattgatggaatttggatatgggattcattggaataggacagcaacccatatgaataaaacattgtgttcccaggcatgcccctccagaagtctttggggaggatgtggcagctaactgcaaacatcatatcaacccatagtgataagacactctgtttccatgcacacccctctattctctctgagaagtttctccccatctcatctatcctggcagcargcctgtcagaggacaggcagaaaagggaa

SEQ ID NO: 202332 - DNA, 611 bp, Homo sapiens
taagggctactgctgagaccttgggcagccaaacccacttgctgtggcgcagctgcattttcagcatcactttctgtttttctgtaaacaaattttttttgagacaggttctcactctgttgcccaggctggagtgcagtggcgtgatcttggctcactgcaacctctgcctcttgggctcaggcgattctccctcctcagccccccaagtagctaagactacaggtgtgcaccaccatgcctggctaatttttgtattttttgtagagacagggtctcactatgttgcccaggctggtctcaaactcctggactcaagtagtccacctgcctcagactcccagagtgctaggattacgggcgtgaacyaacgcacccggcctctgtaaataaattcatccagacacccagatgtctgccaggaaccagctaggtacctctagaaggtcacttaactttcaagagcttcacctctaaaaaggtgtgatgttccaatgttaagactaacttcttcatctttgcccaggacacatatgaaaatgggaccccgcaaagaatcactacaagccctttctgtgaggcctactattaccccagggtcacaaagagat

SEQ ID NO: 202333 - DNA, 604 bp, Homo sapiens
tgataatttttgaatatatatatatatatatatatatatatatatatatatatatccatgagggatttgttctttagtttcttccattaatgctggccttataaaacaagatggaaggtgtttcttcttccatcttctgagacagttcgtgcagaattgttattactctttaattaatcccacctatctgccagtgcctggatataaagttatctcatccatgaggtcttctccggtcccaaaatactgcctgtaacttacaataataataataatgtaacctacagtactgcatgcttatgatggcacaggtcctacagaataaacatttatcattgatttcagtgtgtaaacctccagcaatcctctgaggaagctgttgttgctacctgtttacaaatgagtaaagaaaggctcagagttgttaaataacttgcccagggtcacacattcttttatctgatcatcaacttttcatttagtgcctactaaattccaaggtgccagcaactgagcccaccccagagcccgctcccttarcatgtccatcagtgctttccaaaccatggcccttgtgtcaccagcatcagaatcacctaggagg

SEQ ID NO: 202334 - DNA, 552 bp, Homo sapiens
aggtctgtggcttgcccctatctgcagtggatggacagtgtttatgggctcatgatcagaagacagtgaaaaggccacaaggaacggaaaagcaaagtggacacgaagacaggtgcatgctcggatggcctgggcttgcccctggagttccgttccgcggggcctctgattggccgccctccttgcctggaaacaccaccagctagccgaatcccttccctggggaggtgtaaggaccatcacacgggcttccgaggaagatgcccaggttcagatcccagctctgccatttaccaactgagcgattttagaaaagccacatcacttctcttttcctcagttttctcatctgtaaaatgggaaaaataatagtacctgccttctaaggtagctatgagaattacatgaattaatacccacacatttccccagcacaaagtaagcattgtataataattattattattayactggtaaaatatttgggatgtgtctggtacatctttaccttcagtatattttatgattctgattattatcatcatcatgatc

SEQ ID NO: 202335 - DNA, 444 bp, Homo sapiens
gatatctaggctcctatccacccgagtggatatctatgctcctgtccaccccagtggatacctaggctcctgtccaccccggtggatatctatgtcatatgccctccgtgttcttctaggactctgatgaatgcaaaattcatgagtaaacctagaaaagagcaaaaagtacagctggctccccaggcttcccagggttgagtccagctatggggacaaggtttatgtctccattttgcctggatgcatctaatttgagagttgtctcaaagaagcagamagatccacacaacaaaagaacacgcttgggttttaaaataaactttgttaaataaaaaggctttaaacaaactttgtagctggaggccttctgccatatttacaggcaccagcaacaccgtggtagctgtttccaagatttgcagcctcccaaactcctgcaga

SEQ ID NO: 202336 - DNA, 636 bp, Homo sapiens
ttggtactctggagacattctaaaagtttgggccttggtggtagaagtgaagtaattatttcatggagtctttcaaaataaacagaaatgcagcaaaatgcacagagaaaagtatttgttttctgtgtcctgcctctgacaaaatatagggaccactggggagagaayggtgttaatgaaatcaaaatgagattaacctaactaaaaagacacttagcaaagatgacagtaatgttcagcttagatatacttttatgtatttaattattcattaatgaatgcggtctttaatttacagggggaggagggagacaccggccaattccagtaactagaagctggttggtcactaagctgatatttgtgtttctaccaagtaatagtaagcttaatttctattttcattagaatgtttacagaaaagattccccacaccattatgagttgtgtttaaatcaccagccttcctcctgcaaaggaaataaatgccaattgagtttctgccttagaagttgtctttttctgtagaacatgatttctttaaaaacacaaaggaaaaaaaatcgaaaaaaagtgagactagattattttctttttggttttttctttctccccattctccaaagtcattttgaa

SEQ ID NO: 202337 - DNA, 310 bp, Homo sapiens
aagttctgtttaacagtgccactccacatcagttgttctcaacttttctatacctccaacatatctgaggtatataatacaatgtcattaaaaacagtacctctcactgtgctttagaatctgggtgaagggtagtccctaaaagggccccagtttattctcatatgtgttctcccacttccatttcccactgagaatctctattcctgaaagcttgtagaggtgtagckctcagtctatgatgcacattggaatcacctgggagttttaaaaattattggtggctagctaggtaccactccaaggaatt

SEQ ID NO: 202338 - DNA, 597 bp, Homo sapiens
atagcatatcttacaagtcaaagatattgacagtatttctgatgatggtgaccatttctccaggatttctaaaagcagtgaccttctataaacattgattaacaattttttaattgtctttttaacatttcactcctcacggttatttctgttagccctgcagaaaaaaataagtggaactacaaatagaactattatcttctctctttaaaacgtttttaaaaacaattttgatcaaatttttgctcaaaccattgcatagaaggggaatttaggattatttataaatgtaacttgcccatgatgtccctctctcattatcatgtgtaacgaaaagttggcaggatttactttctttcttagaaaawtgagcatccaaaggaagaataaaattctgcaagaggaattcatttaaaacacttttaagtgaaaaaaatgctaacaaagatatagtgtagaatccaattcacgattttaaaaagcacatggctctttcaggcaatgtcaaagctctttctgtagcatatttttaagaatcacagaggaaagattcgtgattctcaaatatgggctttgatgtctcctttccattcagcc

SEQ ID NO: 202339 - DNA, 446 bp, Homo sapiens
agaattctatttctagcagtaccgaagagtacaaatctaagctggggaaaaaaaaaaaaaaaaagaaagaaagaaagaaaagaaaaacacgattggaaatcttgtcacattttctcatgcctaatttggtcattcctttgtatgaagtaaaacaagctcatcttgtttagtgttacctcaatggagtgaaattggctacaccgttctttcactcaaagaactattcatagatttctattctcaagcatgttatttatattctgcctaaaagtaggtttcacagttattcaraatcatgcagcatcaactgaatacttctttaattttgatctgaaaagtgaaacacatttgaatttcctaatataatatttggggagaaccccaaagtgtgaatattgagaaaacaatgatatataaaagatattagaatccagtgattacttaaa

SEQ ID NO: 202340 - DNA, 583 bp, Homo sapiens
gggcaagtcaactagaagcacctagtgaaagaagacttgtaatgggatatatataacaaatgaaaagaaaggaagttgtgaatgagatgctagacgtttgcactgtttgcttgatggagtagtttgaggtactgacaatggtcacagaatgacaatagatggatgagcagagtggataattcactggagtggtgaayacttcattcaagtaaatagtaaagtcacctaagtggagagggagtgggcagcccagtaaaaaaccatcagcgaaggaggagatgtgacttggaggcccggtgaaggctgccacaggaatggagcacaagcttcaaattgcagaggtttaactagagggtgaaggcacagtggcctaaggtggcagtggggaagacactgacccccctctcaaacctggagctacctggagtgtaaagtggccgccatttgagaggctaacagataaagccttgttctcagagaactggctagattcagttaacacaaaaagatggaagggctctcctgcagaaagtttgggaatataaagggaggaagtctgtttatcagagaatggctgttccgc

SEQ ID NO: 202341 - DNA, 454 bp, Homo sapiens
  misc_feature (1)...(454): n = A,T,C or G
ttatccccactgtgaaggtgcaatgacagtgggatgtgttgtcggccagtgctggtgcttccgctgacagcatgagcctgcctgagccactgctgttccctgaaccaatgctatgtcttcaggatgcaggcccacactggcctgtttgtgggaggcacagctgctacagaaagtgctcaaaagggaaaaaagaactgttagaaatgaggcaacttaatgtaactcattgattctagaacataccttttaaaaggttttcatagtgtttgtttgtttgtttgtntgttgtttgtttttgagacagtctcactctatcacncaggctggagtgyggtggcacaatcttggctcattgcaacctccacttcctgggttcaagtaattcttatgcctcagcctcctgagtagctgggaatataggcgcaagccaccatgccaagctacatagtttaac

SEQ ID NO: 202342 - DNA, 564 bp, Homo sapiens
ttagcataattttttctataaaatacttagtttaagaatgctgaaggggagttattctgtagagtaggttaaacggcttccctttaatctcatttacactattatattgctcagcaaactatttcttttataaaggtgtttgctagatgctgtgggggaatgttggacagaaatgaaccatggacctgccctcaaagtaaactgcatcttggactacttttaaatgttatgaataggctcaaatttaatatggcttggttgctctcttttgaaagatgatgggaaaatagagttctttctctaagagtaaacccaggttgatttgggcttgcacaaatcaatagaggaaggaaaataaacagactttgtgtgcttgtgtgcaagtttgtgtctgtatgtgagtgtgtgagagtgtgtgctgtgaaagtgtgtgtggttcactattacacttagggcctgccacactaccacacagtaggcccttagcggacatgtgmtgaatgactgaatgttgaacaggggcaggaatttctctgtccccaggagcaaaccaaagaacatatg

SEQ ID NO: 202343 - DNA, 606 bp, Homo sapiens
atttccacttcctaaagactgctggaatccatccacttctctccctcttcactgtcacttataacattgcaacagcttcctgtctgtcttctcaatgcatggttcccacataatacagtcctcgtgcacaggagcatgatttatcttaaaaaaaacccattcccctgctgaggctcttccatgattctccaattgctcaattgtgacctgcatgagcaggccctgcccttggactagctkctctccaccctctttcccagagctccaatagcagtttattctatttattttattttttcagttcgttgtgtactccaagcttcttctcaccactgggagctttagcacatgctgtcccctctcctgggaggccctctttatcctgaccccatacaacctggccaacatcaggtctcattgaaagttaatttcctcaggggtattaagttccctgttacacactttcatagcaccttgtgctttgcctttaaaatatttgccactatttatttttaattacttggttgtgcaattatttgttgtctgtctcattagactgtgagcaatgtggacagagttcatatctttctcattgattaatgtata

SEQ ID NO: 202344 - DNA, 606 bp, Homo sapiens
atttccacttcctaaagactgctggaatccatccacttctctccctcttcactgtcacttataacattgcaacagcttcctgtctgtcttctcaatgcatggttcccacataatacagtcctcgtgcacaggagcatgatttatcttaaaaaaaacccattcccctgctgaggctcttccatgattctccaattgctcaattgtgacctgcatgagcaggccctgcccttggactagcttctctccaccctctttcccagagctccaatagcagtttattctatttattttattttttcagttcgttgtgtactccaagcttcttctcaccactgggagctttagcacatgctgtcccctctcctgggaggccctctttatcctgaccccatasaacctggccaacatcaggtctcattgaaagttaatttcctcaggggtattaagttccctgttacacactttcatagcaccttgtgctttgcctttaaaatatttgccactatttatttttaattacttggttgtgcaattatttgttgtctgtctcattagactgtgagcaatgtggacagagttcatatctttctcattgattaatgtata

SEQ ID NO: 202345 - DNA, 576 bp, Homo sapiens
gccaatgaacatatcaaataacaaaataatgtttgttatggtctttggagtgtgctttgaggaagcctcttctgaaaatgattctgttagcctgttgtccctaagccaccctgccaccatgagcccaggaaattagtcatccattagcggaggtctatgtcacaaagctgttcttcatagacttctctgacctgctggcctttgtcctgtgtttcttgccttcccctactgtgttcctgagcatacaaatattttctcactcatcrtttattattaaatcttattatttctatttttcattgtgatgaaatacatgtcatataaaatttatcaccttaatttttaagtatacagctcagtagtgctaagtacatttacattgttttgcaaccaatcttcagaagtttttcaccctgcaaaactgaaactctatatccactcatcaatagctttccattcctttccctcccccagcctctggcaaccaccctgctactttctgtctttatgagtttgactattctaggtaccaaatttaagtggacttatacagtatttgtctttttgtgaatggct

SEQ ID NO: 202346 - DNA, 622 bp, Homo sapiens
gaggggcctgcttggcctgtgcccatgaagaccaagatatgcctgggaatttatgtccttcccagggtcagcccttgactggtgatagatggatgtaaagtagaagtactctactttcgttgtccccgacatgtgcctaacctgcctccagagacattgtgaggttaagccaaagtttcctctggggacttagctgggcwtcatacattgcttgaccttttttctttcctgatcccacttccccttcacttctccaggttttccctagagaaaattacttcctaataaattactatcactcaaactttcatctcaaggtctgcttctgtggaatccaactaagacataagccaagtctggtaggcaacataatgcccccttcaaagtgttcacatcctcacccttagggcttatgaatacagcaaagggggctttgcaggtgtaactaaggttgtagatcttaagacagagagatcatcttgggttacctgggtgggcctaatctaatcatgtgaactcttaaaagcagataactctctggaaggaggcaggaagatgcagcagaagaagcaatcagagagattggaagcataagaaggatttgacacacgtttgttgcctc

SEQ ID NO: 202347 - DNA, 622 bp, Homo sapiens
gaggggcctgcttggcctgtgcccatgaagaccaagatatgcctgggaatttatgtccttcccagggtcagcccttgactggtgatagatggatgtaaagtagaagtactctactttcgttgtccccgacatgtgcctaacctgcctccagagacattgtgaggttaagccaaagtttcctctggggacttagctgggcatcatacattgcttgaccttttttctttcctgatcccacttccccttcamttctccaggttttccctagagaaaattacttcctaataaattactatcactcaaactttcatctcaaggtctgcttctgtggaatccaactaagacataagccaagtctggtaggcaacataatgcccccttcaaagtgttcacatcctcacccttagggcttatgaatacagcaaagggggctttgcaggtgtaactaaggttgtagatcttaagacagagagatcatcttgggttacctgggtgggcctaatctaatcatgtgaactcttaaaagcagataactctctggaaggaggcaggaagatgcagcagaagaagcaatcagagagattggaagcataagaaggatttgacacacgtttgttgcctc

SEQ ID NO: 202348 - DNA, 582 bp, Homo sapiens
aggccaaatccatcatttacaagaactgtctcaagaagcaaaatgtttaaagttcaaattagtagsacagtctttccctgttttcagagttagttgaaattcaaatcgtaatcagaatcccaactctcatttgcagtgaaatctctgccacggagagaacattctgaagcccaaggggtccacagatattccctgtagtcagccatgcaggaagccaaataatccaaaggttgattggtaagggtggaatcagaaccaggggaattaaataaatgttcaatacttgtggctttttcactcctgtagttcagcgaacgagagtggcgcccagcagctgcttctctcctgttgtttgctgagtgggagggagtgttacagctcttgtactctgctgcctacagctcagcgggcaggagtactaagctctttcactcccacagttcggcgagttccaggttcttgtcccacgaccaagaggaataacacacgtggacactggagagtgagtaaagcagagtagaattttattgagcgacagaaagacagctctcagtatcaagaggggacccaaaagtgggttgc

SEQ ID NO: 202349 - DNA, 598 bp, Homo sapiens
ttggggtggtggcagtgaaatttagacttgtgatttggtatgacaatatatggctttttgtgattgttaacattaatgaaaacaagaaaaattagttgctcaaaagttgaaaaatggattcataaactttttattagartaaggcaaaagaacatattaaaatagaggtaaattagaaatgtcaataagaacccatggacattttttataaggagactttatctgttctgtccctacagtgatttatgctcttggatatttttgctgtcatcctgacaaattctagttggaatatggaacaagcttatttgtagacctagtgcctgtggcttctaaagcaattttctgaaaagagaaaccactgcctgttggaagaatagttgattccatacctcaagctagggaaaaaaaatcagaattagtctgtgaattctagatgttgagagaaagcagggtttcattagggcatcggagagtcacaagtccataggatgcaaaaaggaagatgaaataaaattgcctgaaaaacgcacctgaatttctggcattgtttactgaaaaggctgtgtattgatgaaccccaattatgtgaggtcta

SEQ ID NO: 202350 - DNA, 414 bp, Homo sapiens
agacctttttttttttttttcaaatagcccttctgagatctgatatgtattaataaggaatgggaccaagggttatgaatacacatgaacttccatatttcatatgaaaacagtattaatatcctctggaagttctcaatttaatgctttatcaaattagattttttcatgtgatatacagcacaaagaacacatctcttctttgagagccgtaraaaaggaggaggatattccttaggctcctttcttgggatgatttatttgattgtgaagatttatatttttagagccagactctggaatttcatttatcaagtttataagcaaaaattcggcttgtaaagctcaaatttactgggagaaatgaaaaaaagaactacagattttctatataatgacagtgaattaactgga

SEQ ID NO: 202351 - DNA, 552 bp, Homo sapiens
tttaacttactattgcttgcattgtttttaagtcttcaaaagtcctcagtctacttgaacacagcttctcttgtgacacttttcctcttctggtctaagtttctttttggtgagctcttggggtcctaataagagaatttctgcagtccagagaaggaggagggarcatctggtaccaaagtaccaaatgtgttcatgagtgtgtgtgtgtgtgtgtgtatgtgtgtgtgtgtgtatgagagagagagagagagagacagagagagagagaagagagagacagaggaaaagagattggtcttccctttttactttttgtagctttcttctttctaccgcttcttgtgttttgggaaaggcgggtttcctcccttcaattccgtatgtctccttgctcaaaaatcatgctgacaggaggtcatggctcctgatacagtaaacctcaggatggtctttgcccatgcaagaggtttggctggcaattcacgttaatttcttctcccttctgacttgaaaaactcaagttgtctgtgaaaatgaaaaaactttagt

SEQ ID NO: 202352 - DNA, 552 bp, Homo sapiens
tttaacttactattgcttgcattgtttttaagtcttcaaaagtcctcagtctacttgaacacagcttctcttgtgacacttttcctcttctggtctaagtttctttttggtgagctcttggggtcctaataagagaatttctgcagtccagagaaggaggagggaacatctggtaccaaagtaccaaatgtgttcatgagtgtgtgtgtgtgtgtgtgtrtgtgtgtgtgtgtgtatgagagagagagagagagagacagagagagagagaagagagagacagaggaaaagagattggtcttccctttttactttttgtagctttcttctttctaccgcttcttgtgttttgggaaaggcgggtttcctcccttcaattccgtatgtctccttgctcaaaaatcatgctgacaggaggtcatggctcctgatacagtaaacctcaggatggtctttgcccatgcaagaggtttggctggcaattcacgttaatttcttctcccttctgacttgaaaaactcaagttgtctgtgaaaatgaaaaaactttagt

SEQ ID NO: 202353 - DNA, 575 bp, Homo sapiens
gccttgaactcctggcctcaagttaatcctcccgcctcagcctcccaaagtgctgggattataggtgtgagccacaatgcctggccagacagctgtatattctaaacattaaagccaccattaggatagaactaatttagaacaatgttatatagtgactttctcatacagggaatgcaacagccagttttgttataccaggacattttttatacaggggaaaaatcaggcttgtgtgtgtatgtgaatatagaatttattttgtcttaaaatctgagcccccgtttaaagttttttaagggactaaccaacttttgctcttcactcttaatgctttttcttttggagcccctttcatggaaccctgcagcactaaacacttttatatttgtaatayatttaaaagataaaaatgaaagtgtctgctcctaaattcatgggcaagtctactcatcacaagtgttgctggccaacagggttaatatttgctgactgggtaaaaaatgaaacagtattaaagataaagtcatttagggttttactgagtatgtaaagactcaaaaatgaaaatgtcc

SEQ ID NO: 202354 - DNA, 392 bp, Homo sapiens
tcacatactagttatttctcaaacagttggagtaagagctarattttctgttatttgtgacgggtgcctgagccgtttgggaaaaggtgaccctagaaggccagaggaattgggaatgcctgggttgcctgtggagagttgagtaacagtctccatgtgctgggcacctgaagaaattactcctgaaggttaatcctaaagtgtttcacttcattatttcccatgggaggagaaactctagctgaacttcgcgacctatgtaggacttggggaagggcttagcagacgtttagggtctttgcaatgaatctgaccctataagtcagctgcagcttctcattggtctatacatacctgtctgggtaaagggctcctttgaatatatctgatca

SEQ ID NO: 202355 - DNA, 511 bp, Homo sapiens
acaaaataaaaccctatctcaaaaaaaaaacagaaagaaaagaaattaaactcatgcttagtcctgtcttgttctgagtttaactagcatttattgacaaaaatgtgtagtaatagaaaaaaagagctattttcatcttacgaaaatatatggtcctgatttttaaaattttagaacttatgtttaataactaggttttaaatacagtatatttatgttgttttatcaagttaaagtactaataattataatgatgactcaatcacaagaaattttgaaattttgaaattttatcttgtataatatgtgttttgcacagaagcattatagaatgctgaataaaagaccrtaaagcagtaagtttattacattagaaaaaaatgtgaaaggagtgaaatgaaaacattagtccaaaggaaaagggaactgatataaaatttctaactgttaaagaatagcttatctagggccgggcacggtggctcacgcctgtaatcccagcactttggga

SEQ ID NO: 202356 - DNA, 611 bp, Homo sapiens
ttttagcattaatgttatatctccagatataatatttgagagacttctttatctttcaaaccctagaacagtttacagaacattgaaatttactgctccttaaaagtttggtagaatcatatggtcaaactatcatgcctcactgaattcttaaagaagcagctctttggtgactttatttattctattaaaataatgtgtttatgttcttaattattctggagtcagttttggtaaattatatttttctaaaaatattttcattttactcagattttcaaagattttcctcagatttgagaaaagtggtctgttatgattgttttaattttttgtttttgtcattatttttctcatatcagtttttatttcattaacctgtttcttcttttttttattatatcaactagtagttttcttttacataagtacaaaagaaagagcgagaaagaaagaacaaaagaaagaaaggagagagggagggagaaaggaaggagggaagggaggaaggaaggaaggaacgaaggaaggaaygaaggaaggaaggaagttagttgctgagtgggcaccaatcactaaactgacttttctgactagtaggttggacgctg

SEQ ID NO: 202357 - DNA, 572 bp, Homo sapiens
tacttcataaacttgttttcatattcatttttcttttcttctttatttctttggattattttgctgttttttttaacattttcagtggggtgcttatttcgtgtactttcactatttattttttcattgatatgagaaccggtgtggttcgaatgatatctcccctccagatctcatattgaaaagtgatccctggaaggtgtttgggccacaggggtgagcccctcataaatgggttggtgccttcctgcactaatgagtgagttctcactctatgagttagcactagatctggtttgaaagatctggcatctctctcttgctccctctctcaccaartgataccctggctcccctttgccttctgccatgattggaagtttcctgaggccttcccagaagcagatgccagccctatgcttcctgtacagcctgcacaaccatgagccaaataaacctcttttctttataaattatccagtctcaggtattcctttacagcaacacaagcagactaacacaagaacttaaggcttttaactttcatctcaacacagcttagctatattcct

SEQ ID NO: 202358 - DNA, 585 bp, Homo sapiens
tcttcccttttgttccccagccctaaggttagtagttgcttcctgtgtttactaacaccgggctgtctccatggccctcttcagccttattacccaacctgtgtaatcagctccctccattaaatcccctctgtttgaaatacctagtgtggcttctggtttcctcctaggtgctattggtgcatacttcaggtggctgtggccattgcttccgttgtctaataggactggaagttgttaatctatcaattgagattattgaccatggtaacagattgaataaatgagttcctcaatgcctatgcctcagggagataacgaatggtgactctaatcaatatccgtataagtaaaaggagagggtaatccattggacccatccatctcccaacacacttcatctgatgtcaatctcastggcaataccattcattcattcactcattcacttactcaacaaatcctattgcatacctgtaaagttccatttgatgtgctgggggaagggaatatggcagtgaggaagccgtgttgtttgagatttaccaggaccaaataagagaataggtgtcatcgtgtagggat

SEQ ID NO: 202359 - DNA, 364 bp, Homo sapiens
cagtgccctaatgttttcataatatgcatgtacatgggaccatgagaaccataagcagggagttattggctctgtaggctatttttttttttttttgagcagttttaggttcacagcaaaattaaggggaaggtacagagatttcctctatattcttgccccartacacacatgcctggccaattttttatttatttatttatttattttactgttctgaaggtatatcagcatgccaactttttagaccttttactatttggaactgaatctgtttataagttagtagtgggtgttaattgtatttgagattctcatatctactctgatacccagcacttgtgtagcatctactatgtgtagg

SEQ ID NO: 202360 - DNA, 571 bp, Homo sapiens
gattattcttttctttttaattagtaaatatttcttgggggaatattttgagatgatacaaatattgtgtttctccttacactttcacctactaattttagcatccattagtcaatgatgcttgcagaaattattattgtggtactctaatagtgattttctattkctctcattacttctacattcattaattggaatgattctttaaggaagattatctcttctactccatttatttatttattcagttatttatttatatcagtataagcccaacaatatttattttattccttggtttataatccaatactattcttatttaccttcttgctcaaataactttggtaggagctcttttaggttagctcctgtgcctttttcacatgttgccaacccctctgagcattttctgacatcacaattttttccaggataaacttctattttctctgtctcagtctcaaatcaatcacctctttaatgagccatggttccttttattggacactttaccagtgtagcctagtacactgatgataattaaaaaacaaaatttggttattacttg

SEQ ID NO: 202361 - DNA, 571 bp, Homo sapiens
gattattcttttctttttaattagtaaatatttcttgggggaatattttgagatgatacaaatattgtgtttctccttacactttcacctactaattttagcatccattagtcaatgatgcttgcagaaattattattgtggtactctaatagtgattttctatttctctcattacttctacattyattaattggaatgattctttaaggaagattatctcttctactccatttatttatttattcagttatttatttatatcagtataagcccaacaatatttattttattccttggtttataatccaatactattcttatttaccttcttgctcaaataactttggtaggagctcttttaggttagctcctgtgcctttttcacatgttgccaacccctctgagcattttctgacatcacaattttttccaggataaacttctattttctctgtctcagtctcaaatcaatcacctctttaatgagccatggttccttttattggacactttaccagtgtagcctagtacactgatgataattaaaaaacaaaatttggttattacttg

SEQ ID NO: 202362 - DNA, 571 bp, Homo sapiens
gattattcttttctttttaattagtaaatatttcttgggggaatattttgagatgatacaaatattgtgtttctccttacactttcacctactaattttagcatccattagtcaatgatgcttgcagaaattattattgtggtactctaatagtgattttctatttctctcattacttctacattcattaattggaatgattctttaaggaagattatctcttctactccatttatttatttattcagttatttatttatatcagtataagcccaacaatatttattttattccttggtttataatccaatactattcttatttaccttcttgctcaaataactttggtaggagctcttttaggttagctcctgtgcctttttcacatgttgccaacycctctgagcattttctgacatcacaattttttccaggataaacttctattttctctgtctcagtctcaaatcaatcacctctttaatgagccatggttccttttattggacactttaccagtgtagcctagtacactgatgataattaaaaaacaaaatttggttattacttg

SEQ ID NO: 202363 - DNA, 571 bp, Homo sapiens
gattattcttttctttttaattagtaaatatttcttgggggaatattttgagatgatacaaatattgtgtttctccttacactttcacctactaattttagcatccattagtcaatgatgcttgcagaaattattattgtggtactctaatagtgattttctatttctctcattacttctacattcattaattggaatgattctttaaggaagattatctcttctactccatttatttatttattcagttatttatttatatcagtataagcccaacaatatttattttattccttggtttataatccaatactattcttatttaccttcttgctcaaataactttggtaggagctcttttaggttagctcctgtgcctttttcacatgttgccaaccyctctgagcattttctgacatcacaattttttccaggataaacttctattttctctgtctcagtctcaaatcaatcacctctttaatgagccatggttccttttattggacactttaccagtgtagcctagtacactgatgataattaaaaaacaaaatttggttattacttg

SEQ ID NO: 202364 - DNA, 511 bp, Homo sapiens
tggacctaacctggatcagtgtattcacctaaattcaggagataccctagtgttggtgtgctttgactcyctcagttaactaatttcagtgggtatcagaaggtgcctccacaggccgttattacctcctcagccattgtcccttacctgggaacagaggatctgaaagtcttcattcgtaatgtcccctgacttcacttatgcactgtcttgagtcctatttgagatattcatttttccttcttagattcccaaaggtcttcaggtaatatattggagccacttcttcatcatattgtctattccttttattgatactgattgactattttgaatcaaaggagtgggaggcaggttgatgtgatgggaaatatttgctcttaagcagagctactaacttgcacatgaagaaagggtaaaaaagattttctgaagccaacttgctttctgaaacagtgctatttctgaggtattgcttttagaggttaaataattttggcaaaggcctaat

SEQ ID NO: 202365 - DNA, 511 bp, Homo sapiens
tggacctaacctggatcagtgtattcacctaaattcaggagataccctagtgttggtgtgctttgactccstcagttaactaatttcagtgggtatcagaaggtgcctccacaggccgttattacctcctcagccattgtcccttacctgggaacagaggatctgaaagtcttcattcgtaatgtcccctgacttcacttatgcactgtcttgagtcctatttgagatattcatttttccttcttagattcccaaaggtcttcaggtaatatattggagccacttcttcatcatattgtctattccttttattgatactgattgactattttgaatcaaaggagtgggaggcaggttgatgtgatgggaaatatttgctcttaagcagagctactaacttgcacatgaagaaagggtaaaaaagattttctgaagccaacttgctttctgaaacagtgctatttctgaggtattgcttttagaggttaaataattttggcaaaggcctaat

SEQ ID NO: 202366 - DNA, 517 bp, Homo sapiens
aatcacatctttatttactttagtggttaaaaacaaattataaacactgcatgacgttttcacaaaagataccacctaattgcaagcaaagataactatgaactctctggcaggatgaggaaaaaaaaaacaaatttgaaactgcaaaatataatcttctccaggtttccatataacytaaaactaaacaggagagaaaagtgaagtaagcattcaaagaaggagaagaaagtgaagggaaggatccaaagaaaggaaaacaaaaacctctccaccatttattgagcacctagtatgttccatatgttttatatctaatatttgtaattccccaaacaaccctccagatagttcctactatccccattttacagatgagaaaattggggaagaatttaagtgaaatccccaacatcatacaataataattttaaaatagcaaactcataatggttaataggactagtagactgcctaataactcagtaacgaaccttgattttgtttggcagtgcta

SEQ ID NO: 202367 - DNA, 517 bp, Homo sapiens
aatcacatctttatttactttagtggttaaaaacaaattataaacactgcatgacgttttcacaaaagataccacctaattgcaagcaaagataactatgaactctctggcaggatgaggaaaaaaaaaacaaatttgaaactgcaaaatataatcttctccaggtttccatataacttaaaactaaacaggagagaaaartgaagtaagcattcaaagaaggagaagaaagtgaagggaaggatccaaagaaaggaaaacaaaaacctctccaccatttattgagcacctagtatgttccatatgttttatatctaatatttgtaattccccaaacaaccctccagatagttcctactatccccattttacagatgagaaaattggggaagaatttaagtgaaatccccaacatcatacaataataattttaaaatagcaaactcataatggttaataggactagtagactgcctaataactcagtaacgaaccttgattttgtttggcagtgcta

SEQ ID NO: 202368 - DNA, 517 bp, Homo sapiens
aatcacatctttatttactttagtggttaaaaacaaattataaacactgcatgacgttttcacaaaagataccacctaattgcaagcaaagataactatgaactctctggcaggatgaggaaaaaaaaaacaaatttgaaactgcaaaatataatcttctccaggtttccatataacttaaaactaaacaggagagaaaagtgaagyaagcattcaaagaaggagaagaaagtgaagggaaggatccaaagaaaggaaaacaaaaacctctccaccatttattgagcacctagtatgttccatatgttttatatctaatatttgtaattccccaaacaaccctccagatagttcctactatccccattttacagatgagaaaattggggaagaatttaagtgaaatccccaacatcatacaataataattttaaaatagcaaactcataatggttaataggactagtagactgcctaataactcagtaacgaaccttgattttgtttggcagtgcta

SEQ ID NO: 202369 - DNA, 511 bp, Homo sapiens
tggacctaacctggatcagtgtattcacctaaattcaggagataccctagtgttggtgtgctttgactccctcagttaactaatttcagtgggtatcagaaggtgcctccacaggccgttattacctcctcagccattgtcccttacctgggaacagaggatctgaaagtcttcattcgtaatgtcccmtgacttcacttatgcactgtcttgagtcctatttgagatattcatttttccttcttagattcccaaaggtcttcaggtaatatattggagccacttcttcatcatattgtctattccttttattgatactgattgactattttgaatcaaaggagtgggaggcaggttgatgtgatgggaaatatttgctcttaagcagagctactaacttgcacatgaagaaagggtaaaaaagattttctgaagccaacttgctttctgaaacagtgctatttctgaggtattgcttttagaggttaaataattttggcaaaggcctaat

SEQ ID NO: 202370 - DNA, 577 bp, Homo sapiens
gtaaagatttgattcttatttaattattgatattcttataattagctaactacagaaatattatggagtcatttgaagaccaactgaatattagacatccatttttaaaggtgcttatgaagaggttgtattgacataagaaaatacttctctaatagcaactgaaagcagcaggaagctaggtcattaattatatggcagaaactcggagtggccagccatcccagctgaagccagttaaccgtcaatgtggcagtcggctcraaggaacttatagctccctctgttatcctcagtcacctccagaggtagcactctcaccaggggctgggacaggagctgggcggggaacaatacacccagctcctgccttgagtaggtaagatatattagtaccctggagagcaattcttggtgctaattttaagactgacaaggaccccctgaacagtagataggagctactgagacaatttatttatgaccacaatagatcccactgacaggaaaggcagatgatatcagtctatatgtgcaaagaatatacacataagatgactgaaggtaaaggcagcca

SEQ ID NO: 202371 - DNA, 436 bp, Homo sapiens
cctagtccattttgtgttgctacaacagaatacctgaaactgggtaatttataaagaaaagaaatttatttggctcacaattctggaggytgggaagtccaagagcatgctgttggcatcttggagggccttagtgctgcattatcccatggtggaactcagaagggtaagagggtgaaagtaaatagaaagaagccaaactcatccctttatcaggaaccaacttctatgataaataacccattcctgtgataaagctgatgcctttatcccattcatgaaggcagagccttcatgccctaatcaccccttaaaggccctacctctcaacattgttgcattggggattaagtttctaacacatgaactttggggtacacactcaagccatagcagtcagtaatcaaaaacctcccaacaaagaaaattccaggtc

SEQ ID NO: 202372 - DNA, 436 bp, Homo sapiens
cctagtccattttgtgttgctacaacagaatacctgaaactgggtaatttataaagaaaagaaatttatttggctcacaattctggaggctgggaagtccaagagcatgctgttggcatcttggagggccttagtgctgcattatcccatggtggaactcagaagggtaagagggtgaaagtaaatrgaaagaagccaaactcatccctttatcaggaaccaacttctatgataaataacccattcctgtgataaagctgatgcctttatcccattcatgaaggcagagccttcatgccctaatcaccccttaaaggccctacctctcaacattgttgcattggggattaagtttctaacacatgaactttggggtacacactcaagccatagcagtcagtaatcaaaaacctcccaacaaagaaaattccaggtc

SEQ ID NO: 202373 - DNA, 472 bp, Homo sapiens
gaattctgtactgttttgcttcttggcatctsttgttccatatgaaaatctcaggcaagagcatctgatgggtcgccctttggtcatatgactgagctctagctgccacagggagggcagacagagtatcagccttttcagcttctgtcacagaagactggacccaaccttccatcaggaccccacagtaatgatttcctcagatacaggaaggagcttcagattgtgggcagccacacattggacgaatgcccccttgagtattcaataccctattccaaatgttttcccttaatctcaccatgaagaaatctctagtttttgtctatctcagcgagatttgcaaatgtttctacttcatattatttgcagaagaaataaacatttatgttcttttcaaaggaggacaggagatgataactcagattaaaatatggaaattaataagtaataagattaagaaaggcttaaa

SEQ ID NO: 202374 - DNA, 612 bp, Homo sapiens
gagcctaaatcataaagacaaaaattgtaacagcaggttagattttatggctygaatttgtcttaaattggcatatatagcattgctgctgggatcccttgaagtggcatatgcaaatcaaaggtaaatatgtcccagacaattaaatattgttctacagtgagatcaatattgataactgagcagtaaccataactcttgatgaaaggataaatttcgtttttattattctgttgtgaaagataattctactgtgaaaaattctgttgtgttcacctagaaagtgattaactaattgaatatctcaataaatatttcttatatatccaaagcataatggaaattcttttaggaaatgaagattgttttaggaaaataggtgacatctggaccacccagaacttgccctctgtgcaagttaatgccttttttagctatgagtcctaatgtaacaacagggcaagggaaggaaagtggagaatcaaaaaaggctacctggccatagaaaacaagaggttgccctggacccgcttctctagtcacttagcccagcaccatgactttttaaaccatctctatgtcggtaattcccaaatctgcatctaggtcctc

SEQ ID NO: 202375 - DNA, 530 bp, Homo sapiens
aagctttctacacatcaaaatgggttgaaaatgagattttttttttgaataaatgtgccttctgagagcgattttccaaagctgtaattyttcttaactgagggatacaacagttagaaattccctaatgcccaactggttgggtttctctctaattcaagttgtcagtcaccaaccaatgaacgaatgaagataacaattatttatatttgtctcttccacagaagatgaatatgtcctaactcatttttctactgagaagatgaaatgtaaagacatgccttttgttcagttgctgtggatttgttaaatacattcttttatttgatgaaattacttttgagggaaggcaaagaccttatatcttactctaataattaccagatgttggcaagagtattacaggcagcaacaggtttcagtgagaatgtaaccatatcatactatgtattatgtagtgcatatattatatataagtattcatctgtaatagcatatcaacttattttttcaaatgcactaattaaacc

SEQ ID NO: 202376 - DNA, 544 bp, Homo sapiens
ccagctaacctacctgctaactgcagccaatgaacacatctggctgagatcagaaaaacctgggccagaccagaggaactgtctgattaatctgaagaaccacgagcaataatagatggttattgtttacagccgcttaattttaggttggtttgttacacagcattactgtgacaatagctaatatttgatattggacatgggcttctgggtgacagcaacagtggtacatattttggatattggcarttttatagctctggttataataactagttttagataataaagactttgtggtattggaagctcagtagtggcatttggaggtatttctggcaacgtggctaatattggtggctttgatgattatggtccttgtgcttttaggtggttattggtattggcagaacttgataggactacccatgtagtatattggggaactcagtttttctgccaggttttggcacagtttgataattaaatgacaacctctaatgccactaagttctagtggaagctcactatacattgttcttgg

SEQ ID NO: 202377 - DNA, 466 bp, Homo sapiens
ctggaaggtaagagatcatttatggcagaactcagttatctagatgaggacatcatagacgccagagcccagctaacctacctgctaactgcagccaatgaacacatctggctgagatcagaaaaacctgggccagaccagaggaactgtctgattaatctgaagaaccacgagcaataatagatggttattgtttacagccgcttaattttaggttggtttgttacacagcattactgtgacaatagctaatatttgatattggacatgggcttctgggtgacagcaacagtggtacatattttggatattggcaattttatagctctggttataataactagttttagataataaagactttgtggtattggaagctcartagtggcatttggaggtatttctggcaacgtggctaatattggtggctttgatgattatggtccttgtgcttttaggtggttat

SEQ ID NO: 202378 - DNA, 544 bp, Homo sapiens
ccagctaacctacctgctaactgcagccaatgaacacatctggctgagatcagaaaaacctgggccagaccagaggaactgtctgattaatctgaagaaccacgagcaataatagatggttattgtttacagccgcttaattttaggttggtttgttacacagcattactgtgacaatagctaatatttgatattggacatgggcttctgggtgacagcaacagtggtacatattttggatattggcaattttatagctctggttataataactagttttagataataaagactttgtggtattggaagctcagtagtggcatttggaggtatttctggcaacgtggctaatattggtggctttgatgattatggtccttgtgcttttaggtggttattggtattggcagaacttgataggactacccatgtagtatattggggaactcagtttttctgccaggttttggcacagtttgataattaaatgacaacctytaatgccactaagttctagtggaagctcactatacattgttcttgg

SEQ ID NO: 202379 - DNA, 548 bp, Homo sapiens
aggtagcctctgttttctgaatgtgaaagaaatattgtcatgctctcgtaagttccaaaataactataaaaaaaagaaatattcattctcttttaagaccattcattaactgtagtaaatttctctttttacattatgttatctaagaactcttgtttctatcccttcctacttaccaaaattatcgtacattctattttagtatagctcttcygtgtgttacttcatttctcatattatttcaacagtagagaaaaaaatagtcatttcccctatcaaactgcaagaattttctactcaaactacaccatttttactcaaacagcaacacatcttattaacacttattctatatgcctctcttccccctgtatttttttttattattatactttaagttctagggcacaagtgtacaacgtgcaggtttgatgcataggtatacatgtgccatgttggtttgctgcacccatcaactcgtcattcacattaggtatttctcctaacgctatccctccctcaggccccaaccctacacaggccccggt

SEQ ID NO: 202380 - DNA, 548 bp, Homo sapiens
aggtagcctctgttttctgaatgtgaaagaaatattgtcatgctctcgtaagttccaaaataactataaaaaaaagaaatattcattctcttttaagaccattcattaactgtagtaaatttctctttttacattatgttatctaagaactcttgtttctatcccttcctacttaccaaaattatcgtacattctattttagtatagctcttctgtgtgttacttcatttctcatattatttcaacagtagagaaaaaaatagtcatttcccctatcaaactgcaagaattttctactcaaactacaccatttttactcaaacagcaacacatcttattaacacttattctatatgcctctcttccccctgtatttttttttattattatactttaagttctagggcacaagtgtacaacgtgcaggtttgatgcataggtatacatgtgccatgttggtttgcygcacccatcaactcgtcattcacattaggtatttctcctaacgctatccctccctcaggccccaaccctacacaggccccggt

SEQ ID NO: 202381 - DNA, 458 bp, Homo sapiens
ctaaattttctgttatttacattttaaatcactcctcccacatcccacaacaggtgttgaatcttgtattaaatcgtgtcccaatttygatccagaaaatacagtgactcgctcaaactatgggtttgagaaggagcacacaaagaggaactggggtctgttgaatatatgagaataactccttgagcagataagaatttgaaccacgccctactttcacacaaagcgagaagatagctgaaatatggtatctgatacttcatgggtgtgcttccctaatgcatatgttatcctatcagttatgtgtatctaatatttcacaggtgtatatgttttcctaatgcatataggctacagaggttacagtcccataaaccttttaaaataaccatgtaacactatagcctttaaaatctgaagtagtaccataaggtactctaaccatatgcagggacaat

SEQ ID NO: 202382 - DNA, 590 bp, Homo sapiens
tttaagaataatttggtgggtgggtggaggccagtgagttgggagtgctgattggttgggtcggaaatgaactcataggaatttgaagctatcttcttgtgctgagtcagttcctgggtgggggccacaagatcagatgagccagtttatggagctgggtggtaccagctgatccatcaagtgcagggtctctaaaatatctcaagcactgatcttaggttttacaatagtgatgttatccccaggagcaatttggtgatggtcagaatcttgtagtctccagctgcatgactcctaaaccttaatttctaatcttgtggctaatttgttagtcctacaaaggcagtctagtcacaggcaagaaggagatttgttttgggaaagagctgttatcatctttgttttaaactatraagtaagttcctcccaaagttagttctgcctatgcccatgaataagcaatgacagcttggaggctagaagcaagatggaattggttaagtcagatctctttcactgtctcagttataattttgcaatggcagtttcattaggccacgttaactaacttctctacacctcagtttctc

SEQ ID NO: 202383 - DNA, 600 bp, Homo sapiens
tctaaacttctacaggcaacttttacacacgagttttcatatctgggttcctgaaggtttttttagagctagctgacaatttaactcttcttgttgttttaagaactgtaaccaagcatttagaaaaagttgttttgagttttctcttgcgcactgaaaagatcaaaatggcgcatctgtgtgatagggatgggtacaaagtatcttataggaggagtgagttgcrtgtgcctcagccaatgagtcggccatatagattatttgctgcctatcacatcgcccacccatatgggcgtggacaatcatttccttcagaggagctgcttctcgtttttgccaggctaagttctgtgtgtccagcctgaatcaataaatgagagagggagagagaatgagcaaacctaaacccaattaaatacaggccaagatggtaaatgctatagataagataaagggtccaaaggaatagggagagttaggggaaagggtgttgtccttttatatagggcagctgaagtgcaacataaatgaaaagaagcagtcagtcctgcaatgctctggaaaagtgttccagacaaaaagtgcaaaggccccaggcga

SEQ ID NO: 202384 - DNA, 410 bp, Homo sapiens
cccaccctcatgattcaattacctcccatggggtccctcccacgacacatggggattatggtaactaaaactcaagatgagatttgggcggagacacagacaaactatattaacacctctttcaaatggcccctcactgtatgtttgaggatattatcatagtaataacaacaaaataataataacaatacctaacattttatagattcttactataagcaaacacaatgctaggtatgttatatatattatgtatttaaaaatctttattacaatttcaagagctacacargtattgttaagcccatttttagctgagaacattgaattatacaaaagttaaataatttgcctgttgatctaataagtagcagagccagactccagaccctcgtctaactagagaacca

SEQ ID NO: 202385 - DNA, 370 bp, Homo sapiens
tcctccaacacctgccacgatgtctcttcccactgtggttctgcactgtattacgacaagcgacttgtctatttcagggaatcaacattaattacagaggctataagaaggaagccaaatgtaaaaataccaagaactcaagaacttccaactccagagaagaatattttaattctaaaaatcctaaagcagattgaaaaaaaagtgtaaaaactcatgcagcacacatgtgaacaagayacaatgaaaaactgctagtaatccttttaccacaagtctgaatgtggcctttagaaagcatttaaggaaattctactcgactatgctcacaccccttcaaatcaaagaactcccaagcacttgcataagt

SEQ ID NO: 202386 - DNA, 323 bp, Homo sapiens
aagatatcggcagtggattggactttgcctgtaaaaaataccaaggcataaaatgacactaacgtcaaacatcctatcacaaaattcacagattaaaaaattcttccctcccaaagaataaacataaaaagttatgttgtttcttgattagttataaagaaatagtaagtggaactatactcttcccttggaatttttcaaagtgcrtagtagcagttcagttgaaagacagaacagatagtttatccacgtggctgacatgcttatccaagcagccatttcctgtacttagagtagcttggactggcttacaaggtgaagag

SEQ ID NO: 202387 - DNA, 323 bp, Homo sapiens
aagatatcggcagtggattggactttgcctgtaaaaaataccaaggcataaaatgacactaacgtcaaacatcctatcacaaaattcacagattaaaaaattcttccctcccaaagaataaacataaaaagttatgttgtttcttgattagttataaagaaatagtaagtggaactatactcttcccttggaatttttcaaagtgcgtagtagcagttcagttgaaagacagaacagatagtttatccacgtggctgacatgcttatccaagcagccatttcctgtrcttagagtagcttggactggcttacaaggtgaagag

SEQ ID NO: 202388 - DNA, 454 bp, Homo sapiens
ctataatagtccctctcttgaagatttaccatgcacattaggacaacacaggtttccagaagctctgaaggcaagaaacctgtttaagtttgtctaattcagtgtttcttacattttgttgaacatggcctgtttattttaatgtgttcctaatactggtctctcaggtgccagatactgtgctaggggcttcagccatgttaactgactacacctccttacagmcttgtgatgttattcctgttttacaaaggaggtcgtaggagttgaaacagttgaagcaacctgtacaaagcatatagttagaaaacggcagtgctagaattaaaacccaggcctgcctgacttctaagctcatgctattcccactgaattatgtggcctctcaataggtcattttggttttcacgtggttgaggtcaagatcatctgcttgataaggagagtcacaaga

SEQ ID NO: 202389 - DNA, 454 bp, Homo sapiens
ctataatagtccctctcttgaagatttaccatgcacattaggacaacacaggtttccagaagctctgaaggcaagaaacctgtttaagtttgtctaattcagtgtttcttacattttgttgaacatggcctgtttattttaatgtgttcctaatactggtctctcaggtgccagatactgtgctaggggcttcagccatgttaactgactacacctccttacagcmttgtgatgttattcctgttttacaaaggaggtcgtaggagttgaaacagttgaagcaacctgtacaaagcatatagttagaaaacggcagtgctagaattaaaacccaggcctgcctgacttctaagctcatgctattcccactgaattatgtggcctctcaataggtcattttggttttcacgtggttgaggtcaagatcatctgcttgataaggagagtcacaaga

SEQ ID NO: 202390 - DNA, 523 bp, Homo sapiens
gaattcttaatttggataagatatgtcacctctaggtctctcctaagctttgggtttcttagccatgaaagcagaatttatgactcagttatctgggattcaacttccaaagcctctctcttgaagagatcacagattttgtaccttaccartaagaaacaaatattaaagaacgggcaactctagaaggtcacttgcccagagctaattttttaagatgactatttgggtcctttgtatctgaaagttggttgagagcttcccttcaggataggggacaggacaaggtgggctctttgaatcctggctgtgtccctcactctctgtgcctctgtggctcagtttctccacatatcaacaggaaatagtgtatcttatgtctttgggctgaactgagtaccagatgagatcctggatatttcattctcttattccaaagtattatgggtctataaaaccccacaaagacaactatgaagcagagctaggaaagcagatgacaagatttatgaagtatgtagag

SEQ ID NO: 202391 - DNA, 523 bp, Homo sapiens
gaattcttaatttggataagatatgtcacctctaggtctctcctaagctttgggtttcttagccatgaaagcagaatttatgactcagttatctgggattcaacttccaaagcctctctcttgaagagatcacagattttgtaccttaccagtaagaaacaaatattaaagaacgggcaactctagaaggtcacttgcccagagctaattttttaagatgactatttgggtyctttgtatctgaaagttggttgagagcttcccttcaggataggggacaggacaaggtgggctctttgaatcctggctgtgtccctcactctctgtgcctctgtggctcagtttctccacatatcaacaggaaatagtgtatcttatgtctttgggctgaactgagtaccagatgagatcctggatatttcattctcttattccaaagtattatgggtctataaaaccccacaaagacaactatgaagcagagctaggaaagcagatgacaagatttatgaagtatgtagag

SEQ ID NO: 202392 - DNA, 523 bp, Homo sapiens
gaattcttaatttggataagatatgtcacctctaggtctctcctaagctttgggtttcttagccatgaaagcagaatttatgactcagttatctgggattcaacttccaaagcctctctcttgaagagatcacagattttgtaccttaccagtaagaaacaaatattaaagaacgggcaactctagaaggtcacttgcccagagctaattttttaagatgactatttgggtcctttgtatctgaaagttggttgagagcttcccttcaggataggggacaggacaaggtgggctctttgaatcctggctgtgtccctcactctctgtgcctckgtggctcagtttctccacatatcaacaggaaatagtgtatcttatgtctttgggctgaactgagtaccagatgagatcctggatatttcattctcttattccaaagtattatgggtctataaaaccccacaaagacaactatgaagcagagctaggaaagcagatgacaagatttatgaagtatgtagag

SEQ ID NO: 202393 - DNA, 529 bp, Homo sapiens
cctctaggtctctcctaagctttgggtttcttagccatgaaagcagaatttatgactcagttatctgggattcaacttccaaagcctctctcttgaagagatcacagattttgtaccttaccagtaagaaacaaatattaaagaacgggcaactctagaaggtcacttgcccagagctaattttttaagatgactatttgggtcctttgtatctgaaagttggttgagagcttcccttcaggataggggacaggacaaggtgggctctttgaatcctggctgtgtccctcactctctgtgcctctgtggctcagtttctccacatatcaacaggaaatagtgtatcttatgtctttgggctgaactgagtaccagatgagatcctggatatttcattcycttattccaaagtattatgggtctataaaaccccacaaagacaactatgaagcagagctaggaaagcagatgacaagatttatgaagtatgtagaggaaacttgagtgtctgccctatgttgtagaattc

SEQ ID NO: 202394 - DNA, 589 bp, Homo sapiens
attatgggtctataaaaccccacaaagacaactatgaagcagagctaggaaagcagatgacaagatttatgaagtatgtagaggaaacttgagtgtctgccctatgttgtagaattcatttgtcctgccccctggcttcaattcttcaaattgtggacttacaaaagggggatgaaaaagtttgaggagataggaagaaagcttagactttggattagaaatcttattatgaaacattatgaaaataattgtatcttttcatcccaattgtatgtttggtttgaatttaggtgctagtgtaggctttttggcccctctcttccctttagggttcccaagttagaagatctttccttattcttcttctctttccaggggaagctatagaactctgtggctagaagtgagctgtggatgrtgttcactttcaagatgattgtgcaatcctccatgttcagaatctgcctgtaagctgctgtggccttgagagggtggtgaacttggaggaaggattttcgtaaaatggcatagaatgggagaatagtgaacaactgcgccagggacctgagagcaaggagcaaagctcttg

SEQ ID NO: 202395 - DNA, 417 bp, Homo sapiens
tggtataacaaaaaaattcatataacattttttgtagaaataaacatagactatttctttggttagatctataaaaaggattggcaatctatgacctgccaacctggtttgcataacatcaccattgagatcaaattcatataccataaaatctacccatttacgtataaaatgtaatgattttttggtatattcagatctgtgtatccactaccacaatctaagtttagaatattctcatcacycccaaaagaaaccccaaaccattagcagtaattatccattcctgctcacggctactcccagcccccagtaactactaatctactttctgtctccattgatatgcctattctggacatttcatataaatggaatcacataatatgtggtctttcatgactggcttattttatt

SEQ ID NO: 202396 - DNA, 417 bp, Homo sapiens
tggtataacaaaaaaattcatataacattttttgtagaaataaacatagactatttctttggttagatctataaaaaggattggcaatctatgacctgccaacctggtttgcataacatcaccattgagatcaaattcatataccataaaatctacccatttacgtataaaatgtaatgattttttggtatattcagatctgtgtatccactaccacaatctaagtttagaatattctcatcactcccaaaagaaaccccaaaccattagcagtaattatccattcctgctcackgctactcccagcccccagtaactactaatctactttctgtctccattgatatgcctattctggacatttcatataaatggaatcacataatatgtggtctttcatgactggcttattttatt

SEQ ID NO: 202397 - DNA, 588 bp, Homo sapiens
cttttattttatttctttggggaggctgttgttcaacaacactggctcaggtgaatagcagtgagcattargcgggtttgtggacctggtggggccccagtaagccagactttagccagttcccatttattacttgatacgcgataagctccactttaacaggtgataatgatgatgctttgatgatatttccaggagttaatatcaactcaaatcatatatccaataatcttcaaagtctccaggtattttccatattccaggaaaatctaagtatttctgcttcaatcagtgtgggcttttgctttttcaggttcaaaaaagttacctgaggtaggcagaataatgccccctccccctaaaggtgtctatatcctaatccccagaacttgtgaacatattattttacatggcaaaatgaactttgcaggtagggataaatcaaggatcttgggatagcgagattatcctgtattattcaggtgtatcccagtatcccattataacaacaagggtccctgtaagtgaaaaacagaagtaggatggttagagaggaagagaaatttgaagatgctacacttgattttg

SEQ ID NO: 202398 - DNA, 325 bp, Homo sapiens
tttctgcttcaatcagtgtgggcttttgctttttcaggttcmaaaaagttacctgaggtaggcagaataatgccccctccccctaaaggtgtctatatcctaatccccagaacttgtgaacatattattttacatggcaaaatgaactttgcaggtagggataaatcaaggatcttgggatagcgagattatcctgtattattcaggtgtatcccagtatcccattataacaacaagggtccctgtaagtgaaaaacagaagtaggatggttagagaggaagagaaatttgaagatgctacacttgattttgaagatggatgaag

SEQ ID NO: 202399 - DNA, 588 bp, Homo sapiens
cttttattttatttctttggggaggctgttgttcaacaacactggctcaggtgaatagcagtgagcattaggcgggtttgtggacctggtggggccccagtaagccagactttagccagttcccatttattacttgatacgcgataagctccactttaacaggtgataatgatgatgctttgatgatatttccaggagttaatatcaactcaaatcatatatccaataatcttcaaagtctccaggtattttccatattccaggaaaatctaagtatttctgcttcaatcagtgtgggcttttgctttttcaggttcaaaaaagttacctgaggtaggcagaataatgccccctccccctaaaggtgtctatatcctaatccccagaacttgtgaacatattattttacatggcaaaatgaactttgcaggtagggataaatcaaggatcttgggatagcgagattatcctgtattattcaggtgtatccmagtatcccattataacaacaagggtccctgtaagtgaaaaacagaagtaggatggttagagaggaagagaaatttgaagatgctacacttgattttg

SEQ ID NO: 202400 - DNA, 530 bp, Homo sapiens
ctgctggttttccaggtttgtacatgaccatgtaccgcacccgctgcccccagacctaagcaaccactaatatttctgtctccatattttcctattctggacacttaatacaaatggaatcatataatatgtggcattttttgttggcttctttcacttagcatcatctttcaaaggttcattgayattgtagcatgcatttttttttttgagacagaattttgctcttgtcacccaggctggagtacagtggcaccatctcagcttactgcaacctccacctgtcaagttcaagctattctcctgcctcagcctcccaagtagctgagactacaggcacctgccaccacgcttggctaatttttgtatttttagtagagatggggtttcaccatttggccatggtggtctggaattcctgacctcaagtgatccgcccgcctcagcctcccagagtgctgggattacaggtgtgagccactgctcccagcctcattctttttttatggttgaataatattccattgtat

SEQ ID NO: 202401 - DNA, 530 bp, Homo sapiens
ctgctggttttccaggtttgtacatgaccatgtaccgcacccgctgcccccagacctaagcaaccactaatatttctgtctccatattttcctattctggacacttaatacaaatggaatcatataatatgtggcattttttgttggcttctttcacttagcatcatctttcaaaggttcattgacattgtagcatgcatttwtttttttgagacagaattttgctcttgtcacccaggctggagtacagtggcaccatctcagcttactgcaacctccacctgtcaagttcaagctattctcctgcctcagcctcccaagtagctgagactacaggcacctgccaccacgcttggctaatttttgtatttttagtagagatggggtttcaccatttggccatggtggtctggaattcctgacctcaagtgatccgcccgcctcagcctcccagagtgctgggattacaggtgtgagccactgctcccagcctcattctttttttatggttgaataatattccattgtat

SEQ ID NO: 202402 - DNA, 606 bp, Homo sapiens
aattcttgccattcctttgaagtatatataatcctttccctcttatgaagcccagtgtgtcctgagctgggttatgttggatataatcgtacccactgsggtggtgtgggagtaagaagaggagatgggagcatgtcttttggaagttacctgttgccttgtggagttaaagcttctgcagtgtcttccacataagtgaagtgctggttcttactgtggtgcagtgggccacctctgcaaggtctggatagtctccagagccaaaatccttgtggccatccactcagatatccccatcccatattctagggttccatcttttcctaaccagagtcctggccttagtataactgacctactttggctgtgtatttaaatgtctctggagttctgcatttctaactattaagttctgaatctgctccttggccatgtcttcttttttattgtaagagataaattaacaaagaggctccgtggtttcctcacttagcttgtagctggttgccagtcatcgtcactttcacatgatgtccctgtgaagcattataataacttgataactatttaccagctctgctgtctttgcatgtgtaggtcccagat

SEQ ID NO: 202403 - DNA, 606 bp, Homo sapiens
aattcttgccattcctttgaagtatatataatcctttccctcttatgaagcccagtgtgtcctgagctgggttatgttggatataatcgtacccactggggtggtgtgggagtaagaagaggagatgggagcatgtcttttggaagttacctgttgycttgtggagttaaagcttctgcagtgtcttccacataagtgaagtgctggttcttactgtggtgcagtgggccacctctgcaaggtctggatagtctccagagccaaaatccttgtggccatccactcagatatccccatcccatattctagggttccatcttttcctaaccagagtcctggccttagtataactgacctactttggctgtgtatttaaatgtctctggagttctgcatttctaactattaagttctgaatctgctccttggccatgtcttcttttttattgtaagagataaattaacaaagaggctccgtggtttcctcacttagcttgtagctggttgccagtcatcgtcactttcacatgatgtccctgtgaagcattataataacttgataactatttaccagctctgctgtctttgcatgtgtaggtcccagat

SEQ ID NO: 202404 - DNA, 606 bp, Homo sapiens
aattcttgccattcctttgaagtatatataatcctttccctcttatgaagcccagtgtgtcctgagctgggttatgttggatataatcgtacccactggggtggtgtgggagtaagaagaggagatgggagcatgtcttttggaagttacctgttgccttgtggagttaaagcttctgcagtgtcttccacataagtgaagtgctggttcttactgtggtgcagtgggccacctctgcaaggtctggatagtctccagagccaaaatccttgtggccatccactcagatatccccatcccatattctagggttccatcttttcctaaccagagtcctggccttagtataactgacctactttggctgtgtatttaaatgtctctggagttctgcatttctaactattaagttctgaatctgctccttggccatgtcttcttttttattgtaagagataaattaacaaagaggctccgtggtttcctcacttagcttgtagctggttgccagtcatcstcactttcacatgatgtccctgtgaagcattataataacttgataactatttaccagctctgctgtctttgcatgtgtaggtcccagat

SEQ ID NO: 202405 - DNA, 606 bp, Homo sapiens
aattcttgccattcctttgaagtatatataatcctttccctcttatgaagcccagtgtgtcctgagctgggttatgttggatataatcgtacccactggggtggtgtgggagtaagaagaggagatgggagcatgtcttttggaagttacctgttgccttgtggagttaaagcttctgcagtgtcttccacataagtgaagtgctggttcttactgtggtgcagtgggccacctctgcaaggtctggatagtctccagagccaaaatccttgtggccatccactcagatatccccatcccatattctagggttccatcttttcctaaccagagtcctggccttagtataactgacctactttggctgtgtatttaaatgtctctggagttctgcatttctaactattaagttctgaatctgctccttggccatgtcttcttttttattgtaagagataaattaacaaagaggctccgtggtttcctcacttagcttgtagctggttgccagtcatcgtcactttcacatgatrtccctgtgaagcattataataacttgataactatttaccagctctgctgtctttgcatgtgtaggtcccagat

SEQ ID NO: 202406 - DNA, 287 bp, Homo sapiens
caaactcattggccaaacattcctatgtctattgttgcaagggttaatattcttagaagataacttacttgattaaatagaacaaaatctataaaggcaccctaaattatagaatttataataaataatgtccaaaatatgagtatagcaaaaaaccttttattagaartcattaaatgaatttttactttcagggggaagttgctgaagttatatttgtaggtgctaacccgaagaattcagtacaaaaccaggtaggtatcaatgattttcttttacaaatgtaa

SEQ ID NO: 202407 - DNA, 427 bp, Homo sapiens
cccccatatcctctccatctaaggcttccccaatgtcatttgccataaatagacagaaataactctctttacaggttcctatggttatgaaaacttccttattgaatgtaattcatcagttgaatacttaaagaagaattttaaacaattacatggcccacatgtaaataggtgatacatttagcaaggggttatttgagcaccagtaaatgacagatgtaaagaactgtgataaatataagtgaattagacatgtaccttttagggtcacaatctcaaggatttaaaaggatactagaaatktatagcctttgtctttattaacttgtcatatcattcaaatctgtgctttgtttgaagctgaattcttggtctgaaacaaattcttctattataataatcttccaatggggaaataaaatctttt

SEQ ID NO: 202408 - DNA, 304 bp, Homo sapiens
aactcgtaaggctggaactctgaaccctatctaaagggagagaatggtcttcattggctatacttgccattttagcaggtacaacaaacaaacaaacaaaaaacaaaagaaatcatagatttggaaatatgaaattgacataagcaaaagaagtctcttaataaattcaattccatgggtttgtctatggacaggkttatagccctgaagacagaaggatgacactaagtggtactggaaactgggagtcaaggtaagtttttggttatagaaagtgtattttattattagagcaaatggcaaa

SEQ ID NO: 202409 - DNA, 606 bp, Homo sapiens
tccctctacatggaatagtctatttgcccagtacacaaacacaaacacamactaatacacacatacatgcacacaccattgcctttcttctagctaatttctacatatcttttaagtcttagcttatatgttatttcttccaggaaacttactgaaacatccccaagaccatattaggtgccctctctaattccctgaacaataacaatatgggtcactctgtacagtaattacctgttcatccgtttgctttgttcgttaaacgctaagttccttttggcagggaatagctttgccttcattattgtttcattcttaggatttagcataatttctgccataaagtatataggtgcttgatataaatctgttaaaggaacgtatacattttgcaatacagaaagcaatttttttcgtcattattccaatgtgtgttcttttccaaaatatattttctagagtaaaacgagttctaattatttcaaagagcagttaatttggatatgcagatattattgcttgcccactgtggtaacctttagggctgcttgcaaatatcctggttctgtcacctgcccagtgaaaaatgcacagtaatgtggaagc

SEQ ID NO: 202410 - DNA, 606 bp, Homo sapiens
tccctctacatggaatagtctatttgcccagtacacaaacacaaacacacactaatacacacatacatgcacacaccattgccttycttctagctaatttctacatatcttttaagtcttagcttatatgttatttcttccaggaaacttactgaaacatccccaagaccatattaggtgccctctctaattccctgaacaataacaatatgggtcactctgtacagtaattacctgttcatccgtttgctttgttcgttaaacgctaagttccttttggcagggaatagctttgccttcattattgtttcattcttaggatttagcataatttctgccataaagtatataggtgcttgatataaatctgttaaaggaacgtatacattttgcaatacagaaagcaatttttttcgtcattattccaatgtgtgttcttttccaaaatatattttctagagtaaaacgagttctaattatttcaaagagcagttaatttggatatgcagatattattgcttgcccactgtggtaacctttagggctgcttgcaaatatcctggttctgtcacctgcccagtgaaaaatgcacagtaatgtggaagc

SEQ ID NO: 202411 - DNA, 606 bp, Homo sapiens
tccctctacatggaatagtctatttgcccagtacacaaacacaaacacacactaatacacacatacatgcacacaccattgcctttcttctagctaatttctacatatcttttaagtcttagcttatatgttatttcttccaggaaacttactgaaacatccccaagaccatattaggtgccctctctaattccctgaacaataacaatatgggtcactctgtacagtaattacctgttcatccgtttgctttgttcgttaaackctaagttccttttggcagggaatagctttgccttcattattgtttcattcttaggatttagcataatttctgccataaagtatataggtgcttgatataaatctgttaaaggaacgtatacattttgcaatacagaaagcaatttttttcgtcattattccaatgtgtgttcttttccaaaatatattttctagagtaaaacgagttctaattatttcaaagagcagttaatttggatatgcagatattattgcttgcccactgtggtaacctttagggctgcttgcaaatatcctggttctgtcacctgcccagtgaaaaatgcacagtaatgtggaagc

SEQ ID NO: 202412 - DNA, 606 bp, Homo sapiens
tccctctacatggaatagtctatttgcccagtacacaaacacaaacacacactaatacacacatacatgcacacaccattgcctttcttctagctaatttctacatatcttttaagtcttagcttatatgttatttcttccaggaaacttactgaaacatccccaagaccatattaggtgccctctctaattccctgaacaataacaatatgggtcactctgtacagtaattacctgttcatccgtttgctttgttcgttaaacgctaagttccttttggcagggaatagctttgccttcattattgtttcattcttaggatttagcataatttctgccataaagtatataggtgcttgatataaatctgttaaaggaacgtatacattttgcaatacagaaagcaatttttttcrtcattattccaatgtgtgttcttttccaaaatatattttctagagtaaaacgagttctaattatttcaaagagcagttaatttggatatgcagatattattgcttgcccactgtggtaacctttagggctgcttgcaaatatcctggttctgtcacctgcccagtgaaaaatgcacagtaatgtggaagc

SEQ ID NO: 202413 - DNA, 482 bp, Homo sapiens
atttccctctccgataccctatcactctaaaattttggaagccaatataaaccagcaagtcaggttggatacccaggaagcaagagcatcatttggaagaactaaacacatgagaagttcatctagtgatgaaaccttttggctaaagatagaatccatgcgctaatcttagaaaaagacagtaagcttgcttacattggaggagaagcataagagggcacattagaaaaggacattcataagtaaattcattcttggtctttttgttcagaattagygcatgaaacaatttcatagttagctacctgcctaggaaatttttttgcccaactagtaaaaaagagaaagaaaataaaagaaatgccaaccatacatgtgttttaccagcagtacatcttcagaagttagaaaggaactgataaagaagtggttcccttgtgcttcagtggttatttacaagtcatttgtatcactttccaacc

SEQ ID NO: 202414 - DNA, 482 bp, Homo sapiens
atttccctctccgataccctatcactctaaaattttggaagccaatataaaccagcaagtcaggttggatacccaggaagcaagagcatcatttggaagaactaaacacatgagaagttcatctagtgatgaaaccttttggctaaagatagaatccatgcgctaatcttagaaaaagacagtaagcttgcttacattggaggagaagcataagagggcacattagaaaaggacattcataagtaaattcattcttggtctttttgttcagaattagcgcakgaaacaatttcatagttagctacctgcctaggaaatttttttgcccaactagtaaaaaagagaaagaaaataaaagaaatgccaaccatacatgtgttttaccagcagtacatcttcagaagttagaaaggaactgataaagaagtggttcccttgtgcttcagtggttatttacaagtcatttgtatcactttccaacc

SEQ ID NO: 202415 - DNA, 558 bp, Homo sapiens
atttcaggagtttctgccacatggtttggctccagtgagccagtccctgcagcatccacagacaygaattggatctgtgtttttatatcaacagataagttcaattacttcatgatattcttttatgcacaggtaaagaactgatattgataatccaggaatttggttttgtttttacacatgaactgcgaacatagaactgcatgccctagaagaaatgacagctggtgagaaaataggtttctgtgcgttatctggagccaagagtgctaggtgcagaaggatcagtagatgatacagtggccaccttggtacagttgccagtgagctatcaggaatcacaagtagatttgaggaaagcttcaatagaaggaatagaggtagtggaaactgattcatgaacccttctgagtaataacaaatactttaaaaaaccatatcatgagttctaatataattttcttgtctggaatcagctactttcaggatcacttgttcttttaggcttctgaacttttacactgaagactgtggcgtcattagaaaaaagatcacaac

SEQ ID NO: 202416 - DNA, 558 bp, Homo sapiens
atttcaggagtttctgccacatggtttggctccagtgagccagtccctgcagcatccacagacatgaattggatctgtgtttttatatcaacagataagttcaattacttcatgatattcttttatgcacaggtaaagaactgatattgataatccaggaatttggttttrtttttacacatgaactgcgaacatagaactgcatgccctagaagaaatgacagctggtgagaaaataggtttctgtgcgttatctggagccaagagtgctaggtgcagaaggatcagtagatgatacagtggccaccttggtacagttgccagtgagctatcaggaatcacaagtagatttgaggaaagcttcaatagaaggaatagaggtagtggaaactgattcatgaacccttctgagtaataacaaatactttaaaaaaccatatcatgagttctaatataattttcttgtctggaatcagctactttcaggatcacttgttcttttaggcttctgaacttttacactgaagactgtggcgtcattagaaaaaagatcacaac

SEQ ID NO: 202417 - DNA, 558 bp, Homo sapiens
atttcaggagtttctgccacatggtttggctccagtgagccagtccctgcagcatccacagacatgaattggatctgtgtttttatatcaacagataagttcaattacttcatgatattcttttatgcacaggtaaagaactgatattgataatccaggaatttggttttgtttytacacatgaactgcgaacatagaactgcatgccctagaagaaatgacagctggtgagaaaataggtttctgtgcgttatctggagccaagagtgctaggtgcagaaggatcagtagatgatacagtggccaccttggtacagttgccagtgagctatcaggaatcacaagtagatttgaggaaagcttcaatagaaggaatagaggtagtggaaactgattcatgaacccttctgagtaataacaaatactttaaaaaaccatatcatgagttctaatataattttcttgtctggaatcagctactttcaggatcacttgttcttttaggcttctgaacttttacactgaagactgtggcgtcattagaaaaaagatcacaac

SEQ ID NO: 202418 - DNA, 526 bp, Homo sapiens
tttggacccctgcttaaatgttcctcctcctggccatcctgcacaggacatcacatatgcatgcatgcacacacacgacacacatgggtatatgggcacgcacacatacacacacctgtgcacataccgaycaaccttctcttagttgttacctaacacattgtgtatttaatggtctctgtttttatccgtctctcccgccagaatgtaaattcaggaaggcaaggactttatcttttttgctcattgcagtgctctcggcttccagcactgttcctggtacctggtagctgccatgaattactttttaagtgagttcaggctgcagccatcgaggcaaggcacactggaagacacacacattcacacacacattcacacacacattcacccagacatactcacacacatacacacacacacacactcacacacattcacatttaaaagctaaaccaactggccggacatggtggtttatgcctgtaatcccagcactttgggaggccaaggtaggcagatctct

SEQ ID NO: 202419 - DNA, 585 bp, Homo sapiens
tggtctgagaggtaagaaggaatgagaagaaagggaatcacagccagacatctcaggaaatctcagaacatactctatgaaatcatcattcattggccccttcctcccccaagtgtcagaaccttgtagtacaaataaatgaatatttttagagtgcttactctgggggccaaagaccataagtctaatcatccacagaccatctcagtctacagacccttttctttgagctgcacatttttaaaatttgaatttcaaaaaattagccaggtgcagttgtgcacacctgcgttcccagctacttgggaggctgagatgggagaattgcttgagcccgggagtttgagactgcagtgagccatgatggcaccactgcactccagtctgggggatagagcgagaccctgtctttaaaaaaaaaaaaaaatgaattccaacgtctttggcagaagagagggcacttctggaatgatcaagtcaggacctctgaaaatccactcctccrtaagagcaatgagaacactagcaaaaattgtcaaaattgatgttttcagtactccgggagttaatcaaaggcttacaaca

SEQ ID NO: 202420 - DNA, 548 bp, Homo sapiens
ggaaaaacttgcaagaaagaattctaggaaattagaaatatttgttaaaatgaaaaaaatcaacggtagacctgaaagcacaaaattatagatgctctgtctggtgatactaatgatatattcataagtaatatgcatatgatatagttatatattatgtaagataaaaatatataaaatacatataaataaatttattaaaaaatacatttgcaacatgatgcaccaaattcccaaaatcttcagcatgcatctttccaaaccaaggacactcttctacataaccagcatacaactcttccagtcaggaaataagaaatcagctctaacactaacatctaatccaaagaatatattcatattttgccagctgtcctaacagtgtctctttcctgtctaggccaggatcacactttgtacttcatacacaagtctctttagtctctttcaatctggaataattccttggkctctccctgtgtttcatgatctcattagtttgaaagagtgcagacctttcagtctctaggacgaagctcagcctggtt

SEQ ID NO: 202421 - DNA, 574 bp, Homo sapiens
tgggagtggggaagctagttctaagaacccctagtttggaacttctgcagggaagggtctcttggcccgtgggcaggaatgaagttcaggcccactgattacatccatccttcccgctccctgcctccccgctccccacacaccccagattcctctccagccacagtttacttttccggcggatctgggggtgggtggtaggttgggggcggaggggggaacttttagattggaataaaataaactccctctagaggsgtgggggtggagagcgtacaggagacgtcggctctgccactgtctagcccgtggccttgcggagttacgaggtgctcccggcctcggtctacccatctgtaaactggggcggtggggcgaggtggggatctctacgctcggctctgccggcttgagtcgtccgcgcctttagggaccgtgctggaagcggggcggggagggcgctggcgggagagggctgggggcggagagcggcggaggcgcagtcgccgggtcacagtccgcagggaggcccccaggccgctgcgccaggctccaggcgggggaggaggcggcg

SEQ ID NO: 202422 - DNA, 574 bp, Homo sapiens
tgggagtggggaagctagttctaagaacccctagtttggaacttctgcagggaagggtctcttggcccgtgggcaggaatgaagttcaggcccactgattacatccatccttcccgctccctgcctccccgctccccacacaccccagattcctctccagccacagtttacttttccggcggatctgggggtgggtggtaggttgggggcggaggggggaacttttagattggaataaaataaactccctctagaggggtgggggtgragagcgtacaggagacgtcggctctgccactgtctagcccgtggccttgcggagttacgaggtgctcccggcctcggtctacccatctgtaaactggggcggtggggcgaggtggggatctctacgctcggctctgccggcttgagtcgtccgcgcctttagggaccgtgctggaagcggggcggggagggcgctggcgggagagggctgggggcggagagcggcggaggcgcagtcgccgggtcacagtccgcagggaggcccccaggccgctgcgccaggctccaggcgggggaggaggcggcg

SEQ ID NO: 202423 - DNA, 574 bp, Homo sapiens
tgggagtggggaagctagttctaagaacccctagtttggaacttctgcagggaagggtctcttggcccgtgggcaggaatgaagttcaggcccactgattacatccatccttcccgctccctgcctccccgctccccacacaccccagattcctctccagccacagtttacttttccggcggatctgggggtgggtggtaggttgggggcggaggggggaacttttagattggaataaaataaactccctctagaggggtgggggtggagagcgtacaggagacgtcggctctgccactgtctagcccgtggccttgcggagttacgaggtgctcccggcctcggtctacccatctgtaaactggggcggtggggcgaggtggggatctctacgctcggctctgccggcttgagtcgtccgcgcctttagggaccgtgctggaagcggggcggggagggcgctggcgggagagggctgggggcggagagcggcggaggcgcagtcgccgggtcasagtccgcagggaggcccccaggccgctgcgccaggctccaggcgggggaggaggcggcg

SEQ ID NO: 202424 - DNA, 622 bp, Homo sapiens
acttgctagcagacctacctgccacccagaactaaattcaatgaaactttatttcatcccttataaagcatctctcattttgtggactgggattgattccttyaaaaggtgcccttacagataccacatctgcaatggtccaatcataagggtaaccactcttggtaaactatgtacatgctttgcttgagggcattaaagatcaatatgtccatggactggcctcttctcaaaacccaaccaccagccagttgcctttaccataactcttatccttaaaagccacatctgatggcatggccatgatggctaagttgggtgcctgatgaatccagacagaaatttaatagtaggcccaagttacaagattccagttctggaaagtcagcccacgtccatctgaaagagcctatggtgcagtggtgacaggtgggagctcccaaggacactgcctggtttaaatcccagtcattccacccaccagctgtgagacattgggcaagctcttcacactttttggtctcagtttcttcctctgtagaatgagagtgataataacggctaacttcacagtgtaagaattaaatgaattagtatttgagaacttcttagacctggacct

SEQ ID NO: 202425 - DNA, 622 bp, Homo sapiens
acttgctagcagacctacctgccacccagaactaaattcaatgaaactttatttcatcccttataaagcatctctcattttgtggactgggattgattccttcaaaaggtgcccttacarataccacatctgcaatggtccaatcataagggtaaccactcttggtaaactatgtacatgctttgcttgagggcattaaagatcaatatgtccatggactggcctcttctcaaaacccaaccaccagccagttgcctttaccataactcttatccttaaaagccacatctgatggcatggccatgatggctaagttgggtgcctgatgaatccagacagaaatttaatagtaggcccaagttacaagattccagttctggaaagtcagcccacgtccatctgaaagagcctatggtgcagtggtgacaggtgggagctcccaaggacactgcctggtttaaatcccagtcattccacccaccagctgtgagacattgggcaagctcttcacactttttggtctcagtttcttcctctgtagaatgagagtgataataacggctaacttcacagtgtaagaattaaatgaattagtatttgagaacttcttagacctggacct

SEQ ID NO: 202426 - DNA, 622 bp, Homo sapiens
acttgctagcagacctacctgccacccagaactaaattcaatgaaactttatttcatcccttataaagcatctctcattttgtggactgggattgattccttcaaaaggtgcccttacagataccacatctgcaatggtccaatcataagggtaaccactcttggtaaactatgtacatgctttgcttgagggcattaaagatcaatatgtccatggactggcctcttctcaaaacccaaccaccagccagttgcctttaccataactcttatccttaaaagccacatctgatggcatggccatgatggctaagttgggtgcctgatgaatccagacagaaatttaatagtaggcccaagttacaagattccagttctggaaagtcagcccacgtccatctgaaagagcctatggtgcagtggtgacaggtgggagctcccaaggacactgcctggtktaaatcccagtcattccacccaccagctgtgagacattgggcaagctcttcacactttttggtctcagtttcttcctctgtagaatgagagtgataataacggctaacttcacagtgtaagaattaaatgaattagtatttgagaacttcttagacctggacct

SEQ ID NO: 202427 - DNA, 622 bp, Homo sapiens
acttgctagcagacctacctgccacccagaactaaattcaatgaaactttatttcatcccttataaagcatctctcattttgtggactgggattgattccttcaaaaggtgcccttacagataccacatctgcaatggtccaatcataagggtaaccactcttggtaaactatgtacatgctttgcttgagggcattaaagatcaatatgtccatggactggcctcttctcaaaacccaaccaccagccagttgcctttaccataactcttatccttaaaagccacatctgatggcatggccatgatggctaagttgggtgcctgatgaatccagacagaaatttaatagtaggcccaagttacaagattccagttctggaaagtcagcccacgtccatctgaaagagcctatggtgcagtggtgacaggtgggagctcccaaggacactgcctggttyaaatcccagtcattccacccaccagctgtgagacattgggcaagctcttcacactttttggtctcagtttcttcctctgtagaatgagagtgataataacggctaacttcacagtgtaagaattaaatgaattagtatttgagaacttcttagacctggacct

SEQ ID NO: 202428 - DNA, 577 bp, Homo sapiens
atctgacacagccttgataaaagaaactatwagatggtaaaaagaaatttgaagaaaaaaaaaggaaactataagaaaggaaggtgaaaacagagaaacataacttactgtcagaaaaagaagatgtaccagaagtatactgtcatgtaatatatgaaaattataaccaaaaatgtaatattaagtttaaaatttaataaagcaatcatggctacagaaaataatcacaaaattgaaatacaggaattcagggaaagaggtgacatacaggtggaggtaaaatatgagctgacaagtcacaagaagcacaaaggagaatggatattgtgaaaaatttagtaaaataattcagaatataaataaatttaaataaaggcattgaattaaaacatttagtgaaaaacgatagacatggaacggaatgaacatggaataaagaaactaagtagagtgaaaatgacagctatagaagtttggcaaagcagatcaaatataaacataaagtaatttctgaagaaaaaagtgataaaaagagaaaatatttaacaatataactgaaggaaattttttctgatat

SEQ ID NO: 202429 - DNA, 577 bp, Homo sapiens
atctgacacagccttgataaaagaaactattagatggtaaaaagaaatttgaagaaaaaaaaaggaaactataagaaaggaaggtgaaaacagagaaacataacttactgtcagaaaaagaagatgtaccagaagtatactgtcatgtaatatatgaaaattataaccaaaaatgtaatattaagtttaaaatttaataaagcaatcatggctacagaaaataatcacaaaattgaaatacaggaattcagggaaagaggtgacatacaggtggaggtaaaatatgagctgacaagtcacaagaagcacaaaggagaatggatattgtgaaaaatttagtaaaataattcagaatataaataaatttaaataaaggcattgaattaaaacatttagtgaaaaacgatagacatggaayggaatgaacatggaataaagaaactaagtagagtgaaaatgacagctatagaagtttggcaaagcagatcaaatataaacataaagtaatttctgaagaaaaaagtgataaaaagagaaaatatttaacaatataactgaaggaaattttttctgatat

SEQ ID NO: 202430 - DNA, 577 bp, Homo sapiens
atctgacacagccttgataaaagaaactattagatggtaaaaagaaatttgaagaaaaaaaaaggaaactataagaaaggaaggtgaaaacagagaaacataacttactgtcagaaaaagaagatgtaccagaagtatactgtcatgtaatatatgaaaattataaccaaaaatgtaatattaagtttaaaatttaataaagcaatcatggctacagaaaataatcacaaaattgaaatacaggaattcagggaaagaggtgacatacaggtggaggtaaaatatgagctgacaagtcacaagaagcacaaaggagaatggatattgtgaaaaatttagtaaaataattcagaatataaataaatttaaataaaggcattgaattaaaacatttagtgaaaaacgatagacatggaacggaatgaacatggaataaagaaactaagtagagtgaaaatgacagctatagaagtttggcaaagcagatcaaatataaacataaagtaatttctgaagaaaaaagtgataaaaagagaaaatatttaamaatataactgaaggaaattttttctgatat

SEQ ID NO: 202431 - DNA, 607 bp, Homo sapiens
cttacagttatcgtggaaggcaaagggataggaggtgtgtcatggcaagagagggagcaagaaagagggaggaggtctcagactcttcttaacaaccagatctcgtatgaaatcattacwgtggggagaataccaagccacttatgaggggcctgctcccatgacccaaacacctcccactaggttccacctccaacattagagatcacatttcaacatgagatttggagttgaaatctaaatatttaaactatataattctgcccctgggtccccaactctcatgtcctcctcacattgcaaaatgtaatcattccttcgcaatagtccctaaaagtcttaactcattctggtatcaacttgaaggtcaaaagtctcatctgagactcaaggcaagttccttccacttatgagtctgtaatatcaaagcaagttatttacttctaagatgcaatggtgatacaggcattgagtaagcattctcattctgaaagagacattggccaaaagaaaggggcaacagacttggcaagcaagtccaaaacccagcagggaagacattaaacctaaaagctccaaaataattcttgacttcatggctcacatc

SEQ ID NO: 202432 - DNA, 549 bp, Homo sapiens
aaatctgtctaaagctcttaaaccacatggtgcatggactgaaaacatttaaaatttattatcttgaaaggattctcattttgtcctagcagcattgccaaatcctatgcctataaatttacacaaattcctgattacccaaggattaacttggagatcagcatcatgaaattgttgcccttccccgatctgttttctttgatattaatacaagcttccatgataattcctcttttcatgtcctgggactcactgcccataaaaatgatacttccaacagcgtaggattatgggtctttgtgttctcaaccatagttgcctctctttgcactccacttcagttatttactatatgggctcaagacctataccatatctaaaatattttctttctgactataacaattcatcctttacactaayccccttatttcatgacccgtgaactctgatcttgtggtgatctgatggaaaacttttccctactctccaagaatgttacttcttgcccccctggcctcacccaaagatctcatagtgctttacctt

SEQ ID NO: 202433 - DNA, 525 bp, Homo sapiens
gcaatatttatctatgggtaatggaaaacagttgaaggattttaaatggtagtattacaractgataattacatttccaaaagattaacagcttttggagaatgaaggggagaaacagtgaacatgagacttcttattgagggtatttcagcagtgcaggtgtttaagatgatgctttcttgatctagggagcaagtaagatagaaggagtgaaaggtttgagaagtatttaagagacttaattgatgactttgtgattgattggaaaagaagacgcaacagagaggaaagagtttcttcaatgaattactgggtaaatggtcatgccattttctaagacagtgaatactgaaaaataaatgatacattagggtaaagatgagtagttcagtttgtgacatggttgagaagccttgtaagaaaaccaggtgggaaagtgtctttggatgcacaggtgtggtacaaaagaggtggggagagaggtataacttttggagtcactgacatgtagaaggtaattaaacc

SEQ ID NO: 202434 - DNA, 525 bp, Homo sapiens
gcaatatttatctatgggtaatggaaaacagttgaaggattttaaatggtagtattacagactgataattacatttccaaaagattaacagcttttggagaatgaaggggagaaacagtgaacatgagacttcttattgagggtatttcagcagtgcaggtgtttaagatgatgctttcttgatctagggagcaagtaagatagaaggagtgaaaggtttgagaagtatttaagagacttaattgatgactttgtgattgattggaaaagaagacgcaacagagaggaaagagtttcttcaatgaattactgggtaaatggtcatgccattttctaagacagtgaatactgaaaaataaatgatacattagggtaaagatgagtagttcagyttgtgacatggttgagaagccttgtaagaaaaccaggtgggaaagtgtctttggatgcacaggtgtggtacaaaagaggtggggagagaggtataacttttggagtcactgacatgtagaaggtaattaaacc

SEQ ID NO: 202435 - DNA, 525 bp, Homo sapiens
gcaatatttatctatgggtaatggaaaacagttgaaggattttaaatggtagtattacagactgataattacatttccaaaagattaacagcttttggagaatgaaggggagaaacagtgaacatgagacttcttattgagggtatttcagcagtgcaggtgtttaagatgatgctttcttgatctagggagcaagtaagatagaaggagtgaaaggtttgagaagtatttaagagacttaattgatgactttgtgattgattggaaaagaagacgcaacagagaggaaagagtttcttcaatgaattactgggtaaatggtcatgccattttctaagacagtgaatactgaaaaataaatgatacattagggtaaagatgagtagttcagtttgtgacatggttgagaagccttgtaagaaarccaggtgggaaagtgtctttggatgcacaggtgtggtacaaaagaggtggggagagaggtataacttttggagtcactgacatgtagaaggtaattaaacc

SEQ ID NO: 202436 - DNA, 603 bp, Homo sapiens
tcccaggaatgcaaacacaggagaaaaaaagtaagtgtagaattcattctgtatcacccagtaatatttgctatagtgagtccattttcaaggcagattcctaggtttttaatgtttgtaatgaaaacctggggaggggaagaaaaaaggaaacacaattaaggaaaaacctttgaaactcaaacagctttttctccctgcccaagtaaaataactttatttctatacatttctaatagtactttattcttgattgtgacatatatacagaatcaatgtgttagtttagtattatgcatcaaatgtatgtcaaagacagtaaggtactccccaaaaggtgatacatgtagtttgagaaagaaaaatatgagctacttcgttaaatcgggaacagtgaaaatgccaccaactgatggaagttgaggtgggatgtgttgatgaagatgtttataatgtccaactaaccttayttttaaaataatgccttttgtctttttctcagtattggatgtgagtcagaatgtgggggtgggggagcttcttaaaaatgcaaatgcttgacaacccccatccagagattctgattgaagtagtctagagtgt

SEQ ID NO: 202437 - DNA, 544 bp, Homo sapiens
agaaaaaacacaaatggcatgctcaatagatccagaaaagtcatttcatataattcaaaactcacttatgagaagaaaaaaatcagaaaattaagaagagaaaatttaaagcaagaagatttacatggaaatactcaaagatttttttgaataaaaaataagacagggaagttyagcatcacattgttctggaggtcctaaaaaatagagctagttaaagttgccaagaatttcaaccattagtcagagtttcaatggtcatagttccaactaccgtggttcctaactggaatctggtaaattaagtaaaaagatgggagtccagggtgaatatctcagacttaggtggaggtgttctttattgaggcttttatttttccatattatatcccagagttgagagtaattcagcagtggaggacattagtccccactggttatatcaaaatacagttaaaacctgtgcaggaatcttccaaccaaaaccacttgaacagctaccgtttgcagccagaaagaggtgactgagtaaaagatggaattc

SEQ ID NO: 202438 - DNA, 398 bp, Homo sapiens
agctgagaatcaaagtgaggcagtctggttccagagctcatgctcttaaccattatgccgtgctagcactttttgaaaaataaaatagtggtgttaaaacttgaaacaaatactgaaatattagcgttgtcattttgctctagtattgcagttactacatttgaacttaaaactgtcaatcaagaaaaatgatgagacaagtatcaatcactttaggagctttacttgccaaagttawggatgttcacctatgccttactcctaagatgattttgagggctccaaatttaaaggggaaagggcgggatattgagaagtacacaattttcatataagaggggcgttaggaaaaatagttattcatgcctttgtctggctcagtgaatctgcattatttt

SEQ ID NO: 202439 - DNA, 557 bp, Homo sapiens
gaattctaatagtctttccttgaaaatttattaaagagagctagactgtatcctgatcataatgtcactcttgttctttagcaatagactaggtttatttttctagctggtctctctgactctcacagactgcgtacgtgctrcagaatgctgggggaaaattaactctcatgactgggagaggcagagtcaggagtcactgagatggttcccatccaacgtggagaaggaaagcaatgtggcttaagatggattcattatcactggtggaagaagtgattttttagggtggaggaagaatttaatgaaaagcttctttggggggataacttctcatcaatttttgtggcagatgctgcaggttggcactctcacctctcatatgaaacccttttctttctaacctctgtcattttgtaggctgaaaaacaaaagtactcactttcctagcctctcctgtagccaaaggaggtcatctgacacaattttggacaaggagacgtaagttacccctcccctatttttcctttttttcctaccttaaattgataagatag

SEQ ID NO: 202440 - DNA, 557 bp, Homo sapiens
gaattctaatagtctttccttgaaaatttattaaagagagctagactgtatcctgatcataatgtcactcttgttctttagcaatagactaggtttatttttctagctggtctctctgactctcacagactgcgtacgtgctgcagaatgctgggggaaaattaactctcatgactgggagaggcagagtcaggagtcactgagatggttcccatccaacgtggagaaggaaagcaatgtggcttaagatggattcattatcactggtggaagaagtgattttttagggtggaggaagaatttaatgaaaagcttctttggggggataacttctcatcaatttttgtggcagatgctgcaggttggcactctcacctctcatatgaaacccttttctttctaacctctgtcattttgtaggctgaaaaacaaaagtactcactttcctagcctctcctgtagccaaaggasgtcatctgacacaattttggacaaggagacgtaagttacccctcccctatttttcctttttttcctaccttaaattgataagatag

SEQ ID NO: 202441 - DNA, 557 bp, Homo sapiens
gaattctaatagtctttccttgaaaatttattaaagagagctagactgtatcctgatcataatgtcactcttgttctttagcaatagactaggtttatttttctagctggtctctctgactctcacagactgcgtacgtgctgcagaatgctgggggaaaattaactctcatgactgggagaggcagagtcaggagtcactgagatggttcccatccaacgtggagaaggaaagcaatgtggcttaagatggattcattatcactggtggaagaagtgattttttagggtggaggaagaatttaatgaaaagcttctttggggggataacttctcatcaatttttgtggcagatgctgcaggttggcactctcacctctcatatgaaacccttttctttctaacctctgtcattttgtaggctgaaaaacaaaagtactcactttcctagcctctcctgtagccaaaggaggtcatctgacacaattttggacaaggagacrtaagttacccctcccctatttttcctttttttcctaccttaaattgataagatag

SEQ ID NO: 202442 - DNA, 557 bp, Homo sapiens
gaattctaatagtctttccttgaaaatttattaaagagagctagactgtatcctgatcataatgtcactcttgttctttagcaatagactaggtttatttttctagctggtctctctgactctcacagactgcgtacgtgctgcagaatgctgggggaaaattaactctcatgactgggagaggcagagtcaggagtcactgagatggttcccatccaacgtggagaaggaaagcaatgtggcttaagatggattcattatcactggtggaagaagtgattttttagggtggaggaagaatttaatgaaaagcttctttggggggataacttctcatcaatttttgtggcagatgctgcaggttggcactctcacctctcatatgaaacccttttctttctaacctctgtcattttgtaggctgaaaaacaaaagtactcactttcctagcctctcctgtagccaaaggaggtcatctgacacaattttggacaaggagacgtaagttacccctcccctatttttcctttttttyctaccttaaattgataagatag

SEQ ID NO: 202443 - DNA, 208 bp, Homo sapiens
tgggaacgtttgctaacatcagttcctgtgtagccacaatggactgctaaagctaggcagcagctactcccttagacaaattccrtattctccagttagccacattcctacctctccttactgtctctggcatacagctgcatcacacctttccactacgtgccgacctttgtagacaattgcttttggaattatttgctaaaatcag

SEQ ID NO: 202444 - DNA, 598 bp, Homo sapiens
tcacagcaactaattttccagttagaaaaatatttcagactaattacgtagctagtcctaataggaaagacaattttatactaaccacatgctacttctcaagaaattacatttcaaaaactaagccatcggtgcccagctagaacacaaaattttcacattgaatgaaaagcacgctatttctccaccaacataagagtaaaaagtaaaacagatgtcctgtctagcagatcctgatgattacaaataatcataatcctctaaactcattaygtttaacatgcaagacaaagtacagctaagctttctccattttaactactcctcttagtcagtcagctcatagctgatctacccagaaaagacaactggctactctttcaacgcaccatgacaacaagtcagactttaagagctattcacaaactaggagaaaaacaagaagtaaaagagaccagacaagcaaaggatgcacaggttagtgaaggggagctggtgggaagggtggggaaggctgtgaacaagcagttagtcacgagatagtagtaatcaaggtacgtacttgatgcagcttcataagtaattatctatagctaca

SEQ ID NO: 202445 - DNA, 565 bp, Homo sapiens
acaatattcctattgaaattttaaaaataaagcaagtctgtcttaaacatgttttgagatctatattttcaactcagtaacatcaagtgtttttatatttagaagcaaaattttctctgcattggaaatatcctacctggtagttttcatgctrctaagaaaattgactaatgggtagatcgatttatcctgtggcatacagcctggttaaaaaaataagattcaggctgggcgtggtggctcacgcctgtaatcccagcattttggggggccaaggcaggcggatcacgaggtcaagagatcgagaccatcctggccaacatggtgaaaccctgtctctactaaaaatacaaaaattagctgggcatggtgctgtgtgcctgtagtcccaggtacttgggaggctgaggcaggagaatcacttgaacccgggaggcagaggttgcagtgagccgagatcgcgtcactgcactccagcctggtgacagagcgagactgcgtctcaaaaactaaataaataaagttaaaaaaaaataagtgagggaaaacagccacattctctcat

SEQ ID NO: 202446 - DNA, 565 bp, Homo sapiens
acaatattcctattgaaattttaaaaataaagcaagtctgtcttaaacatgttttgagatctatattttcaactcagtaacatcaagtgtttttatatttagaagcaaaattttctctgcattggaaatatcctacctggtagttttcatgctgctaagaaaattgactaatgggtagatcgatttatcctgtggcatacagcctggttaaaaaaataagattcaggctgggcgtggtggctcacgcctgtaatcccagcattttggggggccaaggcaggcggatcacgaggtcaagagatcgagaccatcctggccaacatggtgaaaccctgtctctactaaaaatacaaaaattagctgggcatggtgctgtgtgcctgtagtcccaggtacttgggaggctgaggcaggagaatcacttgaacccgggaggcagaggttgcagtgagccgagatcgcgtcactgcactccagcctggtgacagagcgagactgygtctcaaaaactaaataaataaagttaaaaaaaaataagtgagggaaaacagccacattctctcat

SEQ ID NO: 202447 - DNA, 536 bp, Homo sapiens
gagcatccctccctgtatgagtgaaatgaaacacctaaggtagtaataaataaataaataaataaataaataaataaataaagctaaaaagcagtataaataacaaaacggaaaacaggatgaaaagggcaacacattacacaaaaatggatccggagaaattaggactgactgaataattacatttaattatcaaaatcttagtggtatagattgattcttacaatacgcaacatgtagattcaatttcaagaccatgttgatgtccatcaaacacattatccaatgtgtatattagtttgccctggctcctaaactttggtaacacaacattgcagcattgcaaaatatatctatctaacatagggtaaatgttaaataaatgtttgttgggtcacattgcacaatcaatgctagtgaataacacttcctaaggttttcaggtagcatgagcaaaaaacatccagtatttgtctattcttttgaggacaataasaaaagaatatcagtagccttgcctagagctttctgcaatg

SEQ ID NO: 202448 - DNA, 511 bp, Homo sapiens
cctcacctactgcagcctggatgatgtgcagtcaaaagtttccccccacaagaaaagtcagattgccctcctttaaactcttccttgttacctctcttcactctacagtgaatgccatcctggaaatgcaaaccatctcaataattgagcccatgtccaatggaattaaacaatatgctgactgtgaaattacattatgatttctagagtgagtagcaatattttgtcggatratgttgatatccctttgcagtcatgtgaacaaataggaataggatcttcatagcaatacacaagatgaaggtccttgtgctaccccacacagtgctgtctccaccttgcaggataaaggctgcagttccaaagctcccggctgatatcggcatttgctcctttgcacctctctggtcctcacacaaaggagccttcagatggctgtgtgtggccagaagccagtctcccacttacctgactttgaaatcttccacaacatcctgcatgttcctcagtt

SEQ ID NO: 202449 - DNA, 591 bp, Homo sapiens
tgcatttgaggctgcctatcccagaagtctcccaggcagkttcctcctcctcctgaggaccaagaattcctagctctccagtccttcatcaaaagagctccaacagctgcacctagcagaggattcgttccttccctgtttctcctgttaaccttgtagactgtgccctacattctatattagtctacaaaccgcaaagaagacttcaaggcacctcatctctctgttctgcaactcattgccccatctctaccatgggaagagtcaaaccaaaacattgctgaatcttctttttttttctgccttgagacagggtctcactctgtcacccaggctggagtgcagcagctcaatctcggctcactgcaaccgccacctcctgggctcaggtgatcatcccacctcagcttcctgagtagctgggactacaggcatgctccaccatgcctctctaatttttttactattttgtaaaaactgggtgtcgacattttgctcaggctagtcttgaactcttgagctcaagtcatccatcctctttggcctcccaaagtactgagattacgggcttaagccaccgcgcctggcctg

SEQ ID NO: 202450 - DNA, 573 bp, Homo sapiens
catggctcccagctgacctgtaagcactaaatcagcacacactgatgatgaggatggtgacaatgacaatgaggtcaggagagccattatgctaggagtgactgactcagtgtaaatggagaacagaaacctcttcctgctctgctttaagaggtgtagatatttgaaagccccgacgcaggggaatgaaaaattagggcccatgactcattcttgacaaagaattaatctctttgaaggaagactcagcagagggctcttctaatcagccagctctctttgtgtgtgttcaaagtgcaattgattggcatgtctcttggaggagggtttccagagtgtaaaaccagatatatgaccggcatgtcatgagtaagatagtttccactgaacagaccagggctgtgtctgtgatgcaggttacatccgagcagccaggacgccactttcctcccttcccagaaaagrgtaaaatggcttagaaggcccacaggcagacgccaggatgacctctgcatgatcctacctgtggatattccggctgttctcccatctggccgtgagggagaggaattc

SEQ ID NO: 202451 - DNA, 643 bp, Homo sapiens
gaattccctttaaaggaaatgcctgaaagtgcttttcattcacccctcagcactggtttattaagcaagagttagtcaacctggggtgagcccagagactaatgaaaatgaccartgaattgggaaacagaggtgggaacaaagggggaaggagctatgacgggagaccaatgtcttcctttgtcgttgctgctcttaccatcagggagtaaacttaattggcaagaaggattccattgaggacttctatgttctaatggtgaacagaaaaatatgcttctaagggaagttgtagagatttctgtagattcttcctggaatgatttagggggtgtgattctgcaataaatggaagtttaaaaaaaatctttaagataagcacctatactctctaccctgataatgctctttaggcatcatggtattttacagatttaggatggaaatagggtttccctgcacctttcaaaatttcccccggaagggacatgcccacagagcccctctgaagttggacctgccattgttcatgttccttcattctttgcatccattgcccttgcctcttggtttatgtggagtgtgcttacgtgttcatgggtatatttctggctctgccaggtgagagggatttttcaaaggt

SEQ ID NO: 202452 - DNA, 449 bp, Homo sapiens
ataggaagactgacttggaaactgcaaaggaacaaattgaaaaagaaaagggcagataagaaagcacaaggaacattgttycaaatctgctcaagactcaaggtgaaagagagagtagaggaagggcaaaggacaaagaacagtagatgagagattctgagggggaggaaggcaaggtctcagcagtctcatgtgaagactcatcacctcacttcaggatggtcttaattttgtgtatgttagtgtggcatctatatgaggtaatcataagtggtcttgatttgactgtggagacaacactccaaacaaaccagcaggtacatttcttccagtgtatgtgtccactgcagtgtctcccattagtaaatatccacattctcccacagagtggttcacaaaaagggttatgagtttttgtcaaatgaaccagactggacaaaaactgcaaa

SEQ ID NO: 202453 - DNA, 449 bp, Homo sapiens
ataggaagactgacttggaaactgcaaaggaacaaattgaaaaagaaaagggcagataagaaagcacaaggaacattgtttcaaatctgctcaagactcaaggtgaaagagagagtagaggaagggcaaaggacaaagaamagtagatgagagattctgagggggaggaaggcaaggtctcagcagtctcatgtgaagactcatcacctcacttcaggatggtcttaattttgtgtatgttagtgtggcatctatatgaggtaatcataagtggtcttgatttgactgtggagacaacactccaaacaaaccagcaggtacatttcttccagtgtatgtgtccactgcagtgtctcccattagtaaatatccacattctcccacagagtggttcacaaaaagggttatgagtttttgtcaaatgaaccagactggacaaaaactgcaaa

SEQ ID NO: 202454 - DNA, 449 bp, Homo sapiens
ataggaagactgacttggaaactgcaaaggaacaaattgaaaaagaaaagggcagataagaaagcacaaggaacattgtttcaaatctgctcaagactcaaggtgaaagagagagtagaggaagggcaaaggacaaagaacagtagatgaragattctgagggggaggaaggcaaggtctcagcagtctcatgtgaagactcatcacctcacttcaggatggtcttaattttgtgtatgttagtgtggcatctatatgaggtaatcataagtggtcttgatttgactgtggagacaacactccaaacaaaccagcaggtacatttcttccagtgtatgtgtccactgcagtgtctcccattagtaaatatccacattctcccacagagtggttcacaaaaagggttatgagtttttgtcaaatgaaccagactggacaaaaactgcaaa

SEQ ID NO: 202455 - DNA, 449 bp, Homo sapiens
ataggaagactgacttggaaactgcaaaggaacaaattgaaaaagaaaagggcagataagaaagcacaaggaacattgtttcaaatctgctcaagactcaaggtgaaagagagagtagaggaagggcaaaggacaaagaacagtagatgagagattctgagggggaggaaggcaaggtctcagcagtctcatgtgaagactcatcacctcacttcaggatggtcttaattttgtgtatgttagtgtggcatctatatgaggtaatcataagtggtcttgatttgactgtggagacaacactccaaacaaaccagcaggtacatttcttccagtgtatgtgtccactgcagtgtctcccattagtaaatatccacwttctcccacagagtggttcacaaaaagggttatgagtttttgtcaaatgaaccagactggacaaaaactgcaaa

SEQ ID NO: 202456 - DNA, 504 bp, Homo sapiens
ctcaacaaaacactagcaaaccaaattcaacaacacatcaaaaagagaatacaccataatyaagtgggatttatcacagaaatgcaaggatggttcaacatatgcatatatgtcatacatcacattaatagaatggacagaaaccatatgatcatctcaacagatgcagagaaacttttgataaaattcaacatcccttcatgataaaaactcttaataaattaggtacagaagcaaagtacctcaatataataaagtccatataggaaaacccatagctaacatattgctaaacaaggaaaagctgaaagtttttcctctaagaactggaataagacaaggttgtcctcttgccactttcatgcaacatagtattggaagtcctagccagagcaattaggcaacaaaaagaaataaaaggcatccaaactggaaaggaggaagccaaattgtccctgtttgcagatgacataatattttatatagagaaacctaaagactaca

SEQ ID NO: 202457 - DNA, 504 bp, Homo sapiens
ctcaacaaaacactagcaaaccaaattcaacaacacatcaaaaagagaatacaccataattaagtgggatttatcacagaaatgcaaggatggttcaacatatgcatatatgtcatacatcacattaatagaatggacagaaaccatatgatcatctcaacagatgcagagaaacttttgataaaattcaacatcccttcatgataaaaactcttaataaattaggtacagaagcaaagtacctcaatataataaagtccatataggaaaacccatagctaacatmttgctaaacaaggaaaagctgaaagtttttcctctaagaactggaataagacaaggttgtcctcttgccactttcatgcaacatagtattggaagtcctagccagagcaattaggcaacaaaaagaaataaaaggcatccaaactggaaaggaggaagccaaattgtccctgtttgcagatgacataatattttatatagagaaacctaaagactaca

SEQ ID NO: 202458 - DNA, 504 bp, Homo sapiens
ctcaacaaaacactagcaaaccaaattcaacaacacatcaaaaagagaatacaccataattaagtgggatttatcacagaaatgcaaggatggttcaacatatgcatatatgtcatacatcacattaatagaatggacagaaaccatatgatcatctcaacagatgcagagaaacttttgataaaattcaacatcccttcatgataaaaactcttaataaattaggtacagaagcaaagtacctcaatataataaagtccatataggaaaacccatagctaacatattgctaaacaaggaaaagctgaaagtttttcctctaagaactggaataagacaaggttgtcctctygccactttcatgcaacatagtattggaagtcctagccagagcaattaggcaacaaaaagaaataaaaggcatccaaactggaaaggaggaagccaaattgtccctgtttgcagatgacataatattttatatagagaaacctaaagactaca

SEQ ID NO: 202459 - DNA, 504 bp, Homo sapiens
ctcaacaaaacactagcaaaccaaattcaacaacacatcaaaaagagaatacaccataattaagtgggatttatcacagaaatgcaaggatggttcaacatatgcatatatgtcatacatcacattaatagaatggacagaaaccatatgatcatctcaacagatgcagagaaacttttgataaaattcaacatcccttcatgataaaaactcttaataaattaggtacagaagcaaagtacctcaatataataaagtccatataggaaaacccatagctaacatattgctaaacaaggaaaagctgaaagtttttcctctaagaactggaataagacaaggttgtcctcttgccactttcatgcaacatagtattggaagtcctagccagagcaattaggcaacaaaaagaaataaaaggcatccaaactggaaaggaggaagccaaattgtccctgtttgcagatracataatattttatatagagaaacctaaagactaca

SEQ ID NO: 202460 - DNA, 431 bp, Homo sapiens
agtagaaggggaatataagcttgccctaagttggccaggataagtattcaggtttctcaggtgatggctggggtcataaagctctcaacggtttatgtcttttgtgactggagttcttcatctgtcttgtggaatttgcaatggccttcttctcttttcaaaaaatctgtgatttctttctgttttcatggtatgcttctgcagtggttcctggagcaaaagttcacagtgtgagtctccatatgatgttctgttcttcaaagtgggagctgcaagtcagccctgtctccaatccatcttccctctaattttaattctattccacaacatatgttctgatgattaattttwtgtggcaacttccatggatgttatgtgttccattcatgttatatggtcccatcacaatacatactgaggaacaaaacaat

SEQ ID NO: 202461 - DNA, 496 bp, Homo sapiens
gaattcaagttggagacttgaatagatagatacaaattgttacatataataatacatataaatgtatttattgtcacctaacagggcccagaagcagtgacacaccagcagcagtgagcacatcttgtacctagatcttggttgctaatgctattacccactsttacccactgttaccatgatggttaattttatgtgtcaacttaactgggctacaggtgcccatatatttggtgaacactattctaagtatttctgtgaggatgttttggatgagattaagatttgaatccatagactgagtaaagcagattgccctccctattgtgggtaggtcttattcaatcagctgaaggcctgaatagaacaaaagcctgactgaccctccctctggtaggagagaactctcctgccttatggccttcaaactgggacattagctccctctggttctacagcagcttccagccttcaaagtcaaactgacacatcagct

SEQ ID NO: 202462 - DNA, 496 bp, Homo sapiens
gaattcaagttggagacttgaatagatagatacaaattgttacatataataatacatataaatgtatttattgtcacctaacagggcccagaagcagtgacacaccagcagcagtgagcacatcttgtacctagatcttggttgctaatgctattacccactcttacccactgttaccatgatggttaattttatgtgtcaacttaactgggctacaggtgcccatatatttggtgaacactattctaagtatttctgtgaggatgttttggatgagattaagatttgaatccatagactgagtaaagcagattgccctccctattgtgggtaggtyttattcaatcagctgaaggcctgaatagaacaaaagcctgactgaccctccctctggtaggagagaactctcctgccttatggccttcaaactgggacattagctccctctggttctacagcagcttccagccttcaaagtcaaactgacacatcagct

SEQ ID NO: 202463 - DNA, 428 bp, Homo sapiens
agacagaatcttaataagcttctaattttaatatgaaatatgaaggttagagtctcatattaaaggaaacaataggggtatgcaattagaaaaatcccaagaatgaaaaagtacaatgaacagttaacctgttttatttaacaaataaaagtaagaaatgaagggagatttttaaatttcaatgatttaaaggatatatcactcaaatacaacgtttatagagcttattttgactctgattgggacaccaaaatataagaaatatatatcaaaaataggactgcttgaagactaaatagacacttgttcattttaattagtatgtaaatttttaagatataaaaatagtgttttgattttttaaaggacctattatttagatattaatattgaattattkattgaagacataatatgacttctggaat

SEQ ID NO: 202464 - DNA, 413 bp, Homo sapiens
gggatggcctcaggagaagggcttgagagrggggcctgaaatggtagtgggggtgggatggccaagagggactttccctttagcttcatggttcatttttttttttcccaagaagaatgtagtatgcgctacttgttaattacttataaatgaaggaataaaaaagctttctgggattggtattgtctggcgatgaccagatcaagggtcaggttctgggagctggtgaccgaaatggaatgaaagtgaggttggagttcaggaggtacaagaaatgttcagccaggctgttacctagatgtacacagatgttcaaaagctgggatgtggggtgctgggagctggggtaagacactgaggggtagctctgaaggctacaaggaatgagggggagcctccagaattctttatca

SEQ ID NO: 202465 - DNA, 559 bp, Homo sapiens
gagaaatcagattgttgctgtgtctgtgtagaaagaagtagacatgggagacttcattttgttctgtactaagaaaaattcttctgccttgggatgctgttgatctatgaccttacccccaaccctgtgctctccgaaacatgtgctgtgtcaactcagggttaaatggattaagggcggtgtaagatgtgctttgttaaacagatgcttgaaggcagcatgctcgttaagagtcatcaccactccctaatctcaagtacccagggacccaaacactgcggaaggccgcagtgtcctctgcctaggaaaaccagagacctttgttcacttgtttatctgctgaccttccctccactattgtcctatgaccctgccaaatccccctctgagagaaacacccaagaatgatcaattaaaaaaaaaaaaaaatatttaaaatgtagagtgcataaactgtaaagkgaaaattcccagtggcgatggctaacaattttttgttcaagtttcctgaattgtttttctgttcatgtactcatacacgcatgcccacccgcctcaa

SEQ ID NO: 202466 - DNA, 547 bp, Homo sapiens
aacgaacatcgtggagctcatagtgtgtgtgtgcaataaactatattatattaataataaatgtatatgatttattacagtatgtccttgaatattcattatccttagggactatacattatccttagggaaagaaaaaaatttaatktctagattagttttctgtttattctttcattttcagagctagtgagttcatttaaattatatcctaaatattctttatcctgactacccacaactacataattctgtgatatgagggattagttccatctttattaaaatttcaacttttattttagatacagagggtgcatatgcagatttagtccataggaatattgtgtgatgctgaggtttggaataggaatcccaccctaattcctatggtaatgagcacagtacctaataggtaggactagtttacattcccaccaacaatggtgagcattccctctcctccacaatcatgcagcacctgttgttctttgattttttaacaacagccattctgactggtataagatggtatttcattgtggtt

SEQ ID NO: 202467 - DNA, 547 bp, Homo sapiens
aacgaacatcgtggagctcatagtgtgtgtgtgcaataaactatattatattaataataaatgtatatgatttattacagtatgtccttgaatattcattatccttagggactatacattatccttagggaaagaaaaaaatttaatttctagattagttttctgtttattctttcattttcagagctagtgarttcatttaaattatatcctaaatattctttatcctgactacccacaactacataattctgtgatatgagggattagttccatctttattaaaatttcaacttttattttagatacagagggtgcatatgcagatttagtccataggaatattgtgtgatgctgaggtttggaataggaatcccaccctaattcctatggtaatgagcacagtacctaataggtaggactagtttacattcccaccaacaatggtgagcattccctctcctccacaatcatgcagcacctgttgttctttgattttttaacaacagccattctgactggtataagatggtatttcattgtggtt

SEQ ID NO: 202468 - DNA, 544 bp, Homo sapiens
catttcattaacaatggaaaatgaagaaaattatttagaacaagaagtcatcagcacaacaaagtagcacatggagcaactaaggaaaattttgcagcctcaaaagrggaacactcatgaaggagtaagcatgttccaaccatatgttttcatgtaatagtttacaaatgtatccaactacataaaaactaaaattagccattttggcaggaaaaatgaccccttttctgaacagtgaagagtttagcatatttattttttatataaaaggaggggtgattaataatgttacaagaggccataaaatatttttttccttgaatttctgccaagctaagatgtgtagcttaagtcaactaaagtctaattcaaattttgcaacctttttgatatatcgggtcaagtgacatttactaagacacatagagaaatactgcatcctgtgtattcttctgaaattgcttacagtatgttctaggattgcattccaaaatctctgaagtgaatgactagggagacagtaaaaaaggactgggccatattc

SEQ ID NO: 202469 - DNA, 584 bp, Homo sapiens
  misc_feature (1)...(584): n = A,T,C or G
atctgacccttgatttgctttcaaactttatcttgtgccaactttgtaactgtaataggtctgttgctcaatgcacatggcaagtcagtacgttgagacactgggttgcagtacagaaagagatgtaatcgtagggctgttcagtgaggagatgggaagaaacctgaaatctatctccctaagaagtttggggaaaggtttttaagagttttgaaatgggctgaagtgtggagatcattgattggctaaagaatgcanggtagagtcatgaggcagggagatgaagagtctgtgttctcatgttaattctgttcctatgtgagagtcttcaagctggttggtgccagctgtttcactggaaagcattttangtaaatctaaacagaagtcatataattctaaggtggaaatcctatctatagatacaatggggatgcacatggtcagtatctggtactatgtgttggttaaaagcaagtgggtcaaagtgcagcytgattaatgcttaattataactacatttctgtctggaattcttgtgaaccctgtgagggtggcttcaatttcggtacattcaatatgtt

SEQ ID NO: 202470 - DNA, 551 bp, Homo sapiens
attaggaaattcttttttttttttttttttttgagatggagtctcgctctgtcaccctggctggagtgcagtggtgcaatcttggctcactgcaagctctgcctctggggttcatgccattctcctgcctcagccttcygagtagctgggactacaggcacccgccaccacgcctggctaattttttttgtatttttagtagagacagggtttcaccatgttagccaggatggtctcgatctcctgacctcgtaatccacctgcctcagcctcccaaagtgctggggttacagacatgagccaccacacccagccaggaaattcttaaataaatttgtagtaaagtacacatatcagtcaataggaaatcaaaccaaagcacagagaaaaaaaaaggaatagaaaagagtgatcaaaatgcaagatatgtgtggggcactgtcaaaatatccaacttatgtatcactagagcttcaaacagagaggagagagaattggacagaagtaatatttgatgggtgaaaatgttcaaaactgataaatatattaac

SEQ ID NO: 202471 - DNA, 675 bp, Homo sapiens
tctggacacacttttcaatataagatacctttaaaccaacttcactcttcttgttcaacttgctgaaaaatgccctattcaatcttgtrcaaaaatcagcatctccatgtccttctttctaatggcaaaataaatttctttgtttattattgtcacagcaaaaacaaaaaatgagggaacgagaattcaaagtaaggaattatttcaacaaataatttttaatttgttttattattaacaacatttaatatataacttatatttgctgtatgacactcagctttaattttccttctatgagatcaacttttttagcctccacatatgaataagaacattcctctacaggaacagaacactctttttaaaaaagaagttttttgcttttattattatttttaattgacatgtaaaaattgcacgtatttctggggatagtgtgatattttgatacatgtatggaatgtgtaatgaccaaaacagggtaattagcatatccattgcctcaaacatgtatcatatctttgtgttgggaacattcaaaatcagctcttctagctctctgtgaagttggtttttatgtgtgtgtgaaataaaaaagattgattatatcatctggcagatccatgatatgcttgatattttccttttcaaataagcagaaagcatagtgag

SEQ ID NO: 202472 - DNA, 594 bp, Homo sapiens
  misc_feature (1)...(594): n = A,T,C or G
gatgtttctggttgctggcttgtgtctgtagatgtttaagattcanagactgaaaaatgaggcaaactaacatatttatggctccttccttaggttataatcaccaacagatgagtgaaggacacaggcagaaatctgaatttataaccgacagcatctgaatcaatgtctactgaatagttccattatcagatacagctacaaggaccaggcctttgatactctgagcctcgatagctctgatagcatggagaccagcatctctgcttgctcaccwgacaacatctctaggtaagatttatttatgggtaaggtttctggtttggaaaagagcctactgctcacaaaaagtaaagccatcaatttgggaactgtatatgcacaagccccgtgnnttgagacataaagggtctgtaacgcagaagagggttggtatcatgatggcctttgaaagtagtttctctcaccttgtgtaacttagctagtcaggcatcatataatctgtttccacctttatcctgtttttctccacttgagctcaaatttacactgtgctttaaaattgatttccttctgttggttagctctaagctt

SEQ ID NO: 202473 - DNA, 594 bp, Homo sapiens
  misc_feature (1)...(594): n = A,T,C or G
gatgtttctggttgctggcttgtgtctgtagatgtttaagattcanagactgaaaaatgaggcaaactaacatatttatggctccttccttaggttataatcaccaacagatgagtgaaggacacaggcagaaatctgaatttataaccgacagcatctgaatcaatgtctactgaatagttccattatcagatacagctacaaggaccaggcctttgatactctgagcctcgatagctctgatagcatggagaccagcatctctgcttgctcacctgacaacatctctaggtaagatttatttatgggtaaggtttctggtttggaaaagagcctactgctcacaaaaagtaaagccatcaatttgggaactgtatatgcacaagccccgtgnnttgagacataaagggtctgtaaygcagaagagggttggtatcatgatggcctttgaaagtagtttctctcaccttgtgtaacttagctagtcaggcatcatataatctgtttccacctttatcctgtttttctccacttgagctcaaatttacactgtgctttaaaattgatttccttctgttggttagctctaagctt

SEQ ID NO: 202474 - DNA, 554 bp, Homo sapiens
caaatgttatgttgtgagactgattctgttaaaatcctctggaggagtttgatttttggtttatttgtatgttttggtcagcaatcaacttggttaggwtcagactgcaagttctgtctcaccttctgtgggaggtggttctattgtcagttcagttttcagtgtttactatgcttttaggtctgccccttgtgagcaccacacaaagattagtctgagactaaacagtcactgagcagtggtttacatcatagtccagttctcagagccttgctatatttctttggatgtgcctcatacatgcacagctggaaggtggcccaggatttgagtcatttcatatagaattaggagatcttcttcttttgctttctcctgagatttcccctgcattctttatctcccaagtgcccctttttgaagttgtctggccagaaagatgggattccctcagaggtttagcttcctgcattgtcatgcagtttcacatgactgccctcggggtgaagcagtgacagtaaggagacacaaaaaaacaattaagcatgaattat

SEQ ID NO: 202475 - DNA, 622 bp, Homo sapiens
attttgaaagttcaggaataaaaacgtgtttggtggcagggcacggtggctcacacctgtaatcccagcactttgggaggctgaggcaggcggatcacctgaggtcaagagtttgagatcagcctggccaacatggagaaaccccatctttactaaaaatacaaaaattagccgggcatggtggcaggcacctgtaattccagctgctcgggaggctgaggcaggasaatcgcttgaacctgggaggtagatgttgcagtgagccaagactgcatcactgcactccagcctgggagacagagcgagactctgtctaaaaaaaaaaaaaaagagaaaaaagatgtttagaagctctgagcttgtgggtgaagcctgtcaccttttactttactacagagtgatttgacaagactgctcagttgggaaagctccacaatcagtatctttaagtctttccttttgggctggttagagttcccagagaaagagccctctgctttctgcctagagggtgaaaccctggctgtcaacctctggaggtccagtggataagagagctggggttctgagtacccagcatgcatacattctcatattgtccctgtttgcagaatggctccac

SEQ ID NO: 202476 - DNA, 432 bp, Homo sapiens
agatgacaaagaaaagaaaggaacaatgatcgtgccaaaaagggctgtggccagtagtggcacatactatgtccgatgcatgcccaaggaaaagaccattaagaagctcgtcgtgcaaaacatagtagaggccgcagcagtcagggacattactgcagtgagcaactttgcctcctatgttcttcccaagctgtatgcgaagctacattaaggtgtgagttgtgccattcacagcaaggcagtcagtaatccatcttgtgaatcccacaaggaccaaatamcccaatctgatttaaacctgtgggtgctgcctcatgaccctcaccaaagcccatgtaaggagctgaatccttaaggactgaagagaaactattctcttgaggaaaagaaaatggaaattgtactttttaaagaagagaattcttctgtata

SEQ ID NO: 202477 - DNA, 549 bp, Homo sapiens
ctcatggtcctcttactgtccttgactttcttctctgctttaacattccattctatttgtcaactgcgtaacacaggcgtagaagtggacattgttttccagagagtctcctttttatagtttcttcctcaaccttaaaatgtctgtccttttggcaygttgtgaaggagaacactaacgtgcctaagattggaggtgacgatatctctgtgatgctgggggagaaatcacaggggcaaaacaaatactctaggtgtcattgacaaagtgggcccttctttaatagaaaatggtattcctgtcttttctttcccatctcattctcagtagtacttgtattgctccatgaaagagagggcacaggaacactcacaccatcctctctttgcttttattctgtattgaagccttttcaaatcattacttagctgggctgctgctgtcctcttcatgtctctatgtagtcatcctctttgtgagacaagcttagagataatctagggaagacaagacaaaggaaaggagaggaggagagtgacgatcgttgag

SEQ ID NO: 202478 - DNA, 615 bp, Homo sapiens
tcaaatgttggaatattctaaacttattattctctctctcctatttttcaatttttaaaatattttaattctatttttgagagatagctttgatttatcttttaatcactctactgaattttttattttattacatttctattttctaaaagttcttcattacttttggatgtttctttatccgagcaccctctctagtacatctttctattttgtaatgctgtttcttactagtctttttgaaaatttaaacttattgatgattttttgtttctgttgcctgtattacctgtattctgtagaattcttagcctttttgsgttctgaagtatgaaacagcttaattttaaattctggttgatcttcctgtagcagatgctgttggtgtcctgcaagattctttttactaggctgctgcacacattcctctgcttcagggaatggtgcttgctaatagcttacatctgcagccttctttggaagctgctgtcctgatagagcattggaatgatctcttggtggtataattgagggatccactgacacctgccaatcttgggcactgctcgtcaggatactgtatttgctcaaaaccaatgacctttgtatgtttta

SEQ ID NO: 202479 - DNA, 538 bp, Homo sapiens
atttatcttttaatcactctactgaattttttattttattacatttctattttctaaaagttcttcattacttttggatgtttctttatccgagcaccctctctagtacatctttctattttgtaatgctgtttcttactagtctttttgaaaatttaaacttattgatgattttttgtttctgttgcctgtattacctgtattctgtagaattcttagcctttttgcgttctgaagtatgaaacagcttaattttaaattctggttgatcttcctgtagcagatgctgttggtgtcctgcaagattctttttactaggctgctgcacacattcctctgcttcagggratggtgcttgctaatagcttacatctgcagccttctttggaagctgctgtcctgatagagcattggaatgatctcttggtggtataattgagggatccactgacacctgccaatcttgggcactgctcgtcaggatactgtatttgctcaaaaccaatgacctttgtatgttttattgtccccagtaggt

SEQ ID NO: 202480 - DNA, 558 bp, Homo sapiens
acataataggagctcaacttctatttgtcccactagactgaaaggttttacaatactgttgattcaacagcacatggtactggggagtcaagagccaaagactttggtgtggtttggaagttatgctttagggaatgttttctgctctggtcttcaacttacatgtgaagaaggaaaaactttaaatgcttaggtttacttctttctctttaaaatatagatctgcttggtcttcacaatgattcatattttgattcattactaagattaattgtgattatttatggcttayggtttaagtgccccaaccatcagcacatttaaggcttaatgtctggagcagattcaggaatcagcaaattcagcaattatacctgcttctcaaaaatttaatgtgagtaggcttagttagcattttctccttggtgactaccatcagtgtccaatctagttaccagtatttgtcctttgtcatggttccaggttgtgcagggtgcgctggccctccctttgcatgttcatactccagggtaaagttcctctatacaccagtcagat

SEQ ID NO: 202481 - DNA, 558 bp, Homo sapiens
acataataggagctcaacttctatttgtcccactagactgaaaggttttacaatactgttgattcaacagcacatggtactggggagtcaagagccaaagactttggtgtggtttggaagttatgctttagggaatgttttctgctctggtcttcaacttacatgtgaagaaggaaaaactttaaatgcttaggtttacttctttctctttaaaatatagatctgcttggtcttcacaatgattcatattttgattcattactaagattaattgtgattatttatggcttacggtttaagtgccccaaccatcagcacatttaaggcttaatgtctggagcagattcaggaatcagcaaattcagcaattatacctgcttctcaaaaatttaatgtgagtaggcttagttagcattttctccttggtgactaccatcagtgtccaatctagttaccagtatttgtcctttgtcatggttccaggttgtgcagggtgcgctggccctccctttkcatgttcatactccagggtaaagttcctctatacaccagtcagat

SEQ ID NO: 202482 - DNA, 635 bp, Homo sapiens
ttataggcttcctagagtgtagtgccctaaattggacacaaaactctgggtttggccaaatagaactatcatccttcttcactctaaaatgataaacgttcrtcaacatatcccaagattgcatattaggaattttggacattgtatttcactgttgatttatctcaggcttgctgttgatttaaaccataagtcatgttttcacctttcatgctgagccctgtgtccttcactacccagaactcaaactgtttttggacttcagtgaaatattttaaaattgtctcctttaaatttcatctcattgtattcaggctggcttgagaagatgtttttggtctttatttggtcctaaatcattcataataatttccagctttctaccatctacaaatttgggatatctatctttcacatttttatatgaattattaataaaattatgttatgatataattaagaaaatttctctctaggttgccactgatacatagataaatgactattgcatagtgtacagttattcaaaaattacaaatgcaactagtcaaatggtcatctcccttgttttcccatattatcaactaagctatttagagagactttgtaaaatgcagctgtcacatgttccatag

SEQ ID NO: 202483 - DNA, 604 bp, Homo sapiens
tccacaatgaactctaatttctgaaaccctctttattctttcagtgaactctttacagcccacctttgagcccacagtatcctatgcccagaaaatgcttaataaagattcttttgttgaaaaggggaaggcagaggaggagggtagaagaaagaggaggaaaaggaggaggggtataggggggatataaraagaaagagtaggagaaggggaaaacaattggaaaggttgactattgtgttttattaatgttgataatgttcaggagcaatatatgcaatgggttcaaaaataaaatgtaaagctctgaaagcatgaggagaagtctgtggccataagcatgttttgtatatttttatgaactttctatttgagttttttttatttatttctttggaaaacaattaggcaagtgagaaacattaagaaattggtttccactcatttattgagctattttctcctcacatagcataatttgaataaaccacaaattaattttctatcaatggtgccaaaatgtctttgagcattttaggattctcggagtggctatttgaaactttatttatttttcagcatattgctgaaataaaaataaaaa

SEQ ID NO: 202484 - DNA, 604 bp, Homo sapiens
tccacaatgaactctaatttctgaaaccctctttattctttcagtgaactctttacagcccacctttgagcccacagtatcctatgcccagaaaatgcttaataaagattcttttgttgaaaaggggaaggcagaggaggagggtagaagaaagaggaggaaaaggaggaggggtataggggggatataaaaagaaagagtaggagaaggggaaaacaattggaaaggktgactattgtgttttattaatgttgataatgttcaggagcaatatatgcaatgggttcaaaaataaaatgtaaagctctgaaagcatgaggagaagtctgtggccataagcatgttttgtatatttttatgaactttctatttgagttttttttatttatttctttggaaaacaattaggcaagtgagaaacattaagaaattggtttccactcatttattgagctattttctcctcacatagcataatttgaataaaccacaaattaattttctatcaatggtgccaaaatgtctttgagcattttaggattctcggagtggctatttgaaactttatttatttttcagcatattgctgaaataaaaataaaaa

SEQ ID NO: 202485 - DNA, 453 bp, Homo sapiens
ggagcatcagcaaagaatcctatgaaaaagtgtaaattcataaaaaggaaaatttcatgaagttttataggttatacaggttatatmgtttattataggttaactaaacatattaacttcaatctctgtgtaaataagactgagtcaccggaatttttcttctggctttaaatttccatgtctttatccccaaatatatattcctaagtattcccaatactcttgaagagtacaaccttatgagtgagaagttatctctagttttcccaaatagcaaaggcaacaggtgtccctcatggtagctaacagaagtaagtactatatccctctacatacaaagaatggggcttcctttgtcaagcagtggacccaaagcaactgtatatgcagtctccttggtatcagatttagcctgaggataaagatagtgtgagccagtttaggggaggggca

SEQ ID NO: 202486 - DNA, 499 bp, Homo sapiens
tattttccaggcccactacacttgtaccatggtttactgaaatatgaatcaaagatacaaacaccttacactcccttctctaccagatcgaaattatgattattatttaatgccaagaactcttgtcatgttactcaagctacttttcgaataacaacaatatcttacatttgtgtcaaattttgtagtctcaagttcattatttcataatgcaggtgcagtttctgtgtaattctcttgttaaatctttgaaaaatgtgtcatctcatgttgcgaatgattttatttaatacacatttaattaaataaaccttcattaattgagcacytacctttcaacctcatgtcaccctgtaaacatatttacaaatgttcttccattgcagcctcagacaaatggaacatatcgtaaatcccatgtctgtcacatgaataaactatattactctacatgatgtttccagtaaaagaaaggaggttaagaacacatctaagacaa

SEQ ID NO: 202487 - DNA, 583 bp, Homo sapiens
tattggaagaggaagcaaccaagaattttcaactggaggctctatcatccccagagttggacaaacaaaggaagagatgaggttactaaagctcaggatgtatatgccgtagaagctgaaatgaaacagactcacacggtgggagttgrggccatggaagaacaagctgcctggcaggagctggagcttcacaagagacacagtcactactaaaagcaaagagatatggaggcaagcaccctaggttatctcttcctcccaccctcctatctcctaccagtgccctccaatgccacttctagggagaagctgattagcaaggaagtcttggaactaattcacaagaatagcttctctccaatacagatagggatacaagggaaggaacttgagaataaacaggcaaaggctcactcaactccaaagctcatgttaacctcattaagctatgtcgcctacactccaacatttacttccagtagtgttaactgagtgtagcctgcagctgtgacaaaaacaagctatccatttgccaatatcacaatgccttttctgtatcttaagcattaccaagcacctcaca

SEQ ID NO: 202488 - DNA, 583 bp, Homo sapiens
tattggaagaggaagcaaccaagaattttcaactggaggctctatcatccccagagttggacaaacaaaggaagagatgaggttactaaagctcaggatgtatatgccgtagaagctgaaatgaaacagactcacacggtgggagttgaggccatggaagaacaagctgcctggcaggagctggagcttcacaagagacacagtcactactaaaagcaaagagatatggaggcaagcaccctaggttatctcttcctcccaccctcctatctcctaccagtgccctccaatgccacttctagggagaagctgattagcaaggaagtcttggaactaattcacaagaatagcttctctccaatacagatagggatacaagggaaggaacttgagaataaacaggcaaaggctcactcaactccaaagctcatgttaacctcattaagctatgtcgcytacactccaacatttacttccagtagtgttaactgagtgtagcctgcagctgtgacaaaaacaagctatccatttgccaatatcacaatgccttttctgtatcttaagcattaccaagcacctcaca

SEQ ID NO: 202489 - DNA, 582 bp, Homo sapiens
aaccatgttttctcttctataaaacacagacaataataatgccaattgcatagaattgttgtgaagattaactgagatgattcatataagacattgagtgcagggcctagcaaatagtaagtgctcattaaatgatgatgatggtgatgataatggtgatggatgctaaattacttaatatatctgaatacttcctgtttaatctacatcacagtattgggaagtcatgtaaaaatgagaaaaaaatatatgaaagcactctggaaactacttaattctaatgtacaacattaataatagtaacaatgggagtggtaagtaatggtaagcataaatgtttcacgtggatctaactcctaagtcatgcaaggagcactcagttctgttcagaacatactgtgttctctttctctttctgtttccttgcttgggaaatcaagagttatgactgggaatgtagtttaaatgagccagcaaaacactcatcaaayggtttattttcctaatcttggtgtatcaatttcaaaacctgaaaagttcatttcatatttcacaggctcttttatatatagtgtcataaat

SEQ ID NO: 202490 - DNA, 555 bp, Homo sapiens
acaaaacactgctgaaaaaaatcatagatgacacaaacaaattgaaacacatcccataagcatggatgaataaaattaatattgtgaaaatggactatactgccaaaagcaaactataaatttagtgcaatttccagaaactgtcataatcatccttcacataactaaaaagcagagtcctaaaatttatatagaacaaaaaaaggtcccacatagccaaaccaaaaaaaaaaaaaaaaawatgaaaaaatctgcaggtatcacattatcagaattccaactacagtacaaggctgtagttaccaaaacagcatggtactggtataaaaactggtatacagaacaatggaccagaatagaggacccagaaatagtgccaaaaacttacagccaattaatctctcataaagcaacaaaaacatgaagtgagaaaaggacaccctattcaacaaatagtgctgaaatgatttgccagccagatgcagagaaataaagggggattctcatctctcaccttatcaagaaaatcaactaaacatggagaaaagactcaaa

SEQ ID NO: 202491 - DNA, 555 bp, Homo sapiens
acaaaacactgctgaaaaaaatcatagatgacacaaacaaattgaaacacatcccataagcatggatgaataaaattaatattgtgaaaatggactatactgccaaaagcaaactataaatttagtgcaatttccagaaactgtcataatcatccttcacataactaaaaagcagagtcctaaaatttatatagaacaaaaaaaggtcccacatagccaaaccaaaaaaaaaaaaaaaaatawgaaaaaatctgcaggtatcacattatcagaattccaactacagtacaaggctgtagttaccaaaacagcatggtactggtataaaaactggtatacagaacaatggaccagaatagaggacccagaaatagtgccaaaaacttacagccaattaatctctcataaagcaacaaaaacatgaagtgagaaaaggacaccctattcaacaaatagtgctgaaatgatttgccagccagatgcagagaaataaagggggattctcatctctcaccttatcaagaaaatcaactaaacatggagaaaagactcaaa

SEQ ID NO: 202492 - DNA, 628 bp, Homo sapiens
acagcagctgagtaattatcaaggcaaaatagctcctttcacgtggactgtctttctggatttgagaaaagaatgagacatcaatgagaggccaatctaaaaaagtaccataacaaatgctatgcatccattcttaatcatttgcataggtaataaccagaattaaaggaaatttcatgaataaaattgcttctcctcatgaagattttaagttatgttggaaaattacctttgatatgtttaaaatatgagkgacattttgcataaattctacgtgcaacattgctagcttacgccagtcccttgttacaaacaaggtcaaaaggatatttaaaaatcataactgaatgttgacaaaatgacgatttttcctctaatgtgaattgaagataattctctaattctttgaatttttacaggagatgttgtgttcttaactaacaaaaaaatcacagagtcactgataatgcagaggttatagggaaactgcattttgtcttatctcttcattttgaggaatgggaatctgaggttagtggctcaagccagggtatcccaggtagaccagtagacccaaatcgcagcaagcagaaattagtcccaaacaatttcccctgaagctgtagcc

SEQ ID NO: 202493 - DNA, 501 bp, Homo sapiens
aacatcttaaaaaagacccctttatgaacaaatgtttttcttggtatactggaattaaaaccctacccaaagcgctagcaacataaacatcgagaagcaagatatatcgatctgggggcattcgaaggagaatgatgtataaagtcacaaaagcatgaagtagaaaatgagatgaacaccaggaatacagcatttcacagatactattgaagtaactacaatagccagaaaatgtagtgttcagataatccacacaaataggtgacttgccaggatgaggcagggaaatcttttcattagttgactaaaaatgtacaaccacaaagagtctagcttaarcttcacgttgctcagaatagcactgcactagtgtagaatgcagcaggtcgtcactgcggaggctcagaggttccgactctgctcctccgtagccacagatgagtctgatgaggaactttctataaataataaatgcctcagccttgtgctgcatttgcctta

SEQ ID NO: 202494 - DNA, 548 bp, Homo sapiens
aaagttgcagccagttgtccagacttcctgggcttttacattttgctacgctcttttgggtctccctgactcagtgtgtagtttcctagtcagggtataatctgtgaagtctttatcttagccattccatgactctagtttccaggatctccatgttaaaggtctttctggtctagcactgtctttgttttgtgctgctctaacagaataccacagactgatacattagaaaggatagacatttatcttctcacagttctggaggttgaaaatgtccaagatcaagccattgacatctggtgagggyctgcttgctaaatcctctggaggggagaaatgccatgtcctcacatggtggaaggcagaagggcaagagacaaaaggggaattaactcgcccttttataatggcattaatgccactcatgaaagctctgtcctatcacctcccaaaggttccaccttctaatactgacacaatggcaaccaaatttcaacatgcatttcagaggggagaagcattcaaatcatagcagccactcactccag

SEQ ID NO: 202495 - DNA, 591 bp, Homo sapiens
tctctgcaggaagtatttttgatattattttggcttttgaaaaaaaaaagactttgtgggggttacctcagtgcacagtgaaattgcacattcaaactgtttgaatcctgtcctccaaatacagaggtcttatgtgaaaacaatctcattttcattttactttctgggaacccctccaaggcatggtgaattgccagcattttgtgaccttcagttcctttactgctctcatgggaaacttgaccttggaactgtagagaggaggggaacaagttttgggtgggtcaggggcagaagtttcattcactctgcttgatcaytgcccaaaactatgggttctcctgcaccaagatcattagaacctcagaagtcacagaaatggggaccaaaaagtatgatgaggatgcacactaacaccaaagcaaggatgtggacaacatgactgtcgcatgggatggagactcaggcagccagccaggggcaattcccagtgaaacattagggataagaaaacactggatctcctccagatgcatagctgatgcagggctcccggacccttcagaacatcttaggacttaaatggaattc

SEQ ID NO: 202496 - DNA, 577 bp, Homo sapiens
atccttgaaaacatcaacccagtgatgacaaaaaagaattctgcctagttagagttctctgcaggaagtatttttgatattattttggcttttgaaaaaaaaaagactttgtgggggttacctcagtgcacagtgaaattgcacattcaaactgtttgaatcctgtcctccaaatacagaggtcttatgtgaaaacaatctcattttcattttactttctgggaacccctccaaggcatggtgaattgccagcattttgtgaccttcagttcctttactgctctcatgggaaacttgaccttggaactgtagagaggaggggaacaagttttgggtgggtcaggggcagaagtttcattcactctgcttgatcactgcccaaaactrtgggttctcctgcaccaagatcattagaacctcagaagtcacagaaatggggaccaaaaagtatgatgaggatgcacactaacaccaaagcaaggatgtggacaacatgactgtcgcatgggatggagactcaggcagccagccaggggcaattcccagtgaaacattagggataagaaaacactggatc

SEQ ID NO: 202497 - DNA, 549 bp, Homo sapiens
tgaaaccctgcctgcttgttcagaaaattagatttttcgtgcttcctggtttttgcatttagtaaattggctgggcgggttgtgtttgggtggagtctcatccagtccttaacctattttgaggtgttacccaagtatatattgtggccctgaccacatatcttataagaacctactttacatcccttggtgattcctcatatagaataagtctccccaaaacacccatgaaaaccttgaaatcaatacccaaatatatatcagatctattccacatgccctaaacccagcatatttcttcttcccaaacaatgtccattgctcaactcttcattgtctaacagaccagggacaagaggggctactccagcaattttgccacttcctgcatctccttcactggtctcctttggttttcctttccttggcagkgagtcacctgcccatcacagggttctgttccactcctaaattccaaatctgattgtcctcaacctcaaagaaaatctgtctcaccctgtcacctctgcaatttttagtagttgttct

SEQ ID NO: 202498 - DNA, 583 bp, Homo sapiens
  misc_feature (1)...(583): n = A,T,C or G
cctgggcgacggaacaaaactccgtcttaaaaaaaaaaaaaataaagttaactaactttacctgaacaggagtgggaagggttttaagcatgcaaatcacaaggtcaactntgtgttttggaaagatcactctcgctgcagcacaaagtatatgggaactaggaagtactgtaaccaaggggaccaattaggttgctgatgaggtcatccaagtgggaggcgaccctgacctgaggaggagggtgacagcatggacaaagaaaaagagaaagtgtcagcaggacttggcgattaattggagggcaaaagagaaggtgcaaggggcttgggtgagagagaggaagttagtggcattmtcaggaatatggataaaggagaaggagcaggtttagaggtggtggaaggaagcaggtgcttagtctggggcatgctgaatttgaggcacctgtgggacatttcagaattgggagaagggcacaggtgggacacagtggagatggtttcagagctaaatcttcacatttcacaatttgcccaaccttctaccctcactaacagctactattatacccaatatcagaag

SEQ ID NO: 202499 - DNA, 502 bp, Homo sapiens
ttttttttcaacctggaaaggatcataaacttaggtcattctcatagctttttcatagtgggctcttcaaaaaacttagataaatttattttgaaggggactttatatcactattgcaaacctaggactgcctgctacaaacagaaggtaaccacaacrtaaacacagtacgaacaaaatgagattaaatgttagctagacactattgcctttttggttttagttgacaagcaagggatagagaggtttcattactaaactgagacttccctcttgactaatcagaactgattaagtgattaatgacattaatgctatttaaggatatggccatcttccacctcacatcatcttgcataccacctgtggcataaatgctacgctctgagtaatgcatttttggttcagtaactctccaactggttacacaccaaaatacatgtttctaagtattcctcctaagatatgccctaagatataaagaatcataatcttcagggat

SEQ ID NO: 202500 - DNA, 436 bp, Homo sapiens
agacttatcatattgagactgtagattcacgactgaagtgttattagtgctataaactaataacaaatgtaaaaytgcaaatgtacagagctaccaaaggcctatttgacttttcaaagtgctgtgcttcttgttgggcttaatgtttgtgagcaagcccctgctatttgaattaagtattggtcccaagttctgggctccagtatagttctaatgattggatgtaggttgaggggtagaataatgcatttgaaaagagtaagaagcaataaccactgtgataagagtgtattggacatcactgaacacacgtgcctatcactgtaagctttgccagcatcctgtggttagcaataatcagcagatgatggagaatggccaggagacaaaaggaaaaagtagtattctatgaaggagacgggaaggaatgacacag

SEQ ID NO: 202501 - DNA, 423 bp, Homo sapiens
aagacttatcatattgagactgtagattcacgactgaagtgttattagtgctataaactaataacaaatgtaaaactgcaaatgtacagagctaccaaaggcctatttgacttttcaaagtgctgtgcttcttkttgggcttaatgtttgtgagcaagcccctgctatttgaattaagtattggtcccaagttctgggctccagtatagttctaatgattggatgtaggttgaggggtagaataatgcatttgaaaagagtaagaagcaataaccactgtgataagagtgtattggacatcactgaacacacgtgcctatcactgtaagctttgccagcatcctgtggttagcaataatcagcagatgatggagaatggccaggagacaaaaggaaaaagtagtattctatgaaggagacggg

SEQ ID NO: 202502 - DNA, 423 bp, Homo sapiens
aagacttatcatattgagactgtagattcacgactgaagtgttattagtgctataaactaataacaaatgtaaaactgcaaatgtacagagctaccaaaggcctatttgacttttcaaagtgctgtgcttcttgttgggcttaatgtttgtgagcaagcccctgctatttgaattaagtattggtcccaagttctgggctccagtatagttctaatgattggatrtaggttgaggggtagaataatgcatttgaaaagagtaagaagcaataaccactgtgataagagtgtattggacatcactgaacacacgtgcctatcactgtaagctttgccagcatcctgtggttagcaataatcagcagatgatggagaatggccaggagacaaaaggaaaaagtagtattctatgaaggagacggg

SEQ ID NO: 202503 - DNA, 421 bp, Homo sapiens
gacttatcatattgagactgtagattcacgactgaagtgttattagtgctataaactaataacaaatgtaaaactgcaaatgtacagagctaccaaaggcctatttgacttttcaaagtgctgtgcttcttgttgggcttaatgtttgtgagcaagcccctgctatttgaattaagtattggtcccaagttctgggctccagtatagttctaatgattggatgtaggttgaggggtagaataatgcatttgaaaagagtaagaagcaataaccactgtgataagagtgtattggacatcactgaacacaygtgcctatcactgtaagctttgccagcatcctgtggttagcaataatcagcagatgatggagaatggccaggagacaaaaggaaaaagtagtattctatgaaggagacggg

SEQ ID NO: 202504 - DNA, 439 bp, Homo sapiens
ccagctggtcctctccaggaaaaaggggtggggtgcaactgggattcctgtcaccaaggaatgctgatgccttttattattatgctataccagacatgtgttcaggagtcctgattcttatgtatttctagttcaattgtcattgtgactttggacctgttattgatcccggtattaatttcttcttttacctttccacatacccagctttcgccacagaacacagcctgtgtgttcatttgaacttctccctgctgggctgaatgtatataagacatcatgttctcmttccttccagctgacaaaatccacgctgagctgtatgtatataagacatcagtgttctcattcctcccagctgacaaaatcaggttccatgtcaggttttcacacttggaaatcaagtcttagtgtattaggcattaagatgttaagatga

SEQ ID NO: 202505 - DNA, 587 bp, Homo sapiens
atacttttaacttattatatataatatttactacttttcagtggaatcaaactgtaaaaaataagacagctgactttaatatatgactttgaataagtaatataagggtcaagagatacaaagaacaaacaacggaagacacaggatttcatagattctccaatgtgctttttttacactttcacatggcagcagttgaactatgggggatatgtcttacaatccaagatgtatgacattggaattagcactgttctttttaatgtctttctgtaacggcatataaaataatggcacgtcttaaaattgatgctgactcatattcaccgagataagtaaagatgccagcatcatgtggctgaggatgcttcccagctcacccttgtgtttacttrgattcaccgagataagtaaagatgccagcatcatgtggctgaggatgcttcccagctcacccttgcgtttactccacatcctcttagagacgtgcaatgcagtttcttgtatatgctgctaaatcaaaattctattttacaggaatgtaagagtcctttctgttgctttctcagctttacagaagtagactg

SEQ ID NO: 202506 - DNA, 601 bp, Homo sapiens
caggtctgcaacagggacggataaccagggcacatcctaaggttacaatctgaggaccttcctggtgggtaataatagccctaaaatacacaaaaactcaaacttgagactgtgttgcctaagggcagagtctcctttttgagacaggtcctcactctgttgcccaggatggagtgcagtggttcaatcatagctccctgcagcctcaatctctcgggctcaaaccatcctcccacctcagcctcccgagtagctgggactacaggtgtgtgccaccaaacccagctaatttttgtatttgttgtagacataggtttcgccatgttgcccaggctagtctcgaactcctgagctcaagcgatccgcctgcctctrcctcccaaagtgttgggattacaggcgtgagccaccgtgcctggcctccttttagcgtttttcttgtttaatagttaaagctaaagatttaacagaaactagttaccaagctcaattggtgaagctgatccagggacgttgaaggctgacttcttcctggttatcttccatagctgtgttctgcggagaccctggcatccccgcagaagggcgacttagtgggaaa

SEQ ID NO: 202507 - DNA, 566 bp, Homo sapiens
gccatgtaatatttaagtgggatatacttatatttttaaagtattcattttccaaaatttaaatttaattgggtgttctgtatttttgtttgctaaatctggcacccctacctatattctattatccaaccaaaatttgacatcatggtcacaggttaatccaagtatattttctgactcaattcatgttgcttcctagcttctctctctctctcctcttccttcccaatatattttcactttccttttctttcctggtgtctgtatcttgttaatttcctccatactaaatctacttaactcacacaaatcaatggaatattttctcaaaatgataccagttggtaacaaacctagattyaacacaaataagtaaagttgacagctcactgatgttggcattttctgaataactgcatatctttccagtaccagaaacccaaaagtcaagaatttagaaagattgaggaagaaaagtaaatgaacagaaaagagagacccagtccagccctaaatcttctcacctcttgtcagagagagaaatatttttagtttagctgtttaca

SEQ ID NO: 202508 - DNA, 424 bp, Homo sapiens
tagattttattaaaatagtgttgagatgctgaactttaggcacatcaaaggttaagaagacatttctgggcatttcaccatcactcccaagaaaactcatttcaagtagaaggagactttgagtaacaagcaaatgacctccaaataaaaacccttagggcacaatgtgttcagagaggggaggaggacacattcagatcctctaagtgagaaagaaagcaraataggaataaagtgagaaaaatcattccctaatcatttggtggctggttttgtttttttgtttttgtttttgattttgtttttgtttttttctgtcccctctgagccatggaagatactggagttaacaaaaattttataaactaaagaaagcaactttataatctaaaagaaagcaactttccctcctgtcttttgaatt

SEQ ID NO: 202509 - DNA, 418 bp, Homo sapiens
cttggtttcacaaatatgtctggcagttggctcaatgtcagtcaggatgacaggaatgacttgaccaagtgtctcgcatcgtccaacagaatggatgaggcttattcactcattcacactgttggtgctcaccagagttcccaaaagaaagcagattaaaggggtgccaagcactttttaagtctctgccatgttrtttgctatgataccattagccaaagcaagtcatgcaacttcttgtgggaggggcctttccatagggacagatgcaggaaggggaaatttatgtccattttgggagaaaatctacctaaatatattagagtatcacattgcgtttctagaatattacatatacagcggcataagtccatttcttttaacaacttgcttttgtcactcaaaactctccttgtgc

SEQ ID NO: 202510 - DNA, 418 bp, Homo sapiens
cttggtttcacaaatatgtctggcagttggctcaatgtcagtcaggatgacaggaatgacttgaccaagtgtctcgcatcgtccaacagaatggatgaggcttattcactcattcacactgttggtgctcaccagagttcccaaaagaaagcagattaaaggggtgccaagcactttttaagtctctgccatgttgtttgctatgataccattagccaaagcaagtcatgcaacttcwtgtgggaggggcctttccatagggacagatgcaggaaggggaaatttatgtccattttgggagaaaatctacctaaatatattagagtatcacattgcgtttctagaatattacatatacagcggcataagtccatttcttttaacaacttgcttttgtcactcaaaactctccttgtgc

SEQ ID NO: 202511 - DNA, 405 bp, Homo sapiens
cctacccccacaggtcttccctcaggttcttaccacccaagcattctgcctgccyctgcctgagagttcatccagtgacccaggggccagcctgcccctctctatcgcagtcagcacctgaatcctgggctagcctgatctggctccagacccttcaggactcatacatgcagtccagcggaccatctaggggcctggaaactgaggaactacctatcccattcaaattctgctggcacctgaccacttctcacacaagcccaaaggcatagcccccgcctttacacaaagaagcagtgctatcatatcagagaacagccctgccataaagctatttgtatcaggctgagtgatgaagttgccccaaaccactttaatggagaatcacaaaagaggcattttctg

SEQ ID NO: 202512 - DNA, 602 bp, Homo sapiens
tagaattccatttgtacttctcaagtaaatgggaaattttctggaaactgcagggatgtcttagaactaaagtggatgaagcacagcaggtatcataagaggctgaaaccagagaccacaaaatcatgagcaatgtcactcacttcagcttcctcacttttgtgctcttgcattttctctcatccatgtgattgcttgctctctttctctctctctctctctctcacacacacacacrcatacacacacacacacaaccactaactctgtcttcacaaagtccttactcctgtctttctgcaaagcagccttctagcatcagtagcatatggtaggaaacggctccacacatctccctctgcaacagtgagccacacctagttagcctctcattggcaattccagattccctagtacaaattgatgcactggtagggggtggggaggtgggtcaagaggcacatagatctgctctcaccagggccagaggcttttagaagtacagcatgacatgattggtataaagacctccttgggtggggtttgggaatctagcttaatgcccaaggagcaagtttctttccatagtaagagcagtgatc

SEQ ID NO: 202513 - DNA, 585 bp, Homo sapiens
gaatgcaatttccacatcctgatkatttcattacgcttacctgaccaattaatgacctcaattttctaggcccttgccctccatgatccccttaaaaaccccagcgcagaacatcttggggagatggatttgagtctcctcctatcttttcacttgaccactctgcaatcattaaactctttctctgctgcaaaccctgttgtctcagcctatcagtctgatactgcacagcggacatacaaacccattggtcctgtaacagtgagaactacagtgaagacaataaaataaggtgacatgactgtgagtgacttgaggtgggggatactttagatgagtggtcagagagggtttctatgaggtgacatttgaggtgagacttgaatgcaggaaaggggagagccatcagagcatcccaggaagtgtaaaaaccctgaggcagggagtgagattgtggtctcagaggaaagaaaaaaggccagagtgactgaagaattgtaaaaatgggaaagggcaggagcagacaaggtcagagaggtaggaaggtgttgaatcacccaggatcttgttgaggccatggtgagg

SEQ ID NO: 202514 - DNA, 332 bp, Homo sapiens
gaattccaagttaactatgttggcaagagttctttgcaggcaatactgcatactttccattgtgtcacatcagagggaccctcatgtctagttatcccccttttaatgatgctcaatgtttagtgttgtcaacctgatctttccactgtcaagctctctattagtagttttagcagctgttgttcatcattgtccagctccatggttctcagtcatggctgcatgttaawatcacctgggaagattttagaagacactgatatcagggtgctgttccagatcaattgctggaacgtggagccgaggggttaatttctggggtagggctgagg

SEQ ID NO: 202515 - DNA, 546 bp, Homo sapiens
taccagagaaagacctgcagaaacgaacatttgggggacttccaatgaaacaacgcagtttgccaccaatcaccctactgtgatgcccacctgtcacaactgccacccacttgggttgtggatggaactcccgatcagctctgtggtgcctcattaccaacaatggatggacagcgactaccagacatttggagaaagctggcagcatctgacagggagagcagaacaagattgtagaaaaagaaatctggaaaagaaaatagggaaaatagaaagcaaaaacagggaaagattatagacaattcaaagaaaaaaatacaagtgggaataaaatacaaaaaaaaatcctcattaatsattcaagaaaagcaaattaaaagaaaaagattacatttttttgcccatcacatgacagaaacttgaaaaattgagcctcttcaatattttccaaggtatggggaatcagtaactcttagctactgttagtgatcgttcagaatgcaacaactttattggaaggcaatctggtagaacctaacaaaattt

SEQ ID NO: 202516 - DNA, 504 bp, Homo sapiens
gctagcagtgaagtgaaagtatactgttgtaagtttcttatactttgttaaatactataacatcacttgatggcrgattgtggtaagtttaaaatgtatactataaaccctaaagcaacctaagataacacaacagttatagttaagccagtaaaggagataaaaagtactcaatcaaaataaggcagaaaaagataataaaggacaaatgagacaaacaaaaaacaaataacaagatggtttatgtatatgtaatcccagccatatcaataatcacactagatatgggtggtctaagcaccctaattgaatgccaaagattgtcagattgaatgaaaaagcatgacccaactatatgctgcctacaagaatccttctttatatgtaaagacacaaacatgttaaaagtaaaaggaaggaaaaagatacatcaggctaacactaatgaaaaacaaagcagggtagctatattaacattaggcaaagtagagtttggagaaaaga

SEQ ID NO: 202517 - DNA, 563 bp, Homo sapiens
aggtaccatcctccaagcccctgagctaccaaagggcttgaaataaactccaaaaaaaccaatcctgatgccactgacatggagtcacaagctccttttcatcatcacctctcttctgcaagaacactaatgaaaaygaattaatccatgagggacccacagcacagtgctgcatggtgaagtggggatgttgcctcttcccatacaaacaaatatatgaaagcaacaagacagggtgttctgaacatcggatgaggatccagcccacaagtgccataacaactcagtgtgatgggctgccctggtcaggaaagacccgtggagggggttgtatcttgaatgtggccttgaaagagggatttgaatgggcttagggatgggaatgaatctaactccatgatttgtgaacactttcaaactgcctgggcctgtgtcaagtgctttacatgcatttttttatcctgtttaattctcataacaacctcatcagaaaggtagaattatttcctcatcttatggaaaagtgttcaaagaggttaattaaaacagcctaaggtcacaca

SEQ ID NO: 202518 - DNA, 584 bp, Homo sapiens
catgatgactcatctcaggatgttttctctacttccttcaaatatgattctttccggataatttaatttaaataccaatataatgattatttctggagatgggggatttgcctcctatgataattctcttatctgcagaaggatagaatcaatttaattcccaagtagcaatattgagatgtatttttattggtttgcttaattattttttaaacttctgtaactactgatggaaactaattaaaactaaatgcacattagcttttattaaatggctgctactgagatggtgaagttcaggtaaattgtaggccagcacattccctttaataatgttggctgattcacaattggggtaatttcagatttatgagatttaaagcatccatatgtcctatttcctgaasaatttttaataaagacattaatgtatgtgccatttcaatctaatgagaacagaaccactaactgaataatgtacattctttgcctgaaatcaaatttcaccaacctgggagtgttacagtggagaaaagtacttggggtttatctatcaagtaaacggaagtctttcaccactgatt

SEQ ID NO: 202519 - DNA, 638 bp, Homo sapiens
ttaattccatccttttcaaaacttttaagcctataacctgaccttgcttctcatgccgtgtggcagctgtggaagaaaagattttcaaaagcattcttgaaaaggcttgccgtagttttgttcaaagtgattatgccactaggaaatgaatcatgcttggaaatactgcttgaagttgccagctgaataggctttccactggggtttgcaataagaatgtttcaaatggggcagagcctgagtctctggtccacaagatttggtgacagattgctgctccttgcacctgatgaaaatacaagactctggagccatcaagtcatggtctttctatggaaacaaagacatatttaattttggggaaatatctgttgcatgscactcagcaaggtgccttgcaaacatcacctccaatctcagcagaaaggctgtgaggtaagttacagtgccccattttacagattaggaaactaaggctcagcaaggttaaatagaacaatgcggtgcccggcggaatgccagggctgactgagtctggtgcctgggctcttaccactacaccaaatcctgaaactgaaagtcagtgaagttctaatttgggcagctcctgattcagggagtcagggatcctcacctct

SEQ ID NO: 202520 - DNA, 206 bp, Homo sapiens
aaaaaatctttaaaacatagaaggaatttctgagtgttagggctaacggggatttkagagattagctggtacagaacttttcaaatattgtggatctctttcctctttccctcccttccttccaaaaaaccctttcttcagatggttgaagaggaaaggggcaaggagggggctgtggtgctcagcctgaaacttgctaattcagg

SEQ ID NO: 202521 - DNA, 272 bp, Homo sapiens
tggatctctttcctctttccctcccttccttccaaaaaaccctttcttcagatggttgaagaggaaaggggcaaggagggggctgtggtgctcagcctgaaacttgctaattcaggccgcctccttattctagaggaaaaactgtggcctaaagtgctggccgmcttgccacaggtcacaggtatgtgagtggcagagctgggacaagatcccgggtcccctgtccccttctctggtgtctctgttcttcattgtcactacctttcactctg

SEQ ID NO: 202522 - DNA, 564 bp, Homo sapiens
tcactgtgtggtcaggaccttgggtcaatcacttcacctggtgactcactccctacctgtaaggtgtggaggacagctggagtcactgtggcacctgtgtgtttagcagtgtgtttgcttgttcctgcttttatgtctctggctggtctaagatggaatgataaaaaaataacggaatgcactttgtaaacgagagcatcctagacacatgtaaagattggaaaattagaaagctgtctctactgtagttacttctcagatatgaccaaccattattaagaattcattggctaatagkgctacattttctcatgatcattcttctgttttagaagtgggcaactgcagttttaagaataaatgtgtaaatgtgtgttttcatgagagacaataaagctgttttcattaagaatgaaatatgcaacttgcaaacacttttacttttcttgaattgggtccttcagcagaagcagtttgcccagccctgacatggaaagtttactttgctcatcaacctgaaggagaccgaaagctatgagaggcggctcctgaaaagaatctaga

SEQ ID NO: 202523 - DNA, 446 bp, Homo sapiens
tgtgtccccacagaaatgcttggcccctcaccccagcccccacacccatgagagcttgggtctgtggtatcagccacacacagattccataaagagccagacaagatggggacactaacaacacaatctccagtgcttctgcctcttccaggctcacagctaccccagcaggaagtcttgctgatgtgctggtttcaccaaacccaacagccacagtggctgtagcaaaagtagttaagtctgtctcagaaataaagaccaacgaagtagccgagagatggattttgtaactttagatctttrgggaatgaaaactaaatttaacccaactttggcaatggacaacccctacaaatacttgtttgcaaaatcactttattttatattatagattaacattaaatgagtaaggaatacataattgagtgaacattggtgttatacat

SEQ ID NO: 202524 - DNA, 660 bp, Homo sapiens
tttgctgtgtgacacaagggaaattaagaaacacattggatttcaaactttaaaagtgacacaccaagtagtgttcttttgtgccagtaaaacaaagctacagattgcccagagggagacttctgccttggagtgaacgcccctggaagacactacactggtactttcactccagtgacagcataggggaggaaaaatggggatagtaactggtttacatctcaaggatattatagtctcatagttgcttctttttaacattttttccttagaattaccatctgttaggcactgtcatttttcaaacccattttatagattaggtaattggaaaatgaaaagtatcttgctgaaattcatatagctagttgcagtccaagaatttaaaaccagatctctctgattccagaatctatgaactttgcatgacacccagccatgttctcataagtacctcattttttactctaaaaatctctcccagatgagggtgcactcaacaaaatctgaagtgggacagtatacaggacaaatgacctgtctttctcagcaaataaatyataagaaaaaagagaaagggaaaataacatatagattaaaaattacttaagagggggagttctgggaagatggtgaataggagacaggactgacatgcag

SEQ ID NO: 202525 - DNA, 567 bp, Homo sapiens
agttacccaatgagaaaaagacaaaacaaaatgaacaaagcctccaagaaattttggattatgttacatacacaaatgtaagaataattggtgttcctgaggaagaagagaaatctagaagttttgaaaacatatttgggggaataatcaaggaaaactttcctggccttgctagaaatctagacatccaaatacaagaagctcgaaggaaacctgggaaatgcaacacaaaaaggtcatcacccaggtgcgtaatcatcaggttatccaaagtcaagacarggaaaaaatcttaagagctgtgaggcaaagtcatcaggtaacctataaaggaaaacctattagattaacggcacatttctcagcagaaacccgacaagccagaagggatgggagttctatcattaacctcctcaaacaaaataattgctagccaagaattttgtattgagcaaaaactaagcttcataaatgaaggagagataaagtctttttcagactaacaaatgctgagagcatttgccactctcaagccagcactacaagaaattctaaaaagagatctaa

SEQ ID NO: 202526 - DNA, 609 bp, Homo sapiens
gcacccaggaagacagtgtctaaatctattatatgacatgtctgaaatctacttaagatcacctcgtggtcactcaaattaatagctactatttgccaagttstatattaaatgtttgatataccagacttcatccaatcctcacaaaagccctagaatgcaggtagttttattcccattttgtggatgaagaaactgagggtcatagtgattaacttaccaagtgttattcatttgcttgttcatccattgattctctcaatatctatttatggagtgcctactgtataccgcatatcattctcattgctgaagatagaacagtgaatgtgagagaaaaaaaacgtagattcatggaatttatatctgactgagctgaaaaagggtaaccagaataggagagagctgacatctgagcaatattaagtaagaattctataactgccccttgaaatagaaaggtttgctatgtaaaatttcactgctttctgcaggaagcctggatagcaacataaaagaatatcattacttttacagatatcatcattattttatagatagcatcattattttacggatatcatgatatttttatgaatatcatgagtg

SEQ ID NO: 202527 - DNA, 609 bp, Homo sapiens
gcacccaggaagacagtgtctaaatctattatatgacatgtctgaaatctacttaagatcacctcgtggtcactcaaattaatagctactatttgccaagttgtatattaaatgtttgatataccagacttcatccaatcctcacaaaagccctagaatgcaggtagttttattcccattttgtggatgaagaaactgagggtcatagtgattaacttaccaagtgttattcatttgcttgttcatccattgattctctcaatatctatttatggagtgcctactgtataccgcatatcattctcattgctgaagatagaacagtgaatgtragagaaaaaaaacgtagattcatggaatttatatctgactgagctgaaaaagggtaaccagaataggagagagctgacatctgagcaatattaagtaagaattctataactgccccttgaaatagaaaggtttgctatgtaaaatttcactgctttctgcaggaagcctggatagcaacataaaagaatatcattacttttacagatatcatcattattttatagatagcatcattattttacggatatcatgatatttttatgaatatcatgagtg

SEQ ID NO: 202528 - DNA, 609 bp, Homo sapiens
gcacccaggaagacagtgtctaaatctattatatgacatgtctgaaatctacttaagatcacctcgtggtcactcaaattaatagctactatttgccaagttgtatattaaatgtttgatataccagacttcatccaatcctcacaaaagccctagaatgcaggtagttttattcccattttgtggatgaagaaactgagggtcatagtgattaacttaccaagtgttattcatttgcttgttcatccattgattctctcaatatctatttatggagtgcctactgtataccgcatatcattctcattgctgaagatagaacagtgaatgtgagagaaaaaaaacgtagattcatggaatttatatctgactgagctgaaaaagggtaaccagaataggagagagctgacatctgagcaatattaagtaagaattctataactgccccttgaaatagaaaggtttgctatgtaaaatttcactgctttctgcaggaagcctggatagcaacataaaagaatatcattacttttacagatatcrtcattattttatagatagcatcattattttacggatatcatgatatttttatgaatatcatgagtg

SEQ ID NO: 202529 - DNA, 562 bp, Homo sapiens
tttttattttggtaatagaatggataatgtagatgcyttacatggatgacagtgaaaatgttggttgtttatcctgaaatagaatttttcctctttgggattttgggaaccatttttaaccaattttttaaaaaattgaagtaaatatgcatataaaaattttgtccaggagcacaaactgattcagtttgatgttcaatgcatagtcatttgacatgtatatacacttaggtaaaaatcacccaaaacaatatatagaatagtttcatcacccaagtaaatcttttcatgcccttttccccttacaagctcttcttcctcaagaagatgaccactactcagatttctatccccatagattagttttgcatgttcttgaagttcatgtaaatgtactcttttttgtttggccactctctctctcaacattatgttttagagatttatctgtgttgttttaaatatccatagtgtggcccaagtagtattctattatttggatatactaaaatatgttttattcattctccctttatggacatttgtgctattatcggttttt

SEQ ID NO: 202530 - DNA, 559 bp, Homo sapiens
catcacacgatttagctctcacctctcccgcaactttgcctgtggcagttccagcccttggaagtcccagagaatagatggccattgtacaaatagtcttgaattgtttgttgatgacacattgccccgcacacaagccaatttttttttttttttttttttttttgaggctctgttgcccaggctggagtgcagtggcctgatctctgttcactgcaagctccgcctcccgggttcacgccattctcctgcctcagcctcccgagtagctgggactacaggcgcctgccaccacgaccggctaatttttttttttgtaagtagagacggggtttcaccatgttagccaggatggtctccatctcctgacctcgtgatccgcccgcctcggcctcccaaagtgmtgggattataggcgtgagccactgcgcccggccacacaatccaatttctatgggcagtgtttagggcccccactgtatctcaaatatgtccagtggataaatcagatctccagagacacaactgcagcctcaatcattgactttccctatcagtt

SEQ ID NO: 202531 - DNA, 574 bp, Homo sapiens
tattaaataaactgaagtaatattctttcacgacctcctccctttcctacattcctcagcaaccctgaatgaggctctatcactaaatttggggccacatacaatcactgttttaaatagaagcctggatccccttcagccactgcaatcactcactggtaaaacatacccagcatgacaattcagtggcctccatgtgcagattatcctagggttagtaacgaagtggccaatgccagcagttagagttattgctgtctctatcatcaaagaacaagtgtaataragcagtctttagtttccgagatccttaaacatcaggtggattgttttttgttggtgcgtgtgtgtgtgtgtgttgtgtgtgtgtgtgtgtgtgtgtgtgtgtgtgtgtgtatttcatacatctctttctcccacaaaccttttctttttctttttaattttagattcagagggtacatatgcaggtttgttacatgggtatattgtgtgatgctgaggtttgggcttctaatgatcctgtcacccaagtaatgaacataataccagataggtagtttttaaacacttg

SEQ ID NO: 202532 - DNA, 591 bp, Homo sapiens
attactgtctcatctctattcaaacatttaatgttcactagcaggtcatatgttatgaacactttagaattttattgaagaatttaataatttcttacctttgcacatgtgatgcactttagacatatataaattcagttccgtttatttcatcgatttaaagtaatacacacacacacatgcacacacatgcatacacacacacatacacagtaaagtacattgctcctagttatcttgagaagattaatcttatttcaaagaggctctacatgatttctggaattaggcactagatttaaaatgttctactagggaatataatatatggtgaaaaaatggcaacagaagggcagagatttaggtttccttcatagggaatgatgatgaatagaaatgtasatctaccattttctgcagatgtagaaaatcgtattttctgctcttgtgattttatgcaatgctaaacttttccataaaagaaaatgataaaatccatctcttctcagtgaagtgagtcctcatagattttatgagacatatgcacctcctggcttggaggctgccaggtgtttggccccatgctgctga

SEQ ID NO: 202533 - DNA, 611 bp, Homo sapiens
gaattctttctcccaaagatcaggaacaaggcaagcatgtctactctcaccacttcttttcaagatagcacagtgcaaccaggcaagcaaaagaaatatagtttgaaaaggaagaatatctgtctctgcatgaccaaggattaggcaaagagttcttagacatgaaatcaaaagcatgaaccataacagaaagttggtaaattagagtttatcaaaatgaaaaatttgtgttttgctaaaggcactgttatgagaatgaaaactcaagctacagattgggaaaaaatatttgcaagtcatatgtccaacaaaagacttgtataaccagaatatataaagaattctctaaactcaacagtaagaaaacaagccatccaatttaaaaagygggtaaaatacttaaaaatacacttcaccaaagatacacagatggcaaataggcatatgaaaagatgttcaatatcactagatattaggaatatgcaaattaaagccacaatgagatactactacacatctattagcattgctaaaataatggcaatattggcaatacctactgctgatgagatagcagaacaacttgatctctcatgtactgttggtgggaa

SEQ ID NO: 202534 - DNA, 637 bp, Homo sapiens
atttctgctcagctgagtgtgtggtatatctagctagttaactctagaattctaatcaaaggactgtcaaagcagcaagacaaatatttgtgttagtgctgcagttgctaacttcagatgagatgatgtggctcttgaacacattcagacaccaccctgagttcttggcagccctttgaggagtcctttatggtgcttattaactagctttttgtgccatgccagttgtatgtccccatatccccatataggcttctagaatacgaattctggcttgttaatgrcccaatcttggtagaaaatgcacttggagtggttttctggtaatagttatataaacaggcattcacaccaactcaggggagtctcaggtgtgaccatttatcttgatgtggggccacctgctgtgtcatcttcttgaggaaacttctcaaggagtggtgtgacttccttttaacctttccttctctttctgctctctccctcctgcctgcacccacacatttctctgtgggaagagaacagaactctgttcttcccccattcatcaccacttcttaagggagagaaatgttgttttcgttcttcaaataagtgtagtctatcaccatactaagctcaaatggttagacagaac

SEQ ID NO: 202535 - DNA, 585 bp, Homo sapiens
tgtaattaaggaggacaaataagtcttacagaagatcacaaaccaagacccttccccagtatgmattttacagtaaagggacacccacattcacacagacacacacagatacacacacacacacacacacacacacacacacgcacagtttccttaaaaccaaatcctgcttggcatgaatatgtataattagatgttccctaggagtgagaagtagtaattaattcagtgttaaacatcacaatctattacttgaactccatagcaaccacggttgccaacagagagaaaacaaaatttcggagcctatttttaaataattacattgaaatttttgaaaatgtgtaaaagctgacacttgctatttttaggctaaaacaataggcattaacacaggaagtagagaagaatgccaaggaataaaggcaaaaggaaatctcctctgaaccaacctaaacaatgatgtggaaagtatgactttgaccctgcccaaagcgcagggcccagctgctccctctggggaagaaagttgttctttcagactaagaagagatatattaataatttctggaaggaattgacttt

SEQ ID NO: 202536 - DNA, 585 bp, Homo sapiens
tgtaattaaggaggacaaataagtcttacagaagatcacaaaccaagacccttccccagtatgcmttttacagtaaagggacacccacattcacacagacacacacagatacacacacacacacacacacacacacacacacgcacagtttccttaaaaccaaatcctgcttggcatgaatatgtataattagatgttccctaggagtgagaagtagtaattaattcagtgttaaacatcacaatctattacttgaactccatagcaaccacggttgccaacagagagaaaacaaaatttcggagcctatttttaaataattacattgaaatttttgaaaatgtgtaaaagctgacacttgctatttttaggctaaaacaataggcattaacacaggaagtagagaagaatgccaaggaataaaggcaaaaggaaatctcctctgaaccaacctaaacaatgatgtggaaagtatgactttgaccctgcccaaagcgcagggcccagctgctccctctggggaagaaagttgttctttcagactaagaagagatatattaataatttctggaaggaattgacttt

SEQ ID NO: 202537 - DNA, 484 bp, Homo sapiens
  misc_feature (1)...(484): n = A,T,C or G
gaaaatttgctttcccctccaaaacaattgcctggtctttttgccatctctgaatcctatacatacagattacaatcaccataatgtattgtgaggctgtatctttacccccaaagacctcagtttagtaggggagaaattttgcatcttctcagctttgtatatctaagtatttggcatatacttaggygaatccattgtttatttgaattgcatcctggtcatttccagcaaaagggatagctctgaaagtgtgtggcttcatcctgtgtctcacttagagcattttggaatatatacacacacttaaacatatatacacctatactgtttgtacctgaatgtanggtaaccncaaatataaagcaagcctgcattttcccagagacattgacagcccctcagttttatttatttaacctatttaaatatgtaaaatgtagggatatagatgaagcagtcagcctcataatattgaaactca

SEQ ID NO: 202538 - DNA, 484 bp, Homo sapiens
  misc_feature (1)...(484): n = A,T,C or G
gaaaatttgctttcccctccaaaacaattgcctggtctttttgccatctctgaatcctatacatacagattacaatcaccataatgtattgtgaggctgtatctttacccccaaagacctcagtttagtaggggagaaattttgcatcttctcagctttgtatatctaagtatttggcatatacttaggcgaatccattgtttatttgaattgcatcckggtcatttccagcaaaagggatagctctgaaagtgtgtggcttcatcctgtgtctcacttagagcattttggaatatatacacacacttaaacatatatacacctatactgtttgtacctgaatgtanggtaaccncaaatataaagcaagcctgcattttcccagagacattgacagcccctcagttttatttatttaacctatttaaatatgtaaaatgtagggatatagatgaagcagtcagcctcataatattgaaactca

SEQ ID NO: 202539 - DNA, 566 bp, Homo sapiens
tagtgttagcatagtatatttttctacatcacttcatttttaatatgtatatttctttatatttaaagtaggttttttgtagacagcgtatagttggagcttggtttttgatccactctgacaargtgtgcttattttttatttgtttgtttgtttctttgagacagtctcactctgttgcccaggccagagtgcagtggcgcaatcatggctcactgcaatctctgcctcctcccaggttcaagcgattctcctgccttggcctcctgaatagctgggattacagccgtgcaccaccatggcctggctaatttttgtgtttttaccagagactggttttcaccatgttggccaggctggtctccaactcctggcctcaagcaatctgctggcctcagcctcccaaagtgctgagattacaggtgtgagccactgtgcctagtctgacaaggtgtgcttaagccactgatgtttaaagtaattattaatatagttgggttaatatctaccgtatttgtttttgtgctccatttattgcccttattctttgttcctatttttgtctt

SEQ ID NO: 202540 - DNA, 592 bp, Homo sapiens
aacccctgttccaatcctcctgtcacctcccaaagtgctgagattacagtcatgagccactgcatccagccagtattttttaaagctccctggtgattccaaattgcagccaaagttgagaagggctggataaagtgttccctgaacatgtcgtgcttatccctgcctctgagctttgctcctgccttcctgtgtcatatgctcatgttttttccctcttttctgtctttttttttttttttttttttttcttttgaggcccagcttatactctacctgaaggactcccctgacaactgcgggctgtatgtatctcttctttctctgccctttctgactctgtctatgccgctgtgatgttatctgaggcagcctcagtgtcatgattgatggctccatagaagggaactctagcactttaattggactataagaatcccagaaaaagggagcacattgtatacatttacatcctgacaacttctgrgcaggatctggaacatgtaatagatggctactaaatacatattgcactggaggctgctgctaacatgtatggtatctttgggcaagtttggaaaatgcccaatat

SEQ ID NO: 202541 - DNA, 547 bp, Homo sapiens
tgggattacaggcatgagacaccgcacccagccattgagtaaaatgctagaattgttgataactacagaaagtaaatctatttcaaggtgtcacagaaagtgagacatgaacaaatgaaataagaaacaaattctatcaaactgcacttctcatactactagccacaacacattttttaattttaaatttcagttttatattcctatacataaaatctaaacaaatagaaaaatcacaacacaaatatccaactgtgtttgagatttatttgtacatcttaaataaaatcaaatgttctttatttaacatagatttcctggcacactaatatttttgttgtttatccttttttctactgattatcttgtggaaacatcaaagttaaaaattgaacctcttttgttgttgtcctttgatttcagcttttgtctacatttaataaaaagtctgtatatkgtattttttctctcttgctttctatctatgagtgtttttaaaatccattttccttaaataccagttctttaaaattaacattttcaattg

SEQ ID NO: 202542 - DNA, 567 bp, Homo sapiens
gcttgatgactgcacaggcaaggaggactttcatctctaatttaagaggtcccacccaaagggcctttccccaatctttcagggctttcctttgctcacagttccacttgcatctgaattttcttagtgcccacaagccagcattttcattctgtttgcaaatttgttgttgttgttgtttgagacaaagtttgcctcttgtcacccaggctggagtgcagtggcatgatctcggctcactgtaacctctgtctcccgggttcaagcaattctcctgtctcagcctcctgaatagctgggattaccagagcacaccacaatgcctggctaattttgtatttttagtagagacaaggttcgccatttttatatcccttgaggcatctactgcctatgccatccaaattattaccaaaggcccaaattactgttcctttatgggtctgtagagaatgttatataggttttagtagactgcccaaaatgacttttccataagccctrttatttctagtgtgtgaattggcagaaagcaagctcttttgcatatttcatgttgtggcagaa

SEQ ID NO: 202543 - DNA, 623 bp, Homo sapiens
agaaggggagtgcatgatgacgctacagatacagccattccagtgggaaaaatttaatcttaacacagtatgccaatctgggtatgcactacttgcttctggtgttctctttactacttgagagtagatgggaaaggttgatatgtaggaaaccctgttaatagcagaaaactcgaaggtatgttcatggggagaaatcaagatttaggtataatatcattttcttgggagtcaaggtgtcctgttgtgccactggctggattgtgtgacttggctacttctctgaaaatcagttaacatgctataaaacaaaaaggcttgactctaaaaagtctctggttttaaaatgttatgagtttatttctgaatggaaaggaaagcaaaatkgtttccgactttcacacaccattcaaacgatactgtagacaccaaatgtcagggattttcccccacacatccagcaattatccagcagattccaggtgagtaccctctaattcacttccattctggataccatcagatcccacaggctaaaagctcagtctcataagactaccccttacttcacatgccagtcgcaaattctaggttgtgacttgtggttcttacggaccagcgat

SEQ ID NO: 202544 - DNA, 565 bp, Homo sapiens
attatctatattactggggtactgaagtgacagaaaatttgcataatatattatgctaaataccatctcattaggttagtatatgccaaaattgaatgagctttaaatgattagtaaattctagcacagttgctttttaagaattgtacgtcccaacaaagaaagccccgaggaatccaaatacaaattctctaagccacaaagcacataggagggagggtgggaaagaaagaaagacagaaagagagagagagagagagaatatgttgttaaataaatgtgattcaggtgttcagcattaaatagagtgcctgatacaaagaaggccctgaataactggggatgggtgagccatcagattttatatgactccattctttcagattagtttagctttcactgaggaagcttccctttggttattattgagggtaaatctcttagcattactgaaaaaataaaacttatttttaagagctaaaatctacyttaagtcctaagtcaaataaacagacctctgacagtacagtaagtggatattcagcagatactgcttgaatgcaag

SEQ ID NO: 202545 - DNA, 555 bp, Homo sapiens
actcctttctttatatcagtttccattttttgtctttaacctttataaaatttttatttccatttttactgagtatcagagacatactttgattttccagaaaataagctgcgaataaatggtattgattgaatttgtttccagaaatctctgattccaatattctccacctactttttaaataacatgaacctcactgcattaagttttggtaataattaagagattagcaattatctctgtgtcacatgccaatttccaatttattgtctgtttttggtatatcagtgtgtatacatatgcaagcataagtattgttaaggacttcatctttactttctcattatacttccaagtacttcctctgctacaagtttgtcttttaacatacttattaattttcagtttctaatggtttaacttttttcagtttaaataatgatagctcgataatagtgagaactagctgtcattgaatggttagcattgtgcaagggactttaccaaggcattgcttcatytaatcacaaaacaaacaagtcagcaattgttcac

SEQ ID NO: 202546 - DNA, 391 bp, Homo sapiens
acatttcttaaaagaaaatatacaaatggtaagsagacattaggtgctcaatatcattgatcatcagagaaatgcaaatcaaaactgcaatgggatatcatttcaccccaatcaaaatggattttatcctaaggacaggcaataaaaaatacttaggagagtgtggagaaacaggaaccctcaaacactattggtaggaatataaattggtacactatggagaacaatttggagattcctcaaaaaactaaaaatagagctactatatgatccaaccatcccactgctgggttatacccaaaataagagaaatcagtgtattgcagagatatccgcacacatttgttgcagcaacctaagtgtccatcaacagatgaatggataaaatatg

SEQ ID NO: 202547 - DNA, 391 bp, Homo sapiens
acatttcttaaaagaaaatatacaaatggtaagcagacattaggtgctcaatatcattgatcatcagagaaatgcaaatcaaaactgcaatgggatatcatttcaccccaatcaaaatggattttatcctaaggacaggcaataaaaaatacttargagagtgtggagaaacaggaaccctcaaacactattggtaggaatataaattggtacactatggagaacaatttggagattcctcaaaaaactaaaaatagagctactatatgatccaaccatcccactgctgggttatacccaaaataagagaaatcagtgtattgcagagatatccgcacacatttgttgcagcaacctaagtgtccatcaacagatgaatggataaaatatg

SEQ ID NO: 202548 - DNA, 576 bp, Homo sapiens
ctgctgggttatacccaaaataagagaaatcagtgtattgcagagatatccgcacacatttgttgcagcaacctaagtgtccatcaacagatgaatggataaaatatgtgcttatacacaatggagtactatttagctattacaaaaaagatcttgtcattcgcaacaacatggatggaactagggatgattctgttaagtgaaataagtcaggcacagaaagacaaacatcacacgttctcacttatttgtgggatctaaaaatcaaaacaattaaacacatggagatagagagtagaaggcaggttatcagaggttgggaaaatacagtatggggtgtcgcgggtgtgggtaggtgggattggttcatgggtacaaaaaatatagttgaawagaatgactaacacctagtatttcatagcacaacagggcagctatagtcaaaataatttaactgtatatttataactaagagtataattggattgtttgttacacaaaagataaatgattgaggggatggataccccatttttcattatttgattattatgcattgcaaacctatatcaaaat

SEQ ID NO: 202549 - DNA, 391 bp, Homo sapiens
atatttgtataaacactttctcataattatctgataaggtagatattataatgtctagtttataaatgggggacctgagtcccagaataattaaatgccttactgaagctcacacagctaataagcaacaggtctctttttttctttttacatcatctgaaaaaattcaagtaaatgaaaatgcatgcccatgcttttgtttctactggaaaggaaaattacattaaaaatgctgcaggaattttaatggagcattttactgccttacactgagaaagcgaaagtaggaaaatctttagttagcttcgcaaatcacctgaaagcgttctatccgtaaaagtagtgtttggtctgtaaaattagcwtcgcctctattcacattcatgaattc

SEQ ID NO: 202550 - DNA, 465 bp, Homo sapiens
  misc_feature (1)...(465): n = A,T,C or G
aacatctctttggttgtatggaagcctctattacttaaattttagtttttggaaaaacctaaaagtttatttgaattcaatagtagttnttaaatcactgtgtttctgtaagtagcaaatgacacacaggaaaagaaacagaacagcaaaaaccttttaatcagcaaaattttctgtttactgataattcattgccagaaartaaaatgtcccttgaagattaagataatagctttacattgatagatgtcagtagataatggaattgtgtactctcattaccattgctcaagctgctaaacctttagccaaaaataaacaaaatggccttttggtcatttgttaaattgtaatgaaggaaaaattctgtgaaaattgtgtaagtcattccttggaatggggacattttcccatttttcattccaagatgtcaaagcaattaatattattttccacagctgagac

SEQ ID NO: 202551 - DNA, 602 bp, Homo sapiens
ataatgaaatgtgagtgcattttattttaaagttctgtatatgtgttatataggtaaagactttttaaaaacaatattataaaaattyaaaataaaatctgagctaaaaaatatcttacattaattttgtatccaaaccacagtttttctagctattcaagcataaaataatacactgggcctaataccttcatctggattttggaaacaaatacatgtttttccatggttgtttacaattcttcccttcagttgtcccacagaatagctctagatctgaaacgagtttgcattctaaaaccaaactgaatctgtctaacttcatcactgccacattaaaattattcttaatgatcattttttatttaacaatatatctaacttcattactcattttcttctaaaaatgtaatgtgacaagtatgtttctaaacataaatctgcaatgaattgcttatttaaaatactctgttcttccaagaagagacaagcctcattaattcagacattcaaaggggcaaagatcaaaatagtgacatatttacaaatacataaagaagttatcatttataagacatttactgagcacctattttgtgcca

SEQ ID NO: 202552 - DNA, 300 bp, Homo sapiens
tgaattctaccaaacatataaagaaggggaatgctacttttatctcrtcttacatagactctaaacgtgctggcagacatcacatgtatttgttgtgaatagataattagagatcatagtcttctgtcttagaacatagccatcattccataaacatgaacattatcttctattaaattttcattacttaaacctatttgagacttctttcttaaagttttatcaacagtgtaagcactacttctacgtggtcactctcactatgtctgaattacataacacactcaaacatcatatctg

SEQ ID NO: 202553 - DNA, 300 bp, Homo sapiens
tgaattctaccaaacatataaagaaggggaatgctacttttatctcatcttacatagactctaaacgtgctggcagacatcacatgtatttgttgtgaatagataattagagatcatagtcttctrtcttagaacatagccatcattccataaacatgaacattatcttctattaaattttcattacttaaacctatttgagacttctttcttaaagttttatcaacagtgtaagcactacttctacgtggtcactctcactatgtctgaattacataacacactcaaacatcatatctg

SEQ ID NO: 202554 - DNA, 579 bp, Homo sapiens
aagatctgatgctacatattgaatgaatatattttatctcggaaaataatagttacagkggctcaaaagcaaggggaaactccattgaggatataaggaaaaaatatgagcttacttaagagtgagaaaaatcagtctgactttttacctcacagcaatattcattgccaacatatggctaatcaatgcttattaagtttgtgaggaaaaaatgtgacatgtattttatacaccattagctgttatccaaatataacatggtggcaaattaaccactttttaaaaagttgctggaaatatagtagccttaaaatattttaaagaaacaattgcgagataaattgaagcagccaaataataaatgggaaatatctgataaaaagactattagtaaacattgcattcatcttaattaaggctaagtttaaaacaattgtgggaattatggctacatgatagaagataaatattataaattataacaattgtagagattttaacatagtgctaacaaggcataaactggaaagacagagaaggcaaaggagtataggtatactggtcttatttcctcattca

SEQ ID NO: 202555 - DNA, 587 bp, Homo sapiens
acttgttctaacccctgtactattttctatccatgaaatcattatggaaaagctgttctgttcttcatatttacccagcactgagcacaaggcatgagacatagtaggtgctcaataaacgtaataaatgtcagttgattgaagggttaaatgaaaacatgagaaagtaagtcagcctttagtgtcatttcttaggcaaaagatatatatattatatataatttttcattttcttgagacaaatactagattaagttgtgttaacagmtaaaactcacaggcagtcagtggctctctagtgatccctaaatcatcccaaaatgattatatccataccgttttgaccaggctgaatgaagacagttactctgaggcacccctaatagataagcaataggacagaaaaaaaaaacacaccagatttggaataaaaagttctaccacttacaagatatgtgttttgaaaaattccaaacattttctatccctcaggttttttgtttgtttgtttgtttgcttgcttgctttacacttacaagatgcaaacaatatcattcctgatatcacagcttaaactgaatattata

SEQ ID NO: 202556 - DNA, 608 bp, Homo sapiens
taaaaaacagtcatgcatgaaggaaatcaaaggattttctttttatcatatattagtatcaactttgaaaaaatatatatgcgaatgtacaaaaaatgtaaaaataagtcagccagttagcacatagttaattaaacctatccaaaggcaaaaacttattagggctaaaacctagagatgtgttaacacaatttgaaagacaggtatataaaatgcaagtgtctgactagcaatgaagtcactaaatttaacaattggccagttattagaaaatatttattatttaaccttattcagtgactatgtatggggaagagatacagaagatcaagtttttcacttttgatgcttttctgaaatcagagctgaaatgtttcagtgtttygcctggctgcaattggtcctctacttttgattaaggctaaatttttatgtatggattaatttgggtacaatggtaaaatatttggcatattggccaatttaggaaaaatatgatcatcagagatgaggacaattaaaagggaaaattaagcataacaaaagaaaaggaaatattaaagaatattgaggaaatattaagcataacaaaaacaagcaaataaggt

SEQ ID NO: 202557 - DNA, 593 bp, Homo sapiens
attatgcaaggtatcatatgtgcttattaatctaaatattataagtcataaaagtaacatgatttttgcttaggatcagaaaactgaggttcagaaaagataaaagacttgcctaaggtagcagggctggtaagaatcaaagctttctaattcagagatgttttcctatataatatcatttgtaaagagaaaatagctaggcctggtggctcacacctctaatcccagcactttkggaggccaaggtgtgcagatcactagagcccaggagtttgagacaagcttgggtaatatagtgaaaccctgtctctagaaaaaaatataaaaaattagttgggcgtggtggcacgttcttgtagtcccagctactcagcaagctgagaggtgggagggttgctggagctggggagatcaaggctacagtaagctgtgatcttgccattgcactctagcctgggtgacagaacaagcccctatcaaaaaaaaaaaaaaaaaaaaaaaaggaaagaaaaagagaaaataatttgacaagcatgtaatctatttcactgaaatgtggtgtaatatttttcctaagaaaagttagtgtgaca

SEQ ID NO: 202558 - DNA, 466 bp, Homo sapiens
gtggttgtttaagtcagtaagatttgtccagacaatgggttataagcagaaaagacacatcaattctaggccacagcaactaatagctgttgcaagaggcccttcccatctctctattctgtcaagagggtttagatgagactkttgttgaagcctagctgactctctgttcagagattcctgaggcttagtctttattttaatacacttttacaatagagaatcttgagaatgttggaacttaaaaataagttttccaactgacttacaaaagaataaaactatttaggaggacagagaggattgtacagtcaatatacatattgggatggggagaaaattgaatttgtctttctgtgaatgctgctaattatttttggactatcaaactaacttaaaaacctatctaaggttacaggtgcaataaacaaatgaaaataacaaacaaacaaaaatcttaaaccag

SEQ ID NO: 202559 - DNA, 466 bp, Homo sapiens
gtggttgtttaagtcagtaagatttgtccagacaatgggttataagcagaaaagacacatcaattctaggccacagcaactaatagctgttgcaagaggcccttcccatctctctattctgtcaagagggtttagatgagacttttgttgaagcctagctgactctctgttcagagattcctgaggcttagtctttattttaatacacttttacaatagagaatcttgagaatgttggaacttaaaaataagttttccaactgacttacaaaagaataaaactatttwggaggacagagaggattgtacagtcaatatacatattgggatggggagaaaattgaatttgtctttctgtgaatgctgctaattatttttggactatcaaactaacttaaaaacctatctaaggttacaggtgcaataaacaaatgaaaataacaaacaaacaaaaatcttaaaccag

SEQ ID NO: 202560 - DNA, 593 bp, Homo sapiens
ttcaaacaatcttaaaacacaaaataaattttatgatgacatttaaaagacgattggatatttgataatattaaaattattgttaattgttaaaaaataataaaattgcatgtccaaaggtccttaaatgggaaagagaatgggaacaatttaatcaagggcatggcataatttagacaaggtgatttttttcttgatttattatcctatgatgatctctctccactttatttcagaagtcataccaacctgtattcaggaatcccatacatgctaaataacagatcgggtattttaagttaaaaaaaaaaagaattcacttgcaaagtctggaatgttgtagttagactagaggagaaaaataagaagctattctgatgaacttgtaatacaaagttttacttgtgatgaattttcaatttgtatggaatatacctttaaaatatttcyattagtatagccaatatggataagaataggggttcctcaaaaaattaaaaatagaactactgtatgatctagcaatcccactacgggtatatatacaaaggaaatgagatcagtatgttaaagagatagctgcactcctatgt

SEQ ID NO: 202561 - DNA, 633 bp, Homo sapiens
atgggaatggaacagacttgtcattacgtctccatttttgccatcttacccctacctctacaccctgatatgctkcaggattctgaaaagctctttttgtattatactcttataaatccattgctactgctaacgacagctcaactcattattgattcatgtaacaggagagtggaaggcctgtaagtcagaagcttcatagttgcttaccctctcatcctatacataatgtcacctcttggtttaaatgactgtcacctgagagaaaatgtctccagacaggatacatagatgatttgcagctcatgagaaatgactggtctttgctgctgaagcctaatgttagtatttgactaatattagatttttggtgaatttttactttgccattgctagtgagttttaaaatatcaaacatatgtccctgttgtttaaagagttgcactttagagtgaattaatgggaattttcacaacacagtgatcctagagttgtggcagtttttggtgatatcattgaagttgtcaagactcagcaatgaagcaaataaaagggatagtagttgtctaaatgtctctggaatggcaggggagaagttttagcatttgcagtgagaaaagaaaaaagtaaaaa

SEQ ID NO: 202562 - DNA, 509 bp, Homo sapiens
atttgattgtgacatagcactcaaagtgacaggggttgctctctcaagttttgtctaaatgactggtacaactaatcaaggattttcatttttaatgggtataatcaattgtagatgtcttcagctgatgccaaggacttattggcaagtcacactgcactatgagcttcaggtctggtatttcctttatatatcaaaatgcttgagatgtacacgaagaaacagagtcgttgaacagttttcctaagatcattcagcaagtgatttcacwtcaggtttaagtttctgaattgactctacttaaattattgtactcttaatctgtacaaaatattgctttacataagccctaatgctcagcccaaataaataatgagcactaaagttttgacggtatcacaaataaattattgtttcataatgattaaaattttaaattgaaattcaaaaactatgtagagacagggactgtttctctgtagtgtttaaattctcaagtcatcaacctt

SEQ ID NO: 202563 - DNA, 574 bp, Homo sapiens
  misc_feature (1)...(574): n = A,T,C or G
gggcaacattatatatccttagggaattgcaaatttaaacaatatgataccatgtgtaactattanaatggctaaaatcccaacatttacaacatcaagtgccaacagtttgcagagcatgaggaattctcattcattgctggtggaaatgcaaaatggtccaaaatcccccagtttggaagacaatgtgggggtgccctatkaagcaaaatatggtcttaccatagaatcccagcaatcatgctccttggcatttagtcaagtttaagttgaaaacttatgcccacacaaaaacatgtacagaaacatttataagagctatattcataattgtcccaaattggaagcaatcagatgtactttaataggcaaacggatgaaccacctttgatacatccatacaatcaaatattattcaatgataaaaagtcgcaaaaatacacaaaggaaatttaaatgcatattactaattggaagaagccagtctgaaaaagccacctattatatgattctaaccatatgatattctcgaaaaggcaaaactatagagagagtagacagattagtggttgcc

SEQ ID NO: 202564 - DNA, 590 bp, Homo sapiens
gttgaatttctttaaaatacttctgctgatcctcctggtatttttcttgagaattatgtttaactttgaaattagtttatcgatagtacacacctttacaatattaagrtatctaattcatgaacaaggtatcaactggtatttcagtttatgtttatgacatataatagagtttaaaatttctctttgtgaatactttgttttcttttgatcaagataatttttagatactttcttttatggttattatgaggggttcttaatttctattatatttctaaattggctattagtggtttagatgaatgctattaggatgtgcaagttgatcttactcatcagtatttcagaagtttattttgagttctggtttatgtaaaaaatctgttgattgtcctatgtaaatgagcatacatttgcaaatacttacaggtttgtgctatttttttctcacctttctcacttttttttttttttcatgtgcttttgtatttgctagcagttctagtactatatcagacatggacagggttaatgggcatatttatcttttttccagatctctgagaaaatgcatacaatgaattttc

SEQ ID NO: 202565 - DNA, 590 bp, Homo sapiens
gttgaatttctttaaaatacttctgctgatcctcctggtatttttcttgagaattatgtttaactttgaaattagtttatcgatagtacacacctttacaatattaaggtatctaattcatgaacaaggtatcaactggtatttcagtttatgtttatgacatataatagagtttaaaatttctctttgtgaatactttgttttcttttgatcaagataatttttagatactttcttttatggttattatgaggggttcttaatttctattatatttctaaattggctattagtggtttagatgaatgctattaggatgtgcaagttgatcttactcatcagtatttcagaagtttattttgagttctggtttatgtaaaaaatctgttgattgtcctatgtaaatgagcatacatttgcaaatacttacaggtttgtgctatttttttctcacytttctcacttttttttttttttcatgtgcttttgtatttgctagcagttctagtactatatcagacatggacagggttaatgggcatatttatcttttttccagatctctgagaaaatgcatacaatgaattttc

SEQ ID NO: 202566 - DNA, 586 bp, Homo sapiens
ctggccaaggtcagctcacattgagcccactgtacatagttgaaatgaacatactcagtagttaacaaaacctctatatagattccttgatctgaagataagagctgtcatagtagggaaggccatatagaagcctcttaaagtgcccctgccctagccaaaattaaaaatcagaaacaatattggatcctgggaataatgacagaattagggataccattcaattatgcaaaggtggtggttctcatcatrtctccccatttattcaccagcttggctcctgcataaaaaccagaaggattcttaagtgtgacagtaagccaccaaaacaataagagatagtcccaactgcagctgctgagccagatgtgttatctttgttagagcacagtaacacggtctcaggtatgtgatatatggccactgatcagctagactggttcttttctatccccatcaggaaggagagccagaagtagttcacattcatgtgggaaaaacaagagttttatagtcttgccagaggcctagttaaattttccaccctgtgtgttaatatattggagagggatttggagtattgaaa

SEQ ID NO: 202567 - DNA, 572 bp, Homo sapiens
  misc_feature (1)...(572): n = A,T,C or G
agggaggattctagaatgtctcctcagaggcccctttctcagctgttgaggatcgctttttaatgttataagaaaagcatagccctgagatgtttgaccaatatggccctcaggtgkgtgagtttagagaacctcatgtttttcatgggtgtccagtcttttggcttcccggggccacattagaagaaaaacaattgtcttgggccacacataaaatacactaacactaacaatagctgataagcaaaaaacaaacaaacaaaacaaaacaaaacctcaaaaaagtctcataatgttttaagcaagtttacgaatttgcattgggccacattcaaagccgtccaggactgcatgcagagcacgggccacaggaaggacaaggctgttttagagctttaatccactttcacccacagttttgattactggactgataagattctgaattactctctgcctctgtccaaaccaanacagcacagctgtgaggcatgtaaagccttcctactccagatttggtctactcaccagcagcatctccatcgcctaagagttttattagacatgcgcaa

SEQ ID NO: 202568 - DNA, 572 bp, Homo sapiens
  misc_feature (1)...(572): n = A,T,C or G
agggaggattctagaatgtctcctcagaggcccctttctcagctgttgaggatcgctttttaatgttataagaaaagcatagccctgagatgtttgaccaatatggccctcaggtgggtgagtttagagaacctcatgtttttcatgggtgtccagtcttttggcttcccggggccacattagaagaaaaacaattgtcttgggccacacataaaatacactaacactaacaatagctgataagcaaaaaacaaacaaacaaaacaaaacaaaacctcaaaaaagtctcataatgttttaagcaagtttacgaatttgcaytgggccacattcaaagccgtccaggactgcatgcagagcacgggccacaggaaggacaaggctgttttagagctttaatccactttcacccacagttttgattactggactgataagattctgaattactctctgcctctgtccaaaccaanacagcacagctgtgaggcatgtaaagccttcctactccagatttggtctactcaccagcagcatctccatcgcctaagagttttattagacatgcgcaa

SEQ ID NO: 202569 - DNA, 458 bp, Homo sapiens
cacctctttcctttctcagatgaaaggtgattgacaartaaacttaatcatgttaatatgatcttatccatgattttcctttgttcttaaagatgaaacgtcaaaattgatacaaaagaattttgtgcagtcaggcccctacaaatatctccaatctcatctcctatcaggctattctttacttcctgggatccagccctatctgccttctataactccatatactcatgttccttgctgccatcacagggcaattgcctgggatatgctctctacccagactcctttccttctcctttttgctctttaagacaccgtttagatctttgatgagtattatttttttaggaaagcttctttgacttccctgagcaggtcaaataatacttatagattttcagaacatcatatacttatctttgatggcacttatcacatttgcattttcacatttatct

SEQ ID NO: 202570 - DNA, 546 bp, Homo sapiens
atgaagctacatcagataggacagggtaagtggtggaaggaggccagaatctgacatgagtaggatcatctctcggggtgtttgaagtctaaagttattttattgtcctttgcaaaaaatatgaaagggtttcatctctgaatgcgtattgaactgtcttcacataaaatctaaatccaagttggaattcaaacttttcgtgtctcccctttcacctactcgtcttccattttatttccctaagctttgtatggtcttttgtccaccttcttttacagacctgcccccaaccagkgacattcccttgcttctttgagccacacaaatatttgcagtgcttcactgaattggcctccttgccatactttggttagcacaaacactgcctgcagtgattataagcttcctagtccctggattcttactcacgagaggcttaaagacaggttaggaagtgtttgttttttaactgagagacctgtcctgcaaaatattttgcaacttaaatgtaatgacagtctccattcagacgtgaaacaggctaat

SEQ ID NO: 202571 - DNA, 630 bp, Homo sapiens
catgtactgtgtgtgtgtgatgtatgtgttgtgtataagtgtgcataagggaaaaaatgagcatcaagattttccggcaaaataagtaacgaaaccctgttaatctcctggcagctgcttcagatgtcagaatacatttgtcaaaaaaacaatagaatctggtttgaacagctcttctgtttgggaaaaaaaagaaaaagtgaaacttagcaagaatgtgaactagatcataaacccaactgggtactaatgaagatggtatgcttccaatttcagtggtctttcctggtcaacgatgttgtgcttstttttgttgttccttttgttttatttttattttttcttttctttttatttaaatgtatttatttacttattttgagacagggtctcactctgtcacctaggcaggagtgcagtggcttaattatggctcactgcagccttgacctcctgggctcaagcaatcctcccacctcagcctcccgagtagctgtgtctgagtagctgagactgtagttagctagcatgcccagctaatttttaattttttgtagagacaggttctcactatgttactcaggctggtcttgaactcctgagctcaagtgatcctcttgccttggcatt

SEQ ID NO: 202572 - DNA, 481 bp, Homo sapiens
tctctgttgtaaatatatcctaaatattacatgaaacttactgtagttaaaaaaaaatcactgtttatctgaaacgtgggacatatttgtactaaacaattgtccgttgtttatctgaaattcaaatttagctggccctgcattttatctggcaatcctggaggttgttttatctacattgtgtgaaaygaagtcttttaaaagggcaactgcttggatcccatgtttattttgacttaggcgaagctgtggaactgctgtacaccaacaaaggctgaatgcccacgtccagtccagggccttgttcacagcaggtgctgagatattctttgctcttcaagctgtgtgaagatagggtgtgcatccgtcttgctcactttttttttttttaatccccagggcctattacagtgcctgatgctcaatgaatatatgattaaatgaatagctacctctcctgccccagaaaattgcagggttg

SEQ ID NO: 202573 - DNA, 523 bp, Homo sapiens
gtactcacttgctaaacgtgaagtactataataatagagatagagtgtttatttagtcaacatacaaatcctatgagttaggtttacttttcctcattttataaactagaaagcataagcacagagaatgtaatatttttcacattcaaacactggtaaattaaagtcaatattcaaacttaggcctataagattccaaatggttttatctttcttcaccattaggggaggaaaaatagtattctataatatcattatgyggaaagatctgttgggaaatcaaatgagccctaccctggcatgtaaaacatataaactgaaaattctagaaaaaaaattactttcagcctctaaaaatatatatccccttcaacctcactcttcacatgaagaattccaagaaatatcacactttcaagaaatgccaaatatttttcctttgatcattttcttcccactcccacatctccttctcaaggatgtataactgatgtataatcagctattttttttagaagcctct

SEQ ID NO: 202574 - DNA, 523 bp, Homo sapiens
gtactcacttgctaaacgtgaagtactataataatagagatagagtgtttatttagtcaacatacaaatcctatgagttaggtttacttttcctcattttataaactagaaagcataagcacagagaatgtaatatttttcacattcaaacactggtaaattaaagtcaatattcaaacttaggcctataagattccaaatggttttatctttcttcaccattaggggaggaaaaatagtattctataatatcattatgcggaaagatctgttgggaaatcaaatgagccctaccctggcatgtaaaacatataaactgaaaattctagaaaaaaaattactttcagcctctaaaaatatatatccccttcaacctcactcttyacatgaagaattccaagaaatatcacactttcaagaaatgccaaatatttttcctttgatcattttcttcccactcccacatctccttctcaaggatgtataactgatgtataatcagctattttttttagaagcctct

SEQ ID NO: 202575 - DNA, 451 bp, Homo sapiens
agttactctatggcaaaataaatgaccttatgcactgcacagaatattatgctggaataattcaattccttcagacctttaaggaaacattgttagcatcaggccacaaccartagaacttgaggaaaaaaaaaaacataattagctgaaaatcagttgaaggaaagcattactatttcaagccctttaaaaggggagagaaaaccaaaaacagcaagatgcaataaaagttaaacttcgggttaaaaaatcaaaatatcttataatttattaaaacaaaaattaatccctacaaaatttcattattccaaacaaaaaactcaaactcgtcttccctgctggcagtgagctcaaactctataaaggagttgcctgccttccatcatcatcgaaacaggaaatcttgccttcatcgttggaagtaagcaaaattccaagaaaaaagaggagg

SEQ ID NO: 202576 - DNA, 577 bp, Homo sapiens
tgcctattattccttgtttccatccccagccctaggaaaccactaaacatctactttctgcctttggacatttcatataaatggcatcatgcaatgcataatcttttgtacctggcttctttcacatagcawtttttttagggtaatccatgtcagaaaataatgctgcagctactctagaaaacctcatgcctattattcttcatttccatgcccagccctaggaaaccactaaacatctactttctgtctttggacatttcatataaatggcatcatgcaacgcataatcttttgcacctggcttcttttacatagcatgtttttttagggtaatccatgtcagaaaatatgtcagtacttcattcctttttattgccaaataacattacactgtatgaatatacaacactttgttcatccatttgccagctaacaggtatttggcttgttttcacttttgcttattatgaataatgttgctttgagcatgatgctatgaagaatgatgctataagcataagcatttatatacaagtttttgggtaacatacgttttcaattttcttgggtatgt

SEQ ID NO: 202577 - DNA, 424 bp, Homo sapiens
cgctgaagcaaaatgtaaaccaagatgcccctgcagtggttgtgcttcactctacgacatctgttaccggaaaggggtccagattcagaccccaggagagggttcttggatctcgtgcaagaaagaatttgagacgagtccataaagtgaaagcacatttattaggaaagtaaaagaataaaagaatggctactccatagagagcgcagccctgagggctgctggttgcccatttttatggttgtttctggatgatctgctaaacaggggtggattgttcatgtctcccctttttagaccatatatggtaacttcctgatactgccatggcatctgtaacctgtcatggygctggtgggagtgtagcagtggggacgaccagaggtcactctcatcaccatcttggtttgggtgggttttagcc

SEQ ID NO: 202578 - DNA, 503 bp, Homo sapiens
aaggataaaaatgcattccattcaaagtttacattcctggtgtttaaaaccccttttctaaaattaaataactcattctgaggttgattttatagccctttaagacagggtcacgctctgtttcccagactggagtgcaagtggtgtgaacatggctcagtgcagccttgacctcctgggctcaagcaaccctcccacatcagcccctgagtagctgagactacaggcatgtgctaacatgcttggttaatttattttttgtggagactaggtcttgccatgttgccaggctggtcttgaattcttgggctcaagtgatcttcctgcttcagcctcccaacgtgctaagattacaggtgtgagcctccatgcccagcctgtgtcaccgtttaaagcagatcaacactttgataatccatcactcaaattgtctcatactatagtatcytaagcctccgtatctttggctgtaaacaagtagacttagcttgtttagatcagat

SEQ ID NO: 202579 - DNA, 550 bp, Homo sapiens
gtcagagtggctataatcacatttaaaaaktaactgtgtacaaattacagatttctttagaaagttggttgtatacattaactgtgtatatcctactaacagatatagttacttctgagacaattaatttgacttgaatataattagtacattagatgagataattagctgttttatagactacctaatattgtcatgaggctagcaaattgtttcaaaaactttatcttttataatatatcgaaaaacattaactcctaaattaaaaaaataaaaaatgatgacgggtagtatgtgtgtaattcagtgcctccacccctactctcagcaaaagtatagtaaattcaaaaccgaatgtccatattaaaattgtaaagcaccagttaacatgaattggattagtttccttacttgtttgaataggaaaagaattaattttctttaggaggtgttgccttcatttaaatatttaatgtgagaaatatgtttctggggaaatatattagttcaggactgaaggaatgaatgtgatgaaactggagggaaaggg

SEQ ID NO: 202580 - DNA, 547 bp, Homo sapiens
tgaaggaaaacctttaagttgctttatagtttctttaaaagaattcaaatggttcttagaatgaattaaaaaatggtttatacactataaaacttctcaaaaaattcatagaatatctgtgtgatcttggttttggtgaagggtttttatatagtgtagcaaaagaacaacctataacagaaaaaaaaattgaatgataaccaaattaaaaatatttgtcctattaatgatacttttaagagaatgaaaagataagccacaatagaaaatttttgaaaattatatatctgataaaggacttctattcagaataacycccaaagcttcacaataggaaaataaacagcagataaaaaatggtcagaatttgaaaagacattttactaaagaaattgtaaatatgatgatatggtttggctgcgtccccacccaaatctcatcttgaattgtagttcccgtaatccccatgtgtcatggaagggacctggtgggagggagtttaatcatgggggcagttaccctcatgctcttcttgtgatagtgagtg

SEQ ID NO: 202581 - DNA, 576 bp, Homo sapiens
caaattctgctgaataaaacagtcctttcttgtgcatttgtgtaagaaaatctttagactaaacttgttttaagttattgcacatgtcaaagtgctaataaattagcagctgcatctatctctgtaatccagtagtaataaacaagatgctttaaatctctttctaggagtaatctacatagtacacagtaagttaacccactaacatcttaacaggttgcactgttccaagtcaatataataaaaagagaaaagcaagaaagaggcccaatgccctgtttatgccaattatcagtaattagtaagcatttatttgaatttaaracatagttttaaatatattaaacattccttatatgcatttaaattttatgctaaatgctaagcaggattaggacattgtcattcagaagaacaaaaggagaaaagacaaaggataatgaagagaagatgaagaaatgaaaaaattaaaaattaacagttgtcattcaatttataaaatttatctatgagtcacatttttgttcttacattcatttagtgaggaatagcagctaatttcaattaaataaactt

SEQ ID NO: 202582 - DNA, 579 bp, Homo sapiens
agaacaaagcaacaagttatgatgcattcaggaaaagcaatttccaacaaaacaaaggactgctgcttccaactgttgcttggcatctctaacactaggcaccaacacccaggcacttccctgcagatgtctcagaagaaccagttagttgcttttgccccttgcttggtaaatttgatttcttccacatggccaccacttacagatgctttcttccttccccaagcctgatgtgtgaataaatcttacggatagaagggaggtaccaataaagctctacctgcaagagaatcttrgaaattagattttgagctaatcagattggtctccaatctaatctgtttatcctccattacggactgaagtaatctcaagttactttggtgctcagctaatatcctaaatgaagaatacctttattgtgacccaaaacttctctctttaggtgtgtgataaccctatgagtcctgcctgcacttttctatttacttttattaatacgccaggcaggttttagggcacacctcatgcaatacataccttaataatcaggattaatcattccactcatcagaccaa

SEQ ID NO: 202583 - DNA, 537 bp, Homo sapiens
acatgttgaacataaataacatattttatggaaaataactatattttccacaaaaatatagaagagtggcattgttttagatttttgcaaatatcttcaatgtttggctaacagaagatagctgaattctcctatctgcttctgcattcaatctgttgcaaccctatattgttttgattgaggtacatgaagacaatccagcctcacacagatctgtagagggacaaggaggagtattttaacagctttttcaaataattgtggatattcctctttgatatcacactaaaactcattaagtgatacttycttaaaggatagttgcaatgtggattctgaaatcacagcataattttactgtatatgtgtaattcctaaacaatgtattctttcttttttgcttacttttgaattttaaaaaatagtattatactgtatatatattcttctgcaacttgctttctgtgctcaacattatgagggtcatccattttaatgactgtaactcaaggtttcttaacctggatgctatgacat

SEQ ID NO: 202584 - DNA, 553 bp, Homo sapiens
atgggggaaaacatccccatgattcaattatctcccactgggcccctcccacatcacatgggatttatgggagctacaattcaagatgagatttgggtgggggcacaaatcctaaccatatcagtggggtcactaaggtatataggtatatagtgtagtaagatggtgtcacctgaatcacatttacactctgccccggcacagaaccctgggagctgaatattgaggagcagagaggaacagggatcagaggcacaaaatttggcttgctcttgtagatagcaatagagatgggcacaaggcwgagtgaaatctcatcagagtagtgagtgcttagcacatataaggcactgtccttagtgccgtaagagatatcaagagaaggtaagatagattaaaatgtattgtgtttgttttatgttactcactttatacatactagcagtcaatcaataataataacaatgataagtgctttgaagtacctactatgggccaggcaatgtgcttaatacttcatatcttcttttcttttatttcatgcactcattca

SEQ ID NO: 202585 - DNA, 416 bp, Homo sapiens
atgatgtaaataatttaaatrctgtattgcttttatttaaatttttctttttatactatcttttctcttattttctttttttttattttttaagacggactctcactctgttgcccaggctggagtgtggtagtgtggcaacctccacctctcaggttcaagtgattctcctgcctcagcctgggattacaggcacgtgccaccatacctggctaatttttttgtatttttggtagagatggggtctccccatattggccaggctcatcttgaactcctggtctcaagtgatccgcccgcctcggcctgcaaagtgctaggattacaggcgtgagtcccctgcacccggccttattgtcttttttttcaaaaattttcatctgattggttgaacctgcagttaaggaggaacaact

SEQ ID NO: 202586 - DNA, 213 bp, Homo sapiens
tcttttatcaatatcacagtctcttgattaccgtggctttatagtaagccttgaagttgggtagtatcagtcctccgacttsttcttcttcttcaacattgtgttggctattctgaatcttttgcctctccgtttagcagtcttttttctttcttgtgcatgcaacaatggtatatcttataattgagggcatcttagatctgatgaaatatg

SEQ ID NO: 202587 - DNA, 182 bp, Homo sapiens
cagatttctgtctctctgccctgctgtcatcttaatggggctcctagagagacttcarggtcacttcatggcccaagagggctgttagagttgcagccatgttttctgcattccagggatgcaagaagggaaaagggcagacaaagggtgaactccctgccctctaaggagctttcccaaaa

SEQ ID NO: 202588 - DNA, 615 bp, Homo sapiens
gcacataagacacctggaactccatctgaagaggccatgtaattacgaatgtgtattattatttgtcttcatcctgtctgccagctgagagagacagccagcctacatttgctcagcagcctggaactttctcctccaaagaaaacccagttctccctatagaaatccaataaggccagatatttaggagaaaagtcactggtttctacccctcagagattggattttggttttagattctgcttttcaaattaacttgtctactatgcctatctggcctaatgcttaaaagaaaaaagaatgtttgaataacctttatactagtccccaacaggccaagggctctgagaaaatgagaggatctggagaagggtagaygcatgcacacacacacaaacacaacccacgtgcatacacatgtgtgcacacatatgttctaagagtgcccatacaggtgcatgcgtgtgcacacactctcacacacacatcatccagctgtgctgaagtctctgggtagagaaaagggtactgacctgtgtttacactgtgccttttgtctggggtacgcaaagttccttccaaggaaggcaggctttgtcactcctcaccacccca

SEQ ID NO: 202589 - DNA, 602 bp, Homo sapiens
acgatggcatccatttccatggctttaatttcacttctgtgcagactcctaactttatacctttcaggccagaccttttttgcagagctccaggctcataattccaaccgcctgtctgtttaacacctccacttagacatgcatgcatctcaaacttagcaaaccccaaacagaagtcctgattctcagcaatctaccataacccccttccctaagaaaatgcaatcaaccaaacaaataaagccttggtcctctcccaagcttccctatctcagcaaatgccctatcccatatacccagctgcctgagccatgcttgactatacctctcccccaccccaccatatccaaacctcagcagatatggcagactgtacctgcaaactatatctcgaatccacagacttctctcctctaccaccacsctagtgcagaaccccacctgctccctgtacttttacaaccacctcctgccttccctcctcatcctcttctccatcaatcctcctccacagggagacaaagcaatcttctaaaaactgatcgtgccattcccttgcttaaaatcctttaaaggtagatttccttttgccctacagagaa

SEQ ID NO: 202590 - DNA, 602 bp, Homo sapiens
aaatgtgaagaatagactaaagaaggatagaggaaaacactatcagcacagttagcargacattacagcaatgtaaatatgatgatagaacaagataagtggaactggggatgaaatgtgcagccctaacagccacttgggaggcaaaatgaaaaagagaagtggagaaagaaaaagtcaatgtactttacttatttatacctgaaatcatgcaagagatgcattatgttagtggtttatattcttgattctcctttgcaatactaaaaattgaaaagatcactcaacacttataccagaaaataaaaaaataataattctaggtcctgctttatttacccttagcttgtgttagcaggtcagaacacaagttaatttcgatataccacttaatcatggcccaaaattttaagcttcctgactcagaacattgttaagagcctcaaagaaatcatgtctgtgaactatatactagttgaatataaaaatataaatagttgtctttctcaggatagtagaaaaagtgttaaaataaatgaaaaatcgatttgcattctgaaagctaccaaggagtagaggctctgacagtttttaagaattaa

SEQ ID NO: 202591 - DNA, 602 bp, Homo sapiens
aaatgtgaagaatagactaaagaaggatagaggaaaacactatcagcacagttagcaagacattacagcaatgtaaatatgatgatagaacaagataagtggaactggggatgaaatgtgcagccctaacagccacttgggaggcaaaatgaaaaagagaagtggagaaagaaaaagtcaatgtactttacttatttatacctgaaatcatgcaagagatgcattatgttagtggtttatattcttgattctcctttgcaatactaaaaattgaaaagatcactcaacacttataccagaaaataaaaaaataataattctaggtcctgctttatttacccttagcttgtgttagyaggtcagaacacaagttaatttcgatataccacttaatcatggcccaaaattttaagcttcctgactcagaacattgttaagagcctcaaagaaatcatgtctgtgaactatatactagttgaatataaaaatataaatagttgtctttctcaggatagtagaaaaagtgttaaaataaatgaaaaatcgatttgcattctgaaagctaccaaggagtagaggctctgacagtttttaagaattaa

SEQ ID NO: 202592 - DNA, 602 bp, Homo sapiens
aaatgtgaagaatagactaaagaaggatagaggaaaacactatcagcacagttagcaagacattacagcaatgtaaatatgatgatagaacaagataagtggaactggggatgaaatgtgcagccctaacagccacttgggaggcaaaatgaaaaagagaagtggagaaagaaaaagtcaatgtactttacttatttatacctgaaatcatgcaagagatgcattatgttagtggtttatattcttgattctcctttgcaatactaaaaattgaaaagatcactcaacacttataccagaaaataaaaaaataataattctaggtcctgctttatttacccttagcttgtgttagcaggtcagaamacaagttaatttcgatataccacttaatcatggcccaaaattttaagcttcctgactcagaacattgttaagagcctcaaagaaatcatgtctgtgaactatatactagttgaatataaaaatataaatagttgtctttctcaggatagtagaaaaagtgttaaaataaatgaaaaatcgatttgcattctgaaagctaccaaggagtagaggctctgacagtttttaagaattaa

SEQ ID NO: 202593 - DNA, 602 bp, Homo sapiens
aaatgtgaagaatagactaaagaaggatagaggaaaacactatcagcacagttagcaagacattacagcaatgtaaatatgatgatagaacaagataagtggaactggggatgaaatgtgcagccctaacagccacttgggaggcaaaatgaaaaagagaagtggagaaagaaaaagtcaatgtactttacttatttatacctgaaatcatgcaagagatgcattatgttagtggtttatattcttgattctcctttgcaatactaaaaattgaaaagatcactcaacacttataccagaaaataaaaaaataataattctaggtcctgctttatttacccttagcttgtgttagcaggtcagaacacaagttaatttcgatataccacttaatcatggcccaaaattttaagcttcctgactcagaacattgtkaagagcctcaaagaaatcatgtctgtgaactatatactagttgaatataaaaatataaatagttgtctttctcaggatagtagaaaaagtgttaaaataaatgaaaaatcgatttgcattctgaaagctaccaaggagtagaggctctgacagtttttaagaattaa

SEQ ID NO: 202594 - DNA, 447 bp, Homo sapiens
ttgaatctaatgagaacaaagatacagtataccaraatgtctggaacatagctaaggcagtgttaagagtgaaatgtatagtactaaaactcacattaaaaagctgggaagatctcaagttaacaacctaatgtaacaactaaaagaactagagaaccaagaggaaacaaatcccaaagctagcagaagataaaaaataaccaaaatcagatataaactgaaagagacaggaacacacaaaaccattaaaaagatcaatgaaaccagggggtggtttttgaaaaaattaataaaatagatagaccactaactacactaataaagaagaaaagagaagattcaaataaacacaatcagaaatgataaggggaatattaccactgacaccacagaaacacaaacaaccatcagataatattataaacacctctgcacataaactagaaa

SEQ ID NO: 202595 - DNA, 519 bp, Homo sapiens
tataattttaggaatatgaaattatttgcctcttggagaatagagaagaaatagactgaaagaagcaagatgtaactctgggaatatggaaacgccctatctcttgttttgagtcatggttaccttaggttatacaactattaaaatttgccaaaccaacaggtgaaatatgygcattttattttatgtattttaaaagattttaaatgttaatgaaataaaacatatttgtaaaaaacaaaagcaaaacaataattgtgctcttattagccttttgttttgctattgtacttcaattttggaaatgtgtctccatcattaagattattatctttagatcttatttgtagagtgtttctgcatatatgacatagaccattttcttcaacagactgtctttgtaaagtctgatttattttatgttttctagttttattttatttctaattgacagataataattgtacatatttatggagtacaatgtgatgtttctatacatacattcattgtggaatg

SEQ ID NO: 202596 - DNA, 560 bp, Homo sapiens
acacactcaaaccaagctacacagaattcccaatgaaaacgctgctgtgagttggagtacaaataaatataaaaaatacagtaggaaaacatttacttttgagtaagatttgcaggttatagagttttagatgataaagcagactgatagaatctatgaaatatgtaggtgtaaatacacaaagatatttaaaaagttacgtccacaataaagacaaaatattattaaaaaattagtagaaaaaaattgaaaagttactaataaacaccaactaaaaaacttcctgaaggaattgtgtgtttgtgtgtgtgtgtgtgtgtgtatgtgtgtatgtgtgtggagctatacaaaactaagcagcaatgcattaacagaagttatctctagataataggctacatgtttttatagatgtatttctttatatatttttgtatrttctaattttatacaatccaatgcttctgtaattgtaaaatcatattaaaatatacattaaagagaatttaactttcatgtgttaaaagtataataaaaatgtacctttaggagataattaa

SEQ ID NO: 202597 - DNA, 485 bp, Homo sapiens
gagaattccaaaactcctccaaacaaccagaccttgcatgaactaactgagcaaaaacacatttattaccaaagggatggtgctgaaccattcatgagggcttccccccatgatccaactgccctcccactaggccctgcctccaatattgtgatcacagttcagcatgaaatttgcaggagccaatatccaaaccatatcacttgccatacggcccgcttcagtcatcttcaaagccagatatgttggatcttcctctgacttaaaccagaaaatgtttttccctttggaggattcatgtgattagattggccaacctggataaacccagataatcttcccatctcgagatctttaaccttcttcacacccagagaccctttgccaygtaaagtaacatttcctcaggttttgatgagtaggatgcagacaccgttggagtagggaggaattattctgcctatcacagtgttcaaaggattcat

SEQ ID NO: 202598 - DNA, 478 bp, Homo sapiens
  misc_feature (1)...(478): n = A,T,C or G
nnnnnnnnnnnnnnnnnnnnnnnnnnnnnnnnnnnnnnnnnnntctccattcaggtacggtgagcatgaacaaaggagtcacgtaggctcagaggaaggctaggcaggggcaggccattaagtagtctattcaccatggcctaactactgtagttgctgaatgtaccagtgtcagtaatagagaccaacactgagtccttgatcaggtatcattttttggaagacatccagtagttggtggaaagtttattatattaaaccacttctaccatggaagatgtggatattcatcttgactggaatttgcatgcattgtggttatrggtgtgtcttctcagccagcactactaatccaaggaatacagtatttgaactcctgacaaatacactatatcacaatatttcaggataaggcattatatctatcaacgaagatggagcaatgggctcataaccatgacatttacaacccagaagt

SEQ ID NO: 202599 - DNA, 478 bp, Homo sapiens
  misc_feature (1)...(478): n = A,T,C or G
nnnnnnnnnnnnnnnnnnnnnnnnnnnnnnnnnnnnnnnnnnntctccattcaggtacggtgagcatgaacaaaggagtcacgtaggctcagaggaaggctaggcaggggcaggccattaagtagtctattcaccatggcctaactactgtagttgctgaatgtaccagtgtcagtaatagagaccaacactgagtccttgatcaggtatcattttttggaagacatccagtagttggtggaaagtttattatattaaaccacttctaccatggaagatgtggatattcatcttgactggaatttgcatgcattgtggttatgggtgtgtcttctcagccagcactactaatccaaggaatacagtatttgaactcctgacaaatacactatatcacaatatttcaggataaggsattatatctatcaacgaagatggagcaatgggctcataaccatgacatttacaacccagaagt

SEQ ID NO: 202600 - DNA, 563 bp, Homo sapiens
cgtagatagtaattcaaaagagcaaaatacatcctcccattacagtcaatgataaattaaaattatagagtgtcaattcagttgcataaattatttcaaggtaatcagtatttggtaccaaagggaatttaggaaaaagtctcagcagatttttgtctatgatggcaaagtaattaattcaatttagagggcatatgcaatatggagacttasggatttttaagtagaggttttctatttttctttgttttgagtgtggggaggaaggataatttaagattgctaatgcaaaattattttcttctcccaaattttcattttgctcaagaccatttacattgccttgctgaaattctttcccatgaaaaaggtggcaaaatgcatgtgtttcttaatgatcaggtccccactgcatgagtgctatttgagtgtgagagaggcacaaccagcagatacttttattgatgcctattcaaagtcagagaaatctataaccaaggggcgaagtggctaacctcgaaggtccattcctgccataaaagtttataaatctataaattggt

SEQ ID NO: 202601 - DNA, 563 bp, Homo sapiens
cgtagatagtaattcaaaagagcaaaatacatcctcccattacagtcaatgataaattaaaattatagagtgtcaattcagttgcataaattatttcaaggtaatcagtatttggtaccaaagggaatttaggaaaaagtctcagcagatttttgtctatgatggcaaagtaattaattcaatttagagggcatatgcaatatggagacttagggatttttaagtagaggttttctatttttctttgttttgagtgtggggaggaaggataatttaagattgctaatgcaaaattattttcttctcccaaattttcattttgctcaagaycatttacattgccttgctgaaattctttcccatgaaaaaggtggcaaaatgcatgtgtttcttaatgatcaggtccccactgcatgagtgctatttgagtgtgagagaggcacaaccagcagatacttttattgatgcctattcaaagtcagagaaatctataaccaaggggcgaagtggctaacctcgaaggtccattcctgccataaaagtttataaatctataaattggt

SEQ ID NO: 202602 - DNA, 563 bp, Homo sapiens
cgtagatagtaattcaaaagagcaaaatacatcctcccattacagtcaatgataaattaaaattatagagtgtcaattcagttgcataaattatttcaaggtaatcagtatttggtaccaaagggaatttaggaaaaagtctcagcagatttttgtctatgatggcaaagtaattaattcaatttagagggcatatgcaatatggagacttagggatttttaagtagaggttttctatttttctttgttttgagtgtggggaggaaggataatttaagattgctaatgcaaaattattttcttctcccaaattttcattttgctcaagaccatttacattgccttgctgaaattctttcccatgaaaaaggtggcaaaatgcatgtgtttcttaatgatcaggtccccactgcatgagtgctatttgagtgtgagagaggcacaaccagcagatacttttattgatgcctattcaaagtcagagaaatcyataaccaaggggcgaagtggctaacctcgaaggtccattcctgccataaaagtttataaatctataaattggt

SEQ ID NO: 202603 - DNA, 574 bp, Homo sapiens
attaccaaagaaaagaaaaatgtgtattttctcctagaaaacacagaatttggagtttcagtttcattcagagaagacttggtaaaacaaaatgacaatctaagtaatattcaaccttcaccaagagagtagcagtaacatggactaaaccagctttccttaggcaacctgcctcagttgttagattaagtaaaatattgaatgatggcacaactgtagttgttcataatatcccgtatggactcctggcattgtctaatatgtccagtayggactattgaaattgtctagtatataatggaaaaattagatatattacattgaaagagaaaacatcctgaaaagtaattaaaattataatcaatactaatctccctattaatagcctgcttaagacaggcaaattacaaacaactcatttttttcaatctcattgaaagttgtatctttatgattatgtccctgtaatatctcatatttacttacttataattattgttttaatttactaaaattacttatttcagtgctggaattaatttcttaaaccttactgcagcaatgactaatagcg

SEQ ID NO: 202604 - DNA, 510 bp, Homo sapiens
cttgttccaatcaaacttaataattataaatactctccaaccaataaataaaagatgatataactctacccaattttcaggatatacaaagtaattgtttaggggagctctatttaaccattttgagcctrtaattcctgggtttgtaccacgcttaaatatgtggtaaagctctaaaactcaacatttccttctatttgatttatttccatgtttgtactcatatcaatgcttaacttacagagacaatatcctcatgaaataattggatagctattgctatccaatccattcacatctcttctttttggccatgttaattattttttccccctgtagctgaaatctgaaaatatatatggtgaaaacattgaagaacgtctgtagcactcaggctgctttaaaaagtagtgtccaaaatatattaaaagtatcatagcagtttttaaatataatcactccattttttagattagtgcaaaaaacaatgggggaaaaatgtaatgtcct

SEQ ID NO: 202605 - DNA, 584 bp, Homo sapiens
aatcctgtttaactttaactcagaatttcccaagtatgtttaccattaaaccccttgtgtgtgtgtgtgtgtgtgtgtgtgtgtgtgtgtgtgtaattcaacaaattattagagtttttttagtacccagttataaaaatgctagattatacttgtacttgccaacaagctatttgggggcaaaataaacttcagaatgcagactctatacrttctcagtctactttaagctgcaagtatccatcattatactaaacctcactttataaaattaagcatataggtgttttataacatacttaaagatatattattttattttatcctacaaatgtgggatcctataaattcttctctttttttcacatagatacagagaaaaaggcttcccaaaagttaaattttatattacaggatttttataaaaaataaagttaaggagcaaaatgatagatttcctgaccatgaagagtctccaaccatgagttccttccaatgtccatgtgtagaagagttaacacaaataaaactatttttgttatctgttataatgtatgcatgcttccaagttgtgtttgttaacc

SEQ ID NO: 202606 - DNA, 507 bp, Homo sapiens
ctttgatctttgtgttatcagttgtaatatcctctttttaatatgtgattttatttatttgggtcttctcccttttttttctttgtctgaatgaaggtttgataattttgtttatcttttaaaaaattcaacttttcattttgttaatcatctgtattgtttttgtcattttaattttatttatttgtgttctggtatttatttcttttttctaccaatttttgatttggtttgctcttgatattctgtatcattaagatgcatcattaagttgtttatttgaaatttttctacttttctcaaactcctgatctcaagtgattcgcccacttcagcctcccaaagtgctgggatttacaggtggagccatggtggytggccaaagtttttctacttttctgatgtgggggattattgctataaacttttctcttagcactgctttcacggcagcccatagattttgatatgttgtgcttccattttcatttgcttcaagaaatttta

SEQ ID NO: 202607 - DNA, 552 bp, Homo sapiens
aatgcttcaactttcatttctaacgctgataatttacttcttttaaaaaatgtttactttgaaataatattagatttgcagaagagttgcaaaacactatggagagtccctgtatgactttcccccatatttctctaaggttatgatcttacataaccataacactattatcaaaactaataaattaatattggtacaatgctattaactgtttgatcatatttggatttctccagcttttctattagcatcctttttttttttttttttttttttttttttaacgggggaaaaatctaatccatattcccacatggcgttaagttgtcatgggtcttcggcctcctgcaactkggggctatttctctgcctttcttgatttttcatgaccttgacatgtttgaaaagtcctgattagttattttataaagtatccctaatttaggtttacctgctgcttattatgataaacttgaggtaaggcatttttggccaaaaacaacaaaagggatgggctcctcttagggggtcacatcaggggtatatatggcc

SEQ ID NO: 202608 - DNA, 504 bp, Homo sapiens
tgtttatatattacatattctgacacaagatagtgataattgtcgtagggtaagtttttgaaaaaagattaaaattatttcttagcccataattaaataagcataatatactgkcatcatcatagaatttgtgatttataaggaaatagtatgattcattcttttaattacattaacaaagaaactgaagcttaataaggtttactaatgtctaagagcaaatacacacttgatgtgacagccaacagttttaaagaataactatcatttattgagcatgtactatattccaagcaccatatcagatgctttctagggagatagttttttgtgttgattaacagcaagggatctggagacaggttgcttaaacattaatcttaactcttccatctaataaccgtgtaatactgggcaagttactcactttttgcctcacttgactcctctgtaaaataatatttatattagtattttacttactaagtaattgtggggattaaa

SEQ ID NO: 202609 - DNA, 579 bp, Homo sapiens
gcttaaaagcataaaacgtaaatgcattttagctggaattcaaatggtattttaamttgaaagcttttttttcagtctatcaacctgctaatttttgtgctcctacttccaactattttcctggaaagtgtccttcaacctggcttatgcagttgatagcttttctttttgtgacaaacagctaaatactgtaatcaaacataataaaatatgatgctgaacacctggatttttcaaattactgaaaataatcttaacccatcatttttttgaatggagcaaaatatcacaaggaagatttttattgattttttttatttgcttgcagtttctgtgaatttttttctgataactatatgttcctattgctaatggagaaaatttttgaacttagaattaatataatgttaactagaatatttttcttttaaaataatttgagctatattttctgatttctcaacattggtgcagtaatttttcttatagcatcaaaaatttgatgatttcagaaacgtttattgcctaaaatgtgttatagcaaataatatctttttacttttgatcatcaatgtagaa

SEQ ID NO: 202610 - DNA, 579 bp, Homo sapiens
gcttaaaagcataaaacgtaaatgcattttagctggaattcaaatggtattttaaattgaaagcttttttttcagtctatcaacctgctaatttttgtgctcctacttccaactattttcctggaaagtgtccttcaacctggcttatgcagttgatagcttttctttttgtgacaaacagctaaatactgtaatcaaacataataaaatatgatgctgaacacctggatttttcaaattactgaaaataatcttaacccatcatttttttgaatggagcaaaatatcacaaggaagatttttattgattttytttatttgcttgcagtttctgtgaatttttttctgataactatatgttcctattgctaatggagaaaatttttgaacttagaattaatataatgttaactagaatatttttcttttaaaataatttgagctatattttctgatttctcaacattggtgcagtaatttttcttatagcatcaaaaatttgatgatttcagaaacgtttattgcctaaaatgtgttatagcaaataatatctttttacttttgatcatcaatgtagaa

SEQ ID NO: 202611 - DNA, 543 bp, Homo sapiens
cttatttatttattttaacttttatttgaggttcagggatacatgtgcccatttgttatgtaggtaaattgcatgtcttgaggatttggtgtatggattatttcaccacttggataagcacagtactcartaggtagtttttttggtcttcactttcctctctccctccacaatcaagtagtccctggtgactcttgctccattcttcaagtccttatgtacttaatgtttagctcccactataagtgagaatatgtggtatttagttttctgttcctgcattatttacttaagataatggcctccaactctatccatgttgctacaaaaaaacatgatcttgttcttttttatggctgtgtagtattccatggtgtatatgtaccgcattttttattccattttgtcattgatgaacatttatcttgattccatatttttgctattataaaatagtgctgccatgaacatacacatgtctgggtctttagagtaaaatgacttatattcctttgggcgtatacccaataatgagatcactgg

SEQ ID NO: 202612 - DNA, 501 bp, Homo sapiens
tcaaatgtatgggtttactatgaggaaatcaaataaactacagataccggatattagctttattagaaaaaaatgtatattttgatctcacatattctacatgctttttgtcatatttctctgctcaaagtgtagctcggagaggtgggtgttatttatcgcttttctaastccctaacaattaattgtcaaatgggattctggatactgaaaatgttcaaaattcccccaaaaaatttatgttgacttgttgttgttgtttttgtctgattataaatctagatgagaatactgatagaatcaacataataaaatataaaaatataaaataaatataataaatcagttatttcaacacttaaaagcaattatagctaaaatcttctcgtagtatattgggctcttaatgattattgtaaacatatctgataatactgaaaacataatttgcatactgttttattcatttatcagctatagtataaacttttttgtgcataa

SEQ ID NO: 202613 - DNA, 416 bp, Homo sapiens
tagactaaatattctaatggaaagtgaatttatgaaactgtgtgattcartctgtccatatgccccataggtacatgtggctttgtaataaggcctctttcagcctcattttctcatacataaaatgaggataatagtagctaccttatggccttagctactttgttgtatgtatccaattaagtgatgttcataaccttctgagtgggtgttcattaaatgtaacttctctctctccacattccttttctttctttattgggtattttcccccaactcctcttgccaactcttccattcaggactttatgaacatgggatatttttcaatccctgcctctaggatccatgagaagaataaatgagttgaaagaatgccaaaggcctggcctagtgtctggctcatgtaggaattc

SEQ ID NO: 202614 - DNA, 478 bp, Homo sapiens
aaatcttgcatcttagctgatcaattctaaggtgaaatccagtttttaaatttgttgttgtgtgtacatgtcaggaaagttctgaaaatgtgaaggtgaacttccaaaatctgtcatttatcagtaagctccatctgactgctgtgtccacagttgacagaggaggaaaagggcttgatggttgttgttgttatttttttaaactgttcattatcaaaataatacaatttcactaagaaaattttgaaagaaaaaaattgtctaaaataaaaatttagagtaatacccttactcttcaatttcattccccattggtagcctctgttaatatttttgtgtatatcccactatgtcttacacacacacacacacacacacacacacacacacattttaacaaagatgggatcacactatacaagattctacaagttattttctcactaacartgtctccttaacccctactcatatccgt

SEQ ID NO: 202615 - DNA, 568 bp, Homo sapiens
tcttggctggtccatattttaatattttaatcccatttctggagataaacaatgcttgcctcattaattctcctgattggtttgaaaaaatgctttttaattaatttttcattcacttcttccttattttctttgttgatctcttcacgtatakgtttcatcagtcataatatgggtattgtagtcacttctaccttataaattcttctgagtattaaaatgacaaaatgttaaaaagtatcttacatttagcataatgctggatgcatacttctcaatatggtggttattacaaatattaatatcaatatctgttccacacagattgtaaataccagctgtcaatttagtgagtctctactttaatcaacttagtaaggcttcatgccaagttgaccatttactcagttttaattttgatacctttttgatgcataagtctaatggctatttttattagattgatttttatttaaagagttgtctggtttatcatccattaatttagaatttgctagttactaaatagagaatttcatgtttttcagtcctaaatctctaatattta

SEQ ID NO: 202616 - DNA, 603 bp, Homo sapiens
aggcttttggttttattactatgactacaaaactcaaaagaatgaatttctgaattgcttttatgggagaaatatcacaatttgccataagaatagttcatataataaacaaacagagtattatggaaaaaagacataaaaatgatgaaatggtgaaaactttaaagtgaaacacaacaaacaatttccaagaaataaaaactgaaacactgtgtctgcaggagagacaacrctgttcatggaaaatgagaatcagttgagcaaaaaatacaaaaggttgacactcagtagatctaaattaaaaaccacaatcagtttatctatttttattactaactggataagacccacaaaggaaccttttattatgcttatgagaattacttggggtctccatctcaagattccataatttgtcttctcttccagaacttgactctatcaattattcctgtctttctatacctttgatatttccctttccttttggtttccattcttcagcatatatcatagccaagacttttctttcttgctgtctacctatggaatatactgcagacacaaaagaagaatataatgtgtgcagtttaaacaactcat

SEQ ID NO: 202617 - DNA, 603 bp, Homo sapiens
aggcttttggttttattactatgactacaaaactcaaaagaatgaatttctgaattgcttttatgggagaaatatcacaatttgccataagaatagttcatataataaacaaacagagtattatggaaaaaagacataaaaatgatgaaatggtgaaaactttaaagtgaaacacaacaaacaatttccaagaaataaaaactgaaacactgtgtctgcaggagagacaacgctgttcatggaaaatgrgaatcagttgagcaaaaaatacaaaaggttgacactcagtagatctaaattaaaaaccacaatcagtttatctatttttattactaactggataagacccacaaaggaaccttttattatgcttatgagaattacttggggtctccatctcaagattccataatttgtcttctcttccagaacttgactctatcaattattcctgtctttctatacctttgatatttccctttccttttggtttccattcttcagcatatatcatagccaagacttttctttcttgctgtctacctatggaatatactgcagacacaaaagaagaatataatgtgtgcagtttaaacaactcat

SEQ ID NO: 202618 - DNA, 532 bp, Homo sapiens
agacattcctggaattcaaaaatattataggaaagaaatacaataacaataaatwaattgcctgcaaataatcaaggtatgcaagattggactataattgttggatactgaagggcaaactgaccctggagatgaaggacttggaggcattcgagacattcagaatactcaatcatgtacaaatttttacacaaccaaaaagcagggagttatataattttgaggtcattctaacagccatattgcaaaaaaaaaaaaaattaatccttgcaaaaataaaaattaatccttgaaattagaaacattaataaatatgtcatgctaatgattaagatctttttcagttgaatgaaatataagaataaaaaagaaacaatgttttaccttggttcttaatcattaaccctccttctgaagagtctaaagaacttcacaaataaaataaacattaataacgaggggctgaacagaattccttttaaaaaatacacacagtgttcaagcaaatattttcttagattagtctgaaata

SEQ ID NO: 202619 - DNA, 532 bp, Homo sapiens
agacattcctggaattcaaaaatattataggaaagaaatacaataacaataaataaattgcctgcaaataatcaaggtatgcaagattggactataattgttggatactgaagggcaaactgaccctggagatgaaggacttggaggcattcgagacattcagaatactcaatcatgtacaaatttttacacaaccaaaaagcagggagttatataattttgaggtcattytaacagccatattgcaaaaaaaaaaaaaattaatccttgcaaaaataaaaattaatccttgaaattagaaacattaataaatatgtcatgctaatgattaagatctttttcagttgaatgaaatataagaataaaaaagaaacaatgttttaccttggttcttaatcattaaccctccttctgaagagtctaaagaacttcacaaataaaataaacattaataacgaggggctgaacagaattccttttaaaaaatacacacagtgttcaagcaaatattttcttagattagtctgaaata

SEQ ID NO: 202620 - DNA, 606 bp, Homo sapiens
tatactaaccttatagaatgagacagagaatgttctttctttttctattctttgaaagagttcatgaacatgaaactattaattaatatttgccagaaccaactgataaaccatctcatcctggtgttttctttctataatgatattttaagctactgattaaagttttaactactamttcactactgaggttctatttctaaaatgtgacaaaagatgcggatgatctagctattgttctgacttattctctcattctctctgtttcctagcctttttgaatcattttaatacatttttactgtattttttgtgcttctggacacactttcatgtatctaaagaattctgtgatatttgtgaattcacaaagatcaaactttatacacatatctaaacttacacatggagtgaaaagaagcattccctaaatgtgagagattatacatggggtgaatgcagttgtgagcaaggctcacaagggcatgagatctgtgcaggtccacagggccgtctcttgcactgtaatgctctgctgttgctgtcttggagtttttaatttttgaacaagaggtcccacatttttattttgcatgggtctctgaa

SEQ ID NO: 202621 - DNA, 606 bp, Homo sapiens
tatactaaccttatagaatgagacagagaatgttctttctttttctattctttgaaagagttcatgaacatgaaactattaattaatatttgccagaaccaactgataaaccatctcatcctggtgttttctttctataatgatattttaagctactgattaaagttttaactactacttcactactgaggttctatttctaaaatgtgacaaaagatgcggatgatctagctattgttctgacttattctctcattctctctgtttcctagcctttttgaatcattttaatacatttttactgtattttttgtgcttctggacacactttcatgtatctaaagaattctgtgatatttgtgaattcacaaagatyaaactttatacacatatctaaacttacacatggagtgaaaagaagcattccctaaatgtgagagattatacatggggtgaatgcagttgtgagcaaggctcacaagggcatgagatctgtgcaggtccacagggccgtctcttgcactgtaatgctctgctgttgctgtcttggagtttttaatttttgaacaagaggtcccacatttttattttgcatgggtctctgaa

SEQ ID NO: 202622 - DNA, 641 bp, Homo sapiens
catttgttaactggtgtccttgactgtcctctgctagtatcctgtgccattgggaggtaaaagctccctatctaacacctttttaattgtatatttcagccttcccagttttctccttccagctcagaaagcaatcacttactaatatcatatgaagagagagagagggagagagagagaaaaacctttctgcaatttacraaattacaggtaattctgttattcaattaagttaatacctgtttctgtctgagcataacactgcatttcaaatccaaaccccaaatgggctgcagatgcatagaaaaataaaagaagaatcgtgtacactcatggtttctctattcttaccttagagaataatattctcccagaattttctggcatgcctatccatttgaaacagaatccgtttcaactgtttcaaagaatgcaaaatatcatcaccgtaattgcttctgtatctttatgaatattgtaatatctgtattgcaaatgtaatcttagtaatcctatactgcattgccttttgagaagatttcatttcatatatggtgagttttaaaaccctcataaggagaatttttactgatagaaatgctttctatattttattttataattaaccaaaggaataattg

SEQ ID NO: 202623 - DNA, 641 bp, Homo sapiens
catttgttaactggtgtccttgactgtcctctgctagtatcctgtgccattgggaggtaaaagctccctatctaacacctttttaattgtatatttcagccttcccagttttctccttccagctcagaaagcaatcacttactaatatcatatgaagagagagagagggagagagagagaaaaacctttctgcaatttacaaaattacaggtaattctgttattcaattaagttaatacctgtttctgtctgagcataacactgcatttcaaatccaaaccccaaatgggctgcagatgcatagaaaaataaaagaagaatcgtgtacactcatggtttctctattcttaccttagagaataatattctcccagaattttctggcatgcctatccatttgaaacagaatccgtttcaactgtttcaaagaatgcaaaatatcatcamcgtaattgcttctgtatctttatgaatattgtaatatctgtattgcaaatgtaatcttagtaatcctatactgcattgccttttgagaagatttcatttcatatatggtgagttttaaaaccctcataaggagaatttttactgatagaaatgctttctatattttattttataattaaccaaaggaataattg

SEQ ID NO: 202624 - DNA, 592 bp, Homo sapiens
tagggactggctcaggaagcagccagatgctgttcaatcacctttcccattctgtgtcccagggacagagacgccaacctccacgtctttgaccaggtacaggattctcacccctatgtgctcttctggatctgcaaggaggagaaaaacctcccttagtggttcctgggcctacagggakggcggcggcgggagttaagcagaggctcacttacactaccatccccagctccttggaggctacaacctagcctctttaaacctacaatctaggatgtacaacctagcctctccattcctgatctgagtgattggacattaacagtggctttgcaggaggttgtgagaatgaaacgaggtaatgtctggaaaggtgatagttagttcctgctgttgtcataatgtacatcctcctccctttagcccacaaggcacagagctgtacaggcaatctttactaactctgtgctgtaagatttcttatccaccaccaaagatctttggccttgcccagggacgcagagatccacccctttgtaggagtattaatataagcaacaaggacttgtcagtattcttgaaaaggaagctt

SEQ ID NO: 202625 - DNA, 592 bp, Homo sapiens
tagggactggctcaggaagcagccagatgctgttcaatcacctttcccattctgtgtcccagggacagagacgccaacctccacgtctttgaccaggtacaggattctcacccctatgtgctcttctggatctgcaaggaggagaaaaacctcccttagtggttcctgggcctacagggatggcggcggcrggagttaagcagaggctcacttacactaccatccccagctccttggaggctacaacctagcctctttaaacctacaatctaggatgtacaacctagcctctccattcctgatctgagtgattggacattaacagtggctttgcaggaggttgtgagaatgaaacgaggtaatgtctggaaaggtgatagttagttcctgctgttgtcataatgtacatcctcctccctttagcccacaaggcacagagctgtacaggcaatctttactaactctgtgctgtaagatttcttatccaccaccaaagatctttggccttgcccagggacgcagagatccacccctttgtaggagtattaatataagcaacaaggacttgtcagtattcttgaaaaggaagctt

SEQ ID NO: 202626 - DNA, 592 bp, Homo sapiens
tagggactggctcaggaagcagccagatgctgttcaatcacctttcccattctgtgtcccagggacagagacgccaacctccacgtctttgaccaggtacaggattctcacccctatgtgctcttctggatctgcaaggaggagaaaaacctcccttagtggttcctgggcctacagggatggcggcggcgggagttaagcagaggctcacttacacyaccatccccagctccttggaggctacaacctagcctctttaaacctacaatctaggatgtacaacctagcctctccattcctgatctgagtgattggacattaacagtggctttgcaggaggttgtgagaatgaaacgaggtaatgtctggaaaggtgatagttagttcctgctgttgtcataatgtacatcctcctccctttagcccacaaggcacagagctgtacaggcaatctttactaactctgtgctgtaagatttcttatccaccaccaaagatctttggccttgcccagggacgcagagatccacccctttgtaggagtattaatataagcaacaaggacttgtcagtattcttgaaaaggaagctt

SEQ ID NO: 202627 - DNA, 592 bp, Homo sapiens
tagggactggctcaggaagcagccagatgctgttcaatcacctttcccattctgtgtcccagggacagagacgccaacctccacgtctttgaccaggtacaggattctcacccctatgtgctcttctggatctgcaaggaggagaaaaacctcccttagtggttcctgggcctacagggatggcggcggcgggagttaagcagaggctcacttacactaccatccccagctccttggaggctacaacctagcctctttaaacctacaatctaggatgtacaacctagcctctccattcctgrtctgagtgattggacattaacagtggctttgcaggaggttgtgagaatgaaacgaggtaatgtctggaaaggtgatagttagttcctgctgttgtcataatgtacatcctcctccctttagcccacaaggcacagagctgtacaggcaatctttactaactctgtgctgtaagatttcttatccaccaccaaagatctttggccttgcccagggacgcagagatccacccctttgtaggagtattaatataagcaacaaggacttgtcagtattcttgaaaaggaagctt

SEQ ID NO: 202628 - DNA, 559 bp, Homo sapiens
attctgtattataaatgagactctaaggcctgattcataaatattccaaatcacaatactagactccagaatgtcagtgattcttcacccccagcttttattttttattttattttttgaaaaactactggaaaactctgacaaattttaagtgaagcaaaaagcattgtagagtaacgtaaatgtagatataaaattatcccaactgtgagtagcttttcctcagtactcatagttagggaagtaaaccactaatggcttcaaactaaaagaattctacagaaaacctgcctgaaataaacacaagtgatttagtagaacaaaaatatagaattaaaccctagtggtgccacttttccaaggacttatagtagcaattatagtattataagtgaagatctgggtatatgttttaacattatctccctgactacaatgtaatagctccttttcttttctccattacacacatrcagacacatacctacatacacacacatatttacacaaatatccttaacagaggccaactatctcatacatcttcttgcaaagaaac

SEQ ID NO: 202629 - DNA, 425 bp, Homo sapiens
tgtgcttcctgggtgaggagatgcctggacttgctttggctcacactccatgggttggttgcactcactgtcctgcacccactgtctgacaagccccagtgagatgaacycagtacctcagttggaaatgcagaaatcaaccatcttctgtgccgctcatgctgggagccatagactggagctgttcctattgggccatcttggaactgccccccatattagtccttcttgaacttgcttaattcacttagcataataccctctaggttcatccacattgtcacaaatggtaccttttgtcaaaccttggcaactgaattgacatttctactgcttccatatacagagaaattatactaactgaacttgtgaaaataatttattgatattaaattaaaatgctcatgaatagtttttgaattctt

SEQ ID NO: 202630 - DNA, 425 bp, Homo sapiens
tgtgcttcctgggtgaggagatgcctggacttgctttggctcacactccatgggttggttgcactcactgtcctgcacccactgtctgacaagccccagtgagatgaacccagtacctcagttggaaatgcagaaatcaaccatcttctgtgycgctcatgctgggagccatagactggagctgttcctattgggccatcttggaactgccccccatattagtccttcttgaacttgcttaattcacttagcataataccctctaggttcatccacattgtcacaaatggtaccttttgtcaaaccttggcaactgaattgacatttctactgcttccatatacagagaaattatactaactgaacttgtgaaaataatttattgatattaaattaaaatgctcatgaatagtttttgaattctt

SEQ ID NO: 202631 - DNA, 243 bp, Homo sapiens
ctgttcctattgggccatcttggaactgccccccatattagtccttcttgaacttgcttaattcacttagcataataccctctaggttcatccacattgtcacaaatggtaccttttgtcaaaccttggcaactgaattgacatttctactgcttccatawacagagaaattatactaactgaacttgtgaaaataatttattgatattaaattaaaatgctcatgaatagtttttgaattct

SEQ ID NO: 202632 - DNA, 565 bp, Homo sapiens
aactgccattaattctgagtgttgagctgaaactccagaggtttttattgtttgagtatgcttaggtccataaatagctgctcagcctttggaagagccatcagtgaaataagtctggccacctggaataggcttgtgataagtaatcacagggaggataaaagggtgaactttacaaaattgcaaaacttgcctgatggatagtggttgtctattattactacaaaatccacaagagcaatttgccaagcagtcaacatttcccatgctgcagcctgttgttggaaatccaagggaacaataattttgtctgggtcatatcctgtaaacatttttgatckatgcctatccatagttataagttgagtaattaaagaaagataaacttgtaaagattttactgtttgattggatagaaaaagccattctattaccattacaaacttgtctataaatgggcccaaaattcctattggagagtagggggttggaagaataaacagaagcaaaggcttttgtggctgtagccaggaggcatgtcttcactgaagcatttgttctacaa

SEQ ID NO: 202633 - DNA, 565 bp, Homo sapiens
aactgccattaattctgagtgttgagctgaaactccagaggtttttattgtttgagtatgcttaggtccataaatagctgctcagcctttggaagagccatcagtgaaataagtctggccacctggaataggcttgtgataagtaatcacagggaggataaaagggtgaactttacaaaattgcaaaacttgcctgatggatagtggttgtctattattactacaaaatccacaagagcaatttgccaagcagtcaacatttcccatgctgcagcctgttgttggaaatccaagggaacaataattttgtctgggtcatatcctgtaaacatttttgatctatgcctatccatagttataagttgagtaattaaagaaagataaacttgtaaagattttactgtttgattggatagaaaaagccattctattaccrttacaaacttgtctataaatgggcccaaaattcctattggagagtagggggttggaagaataaacagaagcaaaggcttttgtggctgtagccaggaggcatgtcttcactgaagcatttgttctacaa

SEQ ID NO: 202634 - DNA, 565 bp, Homo sapiens
aactgccattaattctgagtgttgagctgaaactccagaggtttttattgtttgagtatgcttaggtccataaatagctgctcagcctttggaagagccatcagtgaaataagtctggccacctggaataggcttgtgataagtaatcacagggaggataaaagggtgaactttacaaaattgcaaaacttgcctgatggatagtggttgtctattattactacaaaatccacaagagcaatttgccaagcagtcaacatttcccatgctgcagcctgttgttggaaatccaagggaacaataattttgtctgggtcatatcctgtaaacatttttgatctatgcctatccatagttataagttgagtaattaaagaaagataaacttgtaaagattttactgtttgattggatagaaaaagccattctattaccattacaaacttgtctataaatgggcccaaaaktcctattggagagtagggggttggaagaataaacagaagcaaaggcttttgtggctgtagccaggaggcatgtcttcactgaagcatttgttctacaa

SEQ ID NO: 202635 - DNA, 562 bp, Homo sapiens
ccatttaatcaaagcctgttttgtttctctgaataactgatgtaaaatttgatctgtaggagtggccaaaagaatatcctccatataatgaacgatgtaagcagtaggaaacatattccgaggctcctttaatgcctgtcctacaaaatgctgacatagcacaggactgttaagcatgcyttgtggtaaaactttccattgataatgagaaccaggttgtctttgatggatagaaagcacagagaaggcaaatcgaggcttatccttctcgtggaagggtatagtacagaaataatctttaagatctattactaagagaggccagtccattaaaatggctgccgcggatgccagaccttgctgtaatgcgcccattggtttaatttgtgcattaatgactcttttggaattgcaaatactggtgaattccagggactaactgactcttcgatatgttctgcatccaattgctcttttactagctgatagagttgagttagtttctcctgtgataggggccattgattcatagaggcatgggtgggacaacagattcttttaa

SEQ ID NO: 202636 - DNA, 562 bp, Homo sapiens
ccatttaatcaaagcctgttttgtttctctgaataactgatgtaaaatttgatctgtaggagtggccaaaagaatatcctccatataatgaacgatgtaagcagtaggaaacatattccgaggctcctttaatgcctgtcctacaaaatgctgacatagcacaggactgttaagcatgctttgtggtaaaactttccattgataatgagaaccaggttgtctttgatggatagaaagcacagagaaggcaaatcgaggctyatccttctcgtggaagggtatagtacagaaataatctttaagatctattactaagagaggccagtccattaaaatggctgccgcggatgccagaccttgctgtaatgcgcccattggtttaatttgtgcattaatgactcttttggaattgcaaatactggtgaattccagggactaactgactcttcgatatgttctgcatccaattgctcttttactagctgatagagttgagttagtttctcctgtgataggggccattgattcatagaggcatgggtgggacaacagattcttttaa

SEQ ID NO: 202637 - DNA, 562 bp, Homo sapiens
ccatttaatcaaagcctgttttgtttctctgaataactgatgtaaaatttgatctgtaggagtggccaaaagaatatcctccatataatgaacgatgtaagcagtaggaaacatattccgaggctcctttaatgcctgtcctacaaaatgctgacatagcacaggactgttaagcatgctttgtggtaaaactttccattgataatgagaaccaggttgtctttgatggatagaaagcacagagaaggcaaatcgaggcttatccttctcgtggaagggtatagtamagaaataatctttaagatctattactaagagaggccagtccattaaaatggctgccgcggatgccagaccttgctgtaatgcgcccattggtttaatttgtgcattaatgactcttttggaattgcaaatactggtgaattccagggactaactgactcttcgatatgttctgcatccaattgctcttttactagctgatagagttgagttagtttctcctgtgataggggccattgattcatagaggcatgggtgggacaacagattcttttaa

SEQ ID NO: 202638 - DNA, 562 bp, Homo sapiens
ccatttaatcaaagcctgttttgtttctctgaataactgatgtaaaatttgatctgtaggagtggccaaaagaatatcctccatataatgaacgatgtaagcagtaggaaacatattccgaggctcctttaatgcctgtcctacaaaatgctgacatagcacaggactgttaagcatgctttgtggtaaaactttccattgataatgagaaccaggttgtctttgatggatagaaagcacagagaaggcaaatcgaggcttatccttctcgtggaagggtatagtacagaaataatctttaagatctattactaagagaggccagtccattaaaatggctgccgcggatgccagaccttgctgtaatgygcccattggtttaatttgtgcattaatgactcttttggaattgcaaatactggtgaattccagggactaactgactcttcgatatgttctgcatccaattgctcttttactagctgatagagttgagttagtttctcctgtgataggggccattgattcatagaggcatgggtgggacaacagattcttttaa

SEQ ID NO: 202639 - DNA, 506 bp, Homo sapiens
gaattcaaggtgagtcacagagtacagtgagaaaagatagtttattaaaagctatgacattacacagtagggcatcctcagaaggcaaggagttgaatgcaacacctttgttttaagtttttcttatatagaagtcttgtatctgtaaagattaattaagctgtatctagtcgtgggtggtcagacaacaggacaaaattgattattctatttattccaagaaaactatccttgacactttcctgtgtgaaaatatcaaaacatgactgttattatcttgaaagcatatatcgttatgaatattgggacatctggactcttcattgcagrtgtgtgtgtttatagggagctgaacttaaaatcacattactctgactctcctacactcctgattccctaactgcagcatatacagagactctcacttcatgcagaagcacctggtccccatcaccaaatgaatctgaatcttaagtccaggactgaattttaaaaataagaccagt

SEQ ID NO: 202640 - DNA, 222 bp, Homo sapiens
tgcagatgtgtgtgtttatagggagctgaacttaaaatcacattactctgactctcctacactcctgattccctaactgcagcatatacagagactctcacttcatgyagaagcacctggtccccatcaccaaatgaatctgaatcttaagtccaggactgaattttaaaaataagaccagttcagttctagctgaattcccagcctagtctgatcactaac

SEQ ID NO: 202641 - DNA, 222 bp, Homo sapiens
tgcagatgtgtgtgtttatagggagctgaacttaaaatcacattactctgactctcctacactcctgattccctaactgcagcatatacagagactctcacttcatgcagaagcaccyggtccccatcaccaaatgaatctgaatcttaagtccaggactgaattttaaaaataagaccagttcagttctagctgaattcccagcctagtctgatcactaac

SEQ ID NO: 202642 - DNA, 222 bp, Homo sapiens
tgcagatgtgtgtgtttatagggagctgaacttaaaatcacattactctgactctcctacactcctgattccctaactgcagcatatacagagactctcacttcatgcagaagcacctggtccccatcaccaaatgaatctgaatcttaagtccaggactgaattttaaaaataagmccagttcagttctagctgaattcccagcctagtctgatcactaac

SEQ ID NO: 202643 - DNA, 573 bp, Homo sapiens
gcacttatggttgggctccaccagaggtgacctatgcacaaaggtccctggctttttgtctgcagcttcatctctgtgtaatctctgggagacccctctgccagtccacatgtccctgaaggtatggagccccatctagccaggattccagatgtctacagtgagagggagctatctactagtcctttcactcaggtcttccctagaaactgttcagggcagagaatcagctgtattaaggcaccccattcagtgttctcagccttcttctgcttcagcctcagtgactattccttttctccatccacattcagcattttctctccaaagatctgttcaaattatgatgrtatgataaaaaacctggtgttcccctggtggcagttgcacatcctgactgcatctagttgaccatcttgaacacatccctgtgtatatattcttttgagaattctctcttgatgtcccttgcccatttttttaatggagttgcttgtgtatggtttgtcaatttgtttaagttccttacagatttttgatattagacctttatcagatgagtagcttgcaatt

SEQ ID NO: 202644 - DNA, 458 bp, Homo sapiens
tcaaattatgatgatatgataaaaaacctggtgttcccctggtggcagttgcacatcctgactgcatctagttgaccatcttgaacacatccctgtgtatatattcttttgagaattctctcttgatgtcccttgcccatttttttaatggagttgcttgtgtatggtttgtcartttgtttaagttccttacagatttttgatattagacctttatcagatgagtagcttgcaattatattctcccattctgtaagtcatctgtttattctgttgatacttacttttgttgcacagaagctctttagttcaattatgttctattctcttgattttattctaggattttatacttttaggatactgtactagcctgttgtcatgctgttaataaagacatacctgagactggataatttataaaggaaagaggtttaatagattcacagttacacatg

SEQ ID NO: 202645 - DNA, 523 bp, Homo sapiens
ggtggcagttgcacatcctgactgcatctagttgaccatcttgaacacatccctgtgtatatattcttttgagaattctctcttgatgtcccttgcccatttttttaatggagttgcttgtgtatggtttgtcaatttgtttaagttccttacagatttttgatattagacctttatcagatgagtagcttgcaattatattctcccattctgtaagtcatctgtttattctgttgatacttacttttgttgcacrgaagctctttagttcaattatgttctattctcttgattttattctaggattttatacttttaggatactgtactagcctgttgtcatgctgttaataaagacatacctgagactggataatttataaaggaaagaggtttaatagattcacagttacacatggctggggtggcctcacaatcatgatgaaaggcaaatgagaagtaaagtcatgtattacatggaagcaggcaagggagcctgtgtagggaaactctcctttataaa

SEQ ID NO: 202646 - DNA, 523 bp, Homo sapiens
ggtggcagttgcacatcctgactgcatctagttgaccatcttgaacacatccctgtgtatatattcttttgagaattctctcttgatgtcccttgcccatttttttaatggagttgcttgtgtatggtttgtcaatttgtttaagttccttacagatttttgatattagacctttatcagatgagtagcttgcaattatattctcccattctgtaagtcatctgtttattctgttgatacttacttttgttgcacagaagctctttagttcaattatgttctattctcttgattttattctaggattttatacttttaggatactgtactagcctgttgtmatgctgttaataaagacatacctgagactggataatttataaaggaaagaggtttaatagattcacagttacacatggctggggtggcctcacaatcatgatgaaaggcaaatgagaagtaaagtcatgtattacatggaagcaggcaagggagcctgtgtagggaaactctcctttataaa

SEQ ID NO: 202647 - DNA, 503 bp, Homo sapiens
ggatacaggcattgggtaaataacactcctaaatggcagaaactggccgaaacataggggctacaggtcccatgcaagtccgaaatccaggtaaggcagtaaaatccaaggggcagtcacctccaaaatgatattctctgactccatgtctcacatacaggtcacactgatgtaagaggtaggctcccatggccttgggcagctcaacccctgtggctttgcagggtacagccctcctcttgggtgctttcatgggctggcattgagtgtctgtggcttttccagttgggtggtccaaacwgtttgtggatatatcattctagggtctggaggatggtggccatcttctcccagctccactaggcagtgctctggtggggactctgtttgtgtgtgtgttggggtggggggctgcagggggttgctcacaccacacattttcctttcatactgccctagcagagtttctctgtgatggtctcatccctactgcaaacttctac

SEQ ID NO: 202648 - DNA, 503 bp, Homo sapiens
ggatacaggcattgggtaaataacactcctaaatggcagaaactggccgaaacataggggctacaggtcccatgcaagtccgaaatccaggtaaggcagtaaaatccaaggggcagtcacctccaaaatgatattctctgactccatgtctcacatacaggtcacactgatgtaagaggtaggctcccatggccttgggcagctcaacccctgtggctttgcagggtacagccctcctcttgggtgctttcatgggctggcattgagtgtctgtggcttttccagttgggtggtccaaactgttygtggatatatcattctagggtctggaggatggtggccatcttctcccagctccactaggcagtgctctggtggggactctgtttgtgtgtgtgttggggtggggggctgcagggggttgctcacaccacacattttcctttcatactgccctagcagagtttctctgtgatggtctcatccctactgcaaacttctac

SEQ ID NO: 202649 - DNA, 503 bp, Homo sapiens
ggatacaggcattgggtaaataacactcctaaatggcagaaactggccgaaacataggggctacaggtcccatgcaagtccgaaatccaggtaaggcagtaaaatccaaggggcagtcacctccaaaatgatattctctgactccatgtctcacatacaggtcacactgatgtaagaggtaggctcccatggccttgggcagctcaacccctgtggctttgcagggtacagccctcctcttgggtgctttcatgggctggcattgagtgtctgtggcttttccagttgggtggtccaaactgtttgtggatatatcattctagggtctggaggatggtggccatcttctcccagctccactaggcagtgctctggtggggactctgtttgtgtgtgtgttggggtggggggcwgcagggggttgctcacaccacacattttcctttcatactgccctagcagagtttctctgtgatggtctcatccctactgcaaacttctac

SEQ ID NO: 202650 - DNA, 603 bp, Homo sapiens
tgaaaataactttttacattaaattattagtttgagcttatctgtaaatatttactatttagatttaccatgttttagcttactacactctcctttttctgtattttatggaaatgataatttatttattctcttaagctgttaatgaaaagttatgcatagatacatttccaaaatgtctatgcgtaaatggcctagaagtaataatatcccagatgcaatgaacatgctaagtacttgaaattttgcttctagacactatactccaataaaacgaaccatgccttcctcaagatataaatgacattacccctgaggcaacaaaagtacaggatgtgcctgaaatatctaggggtgccagaaagtaaataagtatacaacatgatgacaacatatcagaaaaatatagarggaaactgaaggaagtcccaatgaatcgaatctggaccaatttgagcaatggaataatgatagctgtggattgtaacctttggaataaaccaaatactcatgaaatcatattgacagaaaccagtataaggaaataaaagggaaaaaatgttctttcttagagtagaatttctcttactaattgttaaagaa

SEQ ID NO: 202651 - DNA, 556 bp, Homo sapiens
atttttgaaaaatacttggcaaaatatgttgtgcatacacaaactttargatttctttttttaaacaagtttttaaaagaaagtttacctcccatgtttaggatctgaaagtataccggttatgtcagaatgggttcatcattattttacagagaaaataaataaataataaatggaaaacaaaagaaacaacaacaacaaaaagatgggtattcaattttgacattatatactgaaaacttttggcgctacatttctctttctctttattttgtcttgataggcgtatgcactgagcaatgtggaattacactatgcatttacatttacaaatgagaacataagggaaaccacaattcagagtaattctcaataaatttcaagcaaacacatattcaacaagggctttatattgtgtgaatgagctactcaagatagtgaagagatctccactggaaaaatgactggtagattcttccactgaggattaagtgcccctgtgagacacagaaaagtgatgatgagggtccctcacaggcagttataggtagcacat

SEQ ID NO: 202652 - DNA, 572 bp, Homo sapiens
tctctgttagcttgatttttataattttattctatcctttaggggtgattctacatcagggtttctcaacctcagcattattaacaatttgagccagaaaatcctttgttatgagagtaacttacctgtgcaytgtaagattttagcagcagcagtcacatcaccctacttgtgacaataaaaaaggtctccagatattgtcaaacgtcttctggaggaagtgtctccaggtattgtcaaatgtcttcgggaggtcaaaattatccttggttgggaactattgctatagactcagcaaaattttaatgtaaataagaacatgtaaataagaactttttttctttcttctggatatggaaagcacttgcaacatttatctctatttattcctcctcacaactattacagtatacttgttgctattttaattttctatgtatttccaattccatgatattatattgtttttcatcattagtattcaattgcccacatattttctgttatgttgttcttcacatcttcctgcaaagctgatcttcttactatgattatttttattttactagcag

SEQ ID NO: 202653 - DNA, 584 bp, Homo sapiens
gctttttagtggagtatctgggacatctattgcttttgtttgatcagtgtccattcctctttattttgtaatacaaacctcatttttcttaggactttctctaaatccaagttatttagctatgtgactaagtccaagttatttaggtaagtgactgactccaggagtgatgtatgagttagagatagctaatcagaaattcccatctctctgactacaatcactcgttcaaagataggcatgtgaccaacaatgagtcaatgaaagatacacccaagacttttgctggaactcaggaaagaagctttttctgcagacatttgcaaagcagaaggttgtaagcttgaggtggtatatgagcaaatatctactactattggcaaagaacagttgaaaattaagctaacattaaggaaaaggggaaaggagtgccaagaaaaggaaaagaccagtagctaatgcttattgagaggctggatgcaaccggatcctgaactaaatttgtactatgagatacctcttgtacctatgggtcaacaaaatccacattattgtwaaaacaagttgttgggtcattcacaaac

SEQ ID NO: 202654 - DNA, 534 bp, Homo sapiens
gtaaaatcagacaccttaacttggagacctcatgtgtcatttagaaatgtcttagctattcagactgttataaaaaaatgtcatagagtaggtggtttataaaaagcagaagtttatttctcacagttctggaggctggtaagtcgaagatcaaggcaacagcagatttggtgtctggtgagggccagttttcctggttcacagacagccatcttttcactatgtcctcacatgtcagaaaggagtaggggagctctctgaggcctttatataagggcactaatcccctttctgtcagtttccccttcataatctgatcacttcttgctaaccccaaaggtgacagaacctttggggaggtgattaggtcktaagggcatagacctcatacataggattagtgcccttatgaaagagactccagagagctgccttgttcatgccaatcatgtgaggatgtggtgagaagataccatttatgagccagggactagggccttactacactctgaatttgctagctctttgatctag

SEQ ID NO: 202655 - DNA, 545 bp, Homo sapiens
gaattcatcaccttaatggcatcttgaagacactatgtattaatttgttatagccagacctgcataaaggctctggtttacttgaaagtcaatgtctcagaattttcttcagtgctgtgagctatcctgtctcatcaataaatttctttattgcttatgtcatgcaccaccagtttctattgctgacaaccaaattaaactaacttatatcatggggatattttcctaacagagctccatctgctttgaaattaattgttgctactgagtatgtgaaataaaccattataaattgctttttatatgtcttcctaatatttgtttcataaaatttatttttaaaataactataaaattattttttcctgctgaagctatccttgaaaacttttaggaagaactctgaggcatgttctttcttayaattctcataatgcttatgaactaaggcagagatcaccaacattcttaacgtcaaaacattctaccattttactttctcaggtcattgcatttgaaaaggtccatacagatcatttaatcca

SEQ ID NO: 202656 - DNA, 602 bp, Homo sapiens
tataggtcaaaatctataggttgttttsaaattttctgaaggattcttaaagtgattggagacacagggtgtcaaaaatcctaaatgatatttttaaaaaattagctctgaaaaaaacaagtaaggattagttgtttataaaatgttatggtggttcctttaaaacaatcatttcttaagagtcagtgcacttaagattatctgaaaacaagttatcacttcaggctctcaaacaaagttgcttcttttgtgcagcagcagattaaaggtggcgtccttcagcagcaaagtctatgctgaagaccactggaaatgctcctcctttttaggaacccttccctcagaaattgatgacaatcacaagaaaccacataccttggcagaacctgtaagtgctgaaaaagtaaaatgctttgaacatttgccaggatttattattcatcaataaaatatattatttgctaattcatgccccaaaataattattcatgtctttaaaattttcaaagtaataaccataatatgcagaaagttgattcagagttcagtaagattttttaaatgcctaccatatatgtctctgacaagaggctcctcatacc

SEQ ID NO: 202657 - DNA, 350 bp, Homo sapiens
aaaattgattatcattcttcagcctgcacagtgagatatacattttgtatacgttatatgcttcaaatgtttttaaataaatataatacatgggtagaatttataaaygtagagataagaaaaaaagctggttggtaattataaacagacaaacagcataagcacaacaatctgacagtcaactccaaaatatggaattacttggcccttttttagcactcttttctttgcctctcctatgtccacaccagaactgcaatttctagattgcagtacaatggtgaatggggatcataatcttcctgctagctgaccttcattttttgaatcctgcttccttttccaagtcc

SEQ ID NO: 202658 - DNA, 525 bp, Homo sapiens
tagttaactggattaactaaattagacagcttccccagtacagtgttttttgtcttctagctttgtgataactcattcgactttgaaatatcttagtagctggattggctaaatgttctgactcacaaaatattttagtttttagtaagtatctgttcaaagattcttcccaactgcagtcttctcctyaataacagtcatattaaatatgccctagtgcttatacgtgattgcctctgtttttttgtctgttttgttttgtttttactgctaaaagatttgatcagctaactcagtctcttactgagacttaatgtcatataatatggatgcttcaatattatacttattttaattttcctattgtgctcttttcaaaacactcatagatctatagtttctttttaagctctaatagaaatttctattcttgtccatgacactgggatgaaatttgagatactaatttccatgcacagaaccaacattaatgttctaatttgtaacataaattcaattcttgcc

SEQ ID NO: 202659 - DNA, 526 bp, Homo sapiens
agtatctgttcaaagattcttcccaactgcagtcttctcctcaataacagtcatattaaatatgccctagtgcttatacgtgattgcctctgtttttttgkctgttttgttttgtttttactgctaaaagatttgatcagctaactcagtctcttactgagacttaatgtcatataatatggatgcttcaatattatacttattttaattttcctattgtgctcttttcaaaacactcatagatctatagtttctttttaagctctaatagaaatttctattcttgtccatgacactgggatgaaatttgagatactaatttccatgcacagaaccaacattaatgttctaatttgtaacataaattcaattcttgccaataatttgcatatttcagagagataacatacagacagatatagatacacatatagaaagataaaggcatttacacatatatggcaaggggatatacacaaagagagatagagaatgactagagttcacagagtacagctagacttcc

SEQ ID NO: 202660 - DNA, 526 bp, Homo sapiens
agtatctgttcaaagattcttcccaactgcagtcttctcctcaataacagtcatattaaatatgccctagtgcttatacgtgattgcctctgtttttttgtctgttttgttttgtttttactgctaaaagatttgatcagctaactcagtctcttactgagacttaatgtcatataatatrgatgcttcaatattatacttattttaattttcctattgtgctcttttcaaaacactcatagatctatagtttctttttaagctctaatagaaatttctattcttgtccatgacactgggatgaaatttgagatactaatttccatgcacagaaccaacattaatgttctaatttgtaacataaattcaattcttgccaataatttgcatatttcagagagataacatacagacagatatagatacacatatagaaagataaaggcatttacacatatatggcaaggggatatacacaaagagagatagagaatgactagagttcacagagtacagctagacttcc

SEQ ID NO: 202661 - DNA, 482 bp, Homo sapiens
agatcttgacttcatcttggctatttgactgtattctgtcaattcagaatcactgcagaggagcttctgagtctggcaccattctgaaggtttaacattgtgggaagtctcactccagataattaaaaaggttgaacttctcagcagctcagatatttgagtagcctctcaagttccacttaatgaattaattctctgtgcttcttgaaaaataaaccactcaccctgaaaagcccatggcaccacctgccttcagcayaaggattcaacatatgtgggtgtttgggaggactgttttagactgaccttggaactggaaataagaggcagcagctgaaagcagacagaacacacagcttcataatcaggcagtgctgaggtcaaattctggctccgtcgctcacccagctgtgtgacctccagcaagttatttaggtgttctgagtgtcagatgactaattcataaaatggacacattaaca

SEQ ID NO: 202662 - DNA, 432 bp, Homo sapiens
gataagtaccttagagaaagctttttaacatacaatcacagatcccttgttgaagaacacttttgctaacagttttgccttgctgaattaggaaaaaacattctttcaaggacagtagtaagattgaccaggtttctttgtactctcyatatttgaagaaattgagccagttcagtccaagtcacttaaatcctgagtcttgattgcctaatttgtaaaactgttcagcttcctgccagactcatagggttgtagtggggagttcagtaacataaggcagcatttggaaagttgtaagaaaaaacaaaaatgattatgaagtcactttaaaatatagggctctaatattttactgtcaatcactttcaaagcagtgggacattgtaggcaaaacaccggtctgggaaatgaaagacccaggagaactaagtt

SEQ ID NO: 202663 - DNA, 481 bp, Homo sapiens
atgaaagttgggttctataaataattcctgctttagacttawcatgttgtgtacattgtaatcgaatgtgacataaccattctggtctaacaattccacccaatgatatggttaagtgcccccttcgaataacagtgctactccttgttgcggctatgcgtatcagtcacagtgaatgtaatacagcttggcaagagcccaggatttttgccttgcaagtcttcagaaaatgtagagagagcaagcaaattatcttgtgtgagcagagtgaacaaaatgcatggggaggtagaatttcagctagcctgacaataggtctcagccttgttcaccttcctgccctcaaatggccaaggaatctgttcaaagataaatgccctctgttgtttagaagcctgctgaatctttcacccagacagcattgattactcctacaagacctatttatttgaaacttcctattgatctgtttacagaattc

SEQ ID NO: 202664 - DNA, 630 bp, Homo sapiens
tatttacatatatggggagagtcaccgctgagctccccaagagcagtggcatcaccttcaaggttyaccactctgttcccaaccccttgcaaatcctcaataaatattttttgaatgaatggatggatgagcagaggaactgggtaacaaattacatacagggcttaaagcttagtagtgaagctgccaagtatgaaaggttcttttttttggagacacacaaattaaaaacagaaaggtacgcatttgaaaaaaaaatcaaaagaagaaaaagacaaaaatgagagcagttgaatcttataataaaatgtttacttcagaccagggtgctgtagcggcacagagagtcagtattttaggctttgcaagccgtaaggacactgctgtaactactcaactctgctgttataaacataaagctgccacagacaacacataaacaaatggacatgccagtgttacaataaaattttactcacaaaattggctgaaattggccagagagggatggtttgctgactcctgctttatactaatctaataaaggtaaaaaagagtgacacacaattgaagcatataaagaagaggacctaatcttattgagactcttctatgtgctagaccttttgc

SEQ ID NO: 202665 - DNA, 630 bp, Homo sapiens
tatttacatatatggggagagtcaccgctgagctccccaagagcagtggcatcaccttcaaggtttaccactctgttcccaaccccttgcaaatcctcaataaatattttttgaatgaatggatggatgagcagaggaactgggtaacaaattacatacagggcttaaagcttagtagtgaagctgccaagtatgaaaggttcttttttttggagacacacaaattaaaaacagaaaggtacgcatttgaaaaaaaaatcaaaagaagaaaaagacaaaaatgagagcagttgaatcttataataaaatgtttacttcagaccagggtgctgtagmggcacagagagtcagtattttaggctttgcaagccgtaaggacactgctgtaactactcaactctgctgttataaacataaagctgccacagacaacacataaacaaatggacatgccagtgttacaataaaattttactcacaaaattggctgaaattggccagagagggatggtttgctgactcctgctttatactaatctaataaaggtaaaaaagagtgacacacaattgaagcatataaagaagaggacctaatcttattgagactcttctatgtgctagaccttttgc

SEQ ID NO: 202666 - DNA, 549 bp, Homo sapiens
gtcttatttatattttacaaacagagaatatttattatgtgccaggtactgttctgaaacacacatatgaattcatctaacctccatggcaaccctataaagcaggtaaaatcataatttcttactaatgaggaaactgaagacagaggctacagaactaacgaatgaaaacacttagatttgaacacaggtaayctggctctagatcctgtgcctaaagccactatgctggacttctatctcatactttgatgtcacccttgaatttttagaacaaagcacaatgcctagcatattgtagatgctgaataaatgaacaaattaattaatagaggcaaaataatgtgttacatttacatgcccttttcactaaaccactagttctctaaggtcaacattttacctacttcacacctccagaatatagcttctaatttcagaatctactcagtgattcctttggtcgaaccaataattatcgagtgcccaccctgataagtgcgctggtgatatatcagttgatttaccaactagtgtgggatgaaactg

SEQ ID NO: 202667 - DNA, 390 bp, Homo sapiens
ctaaggcttgaaatgggagcctcaggactctgtctggtgccctgtcctgctgtggctgaactggcatacaggttgcaagacaaagccctctttactctcccctcacctctcaagcaaaaggaaggagtctctgctggcactgcgagctgtgctgcctggggttggggaagcatgatgatgcaatcattcccttggctgctctagctggcatcttgctaggtcatgtgcatcccaagaccactgrctccaagcccagcacagcaccaggacttgcccaggaattgcagcttggcaactggggcctataccgcctttcaagttgattgaggaccccagggcactttagctcatggtggcaaggcttgcaggaactcagatttggaccaatgg

SEQ ID NO: 202668 - DNA, 568 bp, Homo sapiens
ccccaaactctggagggggctgaggtggcaggggggtggtgtgtcagagctgccccaaatgtgtgcacatctgatcaggctgtgacagcaactgggcttggccccaactccattccgagatcagagcaggctctgggagtagggggaggtcaggcagtgggagacacccccaagcctgagaggccgagggggcctggggcccccgaggttgcagagtgcagagtgcagagagggaccctgtgcctgggagagcagggctcctgctcactccatagagtgtgcaggcagccctggccatgccttttctcagcctggggtgggggttccaggtcctcastgagcccctctctgcccgcccttccctgcgccatcacagtggcccccagggcagtggtctccaggggggcttccaccggccctctggagcgtggcacaacccttgacccagctgtgcctcctccctggtgtcctccctgcagtggctgacatgatggcaacagctgctctggacagcctgctgctgccatcaggaggtagggtagagcggtttcagaatagcagcataaca

SEQ ID NO: 202669 - DNA, 568 bp, Homo sapiens
ccccaaactctggagggggctgaggtggcaggggggtggtgtgtcagagctgccccaaatgtgtgcacatctgatcaggctgtgacagcaactgggcttggccccaactccattccgagatcagagcaggctctgggagtagggggaggtcaggcagtgggagacacccccaagcctgagaggccgagggggcctggggcccccgaggttgcagagtgcagagtgcagagagggaccctgtgcctgggagagcagggctcctgctcactccatagagtgtgcaggcagccctggccatgccttttctcagcctggggtgggggttccaggtcctcactgagcccctctctgcccgcccttccctgcgccatcacagtggcccccagggcagtggtctccaggggggcttccaccggccctctggagcrtggcacaacccttgacccagctgtgcctcctccctggtgtcctccctgcagtggctgacatgatggcaacagctgctctggacagcctgctgctgccatcaggaggtagggtagagcggtttcagaatagcagcataaca

SEQ ID NO: 202670 - DNA, 577 bp, Homo sapiens
gacctttctgctagaacaaaaataaatactcagaagtattgaaaaacagagtatgttcaaatttattactgaaccgataagaagaaagaatattcaaaagctaaaaacttagtgcaggtaggagtcaggcaggatataggagaagcaagtttgtccagaaggcatttgttgaatctacgtgatgtggagcctcggattttatggccttctgggcatgcaagaattaggagatacagcyttcggccctcaccacaccatggagcagtgtattaggtttatctctgctcccaaaattggcactataatggactgcccccttgctgtcaggggatctattagtaaatctatgctgcccacctgctccctaagagaactgctaggaaatttgccccttttgaactgtggttctgggtgaaaggagaaaaacatcttggagaatttataaccagcctgcacaagagtttgcatcctgaattgatataacttgtgtgatcccaaaaaacctccagcttagaatttcatgtaaggtgcaatgattcctccaggtaccttgcaaaaaagccctaaaaaaaaaaaa

SEQ ID NO: 202671 - DNA, 566 bp, Homo sapiens
tgtggaaccttgttatgagagttagatttcttcattagtttgctttcatttggtaacaattaatttccaaatctcagtgccttccaacaacaaacatttgttacttttgggcaggtgcagctggctgctgccacttgcccaactctgttccacattttctcactatttagaagtgcatattcactggcagagggaaagagcaagacagatgggggaaacacatgatcacttttaaggcttamactcctcggtggcaaacattacatctgcccatattgtgttggcgaaagcatgtcacttggtccagcccctacagaggcaggtatgcagacatgtctttctcacacaaacattgtatgtcatagcaatatgccgaggtgtataagcttcttatggaagtgagagtaaatattaggaatacgaatataatctatcttagtctgtcctcttaatcacaaatctcctcctttttccattatgcctacaaactacactcaaaggccccatggaacatactgcaaggtctcatccaattgtgacatccggctcaaagcccaggattttat

SEQ ID NO: 202672 - DNA, 380 bp, Homo sapiens
gactgaacgtgcctgccaaggatgtgtcttacctgtgttcctggctcccttgttcagagactgcccttctcaagggctctgtgtctgygctgggaaggaaataactatgggaaggaaatccatgtgtataaactgctgtcaacaaatggaacccagaccttccggctcaaaaaaaaaaaaaaaaaaaaaaaaagatgtcagagagatgagatagatggaagaagaagagattcgaagcatgagaggaacttaacccatcgttgttggctctgaagctggaggtaggaacgtggatgactttcagaagctgaagacagccgtcagctaatagccagcaaggaaatggtcatctcaatcctacaatacaaggaactgaattc

SEQ ID NO: 202673 - DNA, 596 bp, Homo sapiens
agataacttgccttaaatcacacccctggcaaagaaaagacccaaaccagggaagtttattctctagggcatcagttcttatccacctttactgccagcaagccttccatagacctgkatgtgaagacaggtctctgtgtcctacatagaaacaactggaaacctctgtgttgaatatttataccttaaagctcctggtatttgtgctatatacattgtcgtcattaaaaatgtgaaggtaaatatttataaacagctgttaaggaaactagacttctggggagaaatattaaactcaaattgctgcttagaggttttcttttaaaaatatgaatatgcagactgactctaaatataaacctttttcctattgtaattctacctttcatagcccagctaaaaatctgctagaattcagcaataggtccccaggaaaatgactgctttgaaaatgtttggctgaaatcagatactacttctcacctactacaatggctaaagcaaacaagactagcaataccaatactgtaattggaggagatgtggagcagctggaactctcaaatactgctgtgatggaatgataaatggtgcaa

SEQ ID NO: 202674 - DNA, 596 bp, Homo sapiens
agataacttgccttaaatcacacccctggcaaagaaaagacccaaaccagggaagtttattctctagggcatcagttcttatccacctttactgccagcaagccttccatagacctgtatgtgaagacaggtctctgtgtcctacatagaaacaactggaaacctctgtgttgaatatttataccttaaagctcctggtatttgtgctatatacattgtcgtcattaaaaatgtgaaggtaaatatttataaacagctgttaaggaaactagacttctggggagaaatattaaactcaaattgctgcttaraggttttcttttaaaaatatgaatatgcagactgactctaaatataaacctttttcctattgtaattctacctttcatagcccagctaaaaatctgctagaattcagcaataggtccccaggaaaatgactgctttgaaaatgtttggctgaaatcagatactacttctcacctactacaatggctaaagcaaacaagactagcaataccaatactgtaattggaggagatgtggagcagctggaactctcaaatactgctgtgatggaatgataaatggtgcaa

SEQ ID NO: 202675 - DNA, 596 bp, Homo sapiens
agataacttgccttaaatcacacccctggcaaagaaaagacccaaaccagggaagtttattctctagggcatcagttcttatccacctttactgccagcaagccttccatagacctgtatgtgaagacaggtctctgtgtcctacatagaaacaactggaaacctctgtgttgaatatttataccttaaagctcctggtatttgtgctatatacattgtcgtcattaaaaatgtgaaggtaaatatttataaacagctgttaaggaaactagacttctggggagaaatattaaactcaaattgctgcttagaggttttcttttaaaaatatgaatatgcagactgactctaaatataaacctttttcctattgtaattctacctttcatagcccagctaaaaatctgctagaattcagcaataggtccccaggaaaatgactgctttgaaaatgtttggctgaaatcagatactacttctcacctactacaatggctaaagcaaacaagmctagcaataccaatactgtaattggaggagatgtggagcagctggaactctcaaatactgctgtgatggaatgataaatggtgcaa

SEQ ID NO: 202676 - DNA, 596 bp, Homo sapiens
agataacttgccttaaatcacacccctggcaaagaaaagacccaaaccagggaagtttattctctagggcatcagttcttatccacctttactgccagcaagccttccatagacctgtatgtgaagacaggtctctgtgtcctacatagaaacaactggaaacctctgtgttgaatatttataccttaaagctcctggtatttgtgctatatacattgtcgtcattaaaaatgtgaaggtaaatatttataaacagctgttaaggaaactagacttctggggagaaatattaaactcaaattgctgcttagaggttttcttttaaaaatatgaatatgcagactgactctaaatataaacctttttcctattgtaattctacctttcatagcccagctaaaaatctgctagaattcagcaataggtccccaggaaaatgactgctttgaaaatgtttggctgaaatcagatactacttctcacctactacaatggctaaagcaaacaagactagcaataccaatactgtaattggasgagatgtggagcagctggaactctcaaatactgctgtgatggaatgataaatggtgcaa

SEQ ID NO: 202677 - DNA, 565 bp, Homo sapiens
cagctacagttgtagagggtggcattcagaaggggaaaccctggccaggcgccatagctcacacctgttatcccagcactttrggaggcccaggcgggcaaatcacgaggtcaggagttcgaaacctgcctagccaacatagtgaaaacacctgtctactaaaagtacacaacgttagctgggtgtggtggcgggcacctgtaatcccagctacttgggaggctgaggcaggagaatcacttgaacctgggaggcggaggttgcagtgagccgagatcacaccattgcactccagcctgggcaataatgcaaaactccaaaaaagaaaaaaaaaaaaggaaagaaagaaagagagagagagagaaaggaaggaaggacagaaggaaggaaggaaggaagaaaggaaggaaggaaggaaggaagaaaggaaggaaggaaggaaggaaggaaaagaaaagaaaagaaaagaggaagccccaacaagagcttgtagagaagatggagcaacaaggagagctgaagtggctggagaaggcaatgggtagaatagaaatttgagtttgca

SEQ ID NO: 202678 - DNA, 598 bp, Homo sapiens
gtttccaaaacatgctttttgggggacacatttaaaccacagcaatgctattataaatggaatttttaaaaaattatatttcagatagtttatcactattgtatagaattgtaattgatttttgtatgtctactttctatagtgtaactttactaatttgttagttctaacagttttctggtgyagtttttagggtcttctatatataagatcatgtcatctgcaaacagacaattttatgactctctttctgatttggatgcttttaatttcgttccttgcctacctgttccggccaggacttccagtactatgttgaatagaagtggttaaagtaggcattcttgtcttagttttgatcatacagaaaaacttttcaggttttcaccattaagtatgatatcagttgtgaggctataacctttattatgttgagatacattcctcccatattcaatttactaagagttcttatcatgaaaagatgctgaatttcttcaaatacttctcctgcatctcttaagatggttatatgatttttattctgctatttattcatcctgttaaagtgatgtactgcattaactgatttgtgtat

SEQ ID NO: 202679 - DNA, 598 bp, Homo sapiens
gtttccaaaacatgctttttgggggacacatttaaaccacagcaatgctattataaatggaatttttaaaaaattatatttcagatagtttatcactattgtatagaattgtaattgatttttgtatgtctactttctatagtgtaactttactaatttgttagttctaacagttttctggtgtagtttttagggtcttctatatataagatcatgtcatctgcaaacagacaattttatgactctctttctgatttggatgcttttaatttcgttccttgcctacctgttccggccaggacttccagtactatgttgaatagaagtggttaaagtaggcattcttgtcttagtyttgatcatacagaaaaacttttcaggttttcaccattaagtatgatatcagttgtgaggctataacctttattatgttgagatacattcctcccatattcaatttactaagagttcttatcatgaaaagatgctgaatttcttcaaatacttctcctgcatctcttaagatggttatatgatttttattctgctatttattcatcctgttaaagtgatgtactgcattaactgatttgtgtat

SEQ ID NO: 202680 - DNA, 489 bp, Homo sapiens
tgatctaggatgcacactccttatgagaatctaactaatgcctgatgatctgaggtggaacagtttcatccagaaaccatcccccctccatccatggaaacttgtgtcttccattgaggcaggagtataggttctggagtgagggaacctaaggtcgtttcatgctgacttcctagaactaaattgaaaggaaaaccctaactttccacgcctaagggaaaaaaggaccagaggctactccctttgcaaaccyccgaccttttctgccaagcagatgggaaattggctgtccgcaaccaatcagactgatggccggtccagtcttcctttgcctagaagtgcaactttgtaactccaccttagcctgtgattgattacaaaaagcaaccaatcagatatttgcacaggagtgtgaacttcattaactccacttcagtccactttgtaactcctcttcgcaactcctctgattgcaggccaccacttcat

SEQ ID NO: 202681 - DNA, 560 bp, Homo sapiens
ttgaaactcagtctttcttctttcatagtgtgagagttgccctgaaatgcatgttgcaggtgtagctaggtgttttgaaatttctgcactagagtgtcttagacttcaataaaaattatctgagaatcttgctaaaatgctgactctgatgtagtagattggggtggggtgggcgagtctacagttctgataagctcccaggtgatgctaatgctgctggtcyggcaatccacctagagctttgaggatctacactactggatgcatggccaggtagagagttaaggcctgcactttaaaatgaaaagactgctttgaggagaagcaggtgtcagatatttaaatcagccatatcctaacaaggcaaatgtggtactataggtgtgggagctcctggagcctatgaaattaaataggagttgggagatctgggaaaattagccaagaatattttaatttagatgagctatacaagacagaaatcatggaatagggatgatcaaaaataggacagtgggggatgaaacagggaagagaaaattgggaggggatgttctggc

SEQ ID NO: 202682 - DNA, 458 bp, Homo sapiens
atgatgtacatattgatgtgtctttttttgaaatccagcttgaatcttagtgaatattttaaatttgctacttcaggttttcattatctcttggaattattcttctagtatttattgtcggtttttctctatgcattcctttttgttcttctgcaactactattactcacattttaggcctctgattccattctgtggatctctcatgacatctgtctcatggtakatgctgtctgcttgagaagttcttatacttgaccttccaagcctgctgatgtgaatctcagcagccccattttctctttgaatgaatctgctgaataagatatactcaaatctcctttaaaatacctttaatttattttctaattcagggtttttttttctgctctaataattccattttgctgagtgtaagtcctaacagttccacttgatcttctctctggctaatggtt

SEQ ID NO: 202683 - DNA, 480 bp, Homo sapiens
actattactcacattttaggcctctgattccattctgtggatctctcatgacatctgtctcatggtatatgctgtctgcttgagaagttcttatacttgaccttccaagcctgctgatgtgaatctcagcagccccattttctctttgaatgaatctgctgaataagatatactcaaatctcctttaaaatacctttaatttattttctaattcagggtttttttttctgctctaataattccattttgctgagtgtaagtcctaacagttccacttgatcttctctctggctaatggtttcccatagttcgcttgttattttcctttgctggcccattggaattctagtgtggtggckagagtatcctagcagggatcctacagtcatggaaagcacaggcacctctatccccctgagctgcagtgtagaatcaggcaggctggcacctgctgcctctcttatctccctgtagtctctc

SEQ ID NO: 202684 - DNA, 645 bp, Homo sapiens
gcacaggcacctctatccccctgagctgcagtgtagaatcaggcaggctggcacctgctgcctctcttatctccctgtagtctctctcccgtaaggaaggaaataytcagcttacttgttcatctctcatttagtgttttgggaatttggcacgttcatactgaattgacatcagtactcccttaagggaccacagatctttgtatgctccatcttcccccagaattttctgtttttgggttcttaagtaggttatgatgctgtttatcattttacttgttcaaattatgaggtcaaaagacctacaccattctctatgcccaggatcccagcagaagccagagcttcactacattcatttgctatttgtcttaggagaggcagactgattagagttggtagcagcaatcaaggcaccatgctcagaatgccatgttcccacacttcctcccagtgggtttgaatgacaggtacaatcagccattttaggcatatgagccatttgtgctagccagttcttttcaaatttcaatgtgcatatggctcccctgtggatcttattaaaatacaaatgctccttcagtaggtctaaggtagggccccaaattctgcatttctagcactttcagggaggcactatgggcc

SEQ ID NO: 202685 - DNA, 443 bp, Homo sapiens
ggttttgaaaactgagtccttgtcctcacagattcattttaaaacaaaagatttatccaccacatcttccctggctctaacaaaggaaaggaataagtcagaaagaggaaaatgtatcagagagaaacttgagggcrcctcatgattgtagggggattggcagataggcttaaaaagagaaatgcaacaccagcaaactttttaaattcacatatgaatctactatgtgtttgatagttatgaggggtgtttcccatcagccactgttctagatattcacaataaaaagttgtttcctacttgtgagatggtctaaatcactgtgttcaatagaaatacaaggtgagccacatatgcaactttaaatgtttttaatttacttgtaaatttgcatgagtaaacttaatttcttttgatacacagttctatgagttttcacaagt

SEQ ID NO: 202686 - DNA, 618 bp, Homo sapiens
aacctctgcaaacactgatgcattatcgattccttttgtatgtcccttcgagatgtcatatacatggaatcatacagtagtggtcttttgagtctggcttccttaaattagcataataaaataattatccatctcactgaaagttttcaattgttcctttttatttctcagtagtctttctttaatcccttcaccagttaaaggacattaggttgttttggaaattatgaatgaagctgcttataactattagtgtacaggtttatgcaccaacatattttcatttctcttgagaaaatacctaggagtggaatagatgggtcatatagtaagcatatagttaactttgtaagaaactgccaagctgctttccaaagtggctgtaccatcttacattctcgcaggtgatctatctatgccagttgctcaaaatcctcatcagcatttagtattgctgtttytatttattatagccattctaataggtatggagtggtatccaactgtggttttaattggtatatcttcaatggctaatgatgttgcacttctttttacgggcttatttaccatcaatatatcttctttagtgaattgtttaaatattttgcacatttt

SEQ ID NO: 202687 - DNA, 418 bp, Homo sapiens
taaaaaaacagtttaaactctgtgagatgaatgcacacatcacaaatcagtttctcagataatttccgtctactttttatcctaggatattcactttctcaccattggactcaaggagttcccaaatgtccattagcagaatggacaaaaagtctttccaaactgttgaatccaaaggaaggtttaacactgcaaaatgagtgaacatgtcaaaaagcagtttcttagtaagcttctttctagtttttatctgaaggtatttcctttttcatgataggcctcaatgcactgctaagtatccttttgcagattctacaaaaacagtgtttcaaacactgatgaatgaaaagaaagtttgaattctgtgagakgaaggcacacatgaaaaacatttttttaaagagctccctcctagttt

SEQ ID NO: 202688 - DNA, 418 bp, Homo sapiens
taaaaaaacagtttaaactctgtgagatgaatgcacacatcacaaatcagtttctcagataatttccgtctactttttatcctaggatattcactttctcaccattggactcaaggagttcccaaatgtccattagcagaatggacaaaaagtctttccaaactgttgaatccaaaggaaggtttaacactgcaaaatgagtgaacatgtcaaaaagcagtttcttagtaagcttctttctagtttttatctgaaggtatttcctttttcatgataggcctcaatgcactgctaagtatccttttgcagattctacaaaaacagtgtttcaaacactgatgaatgaaaagaaagtttgaattctgtgagaggaakgcacacatgaaaaacatttttttaaagagctccctcctagttt

SEQ ID NO: 202689 - DNA, 554 bp, Homo sapiens
ttttcattcagtggtttggaaacactgtttttctagaatttgtgaggagatagttcatagggcattgaggtctgtggtgaaaaaggaaatatgttgagaaaaaactagaaagaatcttaatgataaagcaaatatcccaggataaaaacttgaaggaagatatctgagaaactgctctgtgttgtgtgcattcatctcccagagttaaacctttcttttctttcagcagttttcaaacattgtttttgtagaatctgtgaagggatattttggagtgcattgaggcytaaggtgaaaaagggaatatattcaggtaaaaactagaaagaagctttctgagaaaatgctttgtgatgagtacattcatctcacagagttaaacctttctctggattcagcagtttggaaaaattgtttttgtgcattctgagaatggccatttgggagctcattgaggacaatggcaacaaaatctacaccccaggataaaaactaggagatatctgaaaaaccgtgttgtgatgtgtgcaatcatcttacaaagttaaaccttc

SEQ ID NO: 202690 - DNA, 429 bp, Homo sapiens
tcaagcaatttaaggatagagacacctggtggatcccaggcatgctaagggtagagactcttggcagacctcaggcattctaatgatagagactcgtggcacaccactagcattctattgatgaagacatctgtgcgacctcagatattttgagaataaagatatttctccaaagccaggcattctatcgggagagagtcctggctgaccacaggcattctagtgatagagactccagtctgaacccaggctttytaatgatggagacaacagggcgacctcaggcattctaaggatagaggcacctggcctaccccaggcattttaatgggagagactcctggccgaccacaggtgttctaatgataaagacttctgcctacctcgggcattaaaatgttagagacacctgtgcaaattctggaattc

SEQ ID NO: 202691 - DNA, 429 bp, Homo sapiens
tcaagcaatttaaggatagagacacctggtggatcccaggcatgctaagggtagagactcttggcagacctcaggcattctaatgatagagactcgtggcacaccactagcattctattgatgaagacatctgtgcgacctcagatattttgagaataaagatatttctccaaagccaggcattctatcgggagagagtcctggctgaccacaggcattctagtgatagagactccagtctgaacccaggctttctaatgatggagacaacagggcgacctcaggcattmtaaggatagaggcacctggcctaccccaggcattttaatgggagagactcctggccgaccacaggtgttctaatgataaagacttctgcctacctcgggcattaaaatgttagagacacctgtgcaaattctggaattc

SEQ ID NO: 202692 - DNA, 613 bp, Homo sapiens
ctgaggcttttagtgaaaagcaacatatccccagaaaaaaactaggaagaagctacctatgaaactgctttctgttgtgggcattgattttgcagagttaaaccattcttttgattcaacaggatggaatcactctttttctagaatctgttaaaagacatttggtagccctttgagaccgataatgaaaaactgaatatccacagaaaaaaactagaaaaaagctatctgtgaagccactttggatgtgtgcattcatctcacaaggataaacttttctgttgattcagcaggttgaaaacactttttctgtaaaatctgtgaggggacatttgggagcccattgaaacctagtgtgaaaaaccaaatctccccagagaaaaactagaaggaagctaactgtgaaactgctttgtgatgtgtgtgttcaactcacagaattaaacctatattttgattaagcagattggraacactctttatgtagtacctgcgaagggacatttgggagcccattggggcctatagtaaaaaactgaatatccccaaataaaaactaaaaagaagctatatgtataacagctttgagatgtgggcattcatcttgcagagt

SEQ ID NO: 202693 - DNA, 413 bp, Homo sapiens
  misc_feature (1)...(413): n = A,T,C or G
nnnnnnnnnnnnnnnnnnnnactaatctagttagtatagtgtaataatatatactagttagtgtaggggacattttctagtataacctactagaaaatgagcttcagatgactaacatggctatagagatatcagtataaggactggtrttgctcattaaatagtcagttgtagaactaaagcagaaaaaagttaaaaggagtgagcacaggattaatggctatatgctgtggcatgagcatgtagtataactgtaaaagtaggtagtgataattgggagaatttatataaaatttttttcaaactgtttgcagtaatcaaattagtggtgacagtatagttactgttattttgacattgttgtgtttataacgtgaaatgaaacagaatgattatggagtattctaatttta

SEQ ID NO: 202694 - DNA, 609 bp, Homo sapiens
ctaagtgggtgacttgagagattcaagtgtatgatttaacctttgacttggtgtttaacctttgacttggcatgcttctgtggggttgcatcccttctctgattcttcccttggggtgggctgtccacatgcacagtgacctaccagcacttgggaggggctgcatgcacagtgtgtttactgaagttgtacacgtgctcatttgaggcattcttccctgactggttgagtgctcctagaagaaggtcatatgccaccagttaaactccaccattttgcctcttagtgtgcatgcttgagcccacttgcctaactcctgagtcttattgggaagctgctgatcaccagtttcaggcttttctatctagtggtagactgccttttcctggcaccaggtgtgaccaattattattttagmgagacagtttaacaaccacctgatcatcacctgatgtggccattcctggttgggggtgtcctcctgtcctgcttatgtctgcctgactgcctactgtaacactggaaaccaagtgaggaaagcatataaagtctgtcagcatgtcaaataaaatgagttctgaatcaagtgagataaggactaaataatga

SEQ ID NO: 202695 - DNA, 609 bp, Homo sapiens
ctaagtgggtgacttgagagattcaagtgtatgatttaacctttgacttggtgtttaacctttgacttggcatgcttctgtggggttgcatcccttctctgattcttcccttggggtgggctgtccacatgcacagtgacctaccagcacttgggaggggctgcatgcacagtgtgtttactgaagttgtacacgtgctcatttgaggcattcttccctgactggttgagtgctcctagaagaaggtcatatgccaccagttaaactccaccattttgcctcttagtgtgcatgcttgagcccacttgcctaactcctgagtcttattgggaagctgctgatcaccagtttcaggcttttctatctagtggtagactgccttttcctggcaccaggtgtgaccaattattattttagcgagacagtttaacaaccacctgatcatcacctgatgtggccattcctggttgggggtgtcctcctgtcctgcttatgtctgcctgactgcctactgtaacactggaaaccaagtgargaaagcatataaagtctgtcagcatgtcaaataaaatgagttctgaatcaagtgagataaggactaaataatga

SEQ ID NO: 202696 - DNA, 609 bp, Homo sapiens
ctaagtgggtgacttgagagattcaagtgtatgatttaacctttgacttggtgtttaacctttgacttggcatgcttctgtggggttgcatcccttctctgattcttcccttggggtgggctgtccacatgcacagtgacctaccagcacttgggaggggctgcatgcacagtgtgtttactgaagttgtacacgtgctcatttgaggcattcttccctgactggttgagtgctcctagaagaaggtcatatgccaccagttaaactccaccattttgcctcttagtgtgcatgcttgagcccacttgcctaactcctgagtcttattgggaagctgctgatcaccagtttcaggcttttctatctagtggtagactgccttttcctggcaccaggtgtgaccaattattattttagcgagacagtttaacaaccacctgatcatcacctgatgtggccattcctggttgggggtgtcctcctgtcctgcttatgtctgcctgactgcctactgtaacactggaaaccaagtgaggaaagcatataaagtctgtcagcatgtcaaataaaatgagttctgaatcaartgagataaggactaaataatga

SEQ ID NO: 202697 - DNA, 502 bp, Homo sapiens
tgtaggagatttttaagattacacttttaagatcaaccattacttacattgtttgttcaccagaaagcaatcatataaaattacccagaactgatccacatggaatttcatttattgctaacatcctatagcatccatcaaattgctgtagatatatgcctgtttgtcacataacaatayagtcttcaaaaacttattccttgctgggcacggtggcccatgcctgtaatctgagcactttgggaggctgaggcgggcggatcacctgaggtcaggagttcgagaccagcctggccaatattgtaaaaccccatctctactgaaaatacaaaaattagccagacacagtggcatgtgcctgtaatcccagctactccagaggctgaggctagagaattgcttgaacctgaaaggcggagattgcagtgagctgagatcgcaccactgcactccagcctgggatacagagtgagactcttgtctcaaaaaaaaaaaaaaaaac

SEQ ID NO: 202698 - DNA, 502 bp, Homo sapiens
tctgttaatacctgtagcttagctcttattgtaattatttatttgcaaatctgtatatttccaactaaactgtgacctagcttattgaaaacacagacagttatattgttaatttggccctggcaaaggaccagatattgaatacttgtttaataaacctgttaagttaatgaatgaatcatgtggtagaattggtcagagcttactttgtctgacaattgaatttcagtggttgcaagtcaaattcctttgctgtaartagaaatataaactcttgattttattcttgtttttgttttgggagttttagttcatcatgaattcatagtcctggttagctttacgaagtagagatgtgtcttctatatacctctagagcaggattagtatgtagaagtaattacatcaccatcccagatacttttcagtcagggcctgctttgtttccagcactattctgggtgctttggatgataagaataataaagtacaaactggaaga

SEQ ID NO: 202699 - DNA, 661 bp, Homo sapiens
tgcctatgtctgctttcacactacaaaggcaaagtgagtagctgtgacacagaccacatggcctacaaagcctaacatatttactctcaggctgtttatagaaaaagttttcaaacccctattgtagatgatagatggttgctaaagagagacagggtgattgaaaacaacaatctgtatagggtattagctttataatcctcaacatttgactgtattctaacctgttgaaaaagatctgctgtagrggaaacatcaaagaagtacagtttagttctggaaggaagcttagcaattactaagaccatttttagatgaggaaaaaatattttattctttatcttaaaaattaagctatacagtcactacgaattacttctactggtatagtacttcttagattgtaaaggagattaaaggaactgcaaagacaggatttatatgcatcaataatatctttgcttattttatagatagtaattataaactatatacatatacataaagcatattatgtgaatatattttattcataatactatataaataaaatagaaaatactaaaaattaacaagacattacagatagtactgaaaaacataagtattctattaccattcctgatctcatcctctccctccactacccagacatagctac

SEQ ID NO: 202700 - DNA, 595 bp, Homo sapiens
ataaaaacaaaaaaaatgtttaatgaagaaatagtattttaaaagtaataatgacctctgggagttagagaaaggatggacttgggtggtgaaagaacactttggctttatctgtaatatgctattatttgttttacagagaatatatttgtgcttcacttctgagggtttttgtttgtttgtttkttttagtttaaaaaaaaaaactaaaagcaaaaacttggccaaaatgttattagttctgggtaacagaacaaaagtgattattagtttcttctttgtgttttcaaatttctccaaataaataaataatgaagtatttactttcactgccaccatatctgtcatcatggaaacactttttgcttttccctgtatgtttgttcatctttgggttgctacaagtactgacagataaagatttctaaaggcgaatttgtcgttattttcttactaatcttactaacttccagggctattactcagcctgctcgtcagtatcaccttttaccagttaaaatactgacagaattctacaccagttaagttctgcttccctgaagccccagaatgcctatcccattcaacccttcac

SEQ ID NO: 202701 - DNA, 595 bp, Homo sapiens
ataaaaacaaaaaaaatgtttaatgaagaaatagtattttaaaagtaataatgacctctgggagttagagaaaggatggacttgggtggtgaaagaacactttggctttatctgtaatatgctattatttgttttacagagaatatatttgtgcttcacttctgagggtttttgtttgtttgtttgttttagtttaaaaaaaaaaactaaaagcaaaaacttggccaaaatgttattagttctgggtaacagaacaaaagtgattattagtttcttctttgtgttttcaaatttctccaaataaataaataatgaagtatttactttcactgccaccatatctgtcatcatggaaacactttttgcttttccctgtatgtttgttcatctttgggttgctacaagtactgacagataaagatttctaaaggcgaatttgtcrttattttcttactaatcttactaacttccagggctattactcagcctgctcgtcagtatcaccttttaccagttaaaatactgacagaattctacaccagttaagttctgcttccctgaagccccagaatgcctatcccattcaacccttcac

SEQ ID NO: 202702 - DNA, 612 bp, Homo sapiens
cctgtaactttgttctttgtatattttaactcattaatgtatagtcacagtattacagaatttagacacagagcctggcataattgataacagttttaacatggctttattaactactcttttctcattcttccctattctcttctagtctcccttttgcatggattattctcttttcctgccctactgttggttccagattcttatgttattccattgcagataagggagaagaagaatggtagaatggaaacccactggagaaattcgagacgaaagagaagaaggaaaataatgggtgaagggaaggttaaaatttcttgctccagcactctctgttctcttccaggccttatcttactccttcagactctgtcttyatttctcatcttttcttctcacttatgcctctgcctttccactctctctttctattggacactttctgacaccatggtagctatcactagtggcttgcaatctatgttcctaccacctggccagtagttgtagggaggaaggaggttggatgggagaattgaaggagactctgttgttggatcttgggctacacagagtagggagaaagatgtaccttgcaaggtataccag

SEQ ID NO: 202703 - DNA, 631 bp, Homo sapiens
gtgctggcattcaaaccacaatacaaaaagttcttcccgctcttctctcccctttccacatgcagaggaggagcgtctctctgtggccagcaccatgactgttccatgagcagttctgccaggccacaccaccagtgttcacttaaagcccaagagctctttcatcagcttgtggtgagtgctgccaggcctcggactcacccttcaggcagtgggcccccctctggcccagagccggtccagaaatggtgtccaagaggctggacttggggatctgaaaagcctgccttttgytctgtcccactgtgatacctgaaagcaagacaaagttccctttacttttccctctgcttttctcagacagaaggagtctttcacagtggccaccacaactgggaatgtgctgggtctcctttgaagcaagtagtctcagacctcaaggcccacagcatactccctgggtattgctggtgcccagtggcaattcattgcccaagaactctttagtcagcaggtgatgagtcctgccaggactggatccttctcttcaaggcagccggttcccttttggcccagagtgtgtctagaaatatcattggggagctagggcctggaatgggggcctcatggc

SEQ ID NO: 202704 - DNA, 517 bp, Homo sapiens
attactagcttcattttaaatgaggaaacaaaataatttaagttatgtgacctaaatagtccatttatttacgtttttaaactaatttctgacaattttgttggcccttaaatactcaaataaatgaaggaactgggatttacaaccagatcatctagcatacagtctttagcatgagatcagaaagagcaggaaaacattggtttaaagttgttggggaaggcataaagaagtaaagctttaaatgtctatagaaggatattayaagattaggaaagaaaagttagtcactctaacatatcacaaaaagtttgggcctactaagaaaatgcttaatttatgcatttttataacacaatagattttgtttctataagctccttcagccaagaatttgcatttagtgttgaatgataatttatgaatgaaatccctactatatccaatttagttctaatctgttactaaaatacataacagaatacataattctacaaaataaaatcactttaggaat

SEQ ID NO: 202705 - DNA, 517 bp, Homo sapiens
attactagcttcattttaaatgaggaaacaaaataatttaagttatgtgacctaaatagtccatttatttacgtttttaaactaatttctgacaattttgttggcccttaaatactcaaataaatgaaggaactgggatttacaaccagatcatctagcatacagtctttagcatgagatcagaaagagcaggaaaacattggtttaaagttgttggggaaggcataaagaagtaaagctttaaatgtctatagaaggatattacaagattaggaaagaaaagttagtcactctaacatatcacaaaaagtttggkcctactaagaaaatgcttaatttatgcatttttataacacaatagattttgtttctataagctccttcagccaagaatttgcatttagtgttgaatgataatttatgaatgaaatccctactatatccaatttagttctaatctgttactaaaatacataacagaatacataattctacaaaataaaatcactttaggaat

SEQ ID NO: 202706 - DNA, 599 bp, Homo sapiens
acagaattctcaattcctgctgtttgaaatatatagtaattgttatatttgatatctaagcattaaaatctgaccagcatgcctctactgtcgaaacttaaggttgtttaaagtgggaatgggaaatatgtcagaagagagaggaagaagagaaacatacttaaaaaaaaaaaaaaaaaaaaaaaaaaccttaacaaaatctacctttccagtacatgttcattcagctgtaaccagttcatgtcaaaaagtcaagttwaaaatgttttccttccacccccttgccagtcattacccaggacccacaaatgtttttttcagcaatgccatataatttttaaagatctcaaagagcaaataatgcttctctacattcagagaaactaaatcaaactcagtcacctggcttctagaaaaacacaatttacagacaactcacagaaagtagcaaaaacaaggaacacaaaaactagcagcaaatattacctaaatggaaaatacatatatgtagacaacagtagcatgaaatttagaaataagggaaaggataatccaaattatttccgggaactattcaaaaaggtgattctccatagaag

SEQ ID NO: 202707 - DNA, 599 bp, Homo sapiens
acagaattctcaattcctgctgtttgaaatatatagtaattgttatatttgatatctaagcattaaaatctgaccagcatgcctctactgtcgaaacttaaggttgtttaaagtgggaatgggaaatatgtcagaagagagaggaagaagagaaacatacttaaaaaaaaaaaaaaaaaaaaaaaaaaccttaacaaaatctacctttccagtacatgttcattcagctgtaaccagttcatgtcaaaaagtcaagttaaaaatgttttccttccacccccttgccagtcattacccaggacccacaaatgtttttttcagcaatgccatataatttttaaagatctcaaagagcaaataatgcttctctacattcagagaaactaaatcaaactcagtcacctggcttctagaaaaacacaatttacagacaactcacagaaagtrgcaaaaacaaggaacacaaaaactagcagcaaatattacctaaatggaaaatacatatatgtagacaacagtagcatgaaatttagaaataagggaaaggataatccaaattatttccgggaactattcaaaaaggtgattctccatagaag

SEQ ID NO: 202708 - DNA, 270 bp, Homo sapiens
tcaataagaaaatatttgtgtaattgagttgcaagcagaattgcctgtcccccccgaagccttttttttttttttttaaacttggaatgactcatacagacgatggcttctataacttgagagtttttttttttttttttttttwaaataaagctttattatttagggttgaaacatttgagtttttattaaagttttcgtcaggcacttgcttttttaaaaatgaaataaagggagcctataacttcaaaaaaaagggccgataaatag

SEQ ID NO: 202709 - DNA, 563 bp, Homo sapiens
acaaaggaacagaatgtagcrgtaagaatggagatctttcaaatatgatttattcacctctaatgcacagagcagcccaaatgcaggtgaagtggctaagagctgaaaccactgatgaagaatttattggagtggtttgcaagacaggcccaggatgtgcaaacccatttattttccaatttgtaaatcaaaatgttctgagtcaggtaggagagttaagtctgatgctaagaactgcatggtataaatcaaaacaaaatttactatcaggagtttagagattcaagtgtgaactcagtttatctcctgtttcctccaatagcaaggcgcttgctcttgtggctcccggcctccagtgttactctctctgtttccctgtggatggccactgtggtgcttcacacatccctacccagacccagtagggtctctgagctctgagctcaaggatgtgttttgagggtgcaaatgtcttagcttctgttctgggcttagagctagttacaggctacaaggtgttgtcattacagaccccaaggaggctcagtctgtgggatccttcc

SEQ ID NO: 202710 - DNA, 563 bp, Homo sapiens
acaaaggaacagaatgtagcagtaagaatggagatctttcaaatatratttattcacctctaatgcacagagcagcccaaatgcaggtgaagtggctaagagctgaaaccactgatgaagaatttattggagtggtttgcaagacaggcccaggatgtgcaaacccatttattttccaatttgtaaatcaaaatgttctgagtcaggtaggagagttaagtctgatgctaagaactgcatggtataaatcaaaacaaaatttactatcaggagtttagagattcaagtgtgaactcagtttatctcctgtttcctccaatagcaaggcgcttgctcttgtggctcccggcctccagtgttactctctctgtttccctgtggatggccactgtggtgcttcacacatccctacccagacccagtagggtctctgagctctgagctcaaggatgtgttttgagggtgcaaatgtcttagcttctgttctgggcttagagctagttacaggctacaaggtgttgtcattacagaccccaaggaggctcagtctgtgggatccttcc

SEQ ID NO: 202711 - DNA, 563 bp, Homo sapiens
acaaaggaacagaatgtagcagtaagaatggagatctttcaaatatgatttattcrcctctaatgcacagagcagcccaaatgcaggtgaagtggctaagagctgaaaccactgatgaagaatttattggagtggtttgcaagacaggcccaggatgtgcaaacccatttattttccaatttgtaaatcaaaatgttctgagtcaggtaggagagttaagtctgatgctaagaactgcatggtataaatcaaaacaaaatttactatcaggagtttagagattcaagtgtgaactcagtttatctcctgtttcctccaatagcaaggcgcttgctcttgtggctcccggcctccagtgttactctctctgtttccctgtggatggccactgtggtgcttcacacatccctacccagacccagtagggtctctgagctctgagctcaaggatgtgttttgagggtgcaaatgtcttagcttctgttctgggcttagagctagttacaggctacaaggtgttgtcattacagaccccaaggaggctcagtctgtgggatccttcc

SEQ ID NO: 202712 - DNA, 563 bp, Homo sapiens
acaaaggaacagaatgtagcagtaagaatggagatctttcaaatatgatttattcacctctaatgcacagagcagcccaaatgcaggtgaagtggctaagagctgaaaccactgatgaagaatttattggagtggtttgcaagacaggcccaggatgtgcaaacccatttattttccaatttgtaaatcaaaatgttctgagtcaggtaggagagytaagtctgatgctaagaactgcatggtataaatcaaaacaaaatttactatcaggagtttagagattcaagtgtgaactcagtttatctcctgtttcctccaatagcaaggcgcttgctcttgtggctcccggcctccagtgttactctctctgtttccctgtggatggccactgtggtgcttcacacatccctacccagacccagtagggtctctgagctctgagctcaaggatgtgttttgagggtgcaaatgtcttagcttctgttctgggcttagagctagttacaggctacaaggtgttgtcattacagaccccaaggaggctcagtctgtgggatccttcc

SEQ ID NO: 202713 - DNA, 627 bp, Homo sapiens
atcccattcaggagtaatcagagcaatgtgtgaggcagactaaaaccactcaaggctgcacagaaacccatcatccaatgtgyagaagcctcacaacaaacctaatcacaaaccctgaccaagcactggctgaacaaatttctctatccaggggaaactcctaggaagctaggattagaaataaaatcacatgcacgtctgccagtctggatgactgtatgcatacccaagattaggccttctcagcagtgatcagaagggacatccaagctactactccttggctgaacatggggcaaagcatacactccttaaactgatagcagcctccaagtcacacacgtagtaaagggttaaaaatctaacagattaagaggacttaagcacaacctctcaccaataactatgttatcatgacctcgagcaacccctaaatagctaggctaaaagataaaataaagcaaaacaactggagcaaggacattagaggctgtgcaatgcatagaaaacagatgtcacagagttagttcagccaaggcactaaacaaaggaataaatgaccaagaaagcaagaatgacatcaattcaggtggcaatggtgcagagtgggagagggaagagagttag

SEQ ID NO: 202714 - DNA, 581 bp, Homo sapiens
aagcttccatgatatatgaagtatttctgaaggatctattttgtcctaattttttgttaaaattcaatgaatagcagtcaattataaatagtagtacagatttttaatagatcttcataagtttgaaacatttgtatacatactattaaaaattattttgacaactttatagtgtagatgatggcaggagaagatgctctgccacttattttacacacggtctctagatatgaaactccttcaataaattaaaatttccaataatctgtagcagatccagggaaagatatctgacatrtacttgataacccaatgttaagtgaaataaagtgaaagtaaacattaacctagccatactacgttttaagtacttgatactcttaggaaatgatttttgaactttgcactcaatttctgctgtagtttgctgcctgtgctgacattgctgttttgctgaagaaagactctattcagagtgcttatatttgtctttaactacatgtttcaacctacaagagtgaaacaaatccgcatatgtgtttctatattgtcatggaatttttagtcctcgaagataattt

SEQ ID NO: 202715 - DNA, 589 bp, Homo sapiens
ggactgaaggggcaaggctggcagccggagaaggggacccttctagctcctgtctgtgcacaagcaaggcagactgtgagctgccaccaggctggagtgtgctgcagaagaaaaaagaaaagactaaacaatttgctaatgtcttaagagcaagtaatgggcacgcaagcaagccctgagcacacccctggggaaaaaaaaaaacatcaaagcctgttgccacagaggaagctagatcccagatcttggggaagagcagggcaatatgaatgaggcaggtggaggtcacttaactctagatctctaaggcagattccataccttttagccatcccccaggggccaggaaagccccttcctgccctcacccttctcctctgttgccaccacattcccctggargttcttccttgcatctttgttaatcccctcagagaagtcagggtgaaaatgtcaaggccagctttacccttctaagaggaaaggaggctctctgttctggaagatggccattgtgtccgtattattccaagtactgcacacaccttcagaaaaaggaacctgctccccacatcccagcttcaaagct

SEQ ID NO: 202716 - DNA, 517 bp, Homo sapiens
gaattcttgtaattggaagcccccttacccccaacccctctcctataatatgaggccagagataaggtatgctctgtatccaactggagccagtttagcaaatgctcctccaagccctatatgaagagacctccgcttggttctgatgatgcaacccaggcaactttacacaatcaaaattttttgcacagctctgagacacagtctttgtcctttctgatgccaycaggtccaactgcagaacacctgatttggcgatgaagccaatttaaatgtagaacacgattctgcttagaggccagggtcagatgtcatagtattggggagcagaagcaagagtctgaagaaaacccctaagctattgccagcatcacccccgactgtgtgaagtaagcaacctgccttctctgcacctccaaaatcctccacccaccaccaccaccattccagtgttccatccacaagagaaaggtcatgcccctgagatgaaggtgctttgtctttaaatgtagattgt

SEQ ID NO: 202717 - DNA, 517 bp, Homo sapiens
gaattcttgtaattggaagcccccttacccccaacccctctcctataatatgaggccagagataaggtatgctctgtatccaactggagccagtttagcaaatgctcctccaagccctatatgaagagacctccgcttggttctgatgatgcaacccaggcaactttacacaatcaaaattttttgcacagctctgagacacagtctttgtcctttctgatgccaccaggtccaactgcagaacacctgatttggcgatgaagccaatttaaatgtagaacacgattctgcttagaggccagggtcagatgtcatagtattggggagcagaarcaagagtctgaagaaaacccctaagctattgccagcatcacccccgactgtgtgaagtaagcaacctgccttctctgcacctccaaaatcctccacccaccaccaccaccattccagtgttccatccacaagagaaaggtcatgcccctgagatgaaggtgctttgtctttaaatgtagattgt

SEQ ID NO: 202718 - DNA, 624 bp, Homo sapiens
caaaattctcacaatagcctacaagatgctgcattgcttttttcttttatatttatctactagataaatatctatctactagactatctactagactgtatattttctttattcatctcacttattgtccgctgcccatrtgtgaatataagctccataaagtcagggacttggtctgttttattcacagatgaagccccagcatctacagcaatacctgacacaaagtatgtactcaatatgtatttgtaaatggaatgaatgaagtagattgggtagggggaaatcttgacacatgggccagaattataccaaattgcaatatgacaagtgaaatggcatttgaggagccagctagtgctgagacctagtcaagccccaggagatgtttttagttgctacttcctaccattgttttgacattttgtctgaggaagtctcccttcttttgtctcctaaagagaaggaaattgactatatagcaaagtaaggagctccccctagtggaagtaactccatcaaagcaatggaatagaaaatcatagcctggtgcttgaaattagaaggatcactagggacaaaggaagtgactccagcatttcacaggaaaaatcctcagtggaa

SEQ ID NO: 202719 - DNA, 624 bp, Homo sapiens
caaaattctcacaatagcctacaagatgctgcattgcttttttcttttatatttatctactagataaatatctatctactagactatctactagactgtatattttctttattcatctcacttattgtccgctgcccatatgtgaatataagctccataaagtcagggacttggtctgttttattcacagatgaagccccagcatctacagcaatacctgacacaaagtatgtactcaatatgtatttgtaaatggaatgaatgaagtagattgggtagggggaaatcttgacacatgggccagaattataccaaattgcaatatgacaagtgaaatggcatttgaggagccagctagtgctgagacctagtcaagccccaggagatgtttttagttgctacttcctaccattgttttgacattttgtctgaggaagtctcccttcttttgtctcctaaagagaaggaaattgactatatagcaaagtaaggagctccccctagtggaagtaactccatcaaagcaatggaatagaaaatcatagcctggtgcttgaaattasaaggatcactagggacaaaggaagtgactccagcatttcacaggaaaaatcctcagtggaa

SEQ ID NO: 202720 - DNA, 624 bp, Homo sapiens
caaaattctcacaatagcctacaagatgctgcattgcttttttcttttatatttatctactagataaatatctatctactagactatctactagactgtatattttctttattcatctcacttattgtccgctgcccatatgtgaatataagctccataaagtcagggacttggtctgttttattcacagatgaagccccagcatctacagcaatacctgacacaaagtatgtactcaatatgtatttgtaaatggaatgaatgaagtagattgggtagggggaaatcttgacacatgggccagaattataccaaattgcaatatgacaagtgaaatggcatttgaggagccagctagtgctgagacctagtcaagccccaggagatgtttttagttgctacttcctaccattgttttgacattttgtctgaggaagtctcccttcttttgtctcctaaagagaaggaaattgactatatagcaaagtaaggagctccccctagtggaagtaactccatcaaagcaatggaatagaaaatcatagcctggtgcttgaaattagaaggatcactasggacaaaggaagtgactccagcatttcacaggaaaaatcctcagtggaa

SEQ ID NO: 202721 - DNA, 553 bp, Homo sapiens
ggaatccctccctccgcctcccgccgtcgctgcagttgtaaacacgtttccctccatgtctgttttcccttctctctcaccgtggccattacgggctgctgtttacaaaaatcctgcaggcctttgacaccccgtcctcccttcccccggcatccctgcccttattctggctttyttctcttccatctcctggtgagcacagcatactgttctcaggcttgttttccttttattgctctccatgtgggacaggtcatgctttatcaacatgtaccattttctacaaatgccgcccttcctctttaaattgcttggatgggcagatcgattttgattagcaacactgcagcagaaacaaggtgcatctctggaaggactgggtggttttctcgttattgttgctggtttgggtcacatcggatgctattttaaattctgtgttttattccccgatgggtcttgaatcctttccctattcgtaggtttgaaatatgtttcctccctttaaaaaaaagaaggggggcagtattgtgttgaaccaaatgtttttcta

SEQ ID NO: 202722 - DNA, 394 bp, Homo sapiens
ttgcatactatgccagattataaaatacttacttttaaaatgaaacmtatatatatatatatatatatatatatatatatatatatatattaactttcttatcaatcatcttgttatgcaactaaaattagagttgcttggtttgaaaacaacactgagagcctccagataacttttaagacttatttagctttgtgggtggtgttttcatgcgaataagtaagagtgagttttatattttgtagaagtttttggtcctgttttaatgttctttgtgtggcagtatgtatataatctgttaaatttctcaagaatgactccttaaaaactttgagattaatgctttattgcaactgtgttttgactaaagcaatgacagtattaaaaacaaaca

SEQ ID NO: 202723 - DNA, 619 bp, Homo sapiens
atatcagcatttgaatttttctgctgagttactttctcctttcatacctaacctggggatactgagatatctgatattaggtttggcttttaacaatttttgcctttttgtyttacataatttttccttcatttttcaatcttgttcttatcttgtttatagtaatcttgtttatagtaatatcaaaccattgtgatggatatttagatttctaatctctaatgtctgacattaagcttgacatgtcaaataatacctaccagcatggatgctttgattaagcaaccaatttgcctgtcatagctttatgtatatatcataattgtaattctcaactctttgcactttccacttcataaaattttcattaaaattgtggcttttaatctgtctggaaacatgtacataaaaactgcaatcatgctttcgacaacatttgtaaaaccttcatgtcttttgttattcccaaacttagtgattccatgtgaaaacagagaaataccctcatgcacatagtatttctattgacaaatttcctcagatcttgctaattttacatagagtattaatcaagatgatcaagctttccaataatcaagatatttttcttgttaccaat

SEQ ID NO: 202724 - DNA, 619 bp, Homo sapiens
atatcagcatttgaatttttctgctgagttactttctcctttcatacctaacctggggatactgagatatctgatattaggtttggcttttaacaatttttgcctttttgttttacataatttttccttcatttttcaatcttgttcttatcttgtttatagtaatcttgtttatagtaatatcaaaccattgtgatggatatttagatttctaatctctaatgtcygacattaagcttgacatgtcaaataatacctaccagcatggatgctttgattaagcaaccaatttgcctgtcatagctttatgtatatatcataattgtaattctcaactctttgcactttccacttcataaaattttcattaaaattgtggcttttaatctgtctggaaacatgtacataaaaactgcaatcatgctttcgacaacatttgtaaaaccttcatgtcttttgttattcccaaacttagtgattccatgtgaaaacagagaaataccctcatgcacatagtatttctattgacaaatttcctcagatcttgctaattttacatagagtattaatcaagatgatcaagctttccaataatcaagatatttttcttgttaccaat

SEQ ID NO: 202725 - DNA, 587 bp, Homo sapiens
gtagtaaactcctaaattatttataagaccatattcagtcaagcaatgagtacttatccagcgtttcttttctttctgatagtcaaggtactatgcataacagatatgaaatctgctggtttatccctgagtgtgtttcttagagaaaggaaataagcaggaactactgtggtagttttgtttttctgacgagattccaaggtaacttattagaaatatttacatcatggtaaatgtcttattggtttatttgccagtgttactaatgacaagatatattctaaaatcttaattgtctctcagatggaactcagtgcatcttttctcattaaaaaatcaacatgttgattaaattatacttatttttaaaacgtcaaagagttagaatttatggttacataattcttatatttcctcwgtcttatctctattttctggctttaaagacaatagcttgataatatggagaccataagaatatgaaactaaaaaacaaaacaataatatataatggaaattataaaacaataaataattagttttaagacatagtaaaagaaaatgataaggcagtttgaagactgtgt

SEQ ID NO: 202726 - DNA, 458 bp, Homo sapiens
agtttgaagactgtgtttcaagtccacatcttctccattgttctagaacattacatctaarggtgtttttttgctcttttctcttcctggagccgtctttgtcactgtcttcccctattccctgctcctcttgacctgtgtaacatgaaatatgtaaataggtaaatataatatgattattcaagtcagtataaatatctcttcctctctgatcactttgctgaacacaactcttatcaacaatttacaataataggtttatggcattcgcagccgcctggatgggattggagactattattctaagtgaagtaactcaggaatggaaaagcaaacatcatatgttctcacccataagcggaagctaagctatgaggatgcaaagacaagaatgatacaatggagttctggggactcagggggaaagggtaggaagtgggtgaaggatacgagactac

SEQ ID NO: 202727 - DNA, 578 bp, Homo sapiens
aaacatcatatgttctcacccataagcggaagctaagctatgaggatgcaaagacaagaatgatacaatggagttctggggactcagggggaaagggtaggaagtgggtgaaggatacgagactacaaattggtttcagtatatactgcttgggtgatgggtgcaccaaaatctcacaaatcaccactaaagaacttgctcatctaaccaaataacacctgctccccaaaatctaaggaaagaattaaaacaaaaatcataataggtttaatgcyctctttttggttcccacagcactccacatttaccactacctacactatcactatattaaccaatttgaagttacattgtaatgcctgccttcccagctaagtggtaagcttccttaaaataaagaagagcttgttcattatttttttctacagggatcacctcaataactgacacataatagacaataaatactaattgaatagattttttcaaagccatgcagtcttttctattctacttggcatgaggttattgtttaaaagtaaatggcagattttattgatggtcttatctttacagtg

SEQ ID NO: 202728 - DNA, 573 bp, Homo sapiens
aacagcagtaaagaaactcatacaaaattaaagaactctattgcaaatttaaagggtcatttggtttcatcaaaaatcaaataatatgaatatgttatcctctgcatgaaagagactatgttaaattattttgagagctgaaaaatgagcaatcaatggtgtgctaatgaaatttgtgaaaaaatcatttttttcacatattgaaatatgccataaattgtcatttacttcctgcagaagaaggcctactttgggagatcactttttttgttttgttatgttttattttattttacctcagcttattgtttatttaaatggtcacactgatgataggacttgaatcaagttagtgggattaaagtaagcagacttctctctgagttgcaaataataataataataataatatgctactctatcataaaagtrtcttgtctgaaatattttcctcgtatgacagaaaacgaacaattcatattatattcattaaatgtccaaagaaccaaatcaatgacctaatagacctgcaaagatttaagatggtttaggccaactaagctctcacccacc

SEQ ID NO: 202729 - DNA, 602 bp, Homo sapiens
gaattttgcttacaaggtcagaaaatttgagcttattttttattctgaccttaactctctcttcccattcacattgttctatctactcaccattagttcaggaacattgaattctattattttcatcttgcagctgttatttttcttttaattttttattagtctctcttttccttctattccagttctctattttatgatgcgcctacatttacccctttgtataagggaccacagggccatagggctcttgttttatattatttttgaagaaaataatttgtagtgccttttgaaaagacacaatgagcaaagagcgtattttgttaaatacattctgaaaataagattaaaatttaattataaaaattaagwgtaatgaggagacagggtaataaaagcaagtaaaaaagtgaaaagtacaattcagttagagtaaaatacttgaataacaggaaaaaaatgaagaaatgtacaacatagtatataagagaagaaaaaagtaacattcatacatgaaaaagcagggtagacacaaataacagtacaaggggtgaggaaaagtctaaaaatcgaggaaagaacaggaagtcaatagagac

SEQ ID NO: 202730 - DNA, 560 bp, Homo sapiens
aggccattataagtttttctcttcatgaatatggataagctttggtaataatgtgtgtttatacacacacgcatacacacakacacactcattacacagtggaacccaataggaagtttcacatggcattgtttacaccatacataactcatacagaagaaactagaagaaagcaggcagacactgatttccttatgtttttgttgtaattttttttcaaacttttaatttattcattggaactggatagtagaaatgcttctttgtgctctattgatcttgttttgcagtgagctttaagggtcacctaggtttacttgttcaatctaaaatcatactttatgttaattttactcttcattgttcgttgtatgatttgtttttagccatcatttttagagaattttattctttcaaagacttctagaatgtactttaaaagacttctagaatggcttcgtgtaactgaattaaatatagtttaattaaatttaaaaaataaattactcttaccactaataactttaagctttaggctgcatttgaattggaaaagaatt

SEQ ID NO: 202731 - DNA, 601 bp, Homo sapiens
tttttcacaaggtttgagtctgaactgctaacattctactgatttctgggtgaagggactgactgcaccatcctaccctgtcagagcacttgccccagtacttccactttaagagttttccaccttgtccagaactacagtccattaatcccctcattttctctcttaagagaataaacaggccaggcgcrgtggctcacgcctgtaatcccagcactttgggaggctgaggcgggtggatcatctgaggtcaggagttcgagaccagcttcgcctacatagtgaaatctcgtctccactaaaaaaaaatcacaaaaattagccgggcgtggtggcaggcgcctgtaatcccagctactcgggaggctgaggcaggagaatcccttgaacccgggaggcagaggttgcagtgagccaagactgtgccacagcactccagcctgggtgacagagtgagactccctctcaaaaaaaaaaaaagaaaaaagagagaaaataaacaacacatctcaagtacacacccacatccctcttatcccaaataccaaacacacaaaaatccaatctgtctccttctacctaagcaattttagatagtcac

SEQ ID NO: 202732 - DNA, 560 bp, Homo sapiens
gggctgatgtccagagccacccagacctcagattccatcttgtgaggctggccttgggcacgccccaacattgtgggggtgtggggtgggaaatggggaggcagatttcctaagggtcttgtttacaccacgaaaatggtctgggggtttggaactatccaggtgtcgggtcccaactgctcagccaccaagcagctgccttcgccttcccctcctccgccctcaccagtgtgtcaccctgggggcagcagggtcacttgtgctgtaaccctgcagggaccaacgagcaggctatcatcgatgtgctcacsaagagaagcaacacgcagcggcagcagatcgccaagtccttcaaggctcagttcggcaaggcaaggggaaggctggtgggggtggggataggtgagccttggggttgggggtacagcctgggaggcagctccattctggacgactttcccctagagccagcccactggcagcatgggcacatggaacatgtttgcatgaaaacaattgttctttattgaaattcaaatgtaactggctgccctgtgttt

SEQ ID NO: 202733 - DNA, 503 bp, Homo sapiens
aaataaatctcattctttggggatatamaaatcttttaataaactgtggaattcagtttgcagtattttgttgaggatttttgcactaatattgataagggattttggtgtatagttttcttacagtgtctttgtctggcttttgtatcagtgcagtgctggcctttatagatttcgtttagaagtgttccatcacctacagatttttggaagagtttgcaaaggatttttccttacatatttggcagaatttaccaatgaagccatctggtcctggacttttctttgttgagaggtttttataactaattcaatctccttactattataggtctgttcggattttctatttcttcacaattttttaaatttttttatttttcatcaacttttattttaagttccggggtacacgtgcaggatgtgcaggtttgttacataggtaaacgtatgccgtggtagtttgctgcacagatcatcccaacacctaggtagtaacccca

SEQ ID NO: 202734 - DNA, 520 bp, Homo sapiens
gtatctgtcaccctacacctcctaatcaatatggcttatttttttgctaatttttttttttttttgagacagaatttcactcttgttgcccaggctagagtgcaatggcacgatctcgcctcaccgcaacctccatctcctgggttgaagcgattctcctgcctcagcctcctaagtaactgggattacaggcatgcaccacctcacccgtctaattttgtatttttagtagagacggggtttctgcatgttggtcaggctggtctcraactcccgacctcaggtgattcacccacttcggtctcccaaagtgctgggattacaggcatgagccactgtgtctggcctttttttctttttttcttttttttgctaatgtaaaagatcatagaatatcagagatagtgaacattatcatttccataaatgtacattttccacacgctgagtactatctaaattttctattgataaactctgaccacttcttcaggcaattcatgtacttactttagcatta

SEQ ID NO: 202735 - DNA, 520 bp, Homo sapiens
gtatctgtcaccctacacctcctaatcaatatggcttatttttttgctaatttttttttttttttgagacagaatttcactcttgttgcccaggctagagtgcaatggcacgatctcgcctcaccgcaacctccatctcctgggttgaagcgattctcctgcctcagcctcctaagtaactgggattacaggcatgcaccacctcacccgtctaattttgtatttttagtagagacggggtttctgcatgttggtcaggctggtctcgaactcccgacctcaggtgattcacccacttcggtctcccaaagtgctgggattacaggcatgagccactgtgtctggcctttttttctttttttyttttttttgctaatgtaaaagatcatagaatatcagagatagtgaacattatcatttccataaatgtacattttccacacgctgagtactatctaaattttctattgataaactctgaccacttcttcaggcaattcatgtacttactttagcatta

SEQ ID NO: 202736 - DNA, 520 bp, Homo sapiens
gtatctgtcaccctacacctcctaatcaatatggcttatttttttgctaatttttttttttttttgagacagaatttcactcttgttgcccaggctagagtgcaatggcacgatctcgcctcaccgcaacctccatctcctgggttgaagcgattctcctgcctcagcctcctaagtaactgggattacaggcatgcaccacctcacccgtctaattttgtatttttagtagagacggggtttctgcatgttggtcaggctggtctcgaactcccgacctcaggtgattcacccacttcggtctcccaaagtgctgggattacaggcatgagccactgtgtctggcctttttttctttttttcttttttttgcyaatgtaaaagatcatagaatatcagagatagtgaacattatcatttccataaatgtacattttccacacgctgagtactatctaaattttctattgataaactctgaccacttcttcaggcaattcatgtacttactttagcatta

SEQ ID NO: 202737 - DNA, 520 bp, Homo sapiens
gtatctgtcaccctacacctcctaatcaatatggcttatttttttgctaatttttttttttttttgagacagaatttcactcttgttgcccaggctagagtgcaatggcacgatctcgcctcaccgcaacctccatctcctgggttgaagcgattctcctgcctcagcctcctaagtaactgggattacaggcatgcaccacctcacccgtctaattttgtatttttagtagagacggggtttctgcatgttggtcaggctggtctcgaactcccgacctcaggtgattcacccacttcggtctcccaaagtgctgggattacaggcatgagccactgtgtctggcctttttttctttttttcttttttttgctaatgtaaaagatcatagaatatcagaratagtgaacattatcatttccataaatgtacattttccacacgctgagtactatctaaattttctattgataaactctgaccacttcttcaggcaattcatgtacttactttagcatta

SEQ ID NO: 202738 - DNA, 433 bp, Homo sapiens
acagtgtccccactgtgctatgctcatttaaccctcagaaacaatctcatgttacagattttacagaagttgttgggacagagaaggtaagtaaacccccccaaggtcacatgactgctaagggtggggccatagtttgatcccaggtagtctgaattccccaattgcttaagcatgattatcagaaagtatagcagtctgttttcacactgatataaagaaacacctgaggttgggtaatttttaaaggaaagaggcttaaytgactcagtttcacatggctggggaggcctcaggaaacttacaatcatggcagagggggaagtccttcaggaaacttacaatcatggcagaagggcaggtccgacttacatggtggccgcacagagagtgggaacatgtgaaggagcaactgtcaaacatgtataaaacc

SEQ ID NO: 202739 - DNA, 445 bp, Homo sapiens
gtattgtgcctactaaaatatcgaagcaaattatttgtattttctttgttccttaagactctcataattcttaaatgattgagaatctcaaagagtatatgyttatattgattatattgatatttagtgtggtagaattatacaattgaaattttttcaaaatctatttttagtttagatttcacagccttaccactgttgatattatgggctagataatgctttgttgtgaggactgtcttgtgcattgcagagagtttagcagtattcatggcctctaccaactagatgtcagtagtaacccatgacccagtttataaaaacagaaaatattccttgagaacagtattgttaacagaagtttttcattgaaaaaaaacttttctacaacaaaaagttgagtaaaaagtgtgtcatttgtttatattatttaaagtctctcatg

SEQ ID NO: 202740 - DNA, 445 bp, Homo sapiens
gtattgtgcctactaaaatatcgaagcaaattatttgtattttctttgttccttaagactctcataattcttaaatgattgagaatctcaaagagtatatgtttatattgattatattgatatttagtgtggtagaattatacaattgaaattttttcaaaatctatttttagtttagatttcacagccttaccactgttgatattatgggctagataatgctttgttgtraggactgtcttgtgcattgcagagagtttagcagtattcatggcctctaccaactagatgtcagtagtaacccatgacccagtttataaaaacagaaaatattccttgagaacagtattgttaacagaagtttttcattgaaaaaaaacttttctacaacaaaaagttgagtaaaaagtgtgtcatttgtttatattatttaaagtctctcatg

SEQ ID NO: 202741 - DNA, 463 bp, Homo sapiens
attgtgcctactaaaatatcgaagcaaattatttgtattttctttgttccttaagactctcataattcttaaatgattgagaatctcaaagagtatatgtttatattgattatattgatatttagtgtggtagaattatacaattgaaattttttcaaaatctatttttagtttagatttcacagccttaccactgttgatattatgggctagataatgctttgttgtgaggactgtcttgtgcattgcagagagtttagcagtattcatggcctctaccaactagatrtcagtagtaacccatgacccagtttataaaaacagaaaatattccttgagaacagtattgttaacagaagtttttcattgaaaaaaaacttttctacaacaaaaagttgagtaaaaagtgtgtcatttgtttatattatttaaagtctctcatgttgagcttaataggagacaa

SEQ ID NO: 202742 - DNA, 463 bp, Homo sapiens
attgtgcctactaaaatatcgaagcaaattatttgtattttctttgttccttaagactctcataattcttaaatgattgagaatctcaaagagtatatgtttatattgattatattgatatttagtgtggtagaattatacaattgaaattttttcaaaatctatttttagtttagatttcacagccttaccactgttgatattatgggctagataatgctttgttgtgaggactgtcttgtgcattgcagagagtttagcagtattcatggcctctaccaactagatgtcagtagtaacccatgacccagkttataaaaacagaaaatattccttgagaacagtattgttaacagaagtttttcattgaaaaaaaacttttctacaacaaaaagttgagtaaaaagtgtgtcatttgtttatattatttaaagtctctcatgttgagcttaataggagacaa

SEQ ID NO: 202743 - DNA, 454 bp, Homo sapiens
tgtgcctactaaaatatcgaagcaaattatttgtattttctttgttccttaagactctcataattcttaaatgattgagaatctcaaagagtatatgtttatattgattatattgatatttagtgtggtagaattatacaattgaaattttttcaaaatctatttttagtttagatttcacagccttaccactgttgatattatgggctagataatgctttgttgtgaggactgtcttgtgcattgcagagagtttagcagtattcatggcctctaccaactagatgtcagtagtaacccatgacccagtttataaaaacagaaaatattccttgagaacagtattgttaacagaagtttttcattgraaaaaaacttttctacaacaaaaagttgagtaaaaagtgtgtcatttgtttatattatttaaagtctctcatgttgagcttaatag

SEQ ID NO: 202744 - DNA, 454 bp, Homo sapiens
tgtgcctactaaaatatcgaagcaaattatttgtattttctttgttccttaagactctcataattcttaaatgattgagaatctcaaagagtatatgtttatattgattatattgatatttagtgtggtagaattatacaattgaaattttttcaaaatctatttttagtttagatttcacagccttaccactgttgatattatgggctagataatgctttgttgtgaggactgtcttgtgcattgcagagagtttagcagtattcatggcctctaccaactagatgtcagtagtaacccatgacccagtttataaaaacagaaaatattccttgagaacagtattgttaacagaagtttttcattgaaaaaaaactyttctacaacaaaaagttgagtaaaaagtgtgtcatttgtttatattatttaaagtctctcatgttgagcttaatag

SEQ ID NO: 202745 - DNA, 463 bp, Homo sapiens
attgtgcctactaaaatatcgaagcaaattatttgtattttctttgttccttaagactctcataattcttaaatgattgagaatctcaaagagtatatgtttatattgattatattgatatttagtgtggtagaattatacaattgaaattttttcaaaatctatttttagtttagatttcacagccttaccactgttgatattatgggctagataatgctttgttgtgaggactgtcttgtgcattgcagagagtttagcagtattcatggcctctaccaactagatgtcagtagtaacccatgacccagtttataaaaacagaaaatattccttgagaacagtattgttaacagaagtttttcattgaaaaaaaacttttctacaacaaaaagttgagtaaaaagtgtgtcatttgtttatattatttaaagtctckcatgttgagcttaataggagacaa

SEQ ID NO: 202746 - DNA, 205 bp, Homo sapiens
tctcacaccacaggcattttctgtaggctatgaaccaataaaggttcagtgaatggaagtacaggaggagctataaagaaagtaccagcttagtggaagaagccctggagccaacagagtagggacaaggaggggatagaagtgaatgcaagtgatattgcctgggctaaagaagamacattttcattttaaatttctagttaac

SEQ ID NO: 202747 - DNA, 514 bp, Homo sapiens
gcgaggcagtttaggctgggtcagtttgtccctgccctcagagtctgttggtcccggaaaaagagggccttattttatttatttatttttctttgagacagtgtcttgctctgtcgcccaggctggagtgcagtggctcgatctcagctcactacaacttctgcctcccaggctcaagcgatcgtcccgcctcagcctccagagtagctgggaccacagggaccacagggaccacaggcgccctgccacgacgctggctttatttttatttatttatttatttatttatttatttatttattttttgagagatgtagcctccctatgttgcccagattggtcttgaactcctgggctcaagcaatcctcctgcctcggcctcccaaarggctgggattacaggcgtgatccaccgcttctggccaaaagagggctatagggcacccccagaacgcgagatctccctcgtctgtcatctttacagaggaggaagtggactcccaatccagccata

SEQ ID NO: 202748 - DNA, 677 bp, Homo sapiens
gcagttatgagcatttgtgtgtagctttttgtgcaaacttaaattataatttctctgataaaagcccaggaatgtgattgttgagtaatatggtaagtgcatgttttttgagaaactgtcaatctatttttgggagtggctgtgtgtatcatgttatattcycacaagcaagggatgagaaatttggtttctctgcatccttgctagcatttggttttatcattatatttttatttcaactgctcaaataagtgtgcagtgatttctcatgatctcaatttgcatttccccaaaggctaatgatgttaaatatatttccacatgctgatttgactcggccatgaaatgtctcttcatgtctattgcccaatttcttattagattttttttttactgttgagttttgagagctctttatgcattgtaaatgtgagtcctttgtcagatacgcgtttgcaaatattttctcccctccatagcttgtcctttcatcatcttaacagaatattttgcagaggcaaagtttttaattttgatgaagtccaatttatcaattctttctttaatgaatcgtacttgggtgccatgcctatgaactcatcctcaactcctaggtccagatgattttctcctgtgtcttcctatcatagccagaaactagaaaagaaccaaaatgt

SEQ ID NO: 202749 - DNA, 677 bp, Homo sapiens
gcagttatgagcatttgtgtgtagctttttgtgcaaacttaaattataatttctctgataaaagcccaggaatgtgattgttgagtaatatggtaagtgcatgttttttgagaaactgtcaatctatttttgggagtggctgtgtgtatcatgttatattcccacaagcaagggatgagaaatttggtttctctgcatccttgctagcatttggttttatcattatatttttatttcaactgctcaaataagtgtgcagtgatttctcatgatctcaatttgcatttccccaaaggctaatgatgttaaatatayttccacatgctgatttgactcggccatgaaatgtctcttcatgtctattgcccaatttcttattagattttttttttactgttgagttttgagagctctttatgcattgtaaatgtgagtcctttgtcagatacgcgtttgcaaatattttctcccctccatagcttgtcctttcatcatcttaacagaatattttgcagaggcaaagtttttaattttgatgaagtccaatttatcaattctttctttaatgaatcgtacttgggtgccatgcctatgaactcatcctcaactcctaggtccagatgattttctcctgtgtcttcctatcatagccagaaactagaaaagaaccaaaatgt

SEQ ID NO: 202750 - DNA, 417 bp, Homo sapiens
tcactggatgctgactctgttkctcttctgagtgctggggtagaggagaggagaggtggagcacagttcttgcttttatgagcttatgttctaggaagttcaagtatttttttcaggtagtatgaaatagcaggaagaggaagcaggctaaagggacacagagtgattgggggctattttaagtagaatgataaggaagagcctgtctagagagctatttgaacagtgacctgactgaagggacaacagaaagcagtgctgacattacaggtagcaggatgactgccaagacagaaacgcatttcatatgtgtttgaggaacaaacagcaaggtgaccagcatggggagagtgaagaatgagggaaaccttgaatgagaataaagcaattccatcttggatgctaatctgccatatt

SEQ ID NO: 202751 - DNA, 441 bp, Homo sapiens
cactggatgctgactctgtttctcttctgagtgctggggtagaggrgaggagaggtggagcacagttcttgcttttatgagcttatgttctaggaagttcaagtatttttttcaggtagtatgaaatagcaggaagaggaagcaggctaaagggacacagagtgattgggggctattttaagtagaatgataaggaagagcctgtctagagagctatttgaacagtgacctgactgaagggacaacagaaagcagtgctgacattacaggtagcaggatgactgccaagacagaaacgcatttcatatgtgtttgaggaacaaacagcaaggtgaccagcatggggagagtgaagaatgagggaaaccttgaatgagaataaagcaattccatcttggatgctaatctgccatattctgattaatcccagttccaacaatt

SEQ ID NO: 202752 - DNA, 441 bp, Homo sapiens
cactggatgctgactctgtttctcttctgagtgctggggtagaggagaggagaggtggagcmcagttcttgcttttatgagcttatgttctaggaagttcaagtatttttttcaggtagtatgaaatagcaggaagaggaagcaggctaaagggacacagagtgattgggggctattttaagtagaatgataaggaagagcctgtctagagagctatttgaacagtgacctgactgaagggacaacagaaagcagtgctgacattacaggtagcaggatgactgccaagacagaaacgcatttcatatgtgtttgaggaacaaacagcaaggtgaccagcatggggagagtgaagaatgagggaaaccttgaatgagaataaagcaattccatcttggatgctaatctgccatattctgattaatcccagttccaacaatt

SEQ ID NO: 202753 - DNA, 453 bp, Homo sapiens
gaattctgccaagcagtgacttgattcatgaacactcactggatgctgactctgtttctcttctgagtgctggggtagaggagaggagaggtggagcacagttcttgcttttakgagcttatgttctaggaagttcaagtatttttttcaggtagtatgaaatagcaggaagaggaagcaggctaaagggacacagagtgattgggggctattttaagtagaatgataaggaagagcctgtctagagagctatttgaacagtgacctgactgaagggacaacagaaagcagtgctgacattacaggtagcaggatgactgccaagacagaaacgcatttcatatgtgtttgaggaacaaacagcaaggtgaccagcatggggagagtgaagaatgagggaaaccttgaatgagaataaagcaattccatcttggatgctaatctgccatattc

SEQ ID NO: 202754 - DNA, 441 bp, Homo sapiens
cactggatgctgactctgtttctcttctgagtgctggggtagaggagaggagaggtggagcacagttcttgcttttatgagcttatgttctaggaagttcaagtatttttttcaggtagtatgaartagcaggaagaggaagcaggctaaagggacacagagtgattgggggctattttaagtagaatgataaggaagagcctgtctagagagctatttgaacagtgacctgactgaagggacaacagaaagcagtgctgacattacaggtagcaggatgactgccaagacagaaacgcatttcatatgtgtttgaggaacaaacagcaaggtgaccagcatggggagagtgaagaatgagggaaaccttgaatgagaataaagcaattccatcttggatgctaatctgccatattctgattaatcccagttccaacaatt

SEQ ID NO: 202755 - DNA, 442 bp, Homo sapiens
cactggatgctgactctgtttctcttctgagtgctggggtagaggagaggagaggtggagcacagttcttgcttttatgagcttatgttctaggaagttcaagtatttttttcaggtagtatgaaatagcaggaagaggaagcaggcyaaagggacacagagtgattgggggctattttaagtagaatgataaggaagagcctgtctagagagctatttgaacagtgacctgactgaagggacaacagaaagcagtgctgacattacaggtagcaggatgactgccaagacagaaacgcatttcatatgtgtttgaggaacaaacagcaaggtgaccagcatggggagagtgaagaatgagggaaaccttgaatgagaataaagcaattccatcttggatgctaatctgccatattctgattaatcccagttccaacaattc

SEQ ID NO: 202756 - DNA, 458 bp, Homo sapiens
ttgattcatgaacactcactggatgctgactctgtttctcttctgagtgctggggtagaggagaggagaggtggagcacagttcttgcttttatgagcttatgttctaggaagttcaagtatttttttcaggtagtatgaaatagcaggaagaggaagcaggctaaagggacacagagtgattgggggctattttaagtagaatgataaggaagagcctgtctagagagctatttgaacagtgacctgactgaagggacaacagaaagcagtgctgacattacaggtagcaggatgactgccaagacagaaacgcatktcatatgtgtttgaggaacaaacagcaaggtgaccagcatggggagagtgaagaatgagggaaaccttgaatgagaataaagcaattccatcttggatgctaatctgccatattctgattaatcccagttccaacaattc

SEQ ID NO: 202757 - DNA, 452 bp, Homo sapiens
gaattctgccaagcagtgacttgattcatgaacactcactggatgctgactctgtttctcttctgagtgctggggtagaggagaggagaggtggagcacagttcttgcttttatgagcttatgttctaggaagttcaagtatttttttcaggtagtatgaaatagcaggaagaggaagcaggctaaagggacacagagtgattgggggctattttaagtagaatgataaggaagagcctgtctagagagctatttgaacagtgacctgactgaagggacaacagaaagcagtgctgacattacaggtagcaggatgactgccaagacagaaacgcatttcatatgtgttygaggaacaaacagcaaggtgaccagcatggggagagtgaagaatgagggaaaccttgaatgagaataaagcaattccatcttggatgctaatctgccatatt

SEQ ID NO: 202758 - DNA, 417 bp, Homo sapiens
tcactggatgctgactctgtttctcttctgagtgctggggtagaggagaggagaggtggagcacagttcttgcttttatgagcttatgttctaggaagttcaagtatttttttcaggtagtatgaaatagcaggaagaggaagcaggctaaagggacacagagtgattgggggctattttaagtagaatgataaggaagagcctgtctagagagctatttgaacagtgacctgactgaagggacaacagaaagcagtgctgacattacaggtagcaggatgactgccaagacagaaacgcatttcatatgtgtttgaggaacaarcagcaaggtgaccagcatggggagagtgaagaatgagggaaaccttgaatgagaataaagcaattccatcttggatgctaatctgccatatt

SEQ ID NO: 202759 - DNA, 417 bp, Homo sapiens
tcactggatgctgactctgtttctcttctgagtgctggggtagaggagaggagaggtggagcacagttcttgcttttatgagcttatgttctaggaagttcaagtatttttttcaggtagtatgaaatagcaggaagaggaagcaggctaaagggacacagagtgattgggggctattttaagtagaatgataaggaagagcctgtctagagagctatttgaacagtgacctgactgaagggacaacagaaagcagtgctgacattacaggtagcaggatgactgccaagacagaaacgcatttcatatgtgtttgaggaacaaacagcaaggtgaccagcatggggagagtgragaatgagggaaaccttgaatgagaataaagcaattccatcttggatgctaatctgccatatt

SEQ ID NO: 202760 - DNA, 441 bp, Homo sapiens
cactggatgctgactctgtttctcttctgagtgctggggtagaggagaggagaggtggagcacagttcttgcttttatgagcttatgttctaggaagttcaagtatttttttcaggtagtatgaaatagcaggaagaggaagcaggctaaagggacacagagtgattgggggctattttaagtagaatgataaggaagagcctgtctagagagctatttgaacagtgacctgactgaagggacaacagaaagcagtgctgacattacaggtagcaggatgactgccaagacagaaacgcatttcatatgtgtttgaggaacaaacagcaaggtgaccagcatggggagagtgaagaatgagggaaaccttgaatgagartaaagcaattccatcttggatgctaatctgccatattctgattaatcccagttccaacaatt

SEQ ID NO: 202761 - DNA, 391 bp, Homo sapiens
aattcacagcctttaattaaacataagctagacttaacatttctccttgggtcagtttttgtgaaagttgtatctttaaaggaatttacctcatctaaaatgttgcgttcattagcagatacttgcttctgctctttattattattacctttactttcagtttaatttgctttttctgttttggtttcttaaggtggaagtttaggccattgctgtattgtcttacatgagcatatagtgctgtacatttacttgcagctctgcttcagtctatcaaaatttgatatgctttcattagaatccagttcaaaatattttctgggttgmtttgtgatttcttctttgacccctgggtttagaattaggttaaattgtggatatttgaggtttt

SEQ ID NO: 202762 - DNA, 453 bp, Homo sapiens
gtgatcgcattgagacggccgggcggttagaacgggacaaactgaaggcccgatgagagaaagggaaagttaagaatgctggagcagaacaatggatttctctttctctttcatgcaagggatcacgggaaacacagttcaacaaccacctcaactcactgactccgccagcatccgtcaggaggatgcctttgataacaaaaktgacattgctgaagatggtggccagacaccatacgaagctaccttgcagcaaagctttcaatactcacctacaacagatcttcctccactcacaaatggctacctgccatcaatcagcatgtatgaaattcaaaccaaataccagtcgcataatcaatatcctaatgggtcagccaatgactttggcgcagctagaaactttagccccactgactattaccattcagaaattctaaacagaagaccaca

SEQ ID NO: 202763 - DNA, 400 bp, Homo sapiens
aatggctacctgccatcaatcagcatgtatgaaattcaaaccaaataccagtcgcataatcaatatcctaatgggtcagccaatgactttggcgcagctagaaactttagccccactgactattaccattcagaaattctaaacagaagaccacattaaattctagaaaacccttcccctccacagccaccacttcggtaccacaaactgtgattccaaagaagagtggctcacctgaagttaaactaaaaataaccaaaactatccagaatggcagggaattgttcaagtcttccctttgtggagaccttttaaatgaagtacaggcaagtgagcacacgaastcaaagcatgaaagcagaaaagaaaagaggaaaaaacccaaaaagcatgactcatc

SEQ ID NO: 202764 - DNA, 592 bp, Homo sapiens
cttctcaaaaacgaagtgactgagataagatcgaagggaaatattccagagcagcagattctgaactcaaggcttccaaagattcacattttgaaaactctatggatttaggagggttctccaggtttgcccacaaggcctctttgtgtagggaccattcatcctaaggaaatcattcaaatgcagccttgctgtgggaatctccatccactaataactgacggacacccccaccccagcttcggacctcaagacgtgagagggctgcctatgcacagggtgtggaaggctgtggggacagtgcrgggcacagacgtggtggggagagtggcctgcatttgcatagttcctttactagggctcaaggtgttgaggtccacactcaagagaggattcgggagttggggaagggaggtcatgagggacctctgtgagcatcttaggccttacacttccacacacctcctgccgtgggccatcgggaagcatgcaggccacaggccttccccctctgagcccccatctcagggaaaagacatcataagttacagaaacaggacaactggggagcaaggacgccccccttggcaag

SEQ ID NO: 202765 - DNA, 510 bp, Homo sapiens
ctgtaattggaggccctggctgcagccctttctaggactgtgactttggcaggtcaccagcctctccaaacctcagtgttctcaccattaaaaaaaatggattaatgccagttctgctccctcggtgtcattgccagaatcaagtagatgatggatgtgtttgtaaatgtcatgtctatgcaaatgagagaygctcaggaagcacttgagaactgcatggtgagacctctggcatagccaagccagccaaactgctaggctgggcaaagaacacataacaggcatcctggcctcatggcattcccaataacaactgctgcagccatggctaagtccctaggcctctctgggcctcagcttcctgatctgtaaaatggggagcagagagagttggacaagatcagagattgcagattggtattccaagaaccagtcgtgccatgttctgggctgcttttaattgaatggcagtgttttgaattcattgccaacatttaaaagttgacaggt

SEQ ID NO: 202766 - DNA, 450 bp, Homo sapiens
ccttgccttcctcctctgctcacattcgttcctttctcccatcacaggcgggtaccctaccttgggggatttgccccagaataagccttttttttcccttctaacattttaatgaaaaatttcaagtgtatagcaatgttgaaaagattttatagtgagcacccatacacctgccacccaaagtctaccattaatgtcttctggacttacttttgccgtcttattcatactctgcctggactgtcstcagctacaggactcacatctcttgccgacagctctaaggcttccagtcctgctgtctggaccaagaaaggcttcctgggctctgagtgtcaaatggcggccttcaaggaaggggaatggtggaaaaggccgtggggggttttggagaaattgctagggaaagactggcaccagagttccaccagcccaggcaatggggggtac

SEQ ID NO: 202767 - DNA, 454 bp, Homo sapiens
gccccttgccttcctcctctgctcacattcgttcctttctcccatcacaggcgggtaccctaccttgggggatttgccccagaataagccttttttttcccttctaacattttaatgaaaaatttcaagtgtatagcaatgttgaaaagattttatagtgagcacccatacacctgccacccaaagtctaccattaatgtcttctggacttacttttgccgtcttattcatactctgcctggactgtcgtcagctacaggactcacatctcttgccgacagctctaaggcttccagtcctgctgtctggaccaagaaaggcttcctgggctctgagtgtcaaatggcggccttcaaggaaggggaatggtggaaaaggccgtggggggttttggagaaattgctagggaaagactggcaccaragttccaccagcccaggcaatggggggtaca

SEQ ID NO: 202768 - DNA, 576 bp, Homo sapiens
ggggggtggtgagtgtgatacataaattgggaggtaaatcaaaaagtctggagcaggcagaagaatgcaggaagaggtcagggagtgaaggactggattgagagggccaagatttggggtttgaacagggctgacttcagggagcgggagtctggccccaggtaaaacttagtgtcattgtgtgggtcagaagacaacaaaggatccttaaggaaactatggcccatcatctcagtagaccaggcagcctttgggaatgatggtcacaaagactctgtggcaacatagaaaatgctaatggtgtcatacagaatacagaactttatggacctatggtacaaacaaacacatgcatgtgcctgcacacacacacacacacacacacacacacatacacagaggaaacaagactggaaggggwtacacctaaatataagtagtgcttgtgtccatggggtggagtgatattgtgggtttatttgctctgtatttttaaataaaacaatggctcaactcagaagataactgagtcagcgtctcatccagcagcccccggggcccctgggagaagccacc

SEQ ID NO: 202769 - DNA, 527 bp, Homo sapiens
tagccccagtttagtggaaatacatacacctagaaaagggtttagagaggagtcatcagtggttatctcagagtggggtggacacaaggctagcaggatggcatgcagttaagagtaaggggattgaacatacttggatgcatatcctaactctgccactctgggaactggggcaattttctcayagactccttatttgtaaaatggggataatgtgactacttagggcttgttaaaggattaaaagaaatggttttaataaagtacatagcacagtatttggtacaaacaaaaactaacttatagatctgcagattttttatctgtaattatcaattttctatgataaatacatattttataatgaaagtcatttaaaaaatgtaaacaaataaagaattctaattaatgatatacacatttaagtgattagaagggaagtatactaatgtttgcaatttactttgaaatacaccaaaacataagatggattgatggtggatacacaaaagtttactgcaaaattc

SEQ ID NO: 202770 - DNA, 527 bp, Homo sapiens
tagccccagtttagtggaaatacatacacctagaaaagggtttagagaggagtcatcagtggttatctcagagtggggtggacacaaggctagcaggatggcatgcagttaagagtaaggggattgaacatacttggatgcatatcctaactctgccactctgggaactggggcaattttctcacagactccttatttgtaaaatggggataatgtgactacttagggcttgttaaaggattaaaagaaatggttttaataaagtacatagcacagtatttggtacaaacaaaaactaacttatagatctgcagattttttatctgtaattatcaattttctatgataaatacatattttataatgaaagtcatttaaaaaatgtaaacaaataaagaattctaattaatgatatacacatttmagtgattagaagggaagtatactaatgtttgcaatttactttgaaatacaccaaaacataagatggattgatggtggatacacaaaagtttactgcaaaattc

SEQ ID NO: 202771 - DNA, 436 bp, Homo sapiens
ttcttttacttttaaagttttattctgagttttccccttagttagagttattaaaaccaccttgacacttgmaaagctagggttatttagcaagcatataaatctgagcttaatatctataccaagagttcctaaagccttagggattttactctaaagatgtcctcccaaaagccccccctgccaccatgtggcagcaagcctgacctcttaggattaaagttggtgatgatgagcttccaactttgctcacaaaaatctaagtaaagttcaggtaacatgatccaataccgataaaagaagacggcatctctgattacattgcagaaactaagtaggatgcatgcaggttgcaactatatatactgcagatggcagatgttaaaaaaagagaaaaaaacaacagaaaacctaccaaattttatttagtggaata

SEQ ID NO: 202772 - DNA, 436 bp, Homo sapiens
ttcttttacttttaaagttttattctgagttttccccttagttagagttattaaaaccaccttgacacttgcaaagctagggttatttagcaagcatataaatctgagcttaatatctataccaagagttcctaaagccttagggattttactctaaagatgtcctcccaaaagccccccctgccaccatgtggcagcaagcctgacctcttaggattaaagttgrtgatgatgagcttccaactttgctcacaaaaatctaagtaaagttcaggtaacatgatccaataccgataaaagaagacggcatctctgattacattgcagaaactaagtaggatgcatgcaggttgcaactatatatactgcagatggcagatgttaaaaaaagagaaaaaaacaacagaaaacctaccaaattttatttagtggaata

SEQ ID NO: 202773 - DNA, 382 bp, Homo sapiens
tataccctccccttctaggttagagtctgaggtgtttttgtttgttcagaagctcttttttataaaattcaataattattttaaggaaaaaacttctaaatctaacatgaattaatataaacattattaattatacatacataatagctcaaattgtagctcaaattaactccttcagtttaattaagtcagaactgctggtagtgagaaagtttttcctgaaataagcatggtgaaggcaattactctgctctgctgagattgttgcaggtgaaaagcaagargaatgcccctccaccaaaggactgtttattttgtgtttaaatgtaattaaagccaattcccatttccaattgccctgagacaagcagaatttccagaa

SEQ ID NO: 202774 - DNA, 420 bp, Homo sapiens
tgtgaggtttagcactgaagactgaagctggaataggctgctttgaaatgttgctgcaaggaggaattcctattgtctgggttgagccctggtacactaaggagatatcaggtcgataggatccataagagactcaagtttcacacagaagaaagtgcttacaagtggtaacatgctatggtactggagggaaattttgttctatctcactttcctcttgctaaggacataccaaaakgattcccataaagactgcccactatgatcctattgctgtgtgtaagaagtacattacattttttaactttttggtcaagggacaacatggagatctgttgctaatgtaaaatactactgagagtcagtaaagcaaatatttactaaatctctttcctatgcaagggccaaggccagagcaaa

SEQ ID NO: 202775 - DNA, 520 bp, Homo sapiens
gaattcacaagacaggacccagattcaagatgaaagacgaaacatatgcatcaactactcttacacctcttgtgtcctaatgaaatggtagaaaagttgttggtttttttaatgagcctacaacaatcctcgtaagaaaggaatcaagcaaaagaacagaaagttcaaaggaactaggaagagagaaagcaaatacgakcagatgtacaaagaaaaccgagtaggaaaaacaacacttccaaaccacattgcccactgaaactccaagatctgggtcaactaacacaaaaagcaggaatgggacctggggcacccaccaaagtaattaataaagaattgaatgtagaagagctaagccaattggtcccttgcaatttccagagttataacggaagacttttatcgaagactcaaaaaagtcaggtactcatgaatcttcattacaactctctgaagtaggccctattattatcctatttgttaaataaagaaactgaggcactgagataagcaacttatg

SEQ ID NO: 202776 - DNA, 631 bp, Homo sapiens
gaaaacatgttcctcaataaccatgctatactgccatagaaggccagttgaaaactgcmtttattaaattagggggcttcagattcagaatggcagcctgagaacaagctccagccttacctttctgcaccatccttagaaataacagtaaccaaagttttagcactatctttacagtgaaaaacaaggaatgtgccatccttcaaaaaaatagcaacaaaaaaaattagcattcatttctacagtgagaaaaaatgtccttatagggccagaaaatttgaagactcctaaagacagaagtcaaatggaatcaggttaaagaaggaaaccacaaactaaagcatatgcaaaaaagggactgttgaataaaaaaaggaggctcaaaggtgcttgaaacccagatgcagcagttactatggagaggaatgggccttggggcagctaatgagcaagtacccctctaaccccaacaggaatgctgcacctcagggagaacttggactgcaatcacctgggtcacagacacagagcaaagccctgggtaaaatgaggggaatcaggtatctactagacccagaaaacacctacatgctctagacataagcactacttctccttctccacagtcact

SEQ ID NO: 202777 - DNA, 631 bp, Homo sapiens
gaaaacatgttcctcaataaccatgctatactgccatagaaggccagttgaaaactgcctttattaaattagggggcttcagattcagaatggcagcctgagaacaagctccagccttacctttctgcaccatccttagaaataacagtaaccaaagttttagcactatctttacagtgaaaaacaaggaatgtgccatccttcaaaaaaatagcaacaaaaaaaattagcattcatttctacagtgagaaaaaatgtccttatagggccagaaaatttgaagacycctaaagacagaagtcaaatggaatcaggttaaagaaggaaaccacaaactaaagcatatgcaaaaaagggactgttgaataaaaaaaggaggctcaaaggtgcttgaaacccagatgcagcagttactatggagaggaatgggccttggggcagctaatgagcaagtacccctctaaccccaacaggaatgctgcacctcagggagaacttggactgcaatcacctgggtcacagacacagagcaaagccctgggtaaaatgaggggaatcaggtatctactagacccagaaaacacctacatgctctagacataagcactacttctccttctccacagtcact

SEQ ID NO: 202778 - DNA, 382 bp, Homo sapiens
cctttgggatcttttccccattgtctttatgaagatacttggctcccttctaaccatggctatctctttagcaaatagttgcttggccacactcttggtttgctctcctaaagatgccttttcactctttacatggccaggcgtaagttttttaaatctttgtgttctrtttttttattattataaattccatctttaatcattttcttcattttgcatctcactgtatgtggttaaaagtagccacacagcagcctgaatgctttgctgcttaggtatttcttctaccaggtatcctagctcatcaagccctcaggcatgaacgtaattcagccaaggtcctagcaactatataaaaagaatggcctttactccaatttcc

SEQ ID NO: 202779 - DNA, 631 bp, Homo sapiens
tgcacgacacatggtttattcagcatccttagggataaaagaccctcccagtccccttcatctgcaatatattttttcttgtcatacccagattccctcacaaaagcacacccacaaagggtaatacaatagtttaatgtaaataaattttgtttcatgctccaaattatttaaaatattatataaaattatttcagggtatatgtattaagtgtatataaagcataaataaatttcatgtttakacttgggtcctaaccccaagatacctcattatgtatatgcaaatactccaaaaaaatttcaaaacctgaaatgcttctggtcccaagcattttggataagggatactcaacctgtactaacattctgatcactactactcaagcactctctaagagtactttccctacagctcttttcttcttctgagcccttacaagagtcgctcttattgctccacttgcagcaatctaggtttttaattagtataagctccttggaggctgatggtgtgacttcatagcagataatagaatggacctaagaaacagtgctaaaattaaacattccttccaaatgtttaagctgtgaaatgcctgcttccccaaattcttctagcctctaccca

SEQ ID NO: 202780 - DNA, 631 bp, Homo sapiens
tgcacgacacatggtttattcagcatccttagggataaaagaccctcccagtccccttcatctgcaatatattttttcttgtcatacccagattccctcacaaaagcacacccacaaagggtaatacaatagtttaatgtaaataaattttgtttcatgctccaaattatttaaaatattatataaaattatttcagggtatatgtattaagtgtatataaagcataaataaatttcatgtttatacttgggtcctaaccccaagatacctcattatgtatatgcaaatactccaaaaaaatttcaaaacctgaaatgcttctggtcccaagcattttggataagggatactcaacctgtactaacattctgatcactactactcaagcactctctaagagtactttccctacagctcttttcttcttctgagcccttacaagagtcgctcttattgctccacttgcagcaatctaggtttttaattagtataagctccttggaggctgatggtgtgacttcatagcagataatagaatggacctaagaaacagtgctaaaattaaacattccttccaaatgtttaagctgtgaaatgcctgcttcyccaaattcttctagcctctaccca

SEQ ID NO: 202781 - DNA, 575 bp, Homo sapiens
ttcagctgtgaaaaatatttaattacactgtaccataggagatatttattttgatagattaaataacttgctgttgaaagagagattctaacctagtatagaattgtaaagtagatacagtayacactactgcattgatggatttattaggaagagcctataatgcttcagtatgtttttcctcttaaaaataatgtacaatacatgagcattacatttaatgaagcaaaccaaatgacatggataaatgtgctggtcagtaaaagaccaaataccttttccacaaaaccaatcttaatgtctgtgatttgaattgaatttcttaaagaaaaagccttgttattcaagatgaccctagaatgctcctgtttaatatcagtactcaagtgattcctaacggcaagaactcaataataatctaattctatacatgtgaagccatcttttcagtttggggcttgtgagtgttagtttttgcaggcctaattgctcactgaaccatctaccaaagttagaggcacagataaagggaatccattcttctgtacaaatgtgcttatattgtagactgattg

SEQ ID NO: 202782 - DNA, 623 bp, Homo sapiens
gaatatttattacaggtctagtctctccaattcaacaaaaatgtgaatgccatctatgataatattaatagttgatatgagtaattccagtccctcctatgtattattttgtctcctcttccaaacaaactatgtgtaagtactgttatccccattctgaagaggcagggactgaggcttagagaagagaaataacttgcctaacattagtaaaagttagagccaggatttaaacctaagccatctgactctacagtcaaatttttaaccactaggtcacccacttattgagctagagggctatgtatttggatagttctttggatgctgagctattattcgatctattagtgtatctctttcatgaaaactatgtgcttgaaggttttctcagagctttagatcctttaattagtcagtygttctcaacctgaggtgattttgtttcccagggaacagttggtaatgtctgaaaaacagttttcgttgctacggctggggcaaggggtaatgcctctggcctctgccctggctttaatgcacaggagaaccctcacagcaagtaattattcatcccaaatgaatgaatttggcatcccaaatgccaagagagctgctgctga

SEQ ID NO: 202783 - DNA, 612 bp, Homo sapiens
gccttggtaccactgcttggattgggtaggagagccaaatgtctagcaggcgtactcagccattcctaacactaagacatgaaatataatctgtatttataatgcagtttgaaaacgtttgcttagagtgtgtttttccccacaaggacaattgcatttaagttaaaaacagctgattctgaagggatgtctttttgtttatttactgtatcttactgaaaaaaaaaatttctgattttcttgagttctstttatattcaaggtagttggaaaaataactatttacttccattacttctatttctgctatggaaactgttctttttctgtttttcattatgctttttacttccttttgtccttctccttcctgccctgtctgggttttgttagttcatatcctctttggatatggtcagagtcatcagtgatggaaaatgtgactgccagaaagtctaccttcatctttaaaactaaataacttgacagccttttaatttacactgttgtcagagatggcatggaacatataggctttgttactgatttctgacatttaactcattgaacagtgtggcaaatgaaatccaggaacttcatattggtaaaaag

SEQ ID NO: 202784 - DNA, 560 bp, Homo sapiens
tttaagttaaaaacagctgattctgaagggatgtctttttgtttatttactgtatcttactgaaaaaaaaaatttctgattttcttgagttctgtttatattcaaggtagttggaaaaataactatttacttccattacttctatttctgctatggaaactgttctttttctgtttttcattatgctttttacttccttttgtccttctccttcctgccctgtctgggttttgttagttcatatcctctttggatatggtcagagtcatcagtgatggaaaatgtgactgccagaaagtctaccttcatctttaaaactaaatmacttgacagccttttaatttacactgttgtcagagatggcatggaacatataggctttgttactgatttctgacatttaactcattgaacagtgtggcaaatgaaatccaggaacttcatattggtaaaaagacatattaattttttaataacacatgtcttttaatgtttttcttttaaggaactgtgactatgatcttctagaaatgaatatttttgagagctataagaatgtg

SEQ ID NO: 202785 - DNA, 625 bp, Homo sapiens
tgtatttataatgcagtttgaaaacgtttgcttagagtgtgtttttccccacaaggacaattgcatttaagttaaaaacagctgattctgaagggatgtctttttgtttatttactgtatcttactgaaaaaaaaaatttctgattttcttgagttctgtttatattcaaggtagttggaaaaataactatttacttccattacttctatttctgctatggaaactgttctttttctgtttttcattatgctttttacttccttttgtccttctccttcctgccctgtctgggttttgttagttcatatcctctttggatatggtcagagtcatcagtgatggaaaatgtgactgccagaaagtctaccttcatctttaaaactaaataacttgacagccttttaatttacactgttgtcagagatggcatggaacatataggcttkgttactgatttctgacatttaactcattgaacagtgtggcaaatgaaatccaggaacttcatattggtaaaaagacatattaattttttaataacacatgtcttttaatgtttttcttttaaggaactgtgactatgatcttctagaaatgaatatttttgagagctataagaatgtg

SEQ ID NO: 202786 - DNA, 604 bp, Homo sapiens
ctttacatttacacccagtttcccttgcaggaatgtttgaaccatgagactaagttctcatcaatgggagctgagcagagataataaaccatttccagaactgactgctgaaaacatctcaagtgactctccatgtctctcttcccttgccttttgaccttagaggccacaagttccagatggcattactacaagggaggagcaacctggattcctggatttctgctcagaagaggactgccctggagagctactcagttacacttcaaataagcgaaaataaacttttattttattaagccaatgggatttcagggtttgttatcacacagcatagattatcccaggagttctcaaaatgtgattcccagacagcagcatcagcatctcctgggaatttgttagatatgcatattyttgagctcacctgaagtctagtaaatcagaaactgagggtgggacacagtgatctgtgttttagcaggccctgcaagtgattctgatacactctaaagctttgagaaccataggtctaaactacctcatcaatatggcagaatccttgatctccaggatctcacagtctaatagacagaggcccttg

SEQ ID NO: 202787 - DNA, 388 bp, Homo sapiens
gaattctgctaagggacagactgcctcctcaggtgggtccctaacwctggtggctcctaactgggagacacctcccaggaggggtcgacagacacctcatacaggagagctctagctggcatctggcaggtgcctctctgggatgaagcttctagaggaaggagcaggcagcaatctttgctgttctgcagccttcactcattatacccaggcaaacagggtctggagttgacctccagtaaattccagcagatctgcagaagaggggcctgttagaaggaaaactaacaaacagaaagcaatagcatcaacatcaacaaaaaggacgaccatgcaaaaactccatccacaggtcaccaacagcaaagaccaaaggtagataaatcca

SEQ ID NO: 202788 - DNA, 574 bp, Homo sapiens
catgagccaaataaatctcttttgtttacaagttacccaatctgtagtattctgttatagcagcagaaaatagactaagacacatatatcatactccttctcacattttcaataggtgctgttgttgacagatcttctgttctcaccagattgggaccctcctgttgagagtggagaacagatcttctttatcttcawgtaagctccaatgactttcgcagagcctcccacattatagatgaatgaataatgaaaacttgtagccagaggtttgtagtcttctcgcttctgcctaatccccacagcagcactgtgatgtgggtggcaacgcaaagggggtggaatgttgaagcacttaatttccccctgagtgcctctcaatctcacagtcatagttctctttttcctcttaagttctattgcaattgtaacttctagattcacaatataactctcttctgaatgtggcaggtgctgcaaaagaatggcaattaagatccattgcagttcaatgcagaaacaggcagcctgtggcaatgaaattaccaagtggcacatgaagtccctagtggtg

SEQ ID NO: 202789 - DNA, 574 bp, Homo sapiens
catgagccaaataaatctcttttgtttacaagttacccaatctgtagtattctgttatagcagcagaaaatagactaagacacatatatcatactccttctcacattttcaataggtgctgttgttgacagatcttctgttctcaccagattgggaccctcctgttgagagtggagaacagatcttctttatcttcatgtaagctccaatgactttcrcagagcctcccacattatagatgaatgaataatgaaaacttgtagccagaggtttgtagtcttctcgcttctgcctaatccccacagcagcactgtgatgtgggtggcaacgcaaagggggtggaatgttgaagcacttaatttccccctgagtgcctctcaatctcacagtcatagttctctttttcctcttaagttctattgcaattgtaacttctagattcacaatataactctcttctgaatgtggcaggtgctgcaaaagaatggcaattaagatccattgcagttcaatgcagaaacaggcagcctgtggcaatgaaattaccaagtggcacatgaagtccctagtggtg

SEQ ID NO: 202790 - DNA, 466 bp, Homo sapiens
gagggatttcatcaacaccaggactgtcctacaagaattgctaaaggaatrgacaatatgttaggccacaaaacaagtattaaaattctcaaaaaatattgaaattatatcaaggataatctgtgaccacaatggaataaaactaaaaatcaataacaagaggaatttggggaactatacaaatacatgaaaattaaataatatgctcctaaatgaccagtgatcaataaagaaattaagaagaaaatttaacaattacttgaaataaatgctaatgaaaacataacatacaaaaaattatgggatgtagcaaaagcagtactaagaggaacacttatagcaataagcacctacatcaaaatagtagaaaaacttcagataaacaaccttacaatgcatcctaaagaaccagaaaagcagaagcaaaccaaacccaaaattagtagaggaaaagaaataataatga

SEQ ID NO: 202791 - DNA, 570 bp, Homo sapiens
acacagtaattcctctgacaaatctggcaaagtaaattgaaaatccgctggaaaggattcaccattctagatgccattaagaacatctgtgattcttagggagtggtcaaaatatcagcattaacaggagtttgaaagaagctgattcctactttcatgaatgacttcgaggggttcaggacttcaatggaggaatttgctgcagctgtggtggaaatactgagaactagaattagacatagaccctgaagatgggactgaattgctgcaatctcatgataaaacttgaatggatgcggagtttcttcttatggatgagaaagaaagtggtttcttgagatggaatctactcatggagatgatgatgctgtgaatattgctgaaatgacaataaaggatttagaatattacataaacatagttaataaagcagcagcagcatttgagaggactgactccaattttgaaagaagttccactgtgggtaaaatgctawcaaatggtagcacatgctacagagaaatattttgtaaaaggaagtcaatcggagctcccaagtacctgggacca

SEQ ID NO: 202792 - DNA, 609 bp, Homo sapiens
aaaccccgaacccattagggagaaactccccaacctcccctccccttcctctggcaaccatgaatctgggttctgtctctggatttgtctgctctggatattttttataaatgyaatcatataatatgtggcctcttgtctctgttcctttcacttagcataatgttttcaaggctcacccgagttgtagcttctgtcagtacttcattctattctctcttcatggtagacatatacatagcagttaggtaagagtcaccacctccattttgcagataataaaactaaggcccacataacacagctcttcctgaatttacctttttgtgtgcatgtgtgtgagacagggtctcactctgtcacccaggctggaatgcagtggtgcagtcaccgctcactgtagcctcaacctcacagggtcaagtgatcctcctgcctcagcctctcaattagctgggactacaggtatgcaccactgcacccagctaattttggttttgttttgttttgttttgtttttgtaatgatggggtcttgctgtcttgtcctagtgatcctcccatgtcagcttcccaaagtgttgggattacaggcatgagccaccattcc

SEQ ID NO: 202793 - DNA, 609 bp, Homo sapiens
aaaccccgaacccattagggagaaactccccaacctcccctccccttcctctggcaaccatgaatctgggttctgtctctggatttgtctgctctggatattttttataaatgtaatcatataatatgtggcctcttgtctctgttcctttcacttagcataatgttttcaaggctcacccgagttgtagcttctgtcagtacttcattctattctctcttcatggtagacatatacatagcagttaggtaagagtcaccacctccmttttgcagataataaaactaaggcccacataacacagctcttcctgaatttacctttttgtgtgcatgtgtgtgagacagggtctcactctgtcacccaggctggaatgcagtggtgcagtcaccgctcactgtagcctcaacctcacagggtcaagtgatcctcctgcctcagcctctcaattagctgggactacaggtatgcaccactgcacccagctaattttggttttgttttgttttgttttgtttttgtaatgatggggtcttgctgtcttgtcctagtgatcctcccatgtcagcttcccaaagtgttgggattacaggcatgagccaccattcc

SEQ ID NO: 202794 - DNA, 479 bp, Homo sapiens
ctgcgtcaagtagaatgaatgaaacctcagcatgatgggagggttcaggagctgatacatttttgtattttctgagagtcttaattacattttacaaattacatggatggttgggttggtaagaagtatgtgaattttgatggctttttaattttgtttttgtagcagttgtttgtatccatgtgtgttggtgcccatatgtattgtttggggtttggttattctctcaaaaccaagttaccgtaaaaagtttgaattttartatttctttattgagtagtgggaccgtctagactgtgtgctggctcttactaaagtcatttgtttttcttacccgtggagaggtgtattcttgaaccctttaaacgggtctctactttggcctaagaccatattagaaaacttttttgaagtcacttattatatgccatataattaaaaagttatatggtatattctcccattacattttagccaca

SEQ ID NO: 202795 - DNA, 451 bp, Homo sapiens
caaagccttacttattccatggaccagacactaaaaaagctgaagtgaagaaactgaaataaaagcttaagtgaagaaagcaaagaggcactgggctattcycaaagaaagcttacagtcacaacctattctaaaaaaaaatctaggctggtatcagaaaatctgggttcaagtctaggctccactataccatgtggacacttcatctgaccagcaagctgcctttcccatctaggaaaaacaaacaaaaaagtctctcgtacaggaaaacttgtgtctcctccaacttattgccccaacgtagttctctattcttgcagcaggaaaaactgtcagttagggagaaaaggatttatcaccatgttttgtggtataacctgttcacttatcttgacttaacttggaatctaattggaaaagtaaaactcaaaggcagtttgtggctcattat

SEQ ID NO: 202796 - DNA, 451 bp, Homo sapiens
tacttattccatggaccagacactaaaaaagctgaagtgaagaaactgaaataaaagcttaagtgaagaaagcaaagaggcactgggctattcccaaagaaagcttacagtcacaacctattctaaaaaaaaatctaggctggtatcagaaaatctgggttcaagtctaggctccactataccatgtggacacttcatctgaccagcaagctgcctttcccatctaggaaaaacaaacaaaaaagtctctcgtacaggaaaacttgtgtctcctccaacttattgccccaacgtagttctctattcwtgcagcaggaaaaactgtcagttagggagaaaaggatttatcaccatgttttgtggtataacctgttcacttatcttgacttaacttggaatctaattggaaaagtaaaactcaaaggcagtttgtggctcattatggaaggga

SEQ ID NO: 202797 - DNA, 509 bp, Homo sapiens
catgcctgcttctatttctgtctcaytataattgaaaacagtgatcttttaaaaaataaatcaaacttaatgtcctcactataaaccctataatggcttcctatcacatttagaataaaatgcaaacccttgtatcctggccttaatgatctggccacgaccaatctttaggcttgatcattctctaccttgctctttctttcccaaaaagactgtttcctaaactcttcaatttcatccctgccttagcatcttcacacttatttcctctacttggaatattcttctgcagcattttacagagtacatttcatcattcaaatctcagctttaaatgtaaccttgagatgcttttgctaaccaccaaatttaaagttttcacctagctattcataacacttacaactgcctgatatttccctttcttactttttcatctgcttattcatattcagtctcctcataacagcaggggtcatatttatcttatttactatcaggaccagcta

SEQ ID NO: 202798 - DNA, 449 bp, Homo sapiens
gtctctatgagattgagtacamcagcaactaaagggactgaggtcatgcattccacttctgagcttatggccacgtccaactcttacaaaaaataacctttctctcctgcactcttagtagtttggccaattttatatggacttgtgctattcctttactttttggcttaagcgtatatatgactcccaaggccatgaaagccctaaccatttggctgagggtggtattttcaggaactccaccagtgaagcagatactatgtattggacaacatcatgtgttcctaatgataggttcttattcaaatgacaataaatattgttagaaaattcaggcgtaagtttgagtgacaatagtgataaaaggaaagtctcagcagctggtctagcaaggttatctatgatagctgcttgttgcaggaagcatcatttgagcgagtttacatgtt

SEQ ID NO: 202799 - DNA, 508 bp, Homo sapiens
ttcttctacattctcaaagcacacaaccctttcacctcccatagagaagagtaagcaatggtcctggagcataaccacaagtgtgtcaatcacatgggtatcttgttaaagtgaagatactgatacaataggtcttggctgggatcttagattttgcatttctaacaagctacctggaaatttataagcctctggtcyatgaagtagttaggagatagagagtccaggatggttactgtggcacgtcttcccatattcaagcaatgactttgacgctaactacaacatcttgattgaattgggtgctctgcttctctgattttctgcagagtgcaggaccagaagcagttattttttgcacattataactggctaatgtcacaaaaatcagtaattgctgaaatcttgacaaatgtgccccaacataaccataagatgataattgaattaaatactcataaaagattgagatttggaactgttgattccaactcttttacacttttca

SEQ ID NO: 202800 - DNA, 606 bp, Homo sapiens
tgtatccttttcatgtatgtttccttgttttgctattaaaaatgtaagttcattgagggaaatcactgtatcatgcaatcatgttggaattttgggctttatcaacacaagataggtaaatatattatttgcaggcaatgaatgttgttaactgaccggcaaccatttatttcctaaataaaaatgtcacattacgaagtggattttgaaagactctgaagattactcctgaaamttggcacctcctccaagttaacatagtcacatttataggactataggtacagctaataaactgcccatctcctatgtttcaatttaaagatcttccaaaggctggttctctttgggtcaccacacttgccagtttggacttttgaaacctactaacatgggctgacataacaaattagcaacaagaaaagttcacagaaggacaagtgtgagaaagtgtgccaaatatattagcattcgttttgcaaccttgtctccagtttgtgtgaagttgatggctggaggttacgctttcattaaaaattgacaacattttaaatgctaatcaaaactgcttgtactttctacttatatttatcttgaaagggcaaa

SEQ ID NO: 202801 - DNA, 574 bp, Homo sapiens
tgtaatttctcaatattatttctatcagtaggaataattaaagaactgtaaagatttgttctcttaagcaccttaaactttctttttttcagtagtatttacattatccattttcccagtaaacacttttgttctatgattaagaagtatatttcaacatagcattgtcagggttatcacaaaatcccagtcagtctgagrttgaattaatatgtttcacaatactttactttttgtatagttaaaaatattatttttttgtacagagacataagaaatgtgtgtacgtaaatactgagaaaacacaaagtgtaaccataatgtgagactcatctttcaataatctaaccagataatagtttttaagaataacaatattttagtgcattcaatgtgaaatagtatatttatctcatttaatcctgaccacattctattttaactgctactattttaattttagcacagaaaatgttaatattattaagtagcatttattgaatgtaaatgtgcaggagtctgtattaacatttcctttaaattaccttatttaaaccattttacaaatgagtaa

SEQ ID NO: 202802 - DNA, 525 bp, Homo sapiens
atgaggggccacatgaatagaacaaacccatactgatgctttaccctcttctcacgttccctaggtcttgtgcttgattaggtgatcttaacaagctcagttttctggagtgggaacctggcttgttggtgccagtattcctgaggtctgcagaatggcctggggatagaactctctgttgccaggcttcctcatgctcactgtgtgtgtttcccgtgctccctgccrctctgctacactcacttgccagtcgttcctgaagccagttgctttcctgcccaattgctttggtctttctgtctaatatttgtcaccttattttccaggtatggggctaggggtgtaccctctcctatgatgtaccaatgaatctatttcctgtggaccagccatggtagataagccatgataggcttatctaccaggaaatatttgatttactacagctttaacttctaaatatgcgtacaaataactttttggttagataagcagagtgaagaagcagaattgtaaattgaattc

SEQ ID NO: 202803 - DNA, 457 bp, Homo sapiens
taatccgttagtttagtgtcccataatctaggtttgctgatacaattatctgcctagcttttatcattaccaacctcatgtctccttctccctctccttctttttgttctgtcctcatggtttatactttcctcactggtagtaaagacagtatagggttgagagtatgactgcctggaattttgagaaacaaactaccagtttttagctgtgtgaccttgagcaagtttcattatattatctatgcctcactttttcatctgtacaaagaggctaataaaagcacctaactcatatgattgttatgaaaattaaatgaaacaatgcagaccaagtattgtttaaaagatattatttttgcatttttccttttaaaaattgtggtaaaatgcacataacataaacaggktatactgtacatttaccatcttaaccatttaagtactgtacattgttg

SEQ ID NO: 202804 - DNA, 531 bp, Homo sapiens
agaattctatgagacattaaaagaagaattggtaccaatcctattgacactattccacaagttagaaaaagaagaaatcctcactaatttattttatgaagccagtatcaccctaatacccaaaccaggaaaggacatatccaaaaaagaaaactacagagcaatatccctgatgaacatagatgcaaaaattcataacaaaataccagctaaccaaatccaacaacatcaaaaaattaatccaccagcaaaatcagcatacaagggacacacctgaatgtaataaaagccgtctatgacaaacccacaaccaacataatactaaatggggaaaagttaaaaagcattccctctgacaactagaacaagacaaggatgccaactctcaccaattctcttcaacatagtactggaagtcctagccagagcaatcagacaagagaaagaaataaaggtcatccaaatttgtaaagaggaagtcaaactgttgctgtttgctgatgataygattatttacctcgaaaaccctaa

SEQ ID NO: 202805 - DNA, 522 bp, Homo sapiens
ttagtagctcttctatacaccagcagcaaccaagctgataatcaaatcatgaactcaacyccttttacaatagcagcaaataaaataaaatacttaggaacatacctaaccacagaggcaaaaggcctctacaagaaaaactataaaatgctgctgaaagaaatgataaatgatccaaacaaatggaaacatattctatgctcgtggatgggtagaatcaatattgtgaaaatgaccgtattgaaacaaaaatctacaaattcaacacaattcccatcaaaataccaacatcattcttcacagaactagaaaaaaaatcctaaaattcatatggaaccaaaaaagagtccacatagccaaagcaagactaagcaaaaagaacaaatctggaggcatcacactacgtgacttcaaactatactataaggccatattaaccaaaacagcatggtactggtataaaagtaggcacacagaccattggaacagaattgggaacccagaaataaaaccaaatactta

SEQ ID NO: 202806 - DNA, 622 bp, Homo sapiens
  misc_feature (1)...(622): n = A,T,C or G
gacctcaagcagagaactcaccaagctcatcttaacttacgacctacagaactgtaataaaattaatttgtcttattttaagatgttaactttgtgttaatttgttatggcagcaataggaaaataataaaattccaaaaagcagaagttataaacaacaatgtgtgatcacaaagtgcaataagattaggttggtgcaaaaataattgtggtttttgtcattgaaaataatggcaaatcctcagttacttttgcaccaacctattattaataaaaacaaaaaaaatttggggtcaaaaggcaaatacatcccaaactacagaatttytaaaacaaagttaaaataaaaatttgacatatctgaatccttaaagcactaaaaagaaaatttaaagcctccaatagttatgtcaataaaaccaagagtaaaacatttaactcataaaagtaaaaaagaatatcaaaataaaccaaacacatgcaacaatttataataaatcttgttctctgaaaaaattacaatggaaattaatcattagtttttttaatcaagtaaaaatgaaaaaaaaaaaacataaatacacaaagaaatgaaagggggaaataaccatcgaaaaaaatn

SEQ ID NO: 202807 - DNA, 591 bp, Homo sapiens
cacgacctgggcaattttatcatgtagataaatgtccttccgtgaatgcttcatgtagaatgtccttctgtttgggtttgttttctcctgattagattgagattatgtgttatcaggaagattaccataaaggtaagagacgtttctcwttgcatcatatcaggagttctatgatgtcgatacgtcttattactgatgattaatttatttattatttatatgtttatatttacatttatttatattataaaaatatatatttatatattaatcttgatcactcagttatgatggtttctgccagttttctctagtataaagctaccacttttcccttacagtgaatatgtatttttgaaggagatactttgagattatataaatattctctgtctccataaattttcatccactaattttagcatccatcagtggatcttgcctgcagtacttttctctgtggtattctagcagtgactttctattgcttgcatttcgtccacatggattatttagaactcttttgtaaggaagacttgtgctttctctcccacttatttacttatttagttatttatttatataaatatg

SEQ ID NO: 202808 - DNA, 597 bp, Homo sapiens
ggatgagggtggaacaaaactgaatggttctaacaagcttccaagtaatgccaaagctgctggttctctgattgcactttgagtagcaaggagctaacataattgttctcaaccatggctgcatattaggatcatctggagaactttgaaaatgctgatgtctggataccatcctcatatgttttgatttaattggtctaggagtggcccagggccagggtctttaggcaacactaatatgttgccaagggtcagaatgactgagctaaaacctgcggctccttctaatgagcacagcatcaaggacacagctggacattagtccccactgttatccataggagaaggtagagattcttagtactttaaaaacaaaaataataattataattagaggttatcatttcctgaacacttattatatgtcaacaactctacaaattacattaattctcyaatttaattgttacaaatgttatagggtaggtacctttactaattctatgtataggtgaggaaattggggttcagagaggctatgtaaattgcccaagttcttatagcaactaaattaataatgtggaggtaacgccaggc

SEQ ID NO: 202809 - DNA, 597 bp, Homo sapiens
ggatgagggtggaacaaaactgaatggttctaacaagcttccaagtaatgccaaagctgctggttctctgattgcactttgagtagcaaggagctaacataattgttctcaaccatggctgcatattaggatcatctggagaactttgaaaatgctgatgtctggataccatcctcatatgttttgatttaattggtctaggagtggcccagggccagggtctttaggcaacactaatatgttgccaagggtcagaatgactgagctaaaacctgcggctccttctaatgagcacagcatcaaggacacagctggacattagtccccactgttatccataggagaaggtagagattcttagtactttaaaaacaaaaataataattataattagaggttatcatttcctgaacacttattatatgtcaacaactctacaaattacattaattctctaatttaattgttacaaatgttatagggtaggtacctttactaattctatgtataggtgaggaaattggggttcagagaggctatgtaaattgcccaagttcwtatagcaactaaattaataatgtggaggtaacgccaggc

SEQ ID NO: 202810 - DNA, 602 bp, Homo sapiens
tgaggaactcaggctcctgcagggagtgcagtgtggctggagcccagactgtgagggggcagcagcaagcaaggaagggtctctcaaacaatgtttggtaggtgggactttttcctgagggaaactgtccctggtagggagacaggaaatgttacaagctgggaagtgacagggtcactgtgttattgtgtggagaaaagataccaggtgtgggaggcaaggaagtaggaagctgtcttaaattatctagaaataacagtggtgtgaccagaaaaggtggctgtggtgttgggaaacaggcagtatattggagaggtatttcaccagtaagattgacaggactgggtgactaactctgtatgtagataagagagagagggattttcttggataacatgtaggattctggcttcaaataataggtagatattagtggctctcgttgagtcagggaacacttgaggaagactgggttttgatttcagtttgaagaatgttgaggtttatatgggggcaggggatgagaatgaaarcagagataagcatatatggatctggagctcagggttgaaaatacacatttgggaattatcaataatagt

SEQ ID NO: 202811 - DNA, 492 bp, Homo sapiens
cgcttaaacagctcctggatggctgtgttgttgctgatgaaggtggaggacatttttagctctggaagtggctacatttcacattatggggggacccaatgagcaaagtagctcctgtgcttgttttggatgttaagcattttcttgtccacctccctcatggacatgcagtccctgaaaatggcagctgctgctaggtagcagccacagcaggggtcacakgtagccgttatgttcttggcttcttggtctgctgatgaccatctagggtcagggcagtctgtggcttgggaattggtgttgcttaatgtttttatccacacacaaacaaaattcaaatgtcttttgtattgggcaagtaggcaaagcctcttgtatttattccagacaactaaaaaataatccctaaaacatacctcactttcaacatgttagaaacacctcatagttacataggagttgctaatcttgagcatttcctttatacttttc

SEQ ID NO: 202812 - DNA, 405 bp, Homo sapiens
ttggcttatgataaggagtccagcaaccaccatgagacacattttgtcccaaactcaattctaaacttcaggtcaaagccctaggaaagaaaactggatctaagggatccagaggcagatgacaatagaagttaaaaggcacagtgcaagtaaacatggctgattcctgccaataaagccaaacccaagcttcytgtttcatggataaaggccatgttagtatctgtggcataaatgaggtctagggaattcaaggctactgaaaccaggagaaatacggtgtatgtgggtaaaagcagacgatttccaccttctaggcccccctgcttcatgggtgcaagtcactttaacacccgtggcggcacctgccaagttcgctgggacttgggaatggaagagggaaag

SEQ ID NO: 202813 - DNA, 533 bp, Homo sapiens
gagaaaagctctatgacattgatttttccaatgatttcatgaatatgacacaaaaawctcaggcaacaaaaaaaaacaaacaagtgggaccatatcaaattaaaaagcatctgcatggcaaaggaagcaatcaataaaatgaaaaggcagcccaattgagtaggagaacatatttgcaaaccatatgtctcataagggattaatgttcaaaatatataaggaactcctcaaactcaatagctaaaaaaacaatctgatttaaaaacgggcaaaagacctaaatagacattttccaaaaatagacatacaaacggccaataggtgcttaacataactgatcatcagggaaatgcaaatcaaaagcacaatgagatatcatctcctgcctgttaggatggctactatcaaaaagataaaagataagtgttggcgaggatgtggaggaaaaaggaacccttgtacactgttggcaggaatgtaaattggtgcaggcattatagaaaataatatgaaggtttctaaaaaaactggag

SEQ ID NO: 202814 - DNA, 533 bp, Homo sapiens
gagaaaagctctatgacattgatttttccaatgatttcatgaatatgacacaaaaaactcaggcaacaaaaaaaaacaaacaagtgggaccatatcaaattaaaaagcatctgcatggcaaaggaagcaatcaataaaatgaaaaggcagcccaattgagtaggagaacatatttgcaaaccatatgtctcataagggattaatgttcaaaatatataaggaactcctcaaactcaatagctaaaaaaacaatctgatttaaaaacgggcaaaagamctaaatagacattttccaaaaatagacatacaaacggccaataggtgcttaacataactgatcatcagggaaatgcaaatcaaaagcacaatgagatatcatctcctgcctgttaggatggctactatcaaaaagataaaagataagtgttggcgaggatgtggaggaaaaaggaacccttgtacactgttggcaggaatgtaaattggtgcaggcattatagaaaataatatgaaggtttctaaaaaaactggag

SEQ ID NO: 202815 - DNA, 588 bp, Homo sapiens
tggcaaagataatgtttgactgtggtattaatttctctttgctttggtgtcctaatatgtaaacttaggaaaacttattcccaccttacagtgttgctgtgacaatgaatgaccccaggtgtcaaaaggaccaggcacctagagggtatccaaagaaaggaaactataattgttgttcacatattcgaagttctgctacttaaagtgttagctacatttgtgtgtagaataattttagagacaataaggacattagagaactttttaaaaacttgttgcactgttagtaatatctcaaatatatttggtgtgtacttttacaaagcaactgtaaaaaccaggtccattatagtttatttatgataaaatacaatraagtagttatttcacataaatacaatttacatgaaaagaattacttttatgctcaaactatgaggattcaaactaatcatttgtactcagaaaacagaaaagggtgctgctttcatttatttcagaagcaataatacatctctagaggaggataaagtggtgttaaaaaaaatttgttgggactgaagctgattttgtagttcctttcaaggc

SEQ ID NO: 202816 - DNA, 609 bp, Homo sapiens
taaattgtttcttttacatttatctatgaaagcctgaagtttttgaaagaacagctctgcatgatatatttacaagtttatttcaataacaataatgggtatttcatgtcagataagtatggttagttatctaaattggatttgcttttatcctaggcagacttctttttaagtggtctttctcrtagtgtctagattcttttatttttcctgtggaagtccagttgtttcagtgccatttgttgaaaaggctatcttttctccattttcttgtcttgctcctttgtcaaagattagtttattatatttatgtgattgctgagctctctattctattctattgatctattcatctgttctttccccaataccacactatcttgattaacgtagctttaaaataagtctgaatttgggtagtgtcagccttccaactttatttttctttttcaattttgtgttagttattcctggtcttttgcctctccatataaactttagaatcagtttgttgatgtccagaaaataacttgctgggattttgcctttcttacgtcaacatgccaaagaaagactttatagtgaaagcagctgcatacattgtctcct

SEQ ID NO: 202817 - DNA, 556 bp, Homo sapiens
gtatttatagtctatttcctgatacgggagagtaatagcaaatgacatccacaggttcttaaattgcatcactgtcatcctggatgtcccctgagttgagtggctgttataacacattgaaggggtggcctgtccctccacacctgtgggtatatctagtcaggtgggacgagagactgagaaaagaaataagacacagagacaaagtatagagaaagaacagtgggcccagaggaccggcactcagcatatggaggacctgcactggcaccggcctctgagttccctcagtttttaytgattattattttcattatttcagcaaaaaggaatgtagtaggaaagcagggtgataataaggagaaggtcagcaaaaaaacatgtgagcaaaagaatctatgtcataattaagttcaagggaaggtactatggctggacgtgcacgtaagccagatttatgtttctctccacccaaacatcttagtggagtaaagaataacaaagcagcattgctgtaaacatgtctcacctcccaccatagggtggtttttctcct

SEQ ID NO: 202818 - DNA, 556 bp, Homo sapiens
gtatttatagtctatttcctgatacgggagagtaatagcaaatgacatccacaggttcttaaattgcatcactgtcatcctggatgtcccctgagttgagtggctgttataacacattgaaggggtggcctgtccctccacacctgtgggtatatctagtcaggtgggacgagagactgagaaaagaaataagacacagagacaaagtatagagaaagaacagtgggcccagaggaccggcactcagcatatggaggacctgcactggcaccggcctctgagttccctcagtttttactgattattattttcattatttcagcaaaaaggaatgtagtaggaaagcagggtgataataaggagaaggtcagcaaaaaaacaygtgagcaaaagaatctatgtcataattaagttcaagggaaggtactatggctggacgtgcacgtaagccagatttatgtttctctccacccaaacatcttagtggagtaaagaataacaaagcagcattgctgtaaacatgtctcacctcccaccatagggtggtttttctcct

SEQ ID NO: 202819 - DNA, 470 bp, Homo sapiens
agctataatcatccccagcacaaagaagcctcataaatctgctttcacaaacatttagaaatgaaaactcatgtgcttttccccaaaaaccaagttccgtatgatgatcaaaaaataccccattaattttatggagttagttgcactgagcaactttaaaatgcccaaatacaattactgcatcagagtgcataagaaagtctctaatccataaatcaaggtcttactttccacattgtgtattacyttcaagtcaatgctctgtactcaatgtttaatgcttttttgaaaatatttacattatagattgataagaatcaaggactttaacattctgactgactaacagcaaactcagtttaagctaatgagaaaaaaagcaatgctcacgatctcaaattggtaatggtaggatgaaacaccctccatgagtttaagagaattagtaatgggatagaaatagcagagat

SEQ ID NO: 202820 - DNA, 470 bp, Homo sapiens
agctataatcatccccagcacaaagaagcctcataaatctgctttcacaaacatttagaaatgaaaactcatgtgcttttccccaaaaaccaagttccgtatgatgatcaaaaaataccccattaattttatggagttagttgcactgagcaactttaaaatgcccaaatacaattactgcatcagagtgcataagaaagtctctaatccataaatcaaggtcttactttccacattgtgtattactttcaartcaatgctctgtactcaatgtttaatgcttttttgaaaatatttacattatagattgataagaatcaaggactttaacattctgactgactaacagcaaactcagtttaagctaatgagaaaaaaagcaatgctcacgatctcaaattggtaatggtaggatgaaacaccctccatgagtttaagagaattagtaatgggatagaaatagcagagat

SEQ ID NO: 202821 - DNA, 594 bp, Homo sapiens
tgacttgaccattacacatttttacgcatgtaagaaaatattacgtatgcccataaatatgtaaaaatattrtgtatcaataaaattccattgattgagttcagtaaacaatagactttgttgcccttagccagaaggaaatgatgaaatgtcttttgggaagagaaatgagaagaggttctttttatccctttctagactatagatctgatagatattttaaaaacatttttcttttcagatgcggaaatggaagctcagggagctcaattgcctttacttacaaaactagcttatggcagttccctgctaaagctaggtgacctgactcagtttggtctcagactagggttctctcagcataacatcctgttcttattcctgatcaattgctggaagaaagtcccaaattttgacctagagaacaggatgagggtaggctccagttaatctctgaccccaatcttgttatatgctccacaactatgcatagatattctttctttctttgagaataagagattttttttttttttaatttgggaaaccaaagaactcattggtgtccttttgctccttcagagttgcttgtct

SEQ ID NO: 202822 - DNA, 424 bp, Homo sapiens
atagtttgcactttttacttctccaaagttccttgaaaagcacttagttcacaggatttctgtgatactgatttattactacctcctccctgtctctttcagttcaccattcttcatctagccagctaggtcacaaataatagaaaaggaatgtatcaaagttttacttcagaaacatatctttcagtgttctccactgytagtattgctgttcccaaaaccttctccatatgtatccaaagtagtgtttctaaatttaaatattacctgcttaaaacccttacagggttccttgaagtcctcaagaaatgagccatagaaaagtattcaaagataaggtataaataattttaaaaagtaacataattactattgagacattcctggtgacataattaaatttcaagagtaaagaaaaatttat

SEQ ID NO: 202823 - DNA, 589 bp, Homo sapiens
ccttccattattacttcatgatgggttattttaacattataaacataatgaaaccccattatttctgatttctgctttactgtcctaatgtttaacccaggctcattttattctattatttgaaaatctaatttttgtcattagtggaaagtttaagcaactcagttacctttctaaagctgtatttgtagctattaaaataatgaaaattagaagaaacataccagtatagacaaaattgtgcactagggaacttgtttttgctgcgaatatacacacaaacagttcttacaaagtrattgaaggaagcactctgaagagaactacagaattcatatgagctgtggctcccacaaagtaaaacctaaaagtctgatatttgtgagactcacaatatcaagacccactcatcctaagtcaaagttttccaggggacagctcctacctgtacacggagcagctagtggtctttcaatctgtcccattctaaaatctgaaaggacaaccaaggattgtcagacagttgaggaaagctgtctttccttctttcttttattgtacatgtgcaggatgtgcaggtttgttacac

SEQ ID NO: 202824 - DNA, 498 bp, Homo sapiens
ctatcttcaatacgggccacataagaatgaattcagttctgaataccactgcagatgatgcatgattacatgcatattttaatgtsgacagggatacaatataaggaatagttttaaaactgaagctttaggcaaagaaacaaaaagaaagacagaataggtgttaaactgctgtaacataaaataacctaagaagaagtctacctttattttgggaaattacataaggcagaagtaggaccaggagcacaagtttgttaaaaacagaatttgactcttatttcctaagaactttctacagcttcttacaactttctacaattaaaatcatgtaaggatctgcctcaaactagcctctgttcaggggcttttcgggtaggctagaacaaatgactttcaaggtctctgccaattctaaggctctacagtaatgtaactgacagctcataagtgcttataggctaacaattttaattttaaactttaaactgatggcaa

SEQ ID NO: 202825 - DNA, 438 bp, Homo sapiens
ttttttagggactcacaaaggaaaatccttaagttccttcaagggaaattccaggcatctagctagccccagaggtaactactaactagaacaagaaggtaatagtagcctaaaacaacagccaaagaagttaaagctccagagatgtttgctttccytatagaaactaaaaataacatctgaacatatgtccctgaattgtctttcagaggctcggaccccccacctaacagatccactggcacctggagtccagataaggagacagtgaaaactaaactttataactgctttttgttctaagtttcttcctgcagtgcttggagaaagtcacaccccctagccagttaacatttttctactgaccctaaatttttaaacaaagctgctcttccttaactaatggcaaatctgaagatctttgaatctacctgcaac

SEQ ID NO: 202826 - DNA, 538 bp, Homo sapiens
atcttacccaaacaatcttaacaggatctaacctgggttttattcttaattatcctctcttgttgcatctgctctttactactcattttctatacccaggtcccctttctttgcatcaaatgttcccattgattatgatttttcccatcaatttacaaataatataatctatatttcagatatccagagttttcacttgttaccaaaaaacataattaatactgattttgattatttcagacagaaacacacccaaatagaatgaaatacagggaaatccagttgaatgcttaacagtratacattataggcaatacaaaattcacttaaagcattttcaataatttactcaagtcatataaatacaatcctactggaaataatttttcaacaaagacacatatttccaaatgatcaaattggctgaaatacaaccttagcacatcttgcagattccagtaactacgtactaaaaatgtatatttattccagactttctgtatgataacctaaaacattaagcaatactaattagcat

SEQ ID NO: 202827 - DNA, 585 bp, Homo sapiens
agattttgaggaggtaatatatccaccaagaagttaaatgagttgacctctttggtaacatttctattgctgatgaggccaagaaaataccataaacatattaaaaatgacagaggaaatcaataaaggcaaagattcytgaactgagatcagttgatagtttgttcatcttctcttgccaaataatgcactattattggatatagttcatcactgtaattaataattttttaactatatgatgtagaagagtagatatgggaacacaaaattatgataaacacttttctttttggatttgggctttagatatatatatgctatctccaataatgctgatgtacaagatccatgaaatatgtgtttctttgagagaaattagatagtcattattcaaagtcccattctcaggccccggtatataaaaagaatatctttgggaagacaattttctgaatataggagccaaagcacactgggaacattggtttgcttctctgtccagattccataatgcaactattgaggaggttggaaccaggtagcagtaaaattctcaacttaaagaagactagtattatacca

SEQ ID NO: 202828 - DNA, 560 bp, Homo sapiens
caggtttaacattcccctacaaaattgcgaataatattgaagggtgtacaacccctgctactttagcagccgcatcttgctagaatatggaaggtaatgtcccagggtgtgaaccgagggtggcagtatagaaaggatcctaggaaaaataggggagtaatatcacccgcctctcgccccctggatattacggtccacatcgcaggggggcgggcgacccaagcgatgcggggagtcataacaccccccacytcccccctggatattacgatccacatctcaggggggcgggcgcccccgccccatgcggggagtaatatcaccctcctctccccccaggatatgacaatccacaacgcagggcgataggcgccccccgcgacgcggggagtcatgtcacccccctctcgccccctggatatgacgatccacatcgcaggagtgtgaggcaccccccgcgatgcggggagtaagagacagcccctcttcccccctggatatgaagatccacatagcagggggggtgaggcaccccccgtgatgcggggagtaagagccag

SEQ ID NO: 202829 - DNA, 560 bp, Homo sapiens
caggtttaacattcccctacaaaattgcgaataatattgaagggtgtacaacccctgctactttagcagccgcatcttgctagaatatggaaggtaatgtcccagggtgtgaaccgagggtggcagtatagaaaggatcctaggaaaaataggggagtaatatcacccgcctctcgccccctggatattacggtccacatcgcaggggggcgggcgacccaagcgatgcggggagtcataacaccccccaccycccccctggatattacgatccacatctcaggggggcgggcgcccccgccccatgcggggagtaatatcaccctcctctccccccaggatatgacaatccacaacgcagggcgataggcgccccccgcgacgcggggagtcatgtcacccccctctcgccccctggatatgacgatccacatcgcaggagtgtgaggcaccccccgcgatgcggggagtaagagacagcccctcttcccccctggatatgaagatccacatagcagggggggtgaggcaccccccgtgatgcggggagtaagagccag

SEQ ID NO: 202830 - DNA, 560 bp, Homo sapiens
caggtttaacattcccctacaaaattgcgaataatattgaagggtgtacaacccctgctactttagcagccgcatcttgctagaatatggaaggtaatgtcccagggtgtgaaccgagggtggcagtatagaaaggatcctaggaaaaataggggagtaatatcacccgcctctcgccccctggatattacggtccacatcgcaggggggcgggcgacccaagcgatgcggggagtcataacaccccccacctcccccctggatattacgatccacatctcaggggggcgggcgcccccgccccatgcggggagtaatatcaccctcctctccccccaggatatgacaatccacaacgcagggcgataggcgccccccgcgacgcggggagtcatrtcacccccctctcgccccctggatatgacgatccacatcgcaggagtgtgaggcaccccccgcgatgcggggagtaagagacagcccctcttcccccctggatatgaagatccacatagcagggggggtgaggcaccccccgtgatgcggggagtaagagccag

SEQ ID NO: 202831 - DNA, 419 bp, Homo sapiens
caaagcatttttttgatatcaaaaattgtgagtgaattaataaygaagcagtgacaaaaccaccagcaaataaacaaatgaaggggcatcattttatacaatattctttgaacattcagataaataaataaacagggagtagatgactcagaaaggaggaacacggaaaaaaagaggtctcacatccaactactgtgtatcccagaaagcaggactggcagatcagcaagatcctgagaatactcggtaatgaccacagatttcgtgacaataaaacagagagggtatctattatttcctttttcagattaagaaataatggaaatagtttctaggaagaaactagtgaattaaaaaataaacagcacatcagattccaaaaaatatgtgtaaaggatcaataaacattcaatgaattc

SEQ ID NO: 202832 - DNA, 442 bp, Homo sapiens
agtcatgataaggattgtgaaagagaatttgtgaaagaaatttgctgtatgacttagttggcaataattaatagaaattataacagcctgtaaatattgagatttcacattaaaaatattgtaaccccagcactttgggaggccaaggtgggcggatcacctaaggtcaggagtttgagaccagcctgaacaacatggagaaaccccatctccactaaaaatacaaaattagccagatgtggtggygcatgtctaatcccagctactcaggaggctgaggcagaggaatcgcttgaacccaggaggcagaggttgtggtgagctgagatcgtgccattgcactccaaaactgtatgacatttctaaaattttgaatattttgtgatgttatcagattatgattattatattcaattattatgattatgattaaaaatgtttg

SEQ ID NO: 202833 - DNA, 561 bp, Homo sapiens
attatgctggtgtttaagactctcaggggtgggagctggtgcaatggatcatttatgctgagaatctgtagttttttacaggccaaagttaaaaactagttgagaactgggctgaaaggatgccagccagggtttagactaggagagcttttgtcaatatgtactgcactcagtgcactcaaatatattgctacctttgttcttattcttatgcaatcaatttcaatttaaagtttctcaaatcttatcaacgtatattgctccaaaaattctaagactagctaccttaagtaaataacaaataagactggaggttttcaatataaagagataatttttcttttttttttttgaagtatcaktgttatactgtgagatttatgatttatttttatggttgtttagtttgtatatataaactggatttaaaatatgctcctttgtgttttatagtattttcaagattgaatagattcataaatgaatggaaacaaaatgtttccaaatagtgtattttgtatttcaaaataatcaatcctattcaaatatagttgcatctca

SEQ ID NO: 202834 - DNA, 561 bp, Homo sapiens
attatgctggtgtttaagactctcaggggtgggagctggtgcaatggatcatttatgctgagaatctgtagttttttacaggccaaagttaaaaactagttgagaactgggctgaaaggatgccagccagggtttagactaggagagcttttgtcaatatgtactgcactcagtgcactcaaatatattgctacctttgttcttattcttatgcaatcaatttcaatttaaagtttctcaaatcttatcaacgtatattgctccaaaaattctaagactagctaccttaagtaaataacaaataagactggaggttttcaatataaagagataatttttcttttttttttttgaagtatcagtgttatactgtgagatttatgatttatttttatggttgtttagtttgtatatataaactggatttaaaatatgctcctttgtgttttatagtawtttcaagattgaatagattcataaatgaatggaaacaaaatgtttccaaatagtgtattttgtatttcaaaataatcaatcctattcaaatatagttgcatctca

SEQ ID NO: 202835 - DNA, 382 bp, Homo sapiens
gtcattaactggtgtacgaataaagtagccaaaggtttttctgatttttgaatagaaaccttttgccttcagagacttttctcttamccatttcaattggattttcttttacttcaattagacaacaagcagacaacaacacaactacctttatactagtgaagagtaatcatttctatatgagtaataatgcaacatgaaaaatcccacaaaatattgtttaataaactaagtcttgtggatgtgtgtgaaaaagctagccagaaatattcttttttctaattctgtagtagaagaatttaatgtgatgactttaggtgtgtgtgcatgtgcctacatgtgtgaacaagtatacatgggtgtactgtgtgtgtgtatcacg

SEQ ID NO: 202836 - DNA, 538 bp, Homo sapiens
taatatacatttaagcttcttccatgtcttttcatagcacaatcatagcttaccacggcctcgatctccagggtccaagcagtctttccagcttagcttcctgagcagctgagactacaggctcatgccaccacacctggctaattttctttagttttttgtagagacagggtctcactatggtgtccaggtaggtctggaacycttggcctcaagtgatccttctaccttggccacccaaagtgctgggattataggcatgaaccatggtgcccaatcaggtcatttctttttagtgctaaataatattccattgtctggatgtaccacagtttatttatccattcacctactgaaggacatcttagtttcttctaagttttggtaactaagaataaggctgctgtaaacatcatgtgcagggtttctttgtgtggaaataagttttcaactcctttgaataaataacaaggagtgcaatttttggatcatatggtaagactatgtttagttctgtagaaaaccaccaaactctctc

SEQ ID NO: 202837 - DNA, 538 bp, Homo sapiens
taatatacatttaagcttcttccatgtcttttcatagcacaatcatagcttaccacggcctcgatctccagggtccaagcagtctttccagcttagcttcctgagcagctgagactacaggctcatgccaccacacctggctaattttctttagttttttgtagagacagggtctcactatggtgtccaggtaggtctggaacccttggcctcaagtgatccttctaccttggccacccaaagtgctgggattataggcatgaaccatggtgcccaatcaggtcatttctttttagtgctaaataatattccrttgtctggatgtaccacagtttatttatccattcacctactgaaggacatcttagtttcttctaagttttggtaactaagaataaggctgctgtaaacatcatgtgcagggtttctttgtgtggaaataagttttcaactcctttgaataaataacaaggagtgcaatttttggatcatatggtaagactatgtttagttctgtagaaaaccaccaaactctctc

SEQ ID NO: 202838 - DNA, 594 bp, Homo sapiens
tatctgtgcctcagttttatcagatataaaatggggatatttcttacttcattggactgtttgaggatgaaattagatcacatacaaatacttagtacaccaccagaacacataataatgctgaataaatgctccctattatcttatgaactttggatcatgagtttattcattgtttttwtctttctttctttttttttttttagatggagttttgctcttgtcgccccaggctggagtgcaatggcacgatctcagctcctccgcctcccaggttcaagtgattctcctgtctcagcctcccaagtagctgggactacaggcgtgtgccaccacgcccggctaatttttgtatttttagtagagacggggtttcaccatcttggccaggctggtctcaaactcctgacctcatgattcacccgcctgggcctcccaaagtgctgggattacaggcgtgagccaccacacccggcctgtttttttcttttgagaataataaccttctttagcctcagcatatatatagtcactgaaataccaatgtggccagcaagtttctgcatccagactgatatttgcctacatgtcatt

SEQ ID NO: 202839 - DNA, 594 bp, Homo sapiens
tatctgtgcctcagttttatcagatataaaatggggatatttcttacttcattggactgtttgaggatgaaattagatcacatacaaatacttagtacaccaccagaacacataataatgctgaataaatgctccctattatcttatgaactttggatcatgagtttattcattgtttttttctttctttctttttttttttttagatggagttttgctcttgtcgccccaggctggagtgcaatggcacgatctcagctcctccgcctcccaggttcaagygattctcctgtctcagcctcccaagtagctgggactacaggcgtgtgccaccacgcccggctaatttttgtatttttagtagagacggggtttcaccatcttggccaggctggtctcaaactcctgacctcatgattcacccgcctgggcctcccaaagtgctgggattacaggcgtgagccaccacacccggcctgtttttttcttttgagaataataaccttctttagcctcagcatatatatagtcactgaaataccaatgtggccagcaagtttctgcatccagactgatatttgcctacatgtcatt

SEQ ID NO: 202840 - DNA, 453 bp, Homo sapiens
ttcgttgccagtagacctgccttgtaagaaatgttaaaggaaattctttagagataargaaaatgatataggttagaaactcagatctacataaagaaaggaagaataatgaagaaaaaataagtgaagataaaataaaaactcttatttctcatatttttacttcagctaaaaggtaatagtttgtttaaaataatagcaacaatgtattaaattatatatgtgtatgtatatatattatatatatatgcttgtatatgcttagccataagtgaaatgaatgatgccaatgttacaagggatgaaagggaggaattaaaattattttattattattttttcttcttttttttcttttttcttttactttaagttctggggtacatgtgcagaacatgcaggtttgttacataagtatacatgtgccatggtggtttgctgcacctatcaacc

SEQ ID NO: 202841 - DNA, 453 bp, Homo sapiens
ttcgttgccagtagacctgccttgtaagaaatgttaaaggaaattctttagagataaggaaaatgatataggttagaaactcagatctacataaagaaaggaagaataatgaagaaaaaataagtgaagataaaataaaaactcttatttctcatatttttacttcagctaaaaggtaatagtttgtttaaaataatagcaacaatgtattaaattatatatgtgtatgtatatatattatatatatatgcttgtatatgcttagccataagtgaaatgaatgatgccaatgttacaagggatgaaagggaggaattaaaattattttattattattttttcttcttktttttcttttttcttttactttaagttctggggtacatgtgcagaacatgcaggtttgttacataagtatacatgtgccatggtggtttgctgcacctatcaacc

SEQ ID NO: 202842 - DNA, 491 bp, Homo sapiens
agattagggttataacagacttcccgtgagcctccccttctgcctaatagaaagaagacaagctggtgaatgctgaggaatatgggacacattcatgaccctcagtgtcctaaagtctctcttgctccctaccgggggccatgggagatccagctatgcctgagttattccccttttgaagaaagcatacatgtaccctacaggtaagagctgaaacttccgcaagcaagcagccttgcagtttatctggcactcctcctttgccgggtactatctctcctctccttacaccagtccagaagattgtcccagtggcttcgcctgccacctacatgggccaatggtagcaggcccacaaacaagcattaaacagrgatatgagtgagtctcctgagggcaaatgtggtggtgctaccttagaggtggactccgtgggtggctcaggaacttgtcccatgcttgagtgcttagtgctctcctgctcctcatat

SEQ ID NO: 202843 - DNA, 484 bp, Homo sapiens
tcaacctgccaaagccctgctgccccttcagcctgatgaactgaaacacagaggccagcatccctgctcctgctccacttttgggcccgcctggatgtgcccccaagtttatcatttccatctggggtgatcctcgcctggatccaggctgtcctgacatgtcaaggctgccatctgagaatgatggcacatttctcagaatgattttcacagatatttgacccttaccgggtaagaaattggagccagaagctaggatgkcagggtttgcttggttgtgaggagcaaaattggcaaaaggaagatctggggcagaaccaatgaggtggggagggctccagggaccagataggcaggtgattggagacccggccctcgctgtgctactacttagtcaggtcactttgagtatctttgatcaccgctctgtgagtttcagcttcctaattgtgcactaagaagaccaaagcataacaggtcggat

SEQ ID NO: 202844 - DNA, 509 bp, Homo sapiens
agcctccccctccttcttttatacacttcctacattattgatatcctatttgataaatgtattttttccttattgacaaatatgctattgagaagttgtatgaaatctctgaagacattaggacctgtgtcttcatgacttgagccataagtcattcagctctctggatctgatccaccacattacatagcacatataagtcttttgatagccgcatactttgagcccaagctaaggaatcatttgtccttgctgtatagcaaaccaccctaaaacttagaggcttaaaacaacaacaactccttatttatcctgattctgtgggttggctgagtgcttcctctgctggtttcatccaggttcactcatgarggtgagttggctggaggataggctaatctgcaaagtccaagatggcctcattcatatgtctggcagttggtgcttgctgttcacaggggcatcttgttttgcttttgtgtgctctctcatcttctaggaggctagac

SEQ ID NO: 202845 - DNA, 549 bp, Homo sapiens
agggtaaatcagggtgctaagtatgatataacaaggaatcttatagacctaaattgggaggttccctaaggaatggccacaaagacccaactccaagcaataagctttytaagcctggcaaacacgacatacaacaatgggtgactggtttctgaattctgaggtattcgtgttttagagaaaattgtttcacaaaggtaacaccaactatgcaaagtactttatctagtctagagaaagtctgaggttaaatgattatttataagttattaacacacttctggagagaaacagccttagttaaattccttttatctactaatgtcgaatttagaaaatactgattctttaatataaggtatccatagataactattttttttctaaaggtatgtcagcaatatttgcatcttcaaggaacacactatctactacacacacacacacacacacacacaacactcacacacatgtacagtcaagccttatttgtggattgcatatctgtgaaattgcctactcactaaaatttacctgtaactccaaaat

SEQ ID NO: 202846 - DNA, 549 bp, Homo sapiens
agggtaaatcagggtgctaagtatgatataacaaggaatcttatagacctaaattgggaggttccctaaggaatggccacaaagacccaactccaagcaataagctttctaagcctggcaaacacgacatacaacaatrggtgactggtttctgaattctgaggtattcgtgttttagagaaaattgtttcacaaaggtaacaccaactatgcaaagtactttatctagtctagagaaagtctgaggttaaatgattatttataagttattaacacacttctggagagaaacagccttagttaaattccttttatctactaatgtcgaatttagaaaatactgattctttaatataaggtatccatagataactattttttttctaaaggtatgtcagcaatatttgcatcttcaaggaacacactatctactacacacacacacacacacacacacaacactcacacacatgtacagtcaagccttatttgtggattgcatatctgtgaaattgcctactcactaaaatttacctgtaactccaaaat

SEQ ID NO: 202847 - DNA, 393 bp, Homo sapiens
atattgattgtatcataggtagcaaccaacccaagacagaattggagtttagtctcagtgtgtggaacttgtatgtgttagctggttggggggtrgtagttgggacagccatttcctgccttgtaaactgagaagcagggagagaagttctgaagagagagagacagagagagagagagataacaagagagatcatgaggagtgcagtgatgagagaggtggagtgttgtgatgagtttctaattccccttctctgtgtctttgtaaggctgcagaactctatgggatatcatcactgtagcctcataaaaaaattttgttaattttcttgcatttagtcagtttctgctacttgcaatgaaaggttttttaactaacaccagtttttgtgta

SEQ ID NO: 202848 - DNA, 575 bp, Homo sapiens
ccattgtatacctttccagttaatctgcagtggtccccagataaaacttttctgtaaacccacttgtagtgtttctccaagtttgatccaaagacccccttttcctatgaatctgcttgtcagaggagaggttccaaagtcctgctccctgttgaattaggctcctctctgaaggtagatccaggaatctgcattttaaacagtgcctcagataattcttaaactctgttgaatctggaaaccaatggattaaggaattgataggacctaaaattctgtgattggtcctgggaaaatgaatatgctccattcrtatttctgattctgagatcacattccctcaatctttattagctggggtacctgagcaaatgtctttttcttcatgccttcttgactcaactattacaggctcactacttaggctttttttttcttcccttctcaatttgggttcttaattagataggattagcaggtttttgcatacaaaactcggcattttcttctggcaggattcaactgtgcaactatacttgtgacaacagagaaagttagtttgcaggttccctggc

SEQ ID NO: 202849 - DNA, 350 bp, Homo sapiens
cctcagggcctactgacttcttagcctggcactcctcaatgccaacattagactccttaatctggctctctcgtaacctcaaattactttttcctttgccattcattaccattcccatcacactacacctcttccaaaacatttcccttcatggttctcgtcaaaaactattttctccatgaagctttttmtgagttcttacttttcacaccccaatttgttgtgatctctagctctttatctatgtctatatctagatcaggaatcagcaaactatagcactcaagccaaatctagcctatctcccatttctgtactgcttgtcagctgaggatgattgctgtattttt

SEQ ID NO: 202850 - DNA, 605 bp, Homo sapiens
atacccattgatttacatattgtctatgggtgcttttggctacaactggtagagtccagtatagcccacagagactaatttacttactaactggctttttatggaaaaagtttgacaaaccttgatctatattcatctttacatttatatctacgtataatttttgaaatacccataacactttgtttacatctctatcattgtcacttagctaaatttacttaacagttgcttgtttacttatctttttgactacccgataaactgtaagcaacttgagagcatacatattaaattttttattagtctttatttcccttgctagctagcacttagcacaagaccttgcacatataaggcattcactaaatatctttattgaagtgataacatatgatttgttatgcaaaatcacttcagtcttaactttgatatgaattatagcacattatgatatatacctttatatatacccagagacacacacagtacacatatatgtgyatagttatttatacctacatataaatatttatatgtgcacatagtgtttacaaacagaagcttgcaacttctatgagataaaattgatatgatagcatgga

SEQ ID NO: 202851 - DNA, 476 bp, Homo sapiens
caccagtagttctttgttaagggtgtcctctcactgctgaaactcactctgccacctgttcaacaggttggaagcttctggaattaatgtctctaggagcagctctcaagcaatatctgaagagtgttggygtataaatacttagctcccttaccccttgggtaggataactttaaggcagaatagcttgtctgggcttcaagagctttccctgtgggattatgcttcagttgcttcctggaactgaaagctgtcttgataacatgctcttccaaaataaactttctttcattctttcacttaatcattctcctacctttactctctaacaaattactcaaccttaaaagcttgtctcagtgtctatatctcaggtaacccaagctaagtcaaatttgaatagcaacagtttggggacagagaatgtcaggtagagaaagcagtatgaaaatagaggcagaggtagaaaaacaaag

SEQ ID NO: 202852 - DNA, 613 bp, Homo sapiens
ttagtgttgcttattttgtcagatatcagattaagcagtcattagttcaatcaaattacttaatactattacttcatgtaaaatgttccataacttttctgtacatatcaaagtgtataatttataccaaaatcattacttgccaattgccaatatttggggagcttagtaggaaatgccgtctagtctagccagctagaatgaaatttcttttcttccttctgtagggattcctcttcctcagccactgtcataaactttgtcaaacttttagactaaatagatatacaatatatactaatggtctggaataaattactctgtatgttgtaatattcaartgcccaactgctctgaaacttactgcctagacacataatgataagtttcaacataatgttgaaaagatgaaagaaaagttagcaaaatgatgtacaaaagaaaattaaactaaaagttgaagaaagcaacagagaataaggtaaattcttgaaataatgaaaaagcttgatggtaactttcaaagaaagctggcagtcactggttgggggcgctcactctgtctctctctcttcccattttcttactttctaccatttgaaattttgaggat

SEQ ID NO: 202853 - DNA, 500 bp, Homo sapiens
ttccctcttctcagtgtggcagaggaaaaggaagataactgactttcgttaagtgtggctcagacatagcaagagaaccactgaacccgaagtgattgtgcttactggaataaggcatatctccatggtgacccaagtggactaacagctgcagtccagatgggacaatgtcacagccattgtgaacagagatcactgtggataaggtaaggcaatggatgtcttcaaagatgcctataagggcaaaagatattgaagaccagatttgcctaccgccacctctgcccatgcagagtcaaccatatgcaaratctgaacattaaataatttataaagacagacggtgtatctgttaagctctataaaaaactgacatgtataagtaatcaaaacctattatccagatgaataatgttcaagtgactgtttctaatgcataaacttttctttcatattgatgatcacaaatttctgtgagtgatctctttcaaaaatgaagc

SEQ ID NO: 202854 - DNA, 500 bp, Homo sapiens
ttccctcttctcagtgtggcagaggaaaaggaagataactgactttcgttaagtgtggctcagacatagcaagagaaccactgaacccgaagtgattgtgcttactggaataaggcatatctccatggtgacccaagtggactaacagctgcagtccagatgggacaatgtcacagccattgtgaacagagatcactgtggataaggtaaggcaatggatgtcttcaaagatgcctataagggcaaaagatattgaagaccagatttgcctaccgccacctctgcccatgcagagtcaaccatatgcaaaatctgaacattaaataatttataaagacagayggtgtatctgttaagctctataaaaaactgacatgtataagtaatcaaaacctattatccagatgaataatgttcaagtgactgtttctaatgcataaacttttctttcatattgatgatcacaaatttctgtgagtgatctctttcaaaaatgaagc

SEQ ID NO: 202855 - DNA, 439 bp, Homo sapiens
acacaggaataactcaactgcataatcgtggaagaatttttagtttgtatggctaaggtgtttcaatgggacaatgcctggggtattgcctgtaatttacttattgcctgtaattcatttatttatttttaattaaaatttaaaaaatagatttagggggtacagtgcagttgtgttacgtggatatattgcgtagtggtggagtctgggcttttagtgtaaccatcacccaaatagtgtacatcgtagatattaagtaattttcatcccttatcctcctcctaccctctcatctctctgagtctccgatrtctattatttcacactctacgtctatgtgtatacattatttagctcccacttataagtgagaacctatggtatttgactttctttttctttaattccacttaaaatagtgacttccagttccatccat

SEQ ID NO: 202856 - DNA, 571 bp, Homo sapiens
acagagttgaattgcatgaattgcttccctgtgatccctggggaaggaaacagttcgtggtcatttgaaatctctagttaagcatagaaaaagggcaaacctgaagggtcttgctacatcatagaaaaaaagaatttcaaattttgtgaaatgttagccaaccatttgagagatgataatgggataagggtggggggttaagtaaatactaattcacccccatttttttaagtactgtatttcatttctgtcaaatttaatgaagataaaaaagtttttgcttatacaaatttcatccattccagtaaacatgtcaggtgcgtggaagttaagatggaaaatcttatagattygcatttggctgctctcttatagctcaatatttaattactttcgtttgttcttttttttttttttttttttttttgaaacggagtcttgctctgtcgcccaggctggagtgcagtggcatgatcttggctcactgcaaggtctgcctcctggtttcacgccattctcctgcctcagcctccaaagtagctgggactacaggcgcccaccatcacgccct

SEQ ID NO: 202857 - DNA, 571 bp, Homo sapiens
acagagttgaattgcatgaattgcttccctgtgatccctggggaaggaaacagttcgtggtcatttgaaatctctagttaagcatagaaaaagggcaaacctgaagggtcttgctacatcatagaaaaaaagaatttcaaattttgtgaaatgttagccaaccatttgagagatgataatgggataagggtggggggttaagtaaatactaattcacccccatttttttaagtactgtatttcatttctgtcaaatttaatgaagataaaaaagtttttgcttatacaaatttcatccattccagtaaacatgtcaggtgcgtggaagttaagatggaaaatcttatagatttgcatttggctgctctcttatagctcaatatttaattactttcgtttgttcttttttttttttttttttttttttgaracggagtcttgctctgtcgcccaggctggagtgcagtggcatgatcttggctcactgcaaggtctgcctcctggtttcacgccattctcctgcctcagcctccaaagtagctgggactacaggcgcccaccatcacgccct

SEQ ID NO: 202858 - DNA, 571 bp, Homo sapiens
acagagttgaattgcatgaattgcttccctgtgatccctggggaaggaaacagttcgtggtcatttgaaatctctagttaagcatagaaaaagggcaaacctgaagggtcttgctacatcatagaaaaaaagaatttcaaattttgtgaaatgttagccaaccatttgagagatgataatgggataagggtggggggttaagtaaatactaattcacccccatttttttaagtactgtatttcatttctgtcaaatttaatgaagataaaaaagtttttgcttatacaaatttcatccattccagtaaacatgtcaggtgcgtggaagttaagatggaaaatcttatagatttgcatttggctgctctcttatagctcaatatttaattactttcgtttgttcttttttttttttttttttttttttgaaacggagtcttgctctgtcgcccaggctggagtgcagtggcatgatcttggctcactgcaaggtctgcctcctggtttcacgccattctcctgcctcagcctccaragtagctgggactacaggcgcccaccatcacgccct

SEQ ID NO: 202859 - DNA, 393 bp, Homo sapiens
gcataactaaactaggcatgaacttttgggtggtaaagttacaaagaaaataaagacttgattaccgtaaagatcaggactgtgattacttttgaaaagagggaagggactgtgattaggatagatggatggaaaaattatattttttaaacctagctatggttataagggtatttggtttattttatatagtcttctatatctgttagattttacaataaaaagttttttttaaacactgagaaaaaaagagcaggttctctgatacaagacaaggatgctctcactcaccacttctattcaacatcgtgttggaagtctaagctagagcaatcagrcaagagaaagaaataaagcacatccaaataggaagagaggaagtcaaactatccc

SEQ ID NO: 202860 - DNA, 609 bp, Homo sapiens
tattttataaacgctgataacactatgttccagacattcttttaagtgctttacagctttacaaatattagtttatttaaaacctcttaacagctacatgaggcagatactatattatcattcccatttataattgagaaactgagacagaggcttaaagtaactttcctaaattcatasacctggtaagtgatagagaaaggatttgaaaccaggcagtctaactgcagaatccatgctttaggcactgttttagaatgtatctcattcattcatacattcatgcatttatccatttagcaaacatttattaagtgcttatcgtatcaaatactgtaatagagaagaaagaaatgtataaaaaataagtggagaaatgttttataggttacatcacaggtcagggttaaagtaaagacactaaggagtgagcggtcaagtctaaacaagaaaggcagagaagaaatttaaaatagatgagtcttgaaatatgtgtgggcagttacctgggaaacagaacactgcattttaagggcaagagcattttaaaatagagggagggctgataacaaaggcatggaggcatgaataaactggtatgtttgagcc

SEQ ID NO: 202861 - DNA, 592 bp, Homo sapiens
gaacctccataacctagaatataaaaaattaataaaatgttatatatctcatgaatgcataaaacatatgtagatatgagtctattttgtgatttactaccataaagtatacacaaatctattatacagagttaaaatttatcaaaacttgcacacatgcttacagactgtrcagggttccatttgcagtcaggtgaaatgtaaacaaacataaagttgcagtattaaaacataactgaataaaattaactgtagtaatgctgtactgctgtaataatttcatagtcacctcctgttgctattgcagtgagctcaagtgttgcaagtatctgcttaaaatgccatgtgatgctaatcatctctgcacgagcagttcatctcatctctccagtaaattgcttatcacagtaaaaggtaatctctcgtggttcttgagtatttcttattgtgtttagtgcaataccataaaccttgaattacaccatgagacccattcaaagtgcctctagtgatgctggaggtgctcccaagaagcagataggcatgacattacaagaaaaagttgaattgcttgatatgtaccatggattga

SEQ ID NO: 202862 - DNA, 592 bp, Homo sapiens
gaacctccataacctagaatataaaaaattaataaaatgttatatatctcatgaatgcataaaacatatgtagatatgagtctattttgtgatttactaccataaagtatacacaaatctattatacagagttaaaatttatcaaaacttgcacacatgcttacagactgtacagggttccatttgcagtcaggtgaaatgtaaacaaacataaagttgcagtattaaaacataactgaataaaattaactgtagtaatgctgtactgctgtaataatttcatagtcacctcctgttgctattgcagtgagctcaagtgttgcaagtatctgcttaaaatgccatgtgatgctaatcatctctgcacgarcagttcatctcatctctccagtaaattgcttatcacagtaaaaggtaatctctcgtggttcttgagtatttcttattgtgtttagtgcaataccataaaccttgaattacaccatgagacccattcaaagtgcctctagtgatgctggaggtgctcccaagaagcagataggcatgacattacaagaaaaagttgaattgcttgatatgtaccatggattga

SEQ ID NO: 202863 - DNA, 508 bp, Homo sapiens
ctgttttataactcagtgatttttgtactggtcccccttttaaagagtttcttccctttgtctggtattatttagaaatttaaatattcctaagatgtaacttattagacacataacacattttttttgtaaatgaattatcgtggcagtcacagagagctgaagaatacaaagcatcttgctgtcagggaagaacagacaagaaaagggagaaaataaggtttagaaaaggtgactgtcccagacaggagtgaaaactgtattcccttctcaaatatcctaaggttattcattcagtcccacatacctgaaccctgaattgcttggagtgtttgttcctcaagcactgtatttgttttgaaatttcattctaagtcacggaaagtttgggataatgaagctggagctgagatcaaagtttgaaaatttttattcataaaatggaaactaaagagagcctgttggtagcagattctatgygagaatggaaggtctctaagagccagac

SEQ ID NO: 202864 - DNA, 553 bp, Homo sapiens
ttttgttcctaattttctccaactgagagcagtttcaacatacctttgcacaccaaaccaaacagacaaaaaataaaaagtacccccacacaaattcagtttcagaaatattgatgaataatatgcatttcttagcaaggttttgtgagacaagaaaggatgttcatggcatagcaaagcttctcatttagttcccttgaaatattttagctctttcccaagggctctttctcaacagcagttgcttcatctcttaccctctttttctacaatccttaacttcacccttaccactgcctcacccccatcttccacaataaatctttatttctgtaagtttagctttcccttatttcctgtcatcaatagagcaccactcactatctcatcaaaacaaagatccagttcagaagctacctgccaaagaatggtgaaggttgaaaggagagggaagactgtaaagagtaaacaaatgctttcctgcaaaataaacatgttaataacatattcaggrtaatgtaagctatgagtggaatctcaacattgaaaaatt

SEQ ID NO: 202865 - DNA, 586 bp, Homo sapiens
ctatgcatatagttttgtaggaataccataacaaaatatcaaaagctgggtggtttatacagcagaaatgtattttctcacagtcctggaggctggagggctgcgaccaggtagcagcagggtggcttcttctgtggcctctctccttggccacctcttgcagtgttgtcacgtggttttttcctctgcacatgtatccctggcatctctctatgtatccagatgtccyttttttgcaagtacaccagttagattggatttgggatccaccctaatggccccattttaacttaatcatctttttaaagactctccaaatacagtcagtctgaggtactggaagttagagctttaacatatgaattttgagagtacacaattcaacccctaacgctatatcatgaattaaataatataggagaatataatagaataatcatggactttaggggaaattatattagaaacagattcctggttgatccagaagtagatgcatcccatggtggtttttaatccaatgggggtctttgccactggctaagtcatttaagaatatgctgagtgtcttcttcaggccagatat

SEQ ID NO: 202866 - DNA, 392 bp, Homo sapiens
acccaattttttaaaaattttatttaaattgttttaaatttaaatgtagacagcyaacatgactcatgactactgtatttgacagtgtagatttagaaagggttttttatcttttttcttcatctatactgtccacatgcataatacactccaatcagatacatttttcattacatgtgagatgtgtagcacgatgtttaagtggaaatttggctatgaatatatggcaacaagtattagaaaccaaaatgagttgcaaaatagatcaccaagtcagggttcttcagaaaaacagaaccaataggatgtgtgtgtggatagagacagagccagcaagctggagttgcaggagagctgaaggtggagcgcctgtccaagagccggcaggctca

SEQ ID NO: 202867 - DNA, 548 bp, Homo sapiens
caaggactgaatcatatacttggtaagactaggaatgatgagaacattgtattcttcaaacaaagtaacagctagacagacaggcaaaagaacraagaatctggcctccaagtaatccttaattataaccctgcaacctaaaaggacaagaatataaagtgggtcaagaagaaatacatgaattatataagtaaagaaaactgaaacacatctccaggcacaaagcaagctagctgtaatttactactataaaattcaagaattttgtaccctagcttatgccattaatccataaagataccaaagccttcaatataaaatgatactagaagctgtaatttaattaaggctgaggtactgtagttattaattacatgtgaaatagtaaatatttaaaatatttgaaaattgctcatatttcttaaaattgagtaatatgctataaatctcaaaaggcagggtaattgcagtctccgtggcaagtctgtttgtacagcaaaacctgtatagcatctctggagaactaaggtataatctgcagctgtgta

SEQ ID NO: 202868 - DNA, 548 bp, Homo sapiens
caaggactgaatcatatacttggtaagactaggaatgatgagaacattgtattcttcaaacaaagtaacagctagacagacaggcaaaagaacgaagaatctggcctccaagtaatccttaattataaccctgcaacctaaaaggacaagaatataaagtgggtcaagaagaaatacatgaattatataagtaaagaaaactgaaacacatctccaggcacaaagcaagctagctgtaatttactactataaaattcaagaattttgtaccctagcttatgccattaatccataaagataccaaagccttcaatataaaatgatactagaagctgtaatttaattaaggctgaggtacwgtagttattaattacatgtgaaatagtaaatatttaaaatatttgaaaattgctcatatttcttaaaattgagtaatatgctataaatctcaaaaggcagggtaattgcagtctccgtggcaagtctgtttgtacagcaaaacctgtatagcatctctggagaactaaggtataatctgcagctgtgta

SEQ ID NO: 202869 - DNA, 423 bp, Homo sapiens
ttggaacaatgaggactctgttcttcatgaatggaccttgagattgttttacaggtaaaaggagggaactcagctcattacaaagacttcattcaagggcaggatgtggctggaagagcagcctctctaagaacatggcttgaaaggaaatctgtgaggaagtaagagaaaatgactcacaagccagccacatgcacatcaatgcacgttagcaggatggcagatgtcacagggaggtagagtgcccttggtgccttttggatcccaatattttaatttttaccccttattgttatatagtaatatccctaaccctgcrtgtggcacaattgctttaataaaaacagttataatgagtggataaagaaaatgtggtatatatacaccatggaacactactcagccattaaaaggaacaacata

SEQ ID NO: 202870 - DNA, 203 bp, Homo sapiens
atcctcacccagagacaccaggtttccatagttctctaacatcgcatccctrtgcaaatgctgctgagcagagtccaggcactcccactcttctggggagaattctatggccacatccctgaatggcaacactccctgaaaaacaaaacatatttagcaaatggtcataggaagaattctcaattttacattaggtaaacaga

SEQ ID NO: 202871 - DNA, 203 bp, Homo sapiens
atcctcacccagagacaccaggtttccatagttctctaacatcgcatccctgtgcaaatgctgctgagcagagtccaggcaytcccactcttctggggagaattctatggccacatccctgaatggcaacactccctgaaaaacaaaacatatttagcaaatggtcataggaagaattctcaattttacattaggtaaacaga

SEQ ID NO: 202872 - DNA, 203 bp, Homo sapiens
atcctcacccagagacaccaggtttccatagttctctaacatcgcatccctgtgcaaatgctgctgagcagagtccaggcactcccactcttctggggagaattctayggccacatccctgaatggcaacactccctgaaaaacaaaacatatttagcaaatggtcataggaagaattctcaattttacattaggtaaacaga

SEQ ID NO: 202873 - DNA, 203 bp, Homo sapiens
atcctcacccagagacaccaggtttccatagttctctaacatcgcatccctgtgcaaatgctgctgagcagagtccaggcactcccactcttctggggagaattctatrgccacatccctgaatggcaacactccctgaaaaacaaaacatatttagcaaatggtcataggaagaattctcaattttacattaggtaaacaga

SEQ ID NO: 202874 - DNA, 411 bp, Homo sapiens
ctgcccctactttggttatgacatctttttttccttgttttttttttttttccagtttcaaataggtttttttttttttaraaaaaaaactttaaaacggaatcaaaagaacaaaaatcagttatctgtcctcttccttcctcacaggtttgaaactatggttaggtggtgaggaaggcaggctcagcacccaagccttggggagacgcagaaagggcccatcccaggcactcaggtggaggtaagcatagcctttgggccataagacctcatggccactggggtgctggtctggaaacaagtcctcatcttcccagaaatgtcatcttttgtctgcagcagctggctggagaaagatttcagaaaggtgtgtgcctggggcacccaaaggcatgaccttcctttctcctt

SEQ ID NO: 202875 - DNA, 610 bp, Homo sapiens
attattgtgatatataatcaagtatcaggctggaagaagacaatgtatgttaccacttgcaagtgaaaaaatatttgcatttttgcctaagaattattctgaaaaaaaaaagtccatttattaaacctccacaatccttcagttctcaaatgtgtcctaaatattaactcattttaattaatatataattattttattcattcaatagccatttttcattccaactatttttcaggcttattaagatatacattattttccatttccaaacacaggttggttaccagttataaatacggactcttttttttgagatggaatttcgctcttgttgcccaggttggagtgcaatggcacgatctcggctcactgcaccctcagcctcccgggttcaagcaattctcctgtctcagcctctggagttgctaggattacaggcatgtgccaccatccccagctaaytttatatttttagtagagacagggtttctccatgttggtcaggctggtctcgaactcccgacttcaggtaatctgcccgccttggcctcccaaagtgctgggattatggtcatgagccaccgtgcctggccaaatgtggacattctca

SEQ ID NO: 202876 - DNA, 414 bp, Homo sapiens
tttattgttttctcctctccattcattacaaatgcatggattatttttaggcaagcagcataggctattgccgaggttgataaatcatattgctcagtagcactgggcaagatttgctgcctagcttactgacctcccaattgtatcactttttctgatatcctgagttaggagattttaaatcttgcaatcccaaycttttcactcattaagatgttgctcattcaattttatattaactttccacagtgtttatattccctgccagttgtataaacaaagaggatgttttggagaccttgaggagtttgacattattaacaatttaaaaaatttcctggatcagacaaatttggaaaaaaggaagaacaaagaaatgaatgcttttaacatgttagcggtagtcagagccac

SEQ ID NO: 202877 - DNA, 333 bp, Homo sapiens
aacaatgaacaaatgaaagtttggaatggttttagtggcaaattatttccctttcttgcagatagaacttggacaggcagctgcttaagggtcaggcgttacmtgtggttcacttttctgacaatctactaaacaagtttttcttctcttcttatcaatgcatcctgtgccagtacaaacctatttcttgggtccttgggcataatgtactacagttgacactcatcagttaagcaaaaatattaatattatatactgggtagaatgctcaaatattagtgttatgcatacgttaaatattataaactcagtattataatctccatttcacac

SEQ ID NO: 202878 - DNA, 431 bp, Homo sapiens
aaacacctttagaatcagaatattgtttcctctgtcactttctcacttaactctgtcaccttctatctgatgttgaagctttgcaggtggtttagttgccctaatatcactgcttcatctccagcactacagtattttctatctcagacatgtttgaattgcatcaccctgctactaaaaaaagtgcaatgactgaccactgcctacaataaagtaatactcctkagtatgtcatttaaagctgctcaaaattggccccaaattatttttctggcatcatctgtgccactctttccagccccacccccagacaccctatattagaccactctgaatcacttactcttctccaaatatactatgcacactggtatctcctagctttggctcatgttgttccttctgttcaaatttccttttctccctttttt

SEQ ID NO: 202879 - DNA, 537 bp, Homo sapiens
ccaaaatccatcaagaggatgatttagcagtggcaattctaatttcatttggcagacttgaatcatggaaatagttgtgatctgggtatttggagtacagtctcagccacttgatagccataagcattggtccttttttataccataattttttcatacaaaagattgagctaatccatctgctcttcctacctatagggattagttgagaatgagataaaatctaagagttttaaaattactattacggtaactcttcctcagcaaagtctacatgagctggatctcttttggacctgggtgccaggtttgaaatgaagcatccttgctgaggagaggtaaaatatagaggctaagagccaaaccyctcacataaagctaaaatgtggccaggtcaggcaaaccgcagttagttgtttatatccataggaaggcagaggcccaaagctggggtacaaaacttgtccatggccacatcagacagcataagggcacagagtgtcagaaaaacaaaattctgaaaaaaaaagagaaaag

SEQ ID NO: 202880 - DNA, 541 bp, Homo sapiens
tgaacttttacccatctaattatttgaatgttttggaatcactgcagtatatcaatgagtcaatgtcaaatttgtcaagctttcaggaacattaaacaaaaattgtcaggcaaaaaggtgattcaggcaattaaatcccrcatgtgtggaatgtgtattttcagagaatccagagagacagagtagaaaaaaaaaaagtgcccctttacaaaacatagaaattctactcatgctttcaggaaacaaacaaacaataacaaaaaaaaatcaccttcttcaaatcaattcggtttacttttgttattagagagcatttagcaagttccaacatttcatgccagatggtattccccaaagatgtaagagagaagatttctaactgtaatgtgaacaaatactagtaattttcatcatcattatatatgtctttttcttcctaaccaaggagttaagtacaataatgacatatataattaatgtcagtcttaattctctaatcttaagaggtttattcactgcaaaatcacatttgtctacagat

SEQ ID NO: 202881 - DNA, 528 bp, Homo sapiens
agtatataatgtgcctgtatgcatgccctgttatagattgaactgttaaatttgctttgttatttacatctgcttcatgcttccttacattttatatttgatacactgtagaaggagatagttaagcttattagtcattatagagttgtattttgactatattttctttaaattgagtttttatttatacattttaatgcaataatatatgaggaatgatgtctagcatttagatatttaatattcataatatgattttatataataaatcagtggccaayaactttttttgtaaagggtcagatagtcaatatgtttggctctttggtccatatggtatctgtatcaactgcctgatactgtccttttatcaaaaggcataatcctataattgtatgctctttgtataattatcttgccttagtttctattatattcgaagtatttttgtttacattatggcttattttcacttttaaattttgtaatattttgatacttttagagtatttataatcttcctcttta

SEQ ID NO: 202882 - DNA, 331 bp, Homo sapiens
atagagggaacagctagcaaatggaggggcagtcgtctctccatcagctaaacaacagagtgcagctagaaaaggatggcaaaccagaaaayccatcaaaagtgatgaaatgggacaggggagaaggacaggtgtaaatggcgtcaagttagacaggagagagagaaatgcagagctcaagtcatggcggatttctgaaccagagtttccttcatagtctgcatctgggtgaggggaggcttataagcaagggggagacagggagaaccatgtggttcccaagaagatggaacgtccagaccctgggaaattcctaagggcacaaacagac

SEQ ID NO: 202883 - DNA, 331 bp, Homo sapiens
atagagggaacagctagcaaatggaggggcagtcgtctctccatcagctaaacaacagagtgcagctagaaaaggatggcaaaccagaaaatccatcaaaagtgatgaaatgggacaggggagaaggacaggtgtaaakggcgtcaagttagacaggagagagagaaatgcagagctcaagtcatggcggatttctgaaccagagtttccttcatagtctgcatctgggtgaggggaggcttataagcaagggggagacagggagaaccatgtggttcccaagaagatggaacgtccagaccctgggaaattcctaagggcacaaacagac

SEQ ID NO: 202884 - DNA, 397 bp, Homo sapiens
tgcatcacagtctcttgatagcataattgatcacacagaagaaaattagtggttgtgaagataggcaatttgaaaaaccacagttggaagagacaaaagaaaaaaagaataaaaacaatgtgagaggccgaggtgggcagatcatgargtcaggagtttgagaccagcctggccaaattctctactaataatacaaatattagctgggcgtggtggctggcacctgtaatcccagctactcgggaggctgaggcaggagaattgtttgaacctaggaggtggaatttgcagtgagccaagattgcgccattgcactccatcctgggagacagggcaagattccatctcaaaacaaacaaacagaaaacaaaaacaatgaagcactacctagagatct

SEQ ID NO: 202885 - DNA, 397 bp, Homo sapiens
tgcatcacagtctcttgatagcataattgatcacacagaagaaaattagtggttgtgaagataggcaatttgaaaaaccacagttggaagagacaaaagaaaaaaagaataaaaacaatgtgagaggccgaggtgggcagatcatgaggtcaggagtttgagaccagcctggccaaattctctactaataatacaaatattagctgggcgtggtggctggcacctgtaatcccagctactcgggaggctgaggcaggagaattgtttgaacctaggaggyggaatttgcagtgagccaagattgcgccattgcactccatcctgggagacagggcaagattccatctcaaaacaaacaaacagaaaacaaaaacaatgaagcactacctagagatct

SEQ ID NO: 202886 - DNA, 593 bp, Homo sapiens
taatgttggcccccttgggccctcgcagagctgccaatattaaaggttctggcaataccatagtgtgtcatcattaaaagctcaagcactggagccttaaggatctggggttatgttctggctctaaaccttaccagccatgtgtattagtctgttctcacattgctataaagaactacctgagactgggtgctttataaagaaaagaggtttaattgtctcctggttccacaggctgtaaggaattgtggctggggaggcctgaggaaacttacaaccatagtggtaggcgaaggggaagcaggttcatmttacatggccagaagaggaggaagagaggaaagagggaggtgctacacacttttaaacaaccagatcttgtgagaactgactcactattaccatccaccccccagtctaattacctcccaccaggccccttctccaacactggggattacaattcaagatgagacatgggtggtgactcaaatccaaattatatcattctgtccctggcccttcttaaatctcatgtccttctaacattgcaaaatacaatcattccttctcagcagtcccccgagtcttaa

SEQ ID NO: 202887 - DNA, 575 bp, Homo sapiens
atttgctttcttttttcttttcagacagtctcactctgtcacccaggctggagtgcagtgatatgaactcagctcactgcaacctccgcctcccaggttcaagtgattctcctgcctcagcctcccgagtggctgggattacaggcacccaccaccacacctggctaatttttgtatttttagtagagatggggtttcgccatgttggccakgctggcctcaaactcctgacctcaggtgatccacctgccttggcctcccaaagtgctgagattacaggcatgagccaccgtgcccagctgatttattttcctttgatgtatactacccagtaataggatctctgggttaaatggtagttctatttttagttctttgagaaatctctaaactgcttttcacaggggataaactaatttacattcttaccaacagcatataaatgtacccttttctctgcaaccctgacaacatctgttgttttttgactttttaattatagccattctgactggtgtgagtgagatctcattgtggttttgatttgtgtttctctaatggtgagtgatgttgag

SEQ ID NO: 202888 - DNA, 575 bp, Homo sapiens
atttgctttcttttttcttttcagacagtctcactctgtcacccaggctggagtgcagtgatatgaactcagctcactgcaacctccgcctcccaggttcaagtgattctcctgcctcagcctcccgagtggctgggattacaggcacccaccaccacacctggctaatttttgtatttttagtagagatggggtttcgccatgttggccatgctggcctcaaactcctgacctcaggtgatccacctgccttggcctcccaaagtgctgagattacaggcatgagccaccgtgcccagctgatttattttcctttgatgtatactacccagtaataggatctctgggttaaatggtagttctatttttagttctttgagaaatctctaaactgcttttcacaggggataaactaatttacattcttaycaacagcatataaatgtacccttttctctgcaaccctgacaacatctgttgttttttgactttttaattatagccattctgactggtgtgagtgagatctcattgtggttttgatttgtgtttctctaatggtgagtgatgttgag

SEQ ID NO: 202889 - DNA, 555 bp, Homo sapiens
taaaatacaaataccttgcatagctctacaaattgttttcatcatataattttaatatttttctatttttaaaattttcttttttctttttttactttgtaaaattgtgttttttttttttaaactaaggcataagcayagatgtgagtctaggcctacagagtcagaatcatcaatattactaccttccacctccatatcttgttccaatggaaagtcttcaggaacagtaacacttgtggaactgccatctcctacaataggaatgccttcttacggaatacttcccatagtacctgcctgagtctgtgttacagttaacatacacatgtgtatatgtatgtatgtatatgtgtatgagtctgtgttataattaacatacacgtatatatgtatgtatatgtatatgtgtatctaagtctgttatagttaacatacacatatatatgtatatgtatatctgagtctgtgttgcagttaacatacacgtatatatgtatatgtgtatctgagtctgtgttacagttaactttatatatatataaacttcataca

SEQ ID NO: 202890 - DNA, 555 bp, Homo sapiens
taaaatacaaataccttgcatagctctacaaattgttttcatcatataattttaatatttttctatttttaaaattttcttttttctttttttactttgtaaaattgtgttttttttttttaaactaaggcataagcatagatgtgagtctaggcctacagagtcagaatcatcaatattactaccttccacctccatatcttgttccaatggaaagtcttcaggaacagtaacacttgtggaactgccatctcctacaatagsaatgccttcttacggaatacttcccatagtacctgcctgagtctgtgttacagttaacatacacatgtgtatatgtatgtatgtatatgtgtatgagtctgtgttataattaacatacacgtatatatgtatgtatatgtatatgtgtatctaagtctgttatagttaacatacacatatatatgtatatgtatatctgagtctgtgttgcagttaacatacacgtatatatgtatatgtgtatctgagtctgtgttacagttaactttatatatatataaacttcataca

SEQ ID NO: 202891 - DNA, 555 bp, Homo sapiens
taaaatacaaataccttgcatagctctacaaattgttttcatcatataattttaatatttttctatttttaaaattttcttttttctttttttactttgtaaaattgtgttttttttttttaaactaaggcataagcatagatgtgagtctaggcctacagagtcagaatcatcaatattactaccttccacctccatatcttgttccaatggaaagtcttcaggaacagtaacacttgtggaactgccatctcctacaataggaatgccttcttayggaatacttcccatagtacctgcctgagtctgtgttacagttaacatacacatgtgtatatgtatgtatgtatatgtgtatgagtctgtgttataattaacatacacgtatatatgtatgtatatgtatatgtgtatctaagtctgttatagttaacatacacatatatatgtatatgtatatctgagtctgtgttgcagttaacatacacgtatatatgtatatgtgtatctgagtctgtgttacagttaactttatatatatataaacttcataca

SEQ ID NO: 202892 - DNA, 555 bp, Homo sapiens
taaaatacaaataccttgcatagctctacaaattgttttcatcatataattttaatatttttctatttttaaaattttcttttttctttttttactttgtaaaattgtgttttttttttttaaactaaggcataagcatagatgtgagtctaggcctacagagtcagaatcatcaatattactaccttccacctccatatcttgttccaatggaaagtcttcaggaacagtaacacttgtggaactgccatctcctacaataggaatgccttcttacggaatacttcccrtagtacctgcctgagtctgtgttacagttaacatacacatgtgtatatgtatgtatgtatatgtgtatgagtctgtgttataattaacatacacgtatatatgtatgtatatgtatatgtgtatctaagtctgttatagttaacatacacatatatatgtatatgtatatctgagtctgtgttgcagttaacatacacgtatatatgtatatgtgtatctgagtctgtgttacagttaactttatatatatataaacttcataca

SEQ ID NO: 202893 - DNA, 474 bp, Homo sapiens
gtgattggaataacattaataaaagcctggcattgtggaaagacacagacatgtgtggatctggttttctctaaccttgcatagctcatagcacatacattatagcaatttgattgattatagcttattacagcccaaggaagactgctttaacattctgtaaggagaggtagtggcgttgaagggagtcttatctctggtacctttgggtctttcctaatcatctacagtacaagaatacagaggaaagttaatctataatcagagaagcagaagttgcaactgcatgctacgtgactyaggccacatattctcatttctcttaaggttcaagtaatttaaagttccaacagcttttagttttaattaatttaatttcacagtaggatctgatgatttcgtggtggagactttattaaatatctgtctcagagatcgtgttttgttttgttttttttaaagaaaggggaaaga

SEQ ID NO: 202894 - DNA, 501 bp, Homo sapiens
ccaataatggagtcctagtatgcacagaaggaaatagaataagtcctaactttgttttttcatcttaaaaaacaataattaatagtatacgtcctcacaagtagcctacaaatgtaaatatgaaacaggtaagtaataaaaatccaggatcttcaatccatacaagtttttaagagtataagtkagactctagggttttgagtagtgtatataattcttgggtgtttggacacttactacactctcacagtgtaggctccttacaatttcattagagccaagagagacagagagcaaaagaaagaaagaggagttaatttacaggtaatagtcataaatggaatatttcctaaaaagaagtcaaacacctttggagatggagttgacaaagtaaactttgagaaactgtagacagagagatgcaaagaaataatcattccaactataggcaataatgtctatgaggaagattcatgagaaagagaagattagcaaaatact

SEQ ID NO: 202895 - DNA, 577 bp, Homo sapiens
acatttaacaagcattttaactattcaaatcacaaaaatatttgtctttttcatttataaattttttttccttttttaactttaattcttgactgtatggaattcattttggcaaaagataaatcgtcaactgaattttttctctcaaatgactatgcagtagtcaaaaaagaagttcattgattaataaatcttttaacactgatttaagttacagcttttgtcatatattaaatcctctcatagagttggatctctgtcaatattatctgactaaacttaaactgcattgtttcatgcrttgtttcatgattttatttttataccctgtaatagccagtaccaaaggtccctacttcattattcttttctggaaagaaatggcctgttttgactcaatgatatggtttggatttgtgtcccttcccaaatctcatgcccagttgtaatccccagtgttagaggaggggcctggtgggaggtgattggatcatgggggcagaatcccccttgctgttctcatgatagcgagtgagtgctcaggagatctggttgtttaaaagtgtgtagccctgcc

SEQ ID NO: 202896 - DNA, 577 bp, Homo sapiens
acatttaacaagcattttaactattcaaatcacaaaaatatttgtctttttcatttataaattttttttccttttttaactttaattcttgactgtatggaattcattttggcaaaagataaatcgtcaactgaattttttctctcaaatgactatgcagtagtcaaaaaagaagttcattgattaataaatcttttaacactgatttaagttacagcttttgtcatatattaaatcctctcatagagttggatctctgtcaatattatctgactaaacttaaactgcattgtttcatgcattgtttcatgattttatttttataccctgtaatagccagtaccaaaggtccctamttcattattcttttctggaaagaaatggcctgttttgactcaatgatatggtttggatttgtgtcccttcccaaatctcatgcccagttgtaatccccagtgttagaggaggggcctggtgggaggtgattggatcatgggggcagaatcccccttgctgttctcatgatagcgagtgagtgctcaggagatctggttgtttaaaagtgtgtagccctgcc

SEQ ID NO: 202897 - DNA, 514 bp, Homo sapiens
tttgccttctctcccatctcttctctgtaccataggaagctaaaccctgggaatgttttcccaaattccattcccaacttgcttctgggtaattttagacaataggaggcacygagggaagatagaaaggtgagaagagaagataaagggaggtgaccattccagtaggatctcttctggattccagctgttgaggctgctggcctaggctttggtaaaaacaccttttcccattgtccctccagtgctgggttaagaatagctttctgcagttgcagatcttaaagttgcctcaccttcccctgtgtgtgctttccattttaatagaatgtaatgtttttggaataaatggtttttgtttggggactcagatgtgcattaaaaatttacagaaatcctttaatagtaattgaagtttcaagttaggttttattctaagaaagggttttcagaaacaaattactctgttaaggaaaagaaagtctatagacagtaaaagccagaaaatgttagt

SEQ ID NO: 202898 - DNA, 575 bp, Homo sapiens
tttttactccatttaggaatgtgtgcttcccctcttttctttgccaaatcgcttgacttctaataacatctgggtgagtatgtttattgagtgtgagtatgccacagaaataacaggagaaatgacaagtaggatctgtcagtatctaccakgtactgggcactgtggcatttcatatgttccctattaaattccacatcaaccccgctagctaagtgatgttgtccttattttatggcccaagaaactgagacttagagaagtcaagtagcttctaatcatcagaacttgacttcaaacctaggggtatctgttgttaattaaagaaatgaggaagtaaatataaaatatggttcatgaaatatgatgttaggtcagtatttacacatgattttcagaatgcaagagctataatatcaggcaagatcttacatacagtactttatttatttggcataaggtggtcatacttcattaattttttaagagtccatgaccttgctttctaataaaatgctttgctagtaaagctctggagacccttgtttaaactttaattaaacagtttacttgaa

SEQ ID NO: 202899 - DNA, 548 bp, Homo sapiens
ctgtaatttcccatcctagtttatgttttttaattaaactactaagtttaggacagagtgcatttataaatacaacagttaatgctgtttcagtccctgcaggaaatactcattgtattttgagcccagagtgtttcacaaatagtgtttctaagtgaattctgtaatctgaaactgggtcatcctttttgcctgaaagattgtgtgatgaaccaatcaattttttgtggaagaatcttatgaattgaatttaaatggttttcagcaatttttctagctcattttggccctctccatgaggaggttttggaggagtctttaataccttcctcgcatttgtcccattctgcctctatgattcattttcacrcttcgtaaagccctaatatcatgtgagtaaactggcaaagatgagggagtcctggatcataagctcctatgaggattccacattccttagtaaagttttgaggattttcccttagatcaaggaagtcctttaccatgactctaagcttagaccatgagtaaaggttatggcagaaagg

SEQ ID NO: 202900 - DNA, 618 bp, Homo sapiens
gttaaacaagtcaaacttgttcacatatgtaacgaattgaaaaaaatgcagcagaatgtttattgctttcctgtgactagcaggatactcttcattcacagaaatccaaaagtcgtctaggagcagatgagtaagccttatcttgactgcatgatcagatggcagcttacyaagttatttttcctctttcaaagtcaggttctcaaactgtagagtagcagtagaagattcagagaaaaggtttttcacctttgtgttgaaagaaagaaaaaatactgtgccattttgttctgcggttcttcaaggtggctttctataaaatttaactcttactaatatctttcctcattcttaaacccaagtagcagtgggaaaattttaaaatttgccattgcaatatgatttttctaaaaattcagatttatataaatcaaagaatcttgtcacttgaaatcatgctactttctccaaggtcttatagatactcattcaactggttcatgtgatgaaaaatatttgctaagtagttcattgctgtagccaccaccttcttattcaaaatactcagcaaaagctggcctaccttgaaaatactcatgcactccaatccacctgtca

SEQ ID NO: 202901 - DNA, 487 bp, Homo sapiens
ttacatatactaattcgcttaatccacataccaatcctgtgaggcaggtcttatgattctcctcattttgtaagtgaggaaacagagacggagggtaagatcacatgaccagtgtgtgacagaatgagaattccaacccaggcagtcagaatccacagtccatgttctttaccacctcactattttgcctttccactacacagtgttaaatagggacagaacactgtgaaaactaagtttaggatgctagccaagcaggagaaaaaccaaagtggccctttgccaatcagatgttgttttgctgcatctgaagcaacaagacttctagacatctttctgtgggagttttagtacaatcccattttcccaggctctggttttgtaacctcgaagagccaaagggagaaaaatagattagctaaaagaattayattgttgccttcgcttttgtgttaatataagatgtgtgtgtgtgtgtctttgtttt

SEQ ID NO: 202902 - DNA, 487 bp, Homo sapiens
ttacatatactaattcgcttaatccacataccaatcctgtgaggcaggtcttatgattctcctcattttgtaagtgaggaaacagagacggagggtaagatcacatgaccagtgtgtgacagaatgagaattccaacccaggcagtcagaatccacagtccatgttctttaccacctcactattttgcctttccactacacagtgttaaatagggacagaacactgtgaaaactaagtttaggatgctagccaagcaggagaaaaaccaaagtggccctttgccaatcagatgttgttttgctgcatctgaagcaacaagacttctagacatctttctgtgggagttttagtacaatcccattttcccaggctctggttttgtaacctcgaagagccaaagggagaaaaatagattagctaaaagaattatattgttgccttcgcktttgtgttaatataagatgtgtgtgtgtgtgtctttgtttt

SEQ ID NO: 202903 - DNA, 568 bp, Homo sapiens
tttgttgtttttgttagtttatagtttccgtctgcttcttggcagcatttttctgatgagttgttgtaggaagattgtgatgcttttttatacttaaaaaaatactgtttctatataaatgctgtccatgatccttttttcctactcatcctgagtaagatgaatttttgcaggttagtagcaagagtttcctatggggtatagtaataatgggccaaagtagcctttcaggtttcacagctcaggagattcccccctctattgctacaaaaatgactgttttcttaatacagcccctctgtttgcccatctctcctttgcctctcagaagctggcctgggtcaagagagctctgttgtcttttcttcataaacttgcctcccaagrtgatacactcactcttagttagtgtatttttctaatgcttcctgatatctgccaccttggtgtgcctgtaggtattttctgtaccttctcccgcctcttctctaatcagctgagtcttgttcagctccttctgacagtgtgctctatctttcaggtggtaagtatttgtaggagagtttga

SEQ ID NO: 202904 - DNA, 439 bp, Homo sapiens
gctgatatgatgtctgccgtaagctttccacatcatcctcacctttggcatcacatatgcaaatcagagtttatagcttttctgttacttcatcgtcttcatctgtgtggtttcagaagaagtgataacacaacatttttattggatttgtctttaataggttcttgaacatttcaacagtactaagtacatagagtcttttttaatagaatgtttttagtctaatttgaataaattagttgaacttaatttgtgagctataaggcgatttaagcaattttaaataattttttggataaagaaatcaatgggctaaataggaaaaaaacataaagagaaatttaaatggattatcttttaaaaatcttttcttaaactttacttttctgtgaatgtttaaagattgttggrtctttatttttcagatcatagacctctt

SEQ ID NO: 202905 - DNA, 549 bp, Homo sapiens
atgtttgctgataaccttatcattgtgctaggttgcagagctttttygagacttcactgcgctccaattttgtagatatttttttcaccctgctttggctgtttctgttcttctttgtgaaattctggaacgcactgaggagaaacagggcagctgggggcagagatgagaagggtctccactgatgtgggaagacaaagtcctgctgtggagactggccctgagggcacggtgacacgagagtggcaccttctagtgttggtttcaaaggagccaagatggagggcaccggccctggccatgggcatccgggctcaggtaacacaagggccaggagacactgcaggaggtccttgtaaagaatgtggttgtgcagggccaaggccagcagctgggcttgagttccagctctcccaagtggaggggcagtggagaccctgtggtgtgttctggtcccagacctgtagacccccatgctttggtgtcagcagtggccgagaagatggctttcttccatggtcccaagccacacccaaggaaccccaacca

SEQ ID NO: 202906 - DNA, 549 bp, Homo sapiens
atgtttgctgataaccttatcattgtgctaggttgcagagctttttcgagacttcactgcgctccaattttgtagatatttttttcaccctgctttggctgtttctgttcttctttgtgaaattctggaacgcactgaggagaaacagggcagctgggggcagagatgagaagggtctccactgatgtgggaagacaaagtcctgctgtggagactggccctgagggcacggtgacacgagagtggcaccttctagtgttggtttcaaaggagccaagatggagggcaccggccctggccatgggcatccgggctcaggtaacacaagggccaggagacactgcaggaggtccttgtraagaatgtggttgtgcagggccaaggccagcagctgggcttgagttccagctctcccaagtggaggggcagtggagaccctgtggtgtgttctggtcccagacctgtagacccccatgctttggtgtcagcagtggccgagaagatggctttcttccatggtcccaagccacacccaaggaaccccaacca

SEQ ID NO: 202907 - DNA, 537 bp, Homo sapiens
ttcagcatagtactggaaatcctagccacagcaatcaggcaagagaaagaaataaaaggcatccaaatagaaagggcagaagtcaaattatctctgtttgcagataacataattctagatatataaaacctcgtaggatctacccaaaagctcttagagctgataaacaacttcagcaaagtttcaggatagaaaattgatgtacaaaaatcagtagcatctatacaccagcaacgttcaaactgagagccaaatcagaaaggcagtkctattcacaattgccacaaaaagaataaagctaacgttcacatgttatgccacaaaacgtgatgccacaaaaaggaatacagctaaccaggaaggtgaaagatctctacaataagaattacaaaacgctgctcaaagaaatcagagatgacacaaacaattggaaaaacattccatgctaatggattgaaagaattgatagtgttaaaatggccatattacccaaagcaatttacagattcaacgctattcctatgaaactaccaatga

SEQ ID NO: 202908 - DNA, 579 bp, Homo sapiens
tggcagcactatttacaatagcaaagacataaaatcaacctaaatgcccatcaataatagactggataaagaaaatgtggtacatatrcaccatggaattctacactgccataaaaaggaatgagattgtgtcctttgcagcaacaaggatggagctggaggccattatcctaagcgaaccaacacagaaacagaaaaccaaataccacattctcactcataagtgggagctaaacattgagtacgcacagacacaaagaagggaacaacagacactggggcctacttgaggatgggaggaggtgaggataaaaaaactacctattgaggactatgctattagctgggtgatgaaattagctgtaaaccaaacccccataacacacaaataacctatatgacaaacctgcaaatgtaaccctgaacctagaataaaagtttaaaaaaaaaaagcatgaggcctggcacggtggctcccagcactttgggaggctgaagcaggtggatgacttgtggtcaggaattcaagaccacccttgccaatatagtgaaacccgtctctactataaatacaaaaat

SEQ ID NO: 202909 - DNA, 536 bp, Homo sapiens
tgctccctccctcccagagggacgggcctcagcctgggctggaagcaccccagcctctctgacccagtctgctgacccggcccctgggcatggcacaccacaggcacctcgggggagctccctctacctgcacagcccagaaccctccctggcaccgtggctggcccacctcatttctctgyctgcctctctctgggtgtgggtatcctgtggtgcccctcctcaagaaaaaacctgccacgctggagttgcctgggtctagattccaagatggagcattacaagatggctttcaagttctagaaacacagttctggggccaaggcacactatcacagaggatgcgtccaagccttctgactttgagagggacatttataaagtaccgtgcagtcagtggaaagaagctagatatgatgatgtgtccagtctccttgaaagcagaggcatccaggctccccacttttctttgaggattccagctggtgctttataaaatacagtagagtggatttacacagactccagggccccag

SEQ ID NO: 202910 - DNA, 321 bp, Homo sapiens
caaagaatgcaacacaagatgacagcctgagtgaatgcatttcaaaaaggcttsgggaggcaagtggaagctggaccacagagaacctgccaagagtcaggaggccaaggtccttgtaccacccctgtcatggactggacctgacatagcagctcacttctgaactttgctcaaaaacaaaacccaatttcatgcctagttccactgcttttgctgacctgtataagatggtactgataccaaagcactttccatttaattgctgaaattgatttctaaaacatttaaagtctctggaaactgctctaaggcatacagcaa

SEQ ID NO: 202911 - DNA, 556 bp, Homo sapiens
cttctggtgtacttctgcattaaattccttgctttcagaatcataaccagggaatcatctggtactatgagagacagatgagcctccagccacagctcccttcagggagccaaaaaatttattgccagtggtagttctggcaaggcctgcatccaaatagcaggtaaaggcacttggctgaccatcaatgttttccacattgtattcattgccagtcacctacacttggycttcatagatgttgtctgtgccaaacctattgagaagcctgcgggccagcagcaggccagtacaatactctgcagcataatttgtcaggccaaccttcacaccatattttggcagttcgtgtgcgtatgctgcgcagactatcatatccccctctatacgggcataagcaatctgactaatgatatctctgttggttagatgaactactatcctatatttgggtgtgttgtatttatttttatcctgtatctccaagtatttccgagcatagtaaccagttttaccctcttgtcgtcttctaaatttcacttggtatctcttaaag

SEQ ID NO: 202912 - DNA, 339 bp, Homo sapiens
ctcgttcactatctgttcattatcctgacacagtaccaaggggggagtctgtcctcatgatccagtcattttccaccaggccccacttccaacattgaggattacaattgaacatgaaattkgggtggaatacagatccaaaccatatcaccttccctggtctccagcactccgatctcactctcattctcctcctgtgatcactgctggccaggcattccaggattctttctgccctcatacaggacaagtttgttcctgccccgctgttacctctgtctgaacgctcttcctccaggtcttcagctggatggatgggtttagctctcagttcaaatg

SEQ ID NO: 202913 - DNA, 339 bp, Homo sapiens
ctcgttcactatctgttcattatcctgacacagtaccaaggggggagtctgtcctcatgatccagtcattttccaccaggccccacttccaacattgaggattacaattgaacatgaaatttgggtggaatacagatccaaaccatatcaccttccctggtctccagcactccgatctcactctcattctcctcctgtgatcactgctggccaggcattccaggattctttctgccctcatacaggacaagtttgttcctgccccgctgttacctctgtctgaacrctcttcctccaggtcttcagctggatggatgggtttagctctcagttcaaatg

SEQ ID NO: 202914 - DNA, 543 bp, Homo sapiens
aacatttgagagtctagcacttagcaggtaataggaaaacaaggcaaatgacacatggcccctgtgatttattccttttgtttgtccaccaaagccttttacactgcaggtggtcagtaaatctcttaatcaatttaagacaggtcaaacgatttaagaagtttacaataaaatgttttacactaatctgagaagtctatgcaaagtaagaacagctatggcatctttttaaaattgtgaaactaaagcatggtcttcagaggtatgtgaacccttctcacaacaagggcttaaagtagggaacagatgtaaactcctcactccctattttgtaagaataagcgcccstaatgaagtttttctctctgcattttgagtttcctgtttgtagttcccactttatcctgctattctattcattttctagctgagcccacagcatcaaaaaatctgcctgagaaaaactgaaaagaaatacagccaattacattcggatggttgaaatagaaatggtggtattctcttcttgaggagttaggaatc

SEQ ID NO: 202915 - DNA, 568 bp, Homo sapiens
gagtgttgtctgccttaactgaaaattttctttgatttatgtttttttttaaaatagattgcttcactttattccatactatctgttagtttaaatggaaatttgtttttggtttgttttcccaggtcttcaatgttcctggcagcttaaagtaccaactgggacacttgtcactagtttgagaagtgcagccataggtgagttctctccaccccaactttyttagtcatcctgccctgaacaaatcagctcaagccagtcccccgccagtgccactttccacttgtctccattgaaaccttcaccctccttcaaggcccaccaccagcccttcgcagatgcccacctccccagcctctacagccctttgtttccatcagtccctctccctggctcagtctctgctttcataaggagccggctctctgttcacccagatttaacttgctcagaggcagaaacttaggcttctttgtatgctcccaatgcttagttccatactgggaacaaagtaggtgtccggtatttttttactggtttccctttaaaaaaaaaaaaaaaaaaaaaa

SEQ ID NO: 202916 - DNA, 611 bp, Homo sapiens
ccctgtcagtctttgctcacctctcagtttcctcctccaaggactactctagttcccctttccccaccacataggaatgtggtccagagtcacatgtgaagctttttaaacagacaaatgtagagctggcttgagagggctttataaggccacagagsttttttgggtgattccaacctgcagccatattaaaaagtagtactttacaaattctctttttgctccagtctctaccaattcattgatcctccctcatatacatttccccaccaacatgctccctgctgtctgccggtgcttgtgagcactaatgatggtggtaacagccctgctgctttggttgcacatctgccagggactctgcaccttgttatgaccctcacactcacgatttcagtttaacccaagtctaacaggcttgcaaaataggtgtcatcactccattttatagataagaaaactgaggttcaaaaaggttcccagatatcaaagacttgagcgtaagcgatggagtaagaatttgaattgaagtttgtctgactccgaagacacattttcctatatgttaggctgcttctctaaactctactgtgagcttctgcagacaccct

SEQ ID NO: 202917 - DNA, 611 bp, Homo sapiens
ccctgtcagtctttgctcacctctcagtttcctcctccaaggactactctagttcccctttccccaccacataggaatgtggtccagagtcacatgtgaagctttttaaacagacaaatgtagagctggcttgagagggctttataaggccacagagcttttttgggtgattccaacctgcagccatattaaaaagtagtactttacaaattctctttttgctccagtctctaccaattcattgatcctccctcatatacatttccccaccaacatgctccctgctgtctgccggtgcttgtgagcactaatgatggtggtaacagccctgctgctttggttgcacatctgccagggactctgcaccttgttatgaccctcacactcacgatttcagtttaacccaagtctaacaggcttgcaaaataggtgtcatcactccattttatagataagaaaactgaggttcaaaaaggttcccagatatcaaagacttgagcgtaagcgatggagtaagaatttgaattgaagttkgtctgactccgaagacacattttcctatatgttaggctgcttctctaaactctactgtgagcttctgcagacaccct

SEQ ID NO: 202918 - DNA, 558 bp, Homo sapiens
cttccttttctttatcaaccttattgacgagtaattcacatgcaataaaatgcacacattttaaatccagttcaccttttgacaactatatctcaaacaagacaaaaaataytttcccatagtttccttcatgtattttccctatcaatctccgctattcccaatccaggcaagcactggtctgctttgtcactatagatcagatttgtcttttctgaaactttatgtgaatggaatcatacagtatctggtattttgtgtctggcttatttcatttagcataatattgttagaattcatctaggctgcatgcgtcagtagtctatattgctgattagtgcacccttgtataatgtaccacagtttatctgtttgccaactgatggacagttgagttgtttccagtagggtgtttttaaaaatcattctgagtaaagcttctatgaaccttggtgaaatgtttttatgtgtgtaaattttcattttccttggggaaagtcctagaaatagaattgctgggttgaacagtaggtgtatatttcagttgataagcaacta

SEQ ID NO: 202919 - DNA, 456 bp, Homo sapiens
tacatggtagataataagtaatttttaaaarttgaatcagaaaagtcgtgagcatttctaaatgattgtggaattaccagaaatgaatatgggttagctaggagtgagtattactaagccagcctcatattggggataatattgggctggtagatttagttttgtggaatagatttgcaagagactcttgtaaatatctgtttggactagacgttagcgtgagttagatggagtcactatttgtttaaaaacaatctgttgttattgttttgagttatcaaaatggaatgggcagaccaactggatgccaaaaacctgccatgttttcattaaaaaaaaatcagtgtcctctgtctagagggcatactcaatacaacttcaagcgatacaaagctgatagggatagctaacatgttgtaggacaaaggtggtagaaataattgatatgttatatat

SEQ ID NO: 202920 - DNA, 456 bp, Homo sapiens
tacatggtagataataagtaatttttaaaagttgaatcagaaaagtcgtgagcatttctaaatgattgtggaattaccagaaatgaatatgggttagctaggagtgagtattactaagccarcctcatattggggataatattgggctggtagatttagttttgtggaatagatttgcaagagactcttgtaaatatctgtttggactagacgttagcgtgagttagatggagtcactatttgtttaaaaacaatctgttgttattgttttgagttatcaaaatggaatgggcagaccaactggatgccaaaaacctgccatgttttcattaaaaaaaaatcagtgtcctctgtctagagggcatactcaatacaacttcaagcgatacaaagctgatagggatagctaacatgttgtaggacaaaggtggtagaaataattgatatgttatatat

SEQ ID NO: 202921 - DNA, 534 bp, Homo sapiens
ttctccgctgactctgccagctgtggagtgtgcttgcaggttacctgcaacctcctccttgccaaatgcagggagctttttcttgctgtgttctccccttctcttgggcactggagggcattcaccatcagtcgtttaaaaacttccctctcccaccggctcccctgctttctccctctctctttctggcagcttctctggctgtggcttcagtagcccttctgcccagatccctggccctcccctcctgcctgtacttctgtcagtccatgggatgtcaaatctagcagcccctcaaactcagcatgaccactgttatgtgtgtctgttgtcagcaaaacctgtgggyagtcacccgacccagaggcctggccatctcccttccccacatattgctcaggtatggaggcctgtacctggtgtctgctgccccagtgctctccgtccatgccctgcctcggctcaggccctctcactctcctctgcaccactgtaagacactgctcttcatcctgtcttcaggctcactcctct

SEQ ID NO: 202922 - DNA, 550 bp, Homo sapiens
ccaaatcaatctaatgaacatttcatggctccatggtggtcatcactaattgtaatatgacagatacaggaaagacagaactacttggtacataatgttaaaatagctgatgtcacagactagagttgacccactcctgtgttgtgtatagccttacgaagccagtaccagttaaagaaagcatccaatggccaaaagtcatttcaaaagcactcacactggtaatttgctttcttggaagtggtcataaatccccctttctctctatccrtgtctattggaactcaaagctgccagagggcaacatccaaactgcttgccctttctcccagcctctgcctgggtgtggccctctttatctagattgactcagccagtctggtgattcctcagccttttgcctccctcctcttccttctcctccggtgtcttgggttctgcatacccgcagtattcagaagggcaacctggcaggaacagagccctgctcaagggcaaggcaagagaagtcatgcaggatgaaatcagcttctctgaggtgggagggagg

SEQ ID NO: 202923 - DNA, 629 bp, Homo sapiens
ggaagcatggaaaggatgtggaagccccagctccatctcctaggcatctgcagcctggctcagaaggaatttcagctgcattcccaaacatagtcagctctttaagggtgaagtccatttttctcagctgacttactttcctctaagrcaatctgtgaaccacactggaactcagccggaacaccatcctttgaagcctgctgaaacttcacttaggcaaatgtttctaaagacatttatttagatgttttggcagcacttcccagacttctcaaaccagaagggctgcctcggtctcggcaattgtatctgtagagaagggctaaagatgatttcaatggcctaaaaggaggagcatcaggccagtgcaaagaacctggccagggaatcgaaagactccagccctagtcccatggcatcccagccccgtggccatgaggaaatgccttgccattggtggaccccctttctaagcccctgctgtggctcaggaggggtggcaagggctcttgaacctgtaggtgggaaagaaccaagctgcaaatgtgtcagtcagtgaatggggctcatgtgactttttttaatggctgaggtagacaggatttcttttttagctttcttgtagagtt

SEQ ID NO: 202924 - DNA, 557 bp, Homo sapiens
taatgaaaacctgcagggctaccagatgccaggttcttgacctaagacaccctcatggctcatcagtcctttccgcagctcacaagggaagtgtgagagtcccccatttttgacaaaagtgtcatgtcccaaatctagcaacctgatgatgctagctccagaattagaatgctgcttctccctaacccaccatctcccctcaagcaggacacccctgagggggaaccaacaccttctgcccacagtctgggcccctgactgagcaaaacctcacccaggacacagtccagggcacttgccttttttggggtggggagggtatttttggctcctaagccatttgtttaagaaagaaaaatagatattccaaaggaaggytgccttaagaacttctatattttgaatatttaatcttagattctaggtacacaacatcatttggaggtgacatcagaagttctacccacaaggcccaggtcagtcgtctcttgcctggcccatgaatggggtgctgcactcagaaccccaccttctccaatccccccaagctagacccc

SEQ ID NO: 202925 - DNA, 422 bp, Homo sapiens
ttgcagcccagctgccctctgagtatctccaccacagcagtgctgccctccaggagcgtggcatggggtgttccaggcaatttgtgcaccatctcaatgcacacaccctcactgatcccactcttcaagattccactgtcttccaagacaagccacagcacacacaggtgactcacactggcctgggcaattccaagccaagacagctccatggggctcctttcagtgtctctaacgggcacggaaattgctcgttgtttttacggctttctgctaagtgatacgtggcactttatttcttcccagcagcctctgaggcccctgagccgctacctggtaaagaggagtgccyggtcagcccacccctggccacccacatcacccttgccaaccccagcacccatgcccatgtacccaggatg

SEQ ID NO: 202926 - DNA, 547 bp, Homo sapiens
agcttagtttctaattaattgaccgagtttacaaagctggcaggtggataactctgaaatgaacccaggtcttattactctgattaccatgaaccttgtttatcccagcttagtrgagtaaaggctgaatttattaaagaactgcagatttcaattccaactgtctgactcataagtggatgagttttgagaaaaatattctctcttagaaccctactttacttatgcatgaaagaatgataataatgatatatttaaggttgtcatctataaggttgatgtgggatgatgcaagggctggatgcatttactgcatctctacgtgcttaataattgttagcgcctctgttctctgtgacttcttctgtcttacattggaaagaaacatgttttcacagctttattggagtataattggcatacaaccaactgcccataattaagtgttgcaatttgttattttgacatcacatacactgtgaaaccatcactcctcttacttcctccatcctatatttttccaagaagttttgtagttttagttttt

SEQ ID NO: 202927 - DNA, 547 bp, Homo sapiens
agcttagtttctaattaattgaccgagtttacaaagctggcaggtggataactctgaaatgaacccaggtcttattactctgattaccatgaaccttgtttatcccagcttagtggagtaaaggctgaatttattaaagaactgcagatttcaattccaactgtctgactcataagtggatgagttttgagaaaaatattctctcttagaaccytactttacttatgcatgaaagaatgataataatgatatatttaaggttgtcatctataaggttgatgtgggatgatgcaagggctggatgcatttactgcatctctacgtgcttaataattgttagcgcctctgttctctgtgacttcttctgtcttacattggaaagaaacatgttttcacagctttattggagtataattggcatacaaccaactgcccataattaagtgttgcaatttgttattttgacatcacatacactgtgaaaccatcactcctcttacttcctccatcctatatttttccaagaagttttgtagttttagttttt

SEQ ID NO: 202928 - DNA, 399 bp, Homo sapiens
aatcatgtaatcagataatagagttagattactgacttatttattttttcctttcccatttggatgccttttatttatttttcttacattactacactggctagtgcttccaatacaatattgaaaagacgtggtgagaatgaaaattttggctttgttccagatccaatcaggaagcatttrgtctttcacaattaattaaacgtttgttttaggtttttcatagatgtgctttatcaggtttacaaagttcccatctattccttgtttgctgatagtatttttttttctaatcaggaataaatgttggattctgtcaatttattttttttttggtctattgagaaaatcatacagatttacagattttattttttagttagttaatgtggtgaattc

SEQ ID NO: 202929 - DNA, 554 bp, Homo sapiens
ctgctaatacaaaataagacatgcaatcaattaatatttgaacattactgattactaaaacaaaacttccacatgtgagctacaaaattgatctcccaaattggtctcattttaattaatttttgcaaaggggtcctagtttatattcagatattcaatattctgtaatatgggcrtataaattctgaaggttattaagagttttcctaagtttttaagtttataggttggcttcagagtcaaattggttgattacagttaaacccacaaaataagcttccatcctcgaatatcataaattttaaaatgtttaagatagtaattatacttttaaaaagcaccaaaaaattataagcataatttgagacacttgatagatacgatcacatttgacagaatcgttcacattccctacaggggacagcatttttacactaaacaagcctggatttatgatatcggctgccttcaaagcaatgccttccaggtctccagactccacagaagatgaattcagttcaccgcctcaggcctggagatttggcccccaatga

SEQ ID NO: 202930 - DNA, 574 bp, Homo sapiens
tgcaacctaaaataaaaattaagtcaacaatgaattgccactacacgcctattaaaatggtgaaaatccaaaacactgacaacactaaattctagcaaggatgtggagtaaaagaaactctcatttattactgatgggatggcaaaatggtacagccattttggaagacagtttggcagtttcttatcaaaactgaacatcttcctatacaatcccgtaatcatgcttcttggtatttacccaaaggaattgtctttatggccacccaaaaactttcacctggatctttttagcactttactcattatcasccaaattgaaagtgaactgagatattcttcagtaggtgaattaataaattgtgttacatccaagcaatggaatgttattcagtgttaaaaaaaaaaaaaagtagctatgaagccactgcaagacatggagaaacttgaaatgtatattactaagtgaaagaagtcaatctgaagatgttctaatttggggtatcttgacctaatcaggctcagccacattttcacttttcttgaacattttgtctaattgaaaggctttactg

SEQ ID NO: 202931 - DNA, 555 bp, Homo sapiens
ctgcactggcttcactctgaatcacatatttcagatgaagattttacacagcacctcatttaagtaaacacaataattgttgagtattactatcagcactaatacggatacatgtaactagtgccttataacttgcaaagtaaaacctcatttaattggacactcacaaccatcctgtaaaaggggcagttgttttctcttgtttctgctgtctagtgtttcctgtaatatattataccagtatttgctgagctcctacaatgtttcagacactgtactgaacactgaaaatacagcagacaaaagacagatgacagttcctgtcctcatggaatttttattctactgtggagagactgagaatttaaaataaataagaagagccttgtattctagaagayggtaagtgctctggaggaaaataaagcagagaatgaagttacagaaagatgaagagagaaaatacaatgttcacaaagattgacagggacaccttactgagacttgaccaggagcaagaacaaggcagcatgaaagaatagcaaggtatgagca

SEQ ID NO: 202932 - DNA, 555 bp, Homo sapiens
ctgcactggcttcactctgaatcacatatttcagatgaagattttacacagcacctcatttaagtaaacacaataattgttgagtattactatcagcactaatacggatacatgtaactagtgccttataacttgcaaagtaaaacctcatttaattggacactcacaaccatcctgtaaaaggggcagttgttttctcttgtttctgctgtctagtgtttcctgtaatatattataccagtatttgctgagctcctacaatgtttcagacactgtactgaacactgaaaatacagcagacaaaagacagatgacagttcctgtcctcatggaatttttattctactgtggagagactgagaatttaaaataaataagaagagccttgtattctagaagacggtaagtgctctggaggaaaataaagcagagaatgaagttacagaaagatgaagasagaaaatacaatgttcacaaagattgacagggacaccttactgagacttgaccaggagcaagaacaaggcagcatgaaagaatagcaaggtatgagca

SEQ ID NO: 202933 - DNA, 599 bp, Homo sapiens
accaaatatgtgaatggacaggcagcctggaattagccagaaatgaccctccaagcatatctgacagaatgatgtgaaagcatacaacatgaattattcaaaataattagagacagcactaagggtgtttgctctgatagggccatagtggaatttgaaggggaaatcaaggcagccagagagaagcaggtaataaaccacttggattcttaaatggcaggccctaattttttcaatgtaaacatggaggtgtctgtttcctgaattgtaaattgaagrggttatctaaacagctctctttagcattaccaccctgggagtaagtcaccaaagatgctaaaaattatactgctcctggaaagatatgaaaacagtttttcatgcagtttgtacaatgacatgttatagaaggaggaaagaaatgtaagcaggatacaataagatgttcaagcagagtggtcttctctcactctggaccctcacaattcccagctaggcaggaccgggcatgttcagtatttggtttgctattgaacaagaacacttaggtattgcagggaagaattgccatttagtacagggtttagtgatctcgaatt

SEQ ID NO: 202934 - DNA, 599 bp, Homo sapiens
accaaatatgtgaatggacaggcagcctggaattagccagaaatgaccctccaagcatatctgacagaatgatgtgaaagcatacaacatgaattattcaaaataattagagacagcactaagggtgtttgctctgatagggccatagtggaatttgaaggggaaatcaaggcagccagagagaagcaggtaataaaccacttggattcttaaatggcaggccctaattttttcaatgtaaacatggaggtgtctgtttcctgaattgtaaattgaagaggttatctaaacagctctctttagcattaccaccctgggagtaagtcaccaaagatgctaaaaattatactgctcctggaaagatatgaaaacagtttttcatgcagtttgtacaatgacatgttatagarggaggaaagaaatgtaagcaggatacaataagatgttcaagcagagtggtcttctctcactctggaccctcacaattcccagctaggcaggaccgggcatgttcagtatttggtttgctattgaacaagaacacttaggtattgcagggaagaattgccatttagtacagggtttagtgatctcgaatt

SEQ ID NO: 202935 - DNA, 261 bp, Homo sapiens
aaaaattatactgctcctggaaagatatgaaaacagtttttcatgcagtttgtacaatgacatgttatagaaggaggaaagaaatgtaagcaggatacaataagatgttcaagcagagtggtcttctctcactctggaccctcacaattcccagctaggcaggacygggcatgttcagtatttggtttgctattgaacaagaacacttaggtattgcagggaagaattgccatttagtacagggtttagtgatctcgaatt

SEQ ID NO: 202936 - DNA, 522 bp, Homo sapiens
gaattcttttacagccatgcaaaatggactaacacaaatagtagctcattggtcctagaacaaaatataatcccttttctgtaaagttaaagcccatgctaaactgtgattctagtttgtcctcacctataaaattctagtcaccaacctttttatttgccaggcttgccttgcctagagcctttgtacattctcatcccttagtctggaaagctttctctcttatcttcatatggctcattcgctcttttcacttagatctcggcttaaatatcaccaccccaaagaaccccttcttgatattctaatccaaggaagccaatcagttactttctgtcacatcaccatattttaatccactgcatagtactttccttatctgacattttctttcytttttagtattaactattttataacttaaaatgtaaaaaaaaaatacttataaccaaatactgcttataactgagacttccatattctctattatagttttggtaaatattttgtctgacttttaac

SEQ ID NO: 202937 - DNA, 488 bp, Homo sapiens
caaatagtagctcattggtcctagaacaaaatataatcccttttctgtaaagttaaagcccatgctaaactgtgattctagtttgtcctcacctataaaattctagtcaccaacctttttatttgccaggcttgccttgcctagagcctttgtacattctcatcccttagtctggaaagctttctctcttatcttcatatggctcattcgctcttttcacttagatctcggcttaaatatcaccaccccaaagaaccccttcttgatattctaatccaaggaagccaatcagttactttctgtcacatcaccatattttaatccactgcatagtactttccttatctgacattttctttcttttttagwattaactattttataacttaaaatgtaaaaaaaaaatacttataaccaaatactgcttataactgagacttccatattctctattatagttttggtaaatattttgtctgacttttaac

SEQ ID NO: 202938 - DNA, 401 bp, Homo sapiens
tgaacagaccaagtggtgctcacccscaaactgttcctatcaagggctgttattttggccatcactcatgaaacaacagacaattaatgcatattttatgactagctcaagtcctaattaaatacaactgtgcacaaagaatgtgaaggccccgacttagagggaccaaaataaatactggcagaaatatggtgagcactacgaccttagctcatcttgttattctatctcagagataagcaccttggcagaggcatacactactcctgaggtacagccagtaagctgaaatccacagtgtattttggaaaatttgggaaatgcagaaaggcagaagggggaaaatcatccatagccacatcaaactagcactaccactgctgataagttggagtatttcc

SEQ ID NO: 202939 - DNA, 459 bp, Homo sapiens
agtatttgggatgctttcctaaatctctattttctgatgtatatataatgttaaccataagccttaccattgctgttgtatattcttgatggctctgtaacttcctggtatttaaaaagactatgactatgaacatgtgttggagatatgtttttatattttctttttggctttgggtcattatctgatgcataratcaaaagcagggctttggtcctgatgtttgattgcatgcactctaacaggactaaaaggaaacatcaggttttcagaatttgggttataatgattggattataggttttttatttctttagttttttggggggagggccaacaatgttcctgctatatgaaatacattttaaatatgactttacagaatatcaccatcaaaatagtttgccagccatcactgaaaccaaggcttagtatttttcaagttgctctatatgaatt

SEQ ID NO: 202940 - DNA, 459 bp, Homo sapiens
agtatttgggatgctttcctaaatctctattttctgatgtatatataatgttaaccataagccttaccattgctgttgtatattcttgatggctctgtaacttcctggtatttaaaaagactatgactatgaacatgtgttggagatatgtttttatattttctttttggctttgggtcattatctgatgcatagatcaaaagcagggctttggtcctgatgtttgattgcatgcactctaacaggactaaaaggaaacatcaggttttcagaatttgggttataatgattggattataggttttttatttctttagttttttggggggagggccaacaatgttcctgctatatgaaatacattttaaatatgactttacagaatatcaccatcaaaatagtttgccagccatcaytgaaaccaaggcttagtatttttcaagttgctctatatgaatt

SEQ ID NO: 202941 - DNA, 539 bp, Homo sapiens
aaattcttcagaaaagaaaatttttggacaatgtggtaacttgatcagtaaacatgtttggtagtaaaaggcctacttccatgggccccttctactgtatctgtgaaaaaggctgcttttgagcagtaagtaaatgtcacccccaactcgggcaatgcgtggtaggtgggccatgggaacaacttgggtgttagggtagaatggccactgtctggacctgtcactaacactgcacttgaacacaggtgtggacaacaagagcacagagcaggccagtgggcaccaaatagtacctcttttacattttgctacaatatcagcagcttatggcactggcttaaggctgctgccaaactccgctgtcattccctcrctgacagtgatagaatggtacatccgttcagtattcagaaatgagacaggcttgttttgacaccactgtttctgcaaaagggaaaggaaccagattggagagtgtagtcatcaattggcagaatcagttaagaataacaacagcacagtgtgcgtcatttgggaga

SEQ ID NO: 202942 - DNA, 587 bp, Homo sapiens
aagctttgatttattgtcttcagttgttttgggtagagggatggctgatttttaacaagaagataaacttaaagatggaaattcttgtaagccataaatatcactaacttgcctgttccagggaagttcaaataaagacactgggacttagcagcagctgaaatgttttccttttttccccattggcccaaaaaaagatatgccttgccattggtggtttggygccagggcctgatctgtgcctggatacacaggccattcagagttcctattgcatagaaaggagacagaggatgacaaattggtctacaccagttgacctccaaagtgaagggataattttacccagcaacctctggagttttctttatctgttttatttagtgaaaacactgttcttctccagtactccctatttctcctagcaagctccaaggattaattctgggtcactagctaaattcaccacctctgctctgctcccaaattgcttctttttccttagccttatgcaaatcctggaagatatcaattctgagggctggggtgtatcttgatcacctttggaatctaccactgcatggagc

SEQ ID NO: 202943 - DNA, 502 bp, Homo sapiens
acattttgaaaggaaagagttcgaatgaagggaaaggtagggaagaaaagctcatgattttgaggagttaagcctgggaaacaaaagtgcttattcctttgataataaatggaaggggaatgtagcttgggttgactggtggaagatgatagatttgaacttgcatgtatagtgygttcatctccaagagatgttgatgccaggagatcttcctttcctttaaaactgcagccaggatggaccaatatttttgttgtgtttccacatatccacaaggatacacgccagcatgtagtgttttttttttttcagcctaaaggttgtagtcattctccttcagcctactgtgtggcagctttcttcttattcggtgctttccattctcatctcaagtcctggacatctgagctgtgcatatgagtgcgcgcgcgcacacacacacgcgcacacacacgtgtgcacacagactagagaccctgattgcatgctttctccccatgga

SEQ ID NO: 202944 - DNA, 517 bp, Homo sapiens
gaatgaattctataaacattttgaaaggaaagagttcgaatgaagggaaaggtagggaagaaaagctcatgattttgaggagttaagcctgggaaacaaaagtgcttattcctttgataataaatggaaggggaatgtagcttgggttgactggtggaagatgatagatttgaacttgcatgtatagtgtgttcatctccaagagatgttgatgccrggagatcttcctttcctttaaaactgcagccaggatggaccaatatttttgttgtgtttccacatatccacaaggatacacgccagcatgtagtgttttttttttttcagcctaaaggttgtagtcattctccttcagcctactgtgtggcagctttcttcttattcggtgctttccattctcatctcaagtcctggacatctgagctgtgcatatgagtgcgcgcgcgcacacacacacgcgcacacacacgtgtgcacacagactagagaccctgattgcatgctttctccccatgga

SEQ ID NO: 202945 - DNA, 558 bp, Homo sapiens
tcttggatagttccagattttagagcccatatgttgtttgctataacttcctcgcctcccagggccaatgcattcgaaacgcttcagctagtgtacttcactgagtagtcttggaagttagggctcatttgtatccatagtctttgttcaaatatggattaattttggctaatttcagtgggtgcayataaagtaaaacgcacagaactgaaactactgaaatcaggcctgtgtgtgatcatctaaaaatctacttttcaagctcctttaagttttatttttgaaataaaaacaataaaatgacagtaaaaagtttccaaaagcattgacattatgagcaattgctaaccaaggctattcccagaatgattgagcaaaatttggatataattctagacaagataactgcccggcagtgccagctataaatactccattcagaaggtgatttcactatgatcctatggaatatgtcccttgtctctagggctgggtaaccacgtggatgcatattatgctattgtcactagggctggcattggagggcaaaggcagatt

SEQ ID NO: 202946 - DNA, 634 bp, Homo sapiens
gtgcgcaaagccaggtaagttttaacaaaaaagaattacagcagaagccatgtgtgcacactaggactatgtaagcactggagtctttttctgctgcctagggattgctctaacactcattctcatccacatcaccgagagattttctaaatcattacctttgtttgcactctaggagtgcactgtagcataagacccaggttttaggaatctcgtggtaaatttttcaatgacatgcacttggagagaaaagaaatactttacctaggctatagagctgacaaaaaaagattatattttggagtgacccaacccaatccttgtaaacagtaaatgaaaaaattgctttgaattgcttcttgaatttctttagargacatagtttctaactacaagaaggaccataagaaaagacagtttttcagaaggtattttgagtgaaggttcagcaagactgatagtcacttaatgcaagatttgtatccatggcagaaagaatcagtgtgcaaaagagtatcatagaaatctgccattatgggttttttttttcctttcctactcagaattgtcatattaccaataaggaaaatttcttattaaggtctttgttttcatttgttggagtgtgccacac

SEQ ID NO: 202947 - DNA, 330 bp, Homo sapiens
atgttaagaaatttgttacaggtcatacagctggtaaatgatcaatacctcctaagctctgacttggtgttaactttaggcataaatgttatgggtatgtctatctcttggcttaaatgasgggaaattctccaatatcataatatcttccctactggctccatttaattccacagttataggtaaattccttaaagtcttaatgattttgtttttaaaatttctgatctaaattcagtcacccaaggtgtggggcatcttaagtagctcccaggcatttaatcaaaagggacgtgttgctcaatgagctctaccgggaagccaagagca

SEQ ID NO: 202948 - DNA, 330 bp, Homo sapiens
atgttaagaaatttgttacaggtcatacagctggtaaatgatcaatacctcctaagctctgacttggtgttaactttaggcataaatgttatgggtatgtctatctcttggcttaaatgaggggaaattctccaatatcataatatcttccctactggctccatttaattccacagttataggtaaattccttaaagtcttaatgattttgtttttaaaatttctgatctaaattcartcacccaaggtgtggggcatcttaagtagctcccaggcatttaatcaaaagggacgtgttgctcaatgagctctaccgggaagccaagagca

SEQ ID NO: 202949 - DNA, 561 bp, Homo sapiens
aaggcaattctttccttagggtgatagaaatggaaggcctagattcattcccacaacaccaccacccaccacttataatctattagcactgcccctgtaacattttaaataacacttaaaaagtattacacgaataataaaacaagaataaaattattcttactttaagaatgtcaactctgggataaatggatgaattttgtaccaaagagaatgactatataaacctatcttgtagatggaatggattaggcagaaagaaggttataaagacttttccacktctacatctatctctgtgaactccatatctgcatccaggccatcacacacaggggagcttttctcccctctatctttcttccagacaatacagaaggaataaaatgtccactgaaaacattgtacatactttggtataagaaatcacacaataagacattggtgctgcctacaagcgtttgctgcatgacatactgttcatatagatgtaatgtttcatgacaaagcaaaatgtatcctgtataaatgatctatttaagtgtgaaatagaaaacacac

SEQ ID NO: 202950 - DNA, 604 bp, Homo sapiens
gcaaattctctgtacttatttagagtacaggaaagatccataattaaccatgctttgggaaaatacttccttggaatggtcatattgaagggtttggtttaaaaaaagttgagggttgggggcttctacatcacatcctcgctacatttttttaaamattaagatttctataatttttttttagaaattaaggcttctataaaattcatgtaattttaaccagggataatctcactcagtttccacgtgtgtgaaatggggattataatagtaccttttctcgggctttctgggactactttatataacatttggaagagtacctctccaattatcatgctgtacaccttgaatatatacaatttttgtgtcagttatacctcaataaagctggagggaaaccctcatttccacagtgaaaataagtacctagcacacaactaatattctagtctataattctataaatgttagcaattattattatcaactaataaaattcccaattacccttataccatatgaccctttgggggagaggactaatagtccatgaatagtatggaatctgcatgtacagagttttagaaacttttgttttcac

SEQ ID NO: 202951 - DNA, 569 bp, Homo sapiens
agaacacctttcttgtgagcttattggcttactcattcaataatttatttatgcattcaacaagtatttactgagaactttctctgtgccagacaaaattacaaatacaggaatacaattgtgaacaagacaaagtttatgtccttatgaagcttatagtggccatggtagataataaacaacaaataaacctgtattcaactagtatggtgaggtgaaatgagcttatgactgtaagtctcttacacagtgcctggtacatggtgaagactaagaagtgggagatattattaatattaactataaagatgaaaatgctgagtaattacattcaaaaggatccagtagggytattgtgaggattagatgaaattagtgtttataagctatttattttatctgcttacttggtgattaattgaagcaaatataaagaatatgttaagtttcccctcactatttcagtgaggttgggatatttttggttcgcataagccacttgtttcttgagagcagaggaaccacagtcaaaatgtagcccccaccccatgccaatctaagtcgctttg

SEQ ID NO: 202952 - DNA, 546 bp, Homo sapiens
cacttaaaaatctgttaagaggccaggcgtggtggtttatcttataatcacagcactttargaggcggaggtgggggtgaaacaggagagttccctggctccccttgcaggacactcaacaggggtgttgatctctgttcagctgccacaagctcaaaccccttataggagcgggaggatacagacaggcaggtgcaggaaccagagtgagcgcttttgggctctggccccagggcagcttctaggggtggtgctttgactcctgaagccccagtaggcatgctacagtgctcttttaactctgccatccacagatggcttaagtgttaaccagctcagtgtccccttggtacccgggcccttgtccagcacccagaaagaatcaggttacacacagacttgaagagtggtgaatatgggggttttattgagtggtggaggtggctctcagcaggatggatggggagctggaacggggacggagtggaaagatgatcttcccttggagttcagcagtcctgtggcagaactcctctccaactgtcc

SEQ ID NO: 202953 - DNA, 545 bp, Homo sapiens
ttttttaaaagtaccagaagtgctatatattctgacaactgttaagctgaaacataagtacatagtgaataatatttttttgacataaggaatgacacatgtatgtgtattctgagtaggctcacttgtcatataagacatcaatgctaaagaaagaaaaatatcttttagctaaattagctcttggtgattttttattacattttcttctttaagagttcactcaccacccaaattcttttcttaaatataacaatactactggtacctcgatctactacctaycaaatgtcataagatcaggcataagaacaagtctccatatagatacatattctgtacacactcgtcaaaaattgttggagaacaaaatgaattttgcagatgaatgtttctttaacaataaccttgtcatttattttataatcattttttcaaaattcttctttcataatgtaagtgcttctcccctctttaaatagaaaaagagggctataatttaaatcatattccggcttttgtcaagagcattcatcatttatgtg

SEQ ID NO: 202954 - DNA, 551 bp, Homo sapiens
tggggtagagaaatacatttgggagttttcagccaatagatggtatttaaagacaggagactggataagatcaccacacttyctcactgcatttggaaatgtctgccaggctacgatataaactttaaattgtttctcttccaatcaccctgactctcgccatgtataagtgactacaacagtatagattcttttctttttcatctagtagtttaagaagtctaataatgtgatcaaaataagggttgtaaacttccatgtaatatgggaactaggtttcttaactattttattaatagcttgccccttggaaagagtaacctgaactggagttgacaagctagttgttcttggtcaggcaaatctactttcttcttgtaagaagaaaacaccacatggaaaaaaagtaagtgaaaacaataagagatgaaagaaagttgagactattataatgaaattcaacaaatatctactaagagtgcaagactctgggtatataaagattgagaaatggtcctttccttctctaaaatcaaattcacaaggatggt

SEQ ID NO: 202955 - DNA, 564 bp, Homo sapiens
ggtagagaaatacatttgggagttttcagccaatagatggtatttaaagacaggagactggataagatcaccacacttcctcactgcatttggaaatgtctgccaggctacgatataaactttaaattgtttctcttccaatcaccctgactctcgccatgtataagtgactacaacagtatagattcttttctttttcatctagtagtttaagaagtctaataatgtgatcaaaataagggttgtaaacttccatgtaatatgggaactaggtttcttaactattttattaatagcttgccycttggaaagagtaacctgaactggagttgacaagctagttgttcttggtcaggcaaatctactttcttcttgtaagaagaaaacaccacatggaaaaaaagtaagtgaaaacaataagagatgaaagaaagttgagactattataatgaaattcaacaaatatctactaagagtgcaagactctgggtatataaagattgagaaatggtcctttccttctctaaaatcaaattcacaaggatggtagaggagaaaggaatt

SEQ ID NO: 202956 - DNA, 652 bp, Homo sapiens
ccagccatccttgaatcaggccctcatcatgtttttagatcccatcctttttttttctaaaaagtatgttaggtattatgatttgtgggtctgaaagacaattctgcccactaaaaaatctgatctacctcaaaagattgggtttccccaaatcataaatcttgcccataatcaataattactcattatttctagaatattataattaaaaacacaagtgaagcagggagaaatccagaatctctaatgcakttcccctgtcctttcattccacaatgctccaactcagattagagtattaagtcttaaagtgatgtttgtagtcaaatcatttacacagaggatactttatgcagcatctccatttatattcaaacagttatcagcttagggaacattatccaggaagtcatactccataaatctgtatgctctaagcttacttaaataatcctacacaattaggtgcattatgctaaaagaaaaccatagaaagattcacttgctgaaaaatatcttcaaactgtctgtctggaggtctaccattagtgcatttcctgggagatttttttccagcttttattttatatttgggggtaaatctgcagggctttgacatgggtgaattgtgtgatgctgaggattgagatat

SEQ ID NO: 202957 - DNA, 652 bp, Homo sapiens
ccagccatccttgaatcaggccctcatcatgtttttagatcccatcctttttttttctaaaaagtatgttaggtattatgatttgtgggtctgaaagacaattctgcccactaaaaaatctgatctacctcaaaagattgggtttccccaaatcataaatcttgcccataatcaataattactcattatttctagaatattataattaaaaacacaagtgaagcagggagaaatccagaatctctaatgcatytcccctgtcctttcattccacaatgctccaactcagattagagtattaagtcttaaagtgatgtttgtagtcaaatcatttacacagaggatactttatgcagcatctccatttatattcaaacagttatcagcttagggaacattatccaggaagtcatactccataaatctgtatgctctaagcttacttaaataatcctacacaattaggtgcattatgctaaaagaaaaccatagaaagattcacttgctgaaaaatatcttcaaactgtctgtctggaggtctaccattagtgcatttcctgggagatttttttccagcttttattttatatttgggggtaaatctgcagggctttgacatgggtgaattgtgtgatgctgaggattgagatat

SEQ ID NO: 202958 - DNA, 491 bp, Homo sapiens
acagcagcattctcagaaatttctttctgatgtctgcattcaactcatagagttgaagattccctttcatagagcaggtttgaaacrctctttctggagtatctggatgtggacatttggagcgctttgatgcctacagtgaaaaagtaaatatcttcccataaaaacgagacagaaggattctgagaaacaagtttgtgatgtgtgtactcagctaacagagtggaacctctcttttgatgcagcagtttggaaacactctttttgtagaaactgcaagtggatatttggatagctctaatgatttcgttggaaacgggaatatcatcatctaaaatctagacagaagccctctcagaaactactttgtgatatctgcattcaagtcacagagttgaacattcgctttcttagagcacgtttgaaacactctttttgtagtgtctggaagtggacatttggagcgctttgatgcctttggtgaaaaaggg

SEQ ID NO: 202959 - DNA, 491 bp, Homo sapiens
acagcagcattctcagaaatttctttctgatgtctgcattcaactcatagagttgaagattccctttcatagagcaggtttgaaacactctttctggagtatctggatgtggacatttggagcgctttgatgcctacagtgaaaaagtaaatatcttcccataaaaacgagacagaaggattctgagaaacaagtttgtgatgtgtgtactcagctaacagagtggaacctctcttttgatgcagcagtttggaaacactctttttgtagaaactgyaagtggatatttggatagctctaatgatttcgttggaaacgggaatatcatcatctaaaatctagacagaagccctctcagaaactactttgtgatatctgcattcaagtcacagagttgaacattcgctttcttagagcacgtttgaaacactctttttgtagtgtctggaagtggacatttggagcgctttgatgcctttggtgaaaaaggg

SEQ ID NO: 202960 - DNA, 491 bp, Homo sapiens
acagcagcattctcagaaatttctttctgatgtctgcattcaactcatagagttgaagattccctttcatagagcaggtttgaaacactctttctggagtatctggatgtggacatttggagcgctttgatgcctacagtgaaaaagtaaatatcttcccataaaaacgagacagaaggattctgagaaacaagtttgtgatgtgtgtactcagctaacagagtggaacctctcttttgatgcagcagtttggaaacactctttttgtagaaactgcaagtggatatttggatagctctaatgatttcgttggaaacgggaatatcatcatctraaatctagacagaagccctctcagaaactactttgtgatatctgcattcaagtcacagagttgaacattcgctttcttagagcacgtttgaaacactctttttgtagtgtctggaagtggacatttggagcgctttgatgcctttggtgaaaaaggg

SEQ ID NO: 202961 - DNA, 491 bp, Homo sapiens
acagcagcattctcagaaatttctttctgatgtctgcattcaactcatagagttgaagattccctttcatagagcaggtttgaaacactctttctggagtatctggatgtggacatttggagcgctttgatgcctacagtgaaaaagtaaatatcttcccataaaaacgagacagaaggattctgagaaacaagtttgtgatgtgtgtactcagctaacagagtggaacctctcttttgatgcagcagtttggaaacactctttttgtagaaactgcaagtggatatttggatagctctaatgatttcgttggaaacgggaatatcatcatctaaaatctagacagaagccctctcagaaactactttgtgatatctgcrttcaagtcacagagttgaacattcgctttcttagagcacgtttgaaacactctttttgtagtgtctggaagtggacatttggagcgctttgatgcctttggtgaaaaaggg

SEQ ID NO: 202962 - DNA, 477 bp, Homo sapiens
ctacacacaatataattaagaaagataataagaaacatatataatttcaagattttcaattttttttactaagccagagaagataaatgagttaatcattcatgtcagtaagtaaatacaggatcaaaaaacatacctaatggaaggaaattaataacagaaaagtaaaaattataatctagaaaatgaaagatataaatcgattcataaatggataagacttttaagactttttttgaagaaatcatttcaaactagaataagcaagaggaatagatcaaaacaaaaaggaaaacagtgaaggtgatatacacatcytcttactgaaaattaattttaaagaactttaaattaattttaaagaattaattttaaacactaaaactcagagtcatcaatgtgtctggatacggattcatttttatttcttctgctcagcacttgttttatactttaaattagagtcctcaagtcttt

SEQ ID NO: 202963 - DNA, 588 bp, Homo sapiens
atggataagacttttaagactttttttgaagaaatcatttcaaactagaataagcaagaggaatagatcaaaacaaaaaggaaaacagtgaaggtgatatacacatcctcttactgaaaattaattttaaagaactttaaattaattttaaagaattaattttaaacactaaaactcagagtcatcaatgtgtctggatayggattcatttttatttcttctgctcagcacttgttttatactttaaattagagtcctcaagtctttcctctgcaatggaaattttatggcatcatgtaaagtatacaaatagtgaaggcattgccagtgttttcttgtgtataagtattctctaccattagaatggaaacgtcatcaaagtgggcccttagtgagagtttgctgagtggatgaatactgtccttaaatatggcttctccattctctttggactccttttgaaactcctatcatacatgtgttggggactttcttgactggtctttctgacttttaaatccttttatctggataaattcatcattatctcccaattgactaattctttgtgtttattgcatttacact

SEQ ID NO: 202964 - DNA, 530 bp, Homo sapiens
gcagcattctcagaaatttctttctgatgtctgcattcaactcatagagttgaagattccctttcatagagcaggtttgaaacactctttctggagtatctggatgtggacatttggagcgctttgatgcctatggtgaaaaagtaaatatcttcccataaaaacgagacagaaggattctcggaaacaagtttgtgatgtgtgtactcagctaacagagcggaacctttctttttacagagcagctttgaaactctatttttgtggattctgcaaattgatatttagattgctttawcgatatcgttggaaaagggaatatcgtcatacaaaatctagacagaagcattctcacaaacttctttgtgatgtgtgtcctcaactaacagagttgaacctttcttttgatgcagcagtttggaaacactctttttgtagaaactgtaagtggatatttggatagctctaacgatttcgttggaaacgggaatatcatcatctaaaatctagacagaagcactattagaaac

SEQ ID NO: 202965 - DNA, 495 bp, Homo sapiens
atggataagacttttaagactttttttgaagaaatcatttcaaactagaataagcaagaggaatagatcaaaacaaaaaggaaaacagtgaaggtgatatacacatcctcttactgaaaattaattttaaagaactttaaattaattttaaagaattaattttaaacactaaaactcagagtcatcaatgtgtctggatacggattcatttttatttcttctgctcagcacttgttttatactttaaattagagtcctcaagtctttcctctgcaatggaaattttatggcatcatgtmaagtatacaaatagtgaaggcattgccagtgttttcttgtgtataagtattctctaccattagaatggaaacgtcatcaaagtgggcccttagtgagagtttgctgagtggatgaatactgtccttaaatatggcttctccattctctttggactccttttgaaactcctatcatacatgtgttggggactttctt

SEQ ID NO: 202966 - DNA, 270 bp, Homo sapiens
cagcagcattctcagaaatttctttctgatgtctgcattcaactcatagagttgaasattccctttcatagagcaggtttgaaacactctttctggagtatctggatgtggacatttggagcgctttgatgcctacggtgaaaaagtaaatatcttcccattaaaacgagacagaaggattctgagaaacaagtttgtgatgtgtgtactcagctaacagagtggaacctctcttttgatgcagcagtttggaaacactctttttgtaga

SEQ ID NO: 202967 - DNA, 270 bp, Homo sapiens
cagcagcattctcagaaatttctttctgatgtctgcattcaactcatagagttgaagattccctttcatagagcaggtttgaaacactctttctggagtatctggatgtggacatttggagcgctttgatgcctacggtgaaaaagtaaatatcttcccatwaaaacgagacagaaggattctgagaaacaagtttgtgatgtgtgtactcagctaacagagtggaacctctcttttgatgcagcagtttggaaacactctttttgtaga

SEQ ID NO: 202968 - DNA, 572 bp, Homo sapiens
aaatcgattcataaatggataagacttttaagactttttttgaagaaatcatttcaaactagaataagcaagaggaatagatcaaaacaaaaaggaaaacagtgaaggtgatatacacatcctcttactgaaaattaattttaaagaactttaaattaattttaaagaattaattttaaacactaaaactcagagtcatcaatgtgtctggatacggattcatttttatttcttctgctcagcacttgttttatactttaaattagagtcctcaagtctttcctctgcaatggaaattttatggcatcatgtaaagtatacaaatagtgaaggcattgccagtgttttcttgtgtataagtattctctaccattagaatggaaacgtcatcaaagtgggcccttagtgagwgtttgctgagtggatgaatactgtccttaaatatggcttctccattctctttggactccttttgaaactcctatcatacatgtgttggggactttcttgactggtctttctgacttttaaatccttttatctggataaattcatcattatctcccaattga

SEQ ID NO: 202969 - DNA, 572 bp, Homo sapiens
aaatcgattcataaatggataagacttttaagactttttttgaagaaatcatttcaaactagaataagcaagaggaatagatcaaaacaaaaaggaaaacagtgaaggtgatatacacatcctcttactgaaaattaattttaaagaactttaaattaattttaaagaattaattttaaacactaaaactcagagtcatcaatgtgtctggatacggattcatttttatttcttctgctcagcacttgttttatactttaaattagagtcctcaagtctttcctctgcaatggaaattttatggcatcatgtaaagtatacaaatagtgaaggcattgccagtgttttcttgtgtataagtattctctaccattagaatggaaacgtcatcaaagtgggcccttagtgagagtttgctgagtggatgaatactgtccttaaatatggcttctccattctctttggactcyttttgaaactcctatcatacatgtgttggggactttcttgactggtctttctgacttttaaatccttttatctggataaattcatcattatctcccaattga

SEQ ID NO: 202970 - DNA, 495 bp, Homo sapiens
atggataagacttttaagactttttttgaagaaatcatttcaaactagaataagcaagaggaatagatcaaaacaaaaaggaaaacagtgaaggtgatatacacatcctcttactgaaaattaattttaaagaactttaaattaattttaaagaattaattttaaacactaaaactcagagtcatcaatgtgtctggatacggattcatttttatttcttctgctcagcacttgttttatactttaaattagagtcctcaagtctttcctctgcaatggaaattttatggcatcatgtaaagtatacaaatagtgaaggcattgccagtgttttcttgtgtataagtattctctaccattagaatggaaacgtcatcaaagtgggcccttagtgagagtttgctgagtggatgaatactgtccttaaatatggcttctccattctctttggactccttttgraactcctatcatacatgtgttggggactttctt

SEQ ID NO: 202971 - DNA, 572 bp, Homo sapiens
aaatcgattcataaatggataagacttttaagactttttttgaagaaatcatttcaaactagaataagcaagaggaatagatcaaaacaaaaaggaaaacagtgaaggtgatatacacatcctcttactgaaaattaattttaaagaactttaaattaattttaaagaattaattttaaacactaaaactcagagtcatcaatgtgtctggatacggattcatttttatttcttctgctcagcacttgttttatactttaaattagagtcctcaagtctttcctctgcaatggaaattttatggcatcatgtaaagtatacaaatagtgaaggcattgccagtgttttcttgtgtataagtattctctaccattagaatggaaacgtcatcaaagtgggcccttagtgagagtttgctgagtggatgaatactgtccttaaatatggcttctccattctctttggactccttttgaaaytcctatcatacatgtgttggggactttcttgactggtctttctgacttttaaatccttttatctggataaattcatcattatctcccaattga

SEQ ID NO: 202972 - DNA, 393 bp, Homo sapiens
acttacagtttctaccaaaagggtgtttccaaactgctgcatcaaaagaaaggttcaactctgttagttgaggacacacatcacaaagaagtttgtgagaatgcttctgtctagattctgtatgacaatattcccttttccaacgatatcgttaaagcaatctaaatatcaatttgcagaatccacaaaaatagagtttcaaagctgctctgtaaaaagaaaggttccactctkttagctgagtagacacatcacaaacttgtttctgagaatccttctgtctcgtttttatgggaagatatttactttttcaccgtaggcatcaaagcgctccaaatgtccacatccagatactccagaaagagtgtttcaaacctgctctatgaaagggaa

SEQ ID NO: 202973 - DNA, 393 bp, Homo sapiens
acttacagtttctaccaaaagggtgtttccaaactgctgcatcaaaagaaaggttcaactctgttagttgaggacacacatcacaaagaagtttgtgagaatgcttctgtctagattctgtatgacaatattcccttttccaacgatatcgttaaagcaatctaaatatcaatttgcagaatccacaaaaatagagtttcaaagctgctctgtaaaaagaaaggttccactcttttagctgagtasacacatcacaaacttgtttctgagaatccttctgtctcgtttttatgggaagatatttactttttcaccgtaggcatcaaagcgctccaaatgtccacatccagatactccagaaagagtgtttcaaacctgctctatgaaagggaa

SEQ ID NO: 202974 - DNA, 319 bp, Homo sapiens
aagctatccaaatatccacttgcagattccacaaaaagagtgtttcaaaactgctctctatcaatggcaaagttcaactctgttagttgargacacatatcaccaacaagtttctgagaatgcttctgtctattttttatgcgaagatatttcctttttcaccgtaggcgtcaaggcgatcgaaatgtccacttccacaaactacaaaaagagtgtttcaaacctgctctatgaaaggccatgttcatctctatgagttgaatggaaatatccgaaagaaatttctgggaatgctgctgtctagtttttatacgaattc

SEQ ID NO: 202975 - DNA, 319 bp, Homo sapiens
aagctatccaaatatccacttgcagattccacaaaaagagtgtttcaaaactgctctctatcaatggcaaagttcaactctgttagttgaagacacatatcaccaacaagtttctgagaatgcttctgtctattttttatgsgaagatatttcctttttcaccgtaggcgtcaaggcgatcgaaatgtccacttccacaaactacaaaaagagtgtttcaaacctgctctatgaaaggccatgttcatctctatgagttgaatggaaatatccgaaagaaatttctgggaatgctgctgtctagtttttatacgaattc

SEQ ID NO: 202976 - DNA, 472 bp, Homo sapiens
tctttgggatgtgtgcattcatctcacagagttaactcttacttttgattgagcagttttgaaactctctttttgttgaatgtgcaagtggatatttggagygctttgaggcctacggtggaaaatgaaatatcttcacataaaaactagacagaagcatttttagaaacttctttgtgaagtgtgcactgatctcaaagagttaagcctttgttttgattgagcagttttgaatctctctttttgtagaatctgcaagaaaacatttggagcgcttttaggcctgaggaggaaaaggaaatattttcacatcaaaactacacagaagaattcggagaagcttctttgtgatgcatgcgtttatctcacagagttgaacctttgttttgattaagcagtttggaaacactctttttgtggaatccgcaagtggacatttagagcgctttgcagcctatgttagaaaaggaaa

SEQ ID NO: 202977 - DNA, 452 bp, Homo sapiens
aacttctttgtgatgcgtgcattaatctcacggagttaaacctttcttttgattgagcagattggaaactctctttttgtaggatctgcaagtggacatttggcagggctttgagtcctgtggtggagaaggaaatatcttcacataaaaagtagatagaagcattctgaraaagttctgtgtgatgtctgcattcatcccctggagttccaactttctttaggagaaccagttttcaaatactctttttggagaatctgcaaggggacatttcaagcaccttgaggcttaagttggaaaaggaaatatcttcacacaaaaaaacagaagaattctgataatcttttttatgatgtgtacgttgagctaacagagttgaaactttcttttgattgtgtagtttggaaataccctttttgtagaatcggcaagtggacatttggagcgctttg

SEQ ID NO: 202978 - DNA, 239 bp, Homo sapiens
tctaatatacactacagaacttcaatgactacaacatacgtaaactttgaaaacattatgcttagtgaaataagccagatgcaaaaggataaatattgcttgaagtacttagaataagcaaatyatagagacagaataatcattaccagggactagtgtgggtgagaagttattgtttaatgggtacagagcttctatatgggatgattaaagagttctggaaatggacggtggtaaag

SEQ ID NO: 202979 - DNA, 203 bp, Homo sapiens
ctgtcacagtcccaagataaaacatttccttaaaatcaagacttgctttaataascaccacatttattacaataataccttcccactataatcaatatggatataaacagcctttgttctatttttctcatacttggaagacttttgctttcattccatgaaaatcttgtatttctcctcaattattctaattagaaaaatag

SEQ ID NO: 202980 - DNA, 203 bp, Homo sapiens
ctgtcacagtcccaagataaaacatttccttaaaatcaagacttgctttaataagcaycacatttattacaataataccttcccactataatcaatatggatataaacagcctttgttctatttttctcatacttggaagacttttgctttcattccatgaaaatcttgtatttctcctcaattattctaattagaaaaatag

SEQ ID NO: 202981 - DNA, 203 bp, Homo sapiens
ctgtcacagtcccaagataaaacatttccttaaaatcaagacttgctttaataagcaccacatttattacaayaataccttcccactataatcaatatggatataaacagcctttgttctatttttctcatacttggaagacttttgctttcattccatgaaaatcttgtatttctcctcaattattctaattagaaaaatag

SEQ ID NO: 202982 - DNA, 391 bp, Homo sapiens
tcaataaaatgtgcatttcttcatggatactctttgaatcatctaaatggagactctttatagaaatattgaatcattaattcttccawctattgtactcctttccaacatactgtcttactgatttttcactttttcctatttatatccattttgttctactaatccgtctgtcattggccttcttctatagccaacctcaaatttcagttcacactagctgtgaacagcactcaaattgctgctgtattcttaaaatataaatttacttcataaagcaaaagtgaattatatgcatgttacaaaaaatattcctagcagagataagatggggtggtatttgctgggatgtgcaacatcgttttttccaaattaatttctctcagaattc

SEQ ID NO: 202983 - DNA, 391 bp, Homo sapiens
tcaataaaatgtgcatttcttcatggatactctttgaatcatctaaatggagactctttatagaaatattgaatcattaattcttccaactaytgtactcctttccaacatactgtcttactgatttttcactttttcctatttatatccattttgttctactaatccgtctgtcattggccttcttctatagccaacctcaaatttcagttcacactagctgtgaacagcactcaaattgctgctgtattcttaaaatataaatttacttcataaagcaaaagtgaattatatgcatgttacaaaaaatattcctagcagagataagatggggtggtatttgctgggatgtgcaacatcgttttttccaaattaatttctctcagaattc

SEQ ID NO: 202984 - DNA, 389 bp, Homo sapiens
tcaataaaatgtgcatttcttcatggatactctttgaatcatctaaatggagactctttatagaaatattgaatcattaattcttccaactattgtactcctttccaacatactgtcttactgatttttcactttttcctatttatatccattttgttctactaayccgtctgtcattggccttcttctatagccaacctcaaatttcagttcacactagctgtgaacagcactcaaattgctgctgtattcttaaaatataaatttacttcataaagcaaaagtgaattatatgcatgttacaaaaaatattcctagcagagataagatggggtggtatttgctgggatgtgcaacatcgttttttccaaattaatttctctcagaat

SEQ ID NO: 202985 - DNA, 347 bp, Homo sapiens
cacttctgtatattcaataaaatgtgcatttcttcatggatactctttgaatcatctaaatggagactctttatagaaatattgaatcattaattcttccaactattgtactcctttccaacatactgtcttactgatttttcactttttcctatttatatccattttgttctactaatccgtctgtcattggccttcttctatagccaacctcaaatttcarttcacactagctgtgaacagcactcaaattgctgctgtattcttaaaatataaatttacttcataaagcaaaagtgaattatatgcatgttacaaaaaatattcctagcagagataagatgggg

SEQ ID NO: 202986 - DNA, 391 bp, Homo sapiens
tcaataaaatgtgcatttcttcatggatactctttgaatcatctaaatggagactctttatagaaatattgaatcattaattcttccaactattgtactcctttccaacatactgtcttactgatttttcactttttcctatttatatccattttgttctactaatccgtctgtcattggccttcttctatagccaacctcaaatttcagttcacaytagctgtgaacagcactcaaattgctgctgtattcttaaaatataaatttacttcataaagcaaaagtgaattatatgcatgttacaaaaaatattcctagcagagataagatggggtggtatttgctgggatgtgcaacatcgttttttccaaattaatttctctcagaattc

SEQ ID NO: 202987 - DNA, 389 bp, Homo sapiens
tcaataaaatgtgcatttcttcatggatactctttgaatcatctaaatggagactctttatagaaatattgaatcattaattcttccaactattgtactcctttccaacatactgtcttactgatttttcactttttcctatttatatccattttgttctactaatccgtctgtcattggccttcttctatagccaacctcaaatttcagttcacactagctgtgaacagcactcaaattgctgctgtattcttaaaatataaatttacttcataaagcaaaagtgaattatatgcatgttacaaaaaatattcctagcagagataagatgggrtggtatttgctgggatgtgcaacatcgttttttccaaattaatttctctcagaat

SEQ ID NO: 202988 - DNA, 387 bp, Homo sapiens
acttacagtttctaccaaaacggtgttcccaaactgctgcatcaaaagaaaggttcaactctgttagttgaggacacacatcacaaagaagtttgtgagaatgcttctgtctagattttgtatgaccatattcccttttccaacgatatcgttaaagcaatctaaatatcaatttgcagaatccacaaaaatagagtttcaaagctgctctgtaaaaagaaaggttccactctgttagctgagtacacacatcacaaacttgtttctgagaatccttctgtctcgtttttatgggaagatatttacttttycaccgtaggcatcaaagcgctccaaatgtccacatccagatactccagaaagagtgtttcaaacctgctctatgaa

SEQ ID NO: 202989 - DNA, 648 bp, Homo sapiens
tctagattttgtatgaccatattcccttttccaacgatatcgttaaagcaatctaaatatcaatttgcagaatccacaaaaatagagtttcaaagctgctctgtaaaaagaaaggttccactctgttagctgagtacacacatcacaaacttgtttctgagaatccttctgtctcgtttttatgggaagatatttactttttcaccgtaggcatcaaagcgctccaaatgtccacatccagatactccagaaagagtgtttcaaacctgctctatgaaagggaatcttcaactctatgagttgaatgcagacatcagaaagaaatttctgagaatgctgcwgtctaccttttatttgaattcccgcttccaacgaaatcctccaagctatccaaatatccacttgcattttccacaaaaagagtgtttcaaaactgctctatcaatagaaatgttcaactcctttagctgggtacacacatcacaaacaagtttcagagaatgcttctgtctagtttttatgggaagacattccctttttcaccaaaggcatcaaagcgctccaaatgtccacttccagacactacaaaaagagtgtttccaacgtgctctaagaaagcgaatgttcaactctgtgacttgaatgcag

SEQ ID NO: 202990 - DNA, 570 bp, Homo sapiens
gctctgtaaaaagaaaggttccactctgttagctgagtacacacatcacaaacttgtttctgagaatccttctgtctcgtttttatgggaagatatttactttttcaccgtaggcatcaaagcgctccaaatgtccacatccagatactccagaaagagtgtttcaaacctgctctatgaaagggaatcttcaactctatgagttgaatgcagacatcagaaagaaatttctgagaatgctgctgtctaccttttatttgaattcccgcttccaacgaaatcctccaagctatccaaatatccacytgcattttccacaaaaagagtgtttcaaaactgctctatcaatagaaatgttcaactcctttagctgggtacacacatcacaaacaagtttctgagaatgcttctgtctagtttttatgggaagacattccctttttcaccaaaggcatcaaagcgctccaaatgtccacttccagacactacaaaaagtgtgtttcctacgtgctctaagaaagcgaatgttcaactctgtgacttgaatgcagatatcacaaagtagtttct

SEQ ID NO: 202991 - DNA, 385 bp, Homo sapiens
gtttcaaacctgctctatgaaagggaatcttcaactctatgagttgaatgcagacatcagaaagaaatttctgagaatgctgctgtctaccttttatttgaattcccgcttccaacgaaatcctccaagctatccaaatatccacctgcattttccacaamaagagtgtttcaaaactgctctatcaatagaaatgttcaactcctttagctgggtacacacatcacaaacaagtttctgagaatgcttctgtctagtttttatgggaagacattccctttttcaccaaaggcatcaaagcgctccaaatgtccacttccagacactacaaaaagtgtgtttcctacgtgctctaagaaagcgaatgttcaactctgtgacttga

SEQ ID NO: 202992 - DNA, 385 bp, Homo sapiens
gtttcaaacctgctctatgaaagggaatcttcaactctatgagttgaatgcagacatcagaaagaaatttctgagaatgctgctgtctaccttttatttgaattcccgcttccaacgaaatcctccaagctatccaaatatccacctgcattttccacaaaaagagtgtttcaaaactgctctatcaatagaaatgttcaactcctttagctgggtacacacatcacaaacaagtttctgagaatgcttctgtctagtttttatgggaagacattccctttttcaccaaaggcatcaaagcrctccaaatgtccacttccagacactacaaaaagtgtgtttcctacgtgctctaagaaagcgaatgttcaactctgtgacttga

SEQ ID NO: 202993 - DNA, 385 bp, Homo sapiens
gtttcaaacctgctctatgaaagggaatcttcaactctatgagttgaatgcagacatcagaaagaaatttctgagaatgctgctgtctaccttttatttgaattcccgcttccaacgaaatcctccaagctatccaaatatccacctgcattttccacaaaaagagtgtttcaaaactgctctatcaatagaaatgttcaactcctttagctgggtacacacatcacaaacaagtttctgagaatgcttctgtctagtttttatgggaagacattccctttttcaccaaaggcatcaaagcgctccaaatgtccacttccagacactacaaaaagwgtgtttcctacgtgctctaagaaagcgaatgttcaactctgtgacttga

SEQ ID NO: 202994 - DNA, 385 bp, Homo sapiens
gtttcaaacctgctctatgaaagggaatcttcaactctatgagttgaatgcagacatcagaaagaaatttctgagaatgctgctgtctaccttttatttgaattcccgcttccaacgaaatcctccaagctatccaaatatccacctgcattttccacaaaaagagtgtttcaaaactgctctatcaatagaaatgttcaactcctttagctgggtacacacatcacaaacaagtttctgagaatgcttctgtctagtttttatgggaagacattccctttttcaccaaaggcatcaaagcgctccaaatgtccacttccagacactacaaaaagtgtgtttccwacgtgctctaagaaagcgaatgttcaactctgtgacttga

SEQ ID NO: 202995 - DNA, 501 bp, Homo sapiens
ctttctttattactgggagagcctcacatgcaaagcagatcaggatattctcttaccaaatgtgttaattaacagtcagttcataatgtaagggtgactcaaatagcagattcaatatcaaacaggaagggcttttgtagcccgttctattttcggtcaaccacaaaccacccacccctgctgaaataaaaacttaaaaggcaggtggaggaaaatatgttctagaccaaggggtaggtactgggtctgcaaaagacatagtgtgccacccacaaacacacaagttcaaggagcgtggctcaatccttcagaaaattggttctaactttcaaatcattagggatcttctttataaaagatatagcaaacaaaaacacaaaatatacccctctaagattattaggaagttaaaaaaagtgacttgtaactttyaataaataactagggaggtaagcttcttcatttctaagattcacaacttttataaaggtgctgtattaa

SEQ ID NO: 202996 - DNA, 313 bp, Homo sapiens
gtaaattcttgaatctgagggtgttcaggggaaacccctgaaatggcagttggtgtcagaagtgagaatcgtcttatatggcctcttcctttgaactttgcagctggacccaaactctgcayaatttgggccagaagtctcgtgttgactttgcagcctaaagtaccttgtagtttgtctaaccctcaataaatttgctttcatcaaatattgtatttgttaccgcaaaattaccatcatgttttttttctccaaataactaacattgggagaaatagccagctgaatctgtaactcaacagaaacaagtgat

SEQ ID NO: 202997 - DNA, 313 bp, Homo sapiens
gtaaattcttgaatctgagggtgttcaggggaaacccctgaaatggcagttggtgtcagaagtgagaatcgtcttatatggcctcttcctttgaactttgcagctggacccaaactctgcataatttgggccagaagtctcgtgttgactttgcagcctaaagtaccttgtagtttgtctaaccctcaataaatttgctttcatcaaatattgtatttgttaccscaaaattaccatcatgttttttttctccaaataactaacattgggagaaatagccagctgaatctgtaactcaacagaaacaagtgat

SEQ ID NO: 202998 - DNA, 313 bp, Homo sapiens
gtaaattcttgaatctgagggtgttcaggggaaacccctgaaatggcagttggtgtcagaagtgagaatcgtcttatatggcctcttcctttgaactttgcagctggacccaaactctgcataatttgggccagaagtctcgtgttgactttgcagcctaaagtaccttgtagtttgtctaaccctcaataaatttgctttcatcaaatattgtatttgttaccgcaaaattaccatcaygttttttttctccaaataactaacattgggagaaatagccagctgaatctgtaactcaacagaaacaagtgat

SEQ ID NO: 202999 - DNA, 619 bp, Homo sapiens
cccacataacaactgcagcctgtaacatcttgctgactggcttgacagaggatggccaatttttgtgtttaggctcagatgtgcagtgctgggttctcaaattgtgtcccagcctggggcagtgtggctttaataacatcctcattatccatcctttatataaaaaaccttatatctgtatgcaaagccatggactcttaagattttgagtgcatcatacatgctacaggcagcagaagatatatgaaggatgtgctttcaggccaatccctgcctagtgtaggcccaggtggtataatgcctcataacasaccccattccctgggcaaagacattgtgaatggtgggattagtatcctcctgtgacatgtgacatcctcctgtgacctactcactatgatttggatggttcccctcaagtttgggctagagtgtcagtgagtggattaactcaggacaattccagttctttctatgtaccttcctttcgtcatgagggatatgaagaaaacattagatcatgttggatgctgtttgtctgttggttggttggttggttgggtttaacaataagagcacgtatctagtcttctagttttgtaaggctgccataataatt

SEQ ID NO: 203000 - DNA, 619 bp, Homo sapiens
cccacataacaactgcagcctgtaacatcttgctgactggcttgacagaggatggccaatttttgtgtttaggctcagatgtgcagtgctgggttctcaaattgtgtcccagcctggggcagtgtggctttaataacatcctcattatccatcctttatataaaaaaccttatatctgtatgcaaagccatggactcttaagattttgagtgcatcatacatgctacaggcagcagaagatatatgaaggatgtgctttcaggccaatccctgcctagtgtaggcccaggtggtataatgcctcataacagaccccattccctgggcaaagacattgtgaatggtgggattagtatcctcctgtgacatgtgacatcctcctgtgacctactcactatgatttggatggttcccctcaartttgggctagagtgtcagtgagtggattaactcaggacaattccagttctttctatgtaccttcctttcgtcatgagggatatgaagaaaacattagatcatgttggatgctgtttgtctgttggttggttggttggttgggtttaacaataagagcacgtatctagtcttctagttttgtaaggctgccataataatt

SEQ ID NO: 203001 - DNA, 431 bp, Homo sapiens
caattccagttctttctatgtaccttcctttcrtcatgagggatatgaagaaaacattagatcatgttggatgctgtttgtctgttggttggttggttggttgggtttaacaataagagcacgtatctagtcttctagttttgtaaggctgccataataatttacatccaagctggtggcttaaaacaacagatatttattctctcacagttgtagaaaccagaagtttggaatcaaagtgtcagaggaccatgttccttccaaaagccctagggaaaaattttaattcttccttgcctcttccagcttttggtggccccaggcattgcttggctgatggcagcataactccagtctctacttttgtcttcatatgtcattattccctatgtttctttgtattctccttttctgtctcttataaggacact

SEQ ID NO: 203002 - DNA, 431 bp, Homo sapiens
caattccagttctttctatgtaccttcctttcgtcatgagggatatgaagaaaacattagatcatgttggatgctgtttgtctgttggttggttggttggttrggtttaacaataagagcacgtatctagtcttctagttttgtaaggctgccataataatttacatccaagctggtggcttaaaacaacagatatttattctctcacagttgtagaaaccagaagtttggaatcaaagtgtcagaggaccatgttccttccaaaagccctagggaaaaattttaattcttccttgcctcttccagcttttggtggccccaggcattgcttggctgatggcagcataactccagtctctacttttgtcttcatatgtcattattccctatgtttctttgtattctccttttctgtctcttataaggacact

SEQ ID NO: 203003 - DNA, 431 bp, Homo sapiens
caattccagttctttctatgtaccttcctttcgtcatgagggatatgaagaaaacattagatcatgttggatgctgtttgtctgttggttggttggttggttgggtttaacaataagagcacgtatctagtcttctagttttgtaaggctgccataataatttacatccaagctggtgrcttaaaacaacagatatttattctctcacagttgtagaaaccagaagtttggaatcaaagtgtcagaggaccatgttccttccaaaagccctagggaaaaattttaattcttccttgcctcttccagcttttggtggccccaggcattgcttggctgatggcagcataactccagtctctacttttgtcttcatatgtcattattccctatgtttctttgtattctccttttctgtctcttataaggacact

SEQ ID NO: 203004 - DNA, 431 bp, Homo sapiens
caattccagttctttctatgtaccttcctttcgtcatgagggatatgaagaaaacattagatcatgttggatgctgtttgtctgttggttggttggttggttgggtttaacaataagagcacgtatctagtcttctagttttgtaaggctgccataataatttacatccaagctggtggcttaaaacaacagatatttattctctcacagttgtagaaaccagaartttggaatcaaagtgtcagaggaccatgttccttccaaaagccctagggaaaaattttaattcttccttgcctcttccagcttttggtggccccaggcattgcttggctgatggcagcataactccagtctctacttttgtcttcatatgtcattattccctatgtttctttgtattctccttttctgtctcttataaggacact

SEQ ID NO: 203005 - DNA, 520 bp, Homo sapiens
cattaaaatgctaagctgaactaagatgttcatgaaatgtattcaaataaacaaacccaawttaaacatgattgtataaaaatatcttacttgaattggtaatataaatgcagaatttgtgaatgtttatttatagttcctgtaatttggggaaattaaagtcacttgggaacaatgtttacttcactagcaaccaaaggagtacaattgaaaaataatgacttgaaaataaaataaaagtaaaaaaggacttcatttcttttcacacagtctgaaagagtgagtgcacaagcttttctctgcccaactcctctttgtccacaaggaattttcagaattcctccgtgtctgtcttataatttcattccttgctcatataagcaagttggttcagaaaccctaagactgttataccgtcagttgggttagtttaaaataacccctatgagcagttcaacactgaattggcaatgctttggaaagcagagaccctgtcagctaaccagccatcctttaaaat

SEQ ID NO: 203006 - DNA, 520 bp, Homo sapiens
cattaaaatgctaagctgaactaagatgttcatgaaatgtattcaaataaacaaacccaaattaaacatgattgtataaaaatatcttacttgaattggtaatataaatgcaraatttgtgaatgtttatttatagttcctgtaatttggggaaattaaagtcacttgggaacaatgtttacttcactagcaaccaaaggagtacaattgaaaaataatgacttgaaaataaaataaaagtaaaaaaggacttcatttcttttcacacagtctgaaagagtgagtgcacaagcttttctctgcccaactcctctttgtccacaaggaattttcagaattcctccgtgtctgtcttataatttcattccttgctcatataagcaagttggttcagaaaccctaagactgttataccgtcagttgggttagtttaaaataacccctatgagcagttcaacactgaattggcaatgctttggaaagcagagaccctgtcagctaaccagccatcctttaaaat

SEQ ID NO: 203007 - DNA, 394 bp, Homo sapiens
tttatttatagttcctgtaatttggggaaattaaagtcacttgggaacaatgtttacttcactagcaaccaaaggagtacaattgaaaaataatgacttgaaaataaaataaaagtaaaaaaggacttcatttcttttcacacagtctgaaagagtgagtgcacaagcttttctctgcccaactcctctttgtccacaasgaattttcagaattcctccgtgtctgtcttataatttcattccttgctcatataagcaagttggttcagaaaccctaagactgttataccgtcagttgggttagtttaaaataacccctatgagcagttcaacactgaattggcaatgctttggaaagcagagaccctgtcagctaaccagccatcctttaaaa

SEQ ID NO: 203008 - DNA, 394 bp, Homo sapiens
tttatttatagttcctgtaatttggggaaattaaagtcacttgggaacaatgtttacttcactagcaaccaaaggagtacaattgaaaaataatgacttgaaaataaaataaaagtaaaaaaggacttcatttcttttcacacagtctgaaagagtgagtgcacaagcttttctctgcccaactcctctttgtccacaaggaattttcagaattcctccgtgtctgtcttataatttcattccttgctcatmtaagcaagttggttcagaaaccctaagactgttataccgtcagttgggttagtttaaaataacccctatgagcagttcaacactgaattggcaatgctttggaaagcagagaccctgtcagctaaccagccatcctttaaaa

SEQ ID NO: 203009 - DNA, 394 bp, Homo sapiens
tttatttatagttcctgtaatttggggaaattaaagtcacttgggaacaatgtttacttcactagcaaccaaaggagtacaattgaaaaataatgacttgaaaataaaataaaagtaaaaaaggacttcatttcttttcacacagtctgaaagagtgagtgcacaagcttttctctgcccaactcctctttgtccacaaggaattttcagaattcctccgtgtctgtcttataatttcattccttgctcatataagcaagttggttcagaaaccctaagactsttataccgtcagttgggttagtttaaaataacccctatgagcagttcaacactgaattggcaatgctttggaaagcagagaccctgtcagctaaccagccatcctttaaaa

SEQ ID NO: 203010 - DNA, 436 bp, Homo sapiens
attcaagaagtgacttgggtactgttaaaaacattcagttttatttattcagaaaggtatggtttggagttgaaatttatgtttaaaagggaagcagatcataraagtttggtaaatttgtagcctgatgatgtgatagaaaagaaaaactcattttctgaggagaaattcaagctggctgtagaaatttgcataagtaataaggagtcaaatgttaatcatgaagacaatggggaaaatatctccagggcatgtcagaggtctttatggcagcccctcccatcacaggcccagagacctaggaggaaaaatggcttcataggttgggtccagggccttgctgctttgagcactctccaaacttgctcccctgcatcccagctgtggctaagaggagccagtgtatagatcaggtcattgcttcagagggtgaaag

SEQ ID NO: 203011 - DNA, 436 bp, Homo sapiens
attcaagaagtgacttgggtactgttaaaaacattcagttttatttattcagaaaggtatggtttggagttgaaatttatgtttaaaagggaagcagatcatagaagtttggtaaatttgtagcctgatgatgtgatagaaaagaaaaacycattttctgaggagaaattcaagctggctgtagaaatttgcataagtaataaggagtcaaatgttaatcatgaagacaatggggaaaatatctccagggcatgtcagaggtctttatggcagcccctcccatcacaggcccagagacctaggaggaaaaatggcttcataggttgggtccagggccttgctgctttgagcactctccaaacttgctcccctgcatcccagctgtggctaagaggagccagtgtatagatcaggtcattgcttcagagggtgaaag

SEQ ID NO: 203012 - DNA, 436 bp, Homo sapiens
attcaagaagtgacttgggtactgttaaaaacattcagttttatttattcagaaaggtatggtttggagttgaaatttatgtttaaaagggaagcagatcatagaagtttggtaaatttgtagcctgatgatgtgatagaaaagaaaaactcattttctgaggagaaattcaagctggctgtagaaatttgcataagtaataaggagycaaatgttaatcatgaagacaatggggaaaatatctccagggcatgtcagaggtctttatggcagcccctcccatcacaggcccagagacctaggaggaaaaatggcttcataggttgggtccagggccttgctgctttgagcactctccaaacttgctcccctgcatcccagctgtggctaagaggagccagtgtatagatcaggtcattgcttcagagggtgaaag

SEQ ID NO: 203013 - DNA, 436 bp, Homo sapiens
attcaagaagtgacttgggtactgttaaaaacattcagttttatttattcagaaaggtatggtttggagttgaaatttatgtttaaaagggaagcagatcatagaagtttggtaaatttgtagcctgatgatgtgatagaaaagaaaaactcattttctgaggagaaattcaagctggctgtagaaatttgcataagtaataaggagtcaaatgttaatcatgaagacaatggggaaaatatctccagggcatgtcagaggtctttatggcagcccctcccatcacaggcccagagacctaggaggaaaaatggcttcataggttgggtccagggccttgctgctttgarcactctccaaacttgctcccctgcatcccagctgtggctaagaggagccagtgtatagatcaggtcattgcttcagagggtgaaag

SEQ ID NO: 203014 - DNA, 523 bp, Homo sapiens
tttgtagcctgatgatgtgatagaaaagaaaaactcattttctgaggagaaattcaagctggctgtagaaatttgcataagtaataaggagtcaaatgttaatcatgaagacaatggggaaaatatctccagggcatgtcagaggtctttatggcagcccctcccatcacaggcccagagacctaggaggaaaaatggcttcataggttgggtccagggccttgctgctttgagcactctccaaacttgctcccctgcatcccagctgtggctaagaggagccagtgtatagatcaggtcattgcttcagagggtgmaagtctcaagccttggcagcttacatgtggcattgggcctccaggtacacagaaatcaagaattgaggtttgagaacctccacatagatttcagagaatttgtggaaatgtctggatgtccaggcagaggtgtgctgcaggggcagagtcctcatggaaaacttctgttagcgcagagtggaagggaaatgtggagtcaagcactg

SEQ ID NO: 203015 - DNA, 336 bp, Homo sapiens
aattttagctctcacaatccccatgtgttgtgggaggaacccagtgggaggtaattgaatcatggaggtgggtctttcccatgctgttcttgtgatagtaaataagtctcatgactcatgagrtctgatggtttgataaaggggagttcccctgcatacactctttcttgcctgctgccatgtaagacgtgtttgcttctcctttgctttccaccatgattgtgaggcctccccagccatgtggatctgtgagtcaattaaacctctttcctttataaattacccagtcccaagtatgtctttattagcagcctgagaacagactaatacaacagg

SEQ ID NO: 203016 - DNA, 401 bp, Homo sapiens
attttagctctcacaatccccatgtgttgtgggaggaacccagtgggaggtaattgaatcatggaggtgggtctttcccatgctgttcttgtgatagtaaataagtctcatgactcatgagatctgatggtttgataaaggggagttcccctgcayacactctttcttgcctgctgccatgtaagacgtgtttgcttctcctttgctttccaccatgattgtgaggcctccccagccatgtggatctgtgagtcaattaaacctctttcctttataaattacccagtcccaagtatgtctttattagcagcctgagaacagactaatacaacaggattgtggaaagttctccaggcattcagagcacccaccttcctgaattaggagtagggaaaccaact

SEQ ID NO: 203017 - DNA, 369 bp, Homo sapiens
caatccccatgtgttgtgggaggaacccagtgggaggtaattgaatcatggaggtgggtctttcccatgctgttcttgtgatagtaaataagtctcatgactcatgagatctgatggtttgataaaggggagttcccctgcatacactctttcttgcctgctgccaygtaagacgtgtttgcttctcctttgctttccaccatgattgtgaggcctccccagccatgtggatctgtgagtcaattaaacctctttcctttataaattacccagtcccaagtatgtctttattagcagcctgagaacagactaatacaacaggattgtggaaagttctccaggcattcagagcacccaccttcctgaatt

SEQ ID NO: 203018 - DNA, 401 bp, Homo sapiens
attttagctctcacaatccccatgtgttgtgggaggaacccagtgggaggtaattgaatcatggaggtgggtctttcccatgctgttcttgtgatagtaaataagtctcatgactcatgagatctgatggtttgataaaggggagttcccctgcatacactctttcttgcctgctgccatgtaagacgtgtttgcttctcctttgctttccaccatgattgtgaggcctccccagccatgtggatctgtgagtcaattaaacctcttwcctttataaattacccagtcccaagtatgtctttattagcagcctgagaacagactaatacaacaggattgtggaaagttctccaggcattcagagcacccaccttcctgaattaggagtagggaaaccaact

SEQ ID NO: 203019 - DNA, 401 bp, Homo sapiens
attttagctctcacaatccccatgtgttgtgggaggaacccagtgggaggtaattgaatcatggaggtgggtctttcccatgctgttcttgtgatagtaaataagtctcatgactcatgagatctgatggtttgataaaggggagttcccctgcatacactctttcttgcctgctgccatgtaagacgtgtttgcttctcctttgctttccaccatgattgtgaggcctccccagccatgtggatctgtgagtcaattaaacctctttcctttataaattacccagtcccaagtatgtctttattagcagcctgagaacagactaatacaacaggattgtggraagttctccaggcattcagagcacccaccttcctgaattaggagtagggaaaccaact

SEQ ID NO: 203020 - DNA, 255 bp, Homo sapiens
tttcaccatgttggtcaggctggtctcsaactcctgacttcaggtgatctacccacttcagcctcccaaagtgctgggattacaggcatgcgcccggccaactttttgacatatttcaagatggctactcggaagactggaaatagcttcttctacaagaatagctgaaaagctgtgtttgttggggagatttgcatttgtagagaaaatctgcattgatatagacaggctttccctgagatactcccttgtctg

SEQ ID NO: 203021 - DNA, 255 bp, Homo sapiens
tttcaccatgttggtcaggctggtctcgaactcctgacttcaggtgatctacccacttcagcctcccaaagtgctgggattacaggcrtgcgcccggccaactttttgacatatttcaagatggctactcggaagactggaaatagcttcttctacaagaatagctgaaaagctgtgtttgttggggagatttgcatttgtagagaaaatctgcattgatatagacaggctttccctgagatactcccttgtctg

SEQ ID NO: 203022 - DNA, 255 bp, Homo sapiens
tttcaccatgttggtcaggctggtctcgaactcctgacttcaggtgatctacccacttcagcctcccaaagtgctgggattacaggcatgcgcccggccarctttttgacatatttcaagatggctactcggaagactggaaatagcttcttctacaagaatagctgaaaagctgtgtttgttggggagatttgcatttgtagagaaaatctgcattgatatagacaggctttccctgagatactcccttgtctg

SEQ ID NO: 203023 - DNA, 255 bp, Homo sapiens
tttcaccatgttggtcaggctggtctcgaactcctgacttcaggtgatctacccacttcagcctcccaaagtgctgggattacaggcatgcgcccggccaactttttgacatatttcaagatggctactcggaagactggaaatagcttcttctacaagaatagctgaaaagctgtgtttgttggggagatttgcatttgtagagaaaatctgyattgatatagacaggctttccctgagatactcccttgtctg

SEQ ID NO: 203024 - DNA, 475 bp, Homo sapiens
ttagagtgtaagacgctttttaaaggtatatttgcaatttgtgtcaaaacatttaaatatacatttgttactttataaaatttcaaataatttaagctaaatacatagwatatgcagaaaatttagcaatatttgtatgtagcaccttactgtgcattactgtaaccagctgtctaatataaagaactaattaaggtagtacctacttttcaaatatcgcattttttcacagacctattaaataagacaaataacatttaaactttatttttaaatttgcagaatagtatttttcagcagatggtttattttagcaaattccatcttcacattgtgctatgcttttatgagttccagctgttaacggataatattttactgctgaatctatcatgtgtgatataattgctcattatgtgccttaaaacacaagcgatatggttattttcaacttggagcaaattaaaatcttatc

SEQ ID NO: 203025 - DNA, 466 bp, Homo sapiens
gacatatatgtgacaaataatatttagagtgtaagacgctttttaaaggtatatttgcaatttgtgtcaaaacatttaaatatacatttgttactttataaaatttcaaataatttaagctaaatacatagtatatgcagaaaatttagcaatatttgtatgtagcaccttactgtgcattactgtaaccagctgtctaatataaagaactaattaaggtagtacctacttttcaaatatcgcattttttcacagacctattaaataagacaaataacatttaaactttatttttaaatttgcagaatagtatttttcagcagatggtttattttagcaaattccrtcttcacattgtgctatgcttttatgagttccagctgttaacggataatattttactgctgaatctatcatgtgtgatataattgctcattatgtgccttaaaacacaagcgatatggtt

SEQ ID NO: 203026 - DNA, 475 bp, Homo sapiens
ttagagtgtaagacgctttttaaaggtatatttgcaatttgtgtcaaaacatttaaatatacatttgttactttataaaatttcaaataatttaagctaaatacatagtatatgcagaaaatttagcaatatttgtatgtagcaccttactgtgcattactgtaaccagctgtctaatataaagaactaattaaggtagtacctacttttcaaatatcgcattttttcacagacctattaaataagacaaataacatttaaactttatttttaaatttgcagaatagtatttttcagcagatggtttattttagcaaattccatcttcacattgtgctatgcttttatgagttccagctgttaacsgataatattttactgctgaatctatcatgtgtgatataattgctcattatgtgccttaaaacacaagcgatatggttattttcaacttggagcaaattaaaatcttatc

SEQ ID NO: 203027 - DNA, 464 bp, Homo sapiens
gagattctggaacactgctaaaatgtaggaatgtttgtccctcacaaagagtccagagcaccgcttgtgggttctgagtgtttgtccctcacataggattgcagaacacagctgctaggttctgagtgtttstcccaaacataggattccaaaacaccgctcagagggtctgaaagtttcttcctcaccaaggattccagaacactgctgctgggttctgaaagtttgtccctcacatacgattccagaacactgctatgaggctctgaatgtttgtccctcaaagggattccagaacactgcttttgagttctgagtgtttgtccgacacaaaggattccagaacactgctgctggcttctgagtgtttgtccctcacataggatttcagaacactgctatgagggtctgcatgtttttccctcagaaagcattctgtatcactgctacgagtgtctgaatgc

SEQ ID NO: 203028 - DNA, 464 bp, Homo sapiens
gagattctggaacactgctaaaatgtaggaatgtttgtccctcacaaagagtccagagcaccgcttgtgggttctgagtgtttgtccctcacataggattgcagaacacagctgctaggttctgagtgtttctcccaaacataggattccaaaacaccgctcagagggtctgaaagtttcttcctcaccaaggattccagaacactgctgctgggttctgaaagtttgtccctcacatacgattccrgaacactgctatgaggctctgaatgtttgtccctcaaagggattccagaacactgcttttgagttctgagtgtttgtccgacacaaaggattccagaacactgctgctggcttctgagtgtttgtccctcacataggatttcagaacactgctatgagggtctgcatgtttttccctcagaaagcattctgtatcactgctacgagtgtctgaatgc

SEQ ID NO: 203029 - DNA, 576 bp, Homo sapiens
ctaatgccggggtctgaatgtttgtccctcacctaggattgcagaacactgctacgaggttctgaatctttgtccatcacgtagcattatagaacactgctacgaagttctgaatgtttttccctcagagaggatcaaagaacactgctgctagygtctgaaattttgatgatcacgtaggattccagaactctcctgctgtggtctgtatgtttgtctctcacataggattccagaacactgctacgagggtctgaatgtttgtccctcacaaaggattctagaacactgctgctgggttctgagtgattgtccctcacataggattccagaacactgctgctgggttctgagtgtttgtccctcacataggattccagaacactgctacaagggtctgaatgtttatccctcacaaagggttccagaacactgttactggattctgagtgtttgtccctcatattggattccagaacaatgctacgagggtctgaatatttttccctcacataggattcgaaaacactcttacgagggtgtgaatgtttttccctcccaaaggaatccagaaca

SEQ ID NO: 203030 - DNA, 384 bp, Homo sapiens
gggttctgagtgattgtccctcacataggattccagaacactgytgctgggttctgagtgtttgtccctcacataggattccagaacactgctacaagggtctgaatgtttatccctcacaaagggttccagaacactgttactggattctgagtgtttgtccctcatattggattccagaacaatgctacgagggtctgaatatttttccctcacataggattcgaaaacactcttacgagggtgtgaatgtttttccctcccaaaggaatccagaacactgctgctgggctctgaatgtttgtccctcatataggattccagaacactgctacgaggatctgaatgttttcccttacaaaggattgtagaacactgctactg

SEQ ID NO: 203031 - DNA, 573 bp, Homo sapiens
tgctgctgggttctgagtgattgtccctcacataggattccagaacactgctgctgggttctgagtgtttgtccctcacataggattccagaacactgctacaaggrtctgaatgtttatccctcacaaagggttccagaacactgttactggattctgagtgtttgtccctcatattggattccagaacaatgctacgagggtctgaatatttttccctcacataggattcgaaaacactcttacgagggtgtgaatgtttttccctcccaaaggaatccagaacactgctgctgggctctgaatgtttgtccctcatataggattccagaacactgctacgaggatctgaatgttttcccttacaaaggattgtagaacactgctactgggttctgtttatttgcccctcacaaaggattccagagcactgctgcatatttcttagtgtttgcccctcacataggattccagaacacttctccaaggttctgaatgtttgccctcagataggattccagtacactggctggattctgagtgtttgtccctcacataggattccagatcact

SEQ ID NO: 203032 - DNA, 318 bp, Homo sapiens
attccagaactctcctgctgggttctgtttgtttacccctcacaaaggaatccacagcactgttgctggtttctgagtgtttgtccctcactcaggataccagaacactgctacgatggtctgaatgtttgtccgtcacaaaggattcataacactgckatgggttctgactgtttgtccctcacaatggattccagaaaactgctttgagagtctcaatgtttgtccctcacaaagtattccagagcactgctgcggggttctgtgtgtttgtccctcacatgggattcaaaaacactcctgctgggttcagagtgt

SEQ ID NO: 203033 - DNA, 318 bp, Homo sapiens
attccagaactctcctgctgggttctgtttgtttacccctcacaaaggaatccacagcactgttgctggtttctgagtgtttgtccctcactcaggataccagaacactgctacgatggtctgaatgtttgtccgtcacaaaggattcataacactgctrtgggttctgactgtttgtccctcacaatggattccagaaaactgctttgagagtctcaatgtttgtccctcacaaagtattccagagcactgctgcggggttctgtgtgtttgtccctcacatgggattcaaaaacactcctgctgggttcagagtgt

SEQ ID NO: 203034 - DNA, 318 bp, Homo sapiens
attccagaactctcctgctgggttctgtttgtttacccctcacaaaggaatccacagcactgttgctggtttctgagtgtttgtccctcactcaggataccagaacactgctacgatggtctgaatgtttgtccgtcacaaaggattcataacactgctatgggttctgactgtttgtccctcacaatggattccagaaaactgctttgagagtctcaatgtttgtccctcacaaagtattccagagcactgctgcggggwtctgtgtgtttgtccctcacatgggattcaaaaacactcctgctgggttcagagtgt

SEQ ID NO: 203035 - DNA, 488 bp, Homo sapiens
tttgtcactcacataggattccagaacactgctgctgggttctgagtgtttgtcctcacatacrattccagaacactgctatgaggttctgaatgtttgtccctcacaaaggattccagaacactgcttctgagttctgagtgtttgtctgtcaaataggattccagaacactgctgctgggctctgtttgtttgtccatcacaaaggattccagaacactgctataggtttctgagtgtttgtccctcacataggattccagaacaattctacgaggctccgaatgtttgtccttcagataggatttcagaacacagtggctgggttctgagtgtttgtccctcacatagggtatcagaacactgctgctgggatctgagcgtttgtctttcacagaggattccagaacactgctgctttgttctgagtgtttgtccctcacataggattccagaacactgccgctcggtactgagggtttgtccct

SEQ ID NO: 203036 - DNA, 488 bp, Homo sapiens
tttgtcactcacataggattccagaacactgctgctgggttctgagtgtttgtcctcacatacgattccagaacactgctatgaggttctgaatgtttgtccctcacaaaggattccagaacactgcttctgagttctgagtgtttgtctgtcaaataggattccagaacactgctgctgggctctgtttgtttgtccatcacaaaggatyccagaacactgctataggtttctgagtgtttgtccctcacataggattccagaacaattctacgaggctccgaatgtttgtccttcagataggatttcagaacacagtggctgggttctgagtgtttgtccctcacatagggtatcagaacactgctgctgggatctgagcgtttgtctttcacagaggattccagaacactgctgctttgttctgagtgtttgtccctcacataggattccagaacactgccgctcggtactgagggtttgtccct

SEQ ID NO: 203037 - DNA, 488 bp, Homo sapiens
tttgtcactcacataggattccagaacactgctgctgggttctgagtgtttgtcctcacatacgattccagaacactgctatgaggttctgaatgtttgtccctcacaaaggattccagaacactgcttctgagttctgagtgtttgtctgtcaaataggattccagaacactgctgctgggctctgtttgtttgtccatcacaaaggattccagaacactgctatargtttctgagtgtttgtccctcacataggattccagaacaattctacgaggctccgaatgtttgtccttcagataggatttcagaacacagtggctgggttctgagtgtttgtccctcacatagggtatcagaacactgctgctgggatctgagcgtttgtctttcacagaggattccagaacactgctgctttgttctgagtgtttgtccctcacataggattccagaacactgccgctcggtactgagggtttgtccct

SEQ ID NO: 203038 - DNA, 488 bp, Homo sapiens
tttgtcactcacataggattccagaacactgctgctgggttctgagtgtttgtcctcacatacgattccagaacactgctatgaggttctgaatgtttgtccctcacaaaggattccagaacactgcttctgagttctgagtgtttgtctgtcaaataggattccagaacactgctgctgggctctgtttgtttgtccatcacaaaggattccagaacactgctataggtttctgagtgtttgtccctcacataggattccagaacaattctacgaggctccgaatgtttgtccttcagataggatttcagarcacagtggctgggttctgagtgtttgtccctcacatagggtatcagaacactgctgctgggatctgagcgtttgtctttcacagaggattccagaacactgctgctttgttctgagtgtttgtccctcacataggattccagaacactgccgctcggtactgagggtttgtccct

SEQ ID NO: 203039 - DNA, 416 bp, Homo sapiens
tactctctgtaccaaatatgtctcaagcctggtaaaaaatggaccctataattttcctggacaacatttccttataaattcaaatttacctaaaattatctcctccataattattccttaagcttctttgagatcagtagcttcaaagtaggtgaagtctcagtaactcgagcagaagatgttacctattaagcatctagcactatcgcaggaattggttttcactcaattgtttaattatcatcactgttctctctcaattaggaaaaaaataaggatacaagagaatagaaagtagggcagtaycaggtattgtgttggagaaaggcagaaaaattgaggagcaatgaagtgcatgtatggagagttacgctgtgaagatagtacttcaatagtttccaacacggtgcaaaaag

SEQ ID NO: 203040 - DNA, 416 bp, Homo sapiens
tactctctgtaccaaatatgtctcaagcctggtaaaaaatggaccctataattttcctggacaacatttccttataaattcaaatttacctaaaattatctcctccataattattccttaagcttctttgagatcagtagcttcaaagtaggtgaagtctcagtaactcgagcagaagatgttacctattaagcatctagcactatcgcaggaattggttttcactcaattgtttaattatcatcactgttctctctcaattaggaaaaaaataaggatacaagagaatagaaagtagggcagtaccaggtattgtgttggagaaaggcagaaaaattgaggagcaatgaagtgcatgtayggagagttacgctgtgaagatagtacttcaatagtttccaacacggtgcaaaaag

SEQ ID NO: 203041 - DNA, 267 bp, Homo sapiens
tgtggtaaacatattaaaataatttggcatgggaamtgttttttctcttttaaatttaattatggtaagaaagaagagcattttaaagaagatgttaatttacatcaacaatatgcaagagaaaataatgtagagtatgtatattagagaaacacataactgcatatatgtatggttaaaacttaatgccttctggctttgtcatttataagaattattacctacacaaggagtactgtgctgaaccctttccatttccttagtttt

SEQ ID NO: 203042 - DNA, 267 bp, Homo sapiens
tgtggtaaacatattaaaataatttggcatgggaactgttttttctcttttaaatttaattatggtaagaaagaagagcattttaaagaagatgttaatttmcatcaacaatatgcaagagaaaataatgtagagtatgtatattagagaaacacataactgcatatatgtatggttaaaacttaatgccttctggctttgtcatttataagaattattacctacacaaggagtactgtgctgaaccctttccatttccttagtttt

SEQ ID NO: 203043 - DNA, 267 bp, Homo sapiens
tgtggtaaacatattaaaataatttggcatgggaactgttttttctcttttaaatttaattatggtaagaaagaagagcattttaaagaagatgttaatttacatcaacaatatgcaagagaaamtaatgtagagtatgtatattagagaaacacataactgcatatatgtatggttaaaacttaatgccttctggctttgtcatttataagaattattacctacacaaggagtactgtgctgaaccctttccatttccttagtttt

SEQ ID NO: 203044 - DNA, 376 bp, Homo sapiens
caaatagttatcacatgttttattttaaataagcataaatagtggtagaaattaaggaaatwtatttattagagaaaacttagaaatatgaaggctctagttatatttatttcttatgtatcacatcctcaattttaaataaaaagcattaataatagtagaaattaagaaaatacatttattagagaagtctattagaaatatcaaggcttaatctaattatatttgtttgttaactgaacttgagacatatgaatattcacatactttaagatattttatcacctatttgaagagggactctggccactataagaacaactcgcacatagcaaaaattagtgattgaatacattctaaagagtaacatacattt

SEQ ID NO: 203045 - DNA, 376 bp, Homo sapiens
caaatagttatcacatgttttattttaaataagcataaatagtggtagaaattaaggaaatatatttattagagaaaacttagaaatatgaaggctctagttatatttrtttcttatgtatcacatcctcaattttaaataaaaagcattaataatagtagaaattaagaaaatacatttattagagaagtctattagaaatatcaaggcttaatctaattatatttgtttgttaactgaacttgagacatatgaatattcacatactttaagatattttatcacctatttgaagagggactctggccactataagaacaactcgcacatagcaaaaattagtgattgaatacattctaaagagtaacatacattt

SEQ ID NO: 203046 - DNA, 376 bp, Homo sapiens
caaatagttatcacatgttttattttaaataagcataaatagtggtagaaattaaggaaatatatttattagagaaaacttagaaatatgaaggctctagttatatttatttcttatgtatcacatcctcaattttaaataaaaagcattaataatagtagaaattaagaaaatacatttattagagaagtctattagaaatatcaaggcttaatctaattatatttgtttgttaactgaacttgagacatatgaatattcacatactttaagatattttatcacctatttgaagagggactctggccactataagaacaactcgcacatagcaaaaaytagtgattgaatacattctaaagagtaacatacattt

SEQ ID NO: 203047 - DNA, 518 bp, Homo sapiens
gttaataataattactacagcaatcttttctagacaagggaaagtgaagcaactaattaaccctcaaggaaaaaaaggtttttttcactgctaaagactattaactctgacatgagttttagaatatttttgctttctctctctttgcctgtattttctttattttttattctaacattttcgatttacccaaggattttgttgctagatggtggttctggtaggctgatcaaagttcataccacaggcagttaattttaccgagatggctcctggtttctttcttttttaaataaatcataaccactgccgaggttgatatgaggacttctctccattggcaagtagcattgtagccacaacctcttattaaagcttgaaacaaaatggtgattactagtgtttatggccaaattttgttcatgcctgcccactgaatttgtttggataccaggaaattrtggactgtgtgattcgaattaggataagagattaaaccctgggagccattctttagc

SEQ ID NO: 203048 - DNA, 462 bp, Homo sapiens
actgactatattataaaatatgctaaaattgtactgcaaatgaactctcctcacctcccaaataataacaaaacatacagtgaaacaaaattgtacaagtttatattaaggctctcaaatttaaactaagcataaaaactgagcaatttatcttgggattctaaaaaataaaaatgaatctaacaaaattcaaattgatgatacccgacatgttgtcataatataacaaagtttactctctgaagaaatatcaagttttaaaaataaataggaacaaaaccaagcatcatctaaaggccagtttctagttttctcagcaccatgggtaacttttgtaagaaatgagataatcctgtagtcccagctacttggggggctgaggcaggagaatggccagaacccgggaggcggagcttgcagtgagcggagatcgcrccactgcattccggcctgggtgaaaga

SEQ ID NO: 203049 - DNA, 414 bp, Homo sapiens
agcctgtgaatagtggcagcatttaaaattaataccatgcaattaccttctgttctatgataatctttcatattttctcttgttttctcaaactcttcataactcttaggtcaaatttcatgcactatatagttcccttccttttgtatcacctttatgtagctaagattatagtaagttsttaacaagaatttatagatttatcggtcaaattattaaccgttcaacaagaagaccaaagccaatgtaatatttttaaaagtagggattaagaaaattacctttggtattatccttaaagagagttttagtccttattttccaatacatacactcaactatacctcccgttttgtaagaaaaccacctgcattagggaacatttcttaaattgttgaagtcttaacattgata

SEQ ID NO: 203050 - DNA, 414 bp, Homo sapiens
agcctgtgaatagtggcagcatttaaaattaataccatgcaattaccttctgttctatgataatctttcatattttctcttgttttctcaaactcttcataactcttaggtcaaatttcatgcactatatagttcccttccttttgtatcacctttatgtagctaagattatagtaagttgttaacaagaatttatagatttatcggtcaaattattaaccgttcaacaagaagaccaaagccaatgtaatatttttaaaagtagggattaagaaaattacctttggtattatccttaaagagagttttagtccttattttccaatacatacactcaactatacctcccrttttgtaagaaaaccacctgcattagggaacatttcttaaattgttgaagtcttaacattgata

SEQ ID NO: 203051 - DNA, 414 bp, Homo sapiens
agcctgtgaatagtggcagcatttaaaattaataccatgcaattaccttctgttctatgataatctttcatattttctcttgttttctcaaactcttcataactcttaggtcaaatttcatgcactatatagttcccttccttttgtatcacctttatgtagctaagattatagtaagttgttaacaagaatttatagatttatcggtcaaattattaaccgttcaacaagaagaccaaagccaatgtaatatttttaaaagtagggattaagaaaattacctttggtattatccttaaagagagttttagtccttattttccaatacatacactcaactatacctcccgttttgtaagaaaaccacctgcattwgggaacatttcttaaattgttgaagtcttaacattgata

SEQ ID NO: 203052 - DNA, 503 bp, Homo sapiens
aacaatccactcattcaaatctaaatcactgacctgatttgaagatgaatcatgccaaaataaagtcatgctttcctattaagtgtgttgcctcagtgcaagcttttgaatggcttgttcttaaggtttgaagtggggatttccagtgacaaagaaacacaatttgatctcataaccctagacrcccagacttattttaaatgatagagacttaagattgagagaaaatctgagtcatcatccagttcagtatttttcacttagtggaaaatgtactggtcaccttgggtttgaacagtttagcaacattgcaggatcttctacagatgcatacataagcatttgaacaaattctctaggtaggcaaagatcattgcagccgaatgtctaatgatctttatcgcagagttatctatccaatgttccagggtaaatgttctattattaacattcctgaggaaatacattcatggatatatatgtttagtgtattatttaactac

SEQ ID NO: 203053 - DNA, 503 bp, Homo sapiens
aacaatccactcattcaaatctaaatcactgacctgatttgaagatgaatcatgccaaaataaagtcatgctttcctattaagtgtgttgcctcagtgcaagcttttgaatggcttgttcttaaggtttgaagtggggatttccagtgacaaagaaacacaatttgatctcataaccctagacgcccagacttattttaaatgatagagacttaagattgagagaaaatctgagtcatcatccagttcagtatttttcacttagtggraaatgtactggtcaccttgggtttgaacagtttagcaacattgcaggatcttctacagatgcatacataagcatttgaacaaattctctaggtaggcaaagatcattgcagccgaatgtctaatgatctttatcgcagagttatctatccaatgttccagggtaaatgttctattattaacattcctgaggaaatacattcatggatatatatgtttagtgtattatttaactac

SEQ ID NO: 203054 - DNA, 501 bp, Homo sapiens
atgtttgaacactgaagtctctgtttgcttaacttagtagtcagtgaaagaatagacagaaatttcattaaagacctggaacccgtmactcttccggtctctgctgagtggctctgtgtgcatttcagggcacacttttaacacccagccggttggttgacaactctgccttagtcttcacattctgctttcccatagcttcatggtcatctggaggtgaaagcttagggccttctcatatttttcttgagaataagcattgtgcttagaatgtgcacaatcatacgtgtgtgagtgaccttttatagtgccagtaatatgtcagaagtcttcaaaactcctatttatatttcctagctttttaagttttccagctaccatattatttgccctaactgttatctaccactttagtctaccatgatttaaaaaagttgcctttcaatgttttcaataagtatgctagttaaaaagactttcatgggccagttacaaatgagg

SEQ ID NO: 203055 - DNA, 501 bp, Homo sapiens
atgtttgaacactgaagtctctgtttgcttaacttagtagtcagtgaaagaatagacagaaatttcattaaagacctggaacccgtaactcttccggtctctgctgagtggctctgtgtgcatttcagggcacacttttaacacccagccggttggttgacaactctgccttagtcttcacattctgctttcccatagcttcatggtcatctggaggtgaaagcttagggccttctcatatttttcttgagaataagcattgtgcttagaatgtgcacaatcatacgtgtgtgagtgaccttttatagtgccagtaatatgtcagaagtcttcaaaactcctatttatatttcctagctttttragttttccagctaccatattatttgccctaactgttatctaccactttagtctaccatgatttaaaaaagttgcctttcaatgttttcaataagtatgctagttaaaaagactttcatgggccagttacaaatgagg

SEQ ID NO: 203056 - DNA, 408 bp, Homo sapiens
atgcaagatttctaaacaaaatattagcaaactacatccagcaatatatagaaaagaactgattattttccatgaccaacgatttgtcccaggaatacaagcttgttttaacattcaaaaataagtcagggtaaaataccatctcgatacaataaaggacaaaaaaatacatgatagatacagaaaaagcatttgacaaaatcacacactatttaaaacaaaaaagtaaaaaaaaaaaaaaaaaaaaaaaaaagacccaggaagctagttatagaaggaaactagctcaaccaaataaaggttatttacaaaagscccaagccaacattatacttaatagtgaagactgaatgatttacccctaagttcaggacagatgggtattctcacagtgactgtgcaacattg

SEQ ID NO: 203057 - DNA, 408 bp, Homo sapiens
atgcaagatttctaaacaaaatattagcaaactacatccagcaatatatagaaaagaactgattattttccatgaccaacgatttgtcccaggaatacaagcttgttttaacattcaaaaataagtcagggtaaaataccatctcgatacaataaaggacaaaaaaatacatgatagatacagaaaaagcatttgacaaaatcacacactatttaaaacaaaaaagtaaaaaaaaaaaaaaaaaaaaaaaaaagacccaggaagctagttatagaaggaaactagctcaaccaaataaaggttatttacaaaaggcccaagccaacattatacttaatagtgaagactgaatgatttacccctaagttcaggacagatggrtattctcacagtgactgtgcaacattg

SEQ ID NO: 203058 - DNA, 375 bp, Homo sapiens
aaatttaacaaaagaatcaaagtcatgtacactgaaaactaaaaactgttgttgaaagaaactaaataaaaggtaagccacctcacctgatggttatgtgtaaaaaaaattaatattattaaaatggtaaaattttcaaaataatctacagattcagtacattctctatcaaaatccaagtttcctttttcaaaattgacaaggtgatatttaaattcataaggaatgtaaaggaccaagaatggccaaaatcatcttgaaaaagattgaagttggaagatcctgacttcctgattttaaatttactgtaaaactacattaatcaaggcattgtaggattagtacaaagataaataaatatawacatatatatat

SEQ ID NO: 203059 - DNA, 394 bp, Homo sapiens
actgaattcctcaaactcttgcatatttaaaattacatttttgaaccttgatgcttgaagtgtagcttgggtaacaggtgggctttaagccrattttggcatgcaaggggttgagtttattaggcatcagcacctctgaaaatcgtggggatgcaggcttaatttcaacactattctaaatacttgaaagatatataattccttaataaactcctttgtctacaaatggttcacattaactcaatatccatgattaaacatctataaaatcaaggcactgttatttagtggagacttgctggctattctatgagaggaggtattgttattttaatctcatcctctcataaaagtgtatcatattactcataaccagcccttcatattctattcc

SEQ ID NO: 203060 - DNA, 330 bp, Homo sapiens
gcttgggtaacaggtgggctttaagccgattttggcatgcaaggggttgagtttattaggcatcagcacctctgaaaatcgtggggatgcaggcttaatttcaacactattctaaatacttgaaagatatataattccttaataaactcctttgtctacaaatggttcacattaactcaatatccatgattaaacatctataaaatcaaggcactgttatttagtggagacttgctggctattctatgagaggaggtattgttattktaatctcatcctctcataaaagtgtatcatattactcataaccagcccttcatattctattcc

SEQ ID NO: 203061 - DNA, 573 bp, Homo sapiens
tcatagagatagtacaatgatggttgccagaagctgtgggggaggaagaaataggggaaatattgtttaatgggtatagagtttcagttctacaagatgaaatgagttatggagatggatggtagggatggctgcacaatgttatgactatatttagtaccactgaactgtacacttaaaatsgttaacagagtacattttattttatgtgtattttaccacaataaaaaaataaaataccttaggaacattttcctgaaagagtccacataaaattcattttaatgcatgtgtttatgcatagctttctatttttctcttttctatttatattccaaattagaatataatgctaatcaagcatagtggctgtgtttcttgcttcgtctagtctgcaggtagcatacaaatgtaataaactacttattcatgtcacatctatttattttctgccttataccaagcttgtgggattctcttaaatacaacatttttatacttacacctaggcaatacccattagcatcgccttcctaaatcaggggaaattgagcctctgtaaggtggagtaac

SEQ ID NO: 203062 - DNA, 431 bp, Homo sapiens
acctgagtgaaagctgtccatcaggcatacagggaatgacggaaaaggtgacaacagaagatgaatgctatgtcactaaccttcaaagatgacctgccttttctttcaaattcttgatatcttaagacttcattawttcatctctctttgcccttggttcaacattgtgctataccaaaactcatgtaaaacaatgatctaatgtaataaaaatggcatttttctttcatgtagatgcaagctaactggcatttttacaatcaacgtatttcctttgtcaatttttcattctgtattggaagtaattgataggtatttctgaagggatgaaggtgtttctgtgttcattgtgatccaaactatttttagacctaggggcatttgtaaaacaatttgtgccagctgaccaaggaccactgtggcagaaagca

SEQ ID NO: 203063 - DNA, 431 bp, Homo sapiens
acctgagtgaaagctgtccatcaggcatacagggaatgacggaaaaggtgacaacagaagatgaatgctatgtcactaaccttcaaagatgacctgccttttctttcaaattcttgatatcttaagacttcattatttcatctctctttgcccttggttcaacattgtgctataccaaaactcatgtaaaacaatgatctaatgtaataaaaatggcatttttctttcatgtagatgcaagctaactggcatttttacaatcaacrtatttcctttgtcaatttttcattctgtattggaagtaattgataggtatttctgaagggatgaaggtgtttctgtgttcattgtgatccaaactatttttagacctaggggcatttgtaaaacaatttgtgccagctgaccaaggaccactgtggcagaaagca

SEQ ID NO: 203064 - DNA, 431 bp, Homo sapiens
acctgagtgaaagctgtccatcaggcatacagggaatgacggaaaaggtgacaacagaagatgaatgctatgtcactaaccttcaaagatgacctgccttttctttcaaattcttgatatcttaagacttcattatttcatctctctttgcccttggttcaacattgtgctataccaaaactcatgtaaaacaatgatctaatgtaataaaaatggcatttttctttcatgtagatgcaagctaactggcatttttacaatcaacgtatttcctttgtcaatttttcattctgtattggaagtaattgataggtatttctgaagggatgaaggtgtttctgtgttcattgtgatccaaactatttttagacctaggggcatttgtaaaacaayttgtgccagctgaccaaggaccactgtggcagaaagca

SEQ ID NO: 203065 - DNA, 427 bp, Homo sapiens
aagaattctgtaaatatacacaatagggtaggaatgagaaaatctttagaggaaatattcaagtatgtttgatttctagcaaatccagatagacagttttggcaacaamaaagtcataattttaagtcttgttataggagctataattttattcaagggacaactgatttgattagattagatgctgtgcactgcatgtttccttcaacaaatgcacaagttgaaactctaacaatagaatggcattagaaggaggacctttgggaagtaatttggttttgatgaggatggagttcccacaatggggttagcatcctaataagaagagtaggagactagagccctcttctctcagccatgtgaagatacaacaagaacacctgcaaaccagtaagagggccttcaccagacactggctctgctggcc

SEQ ID NO: 203066 - DNA, 427 bp, Homo sapiens
aagaattctgtaaatatacacaatagggtaggaatgagaaaatctttagaggaaatattcaagtatgtttgatttctagcaaatccagatagacagttttggcaacaaamaagtcataattttaagtcttgttataggagctataattttattcaagggacaactgatttgattagattagatgctgtgcactgcatgtttccttcaacaaatgcacaagttgaaactctaacaatagaatggcattagaaggaggacctttgggaagtaatttggttttgatgaggatggagttcccacaatggggttagcatcctaataagaagagtaggagactagagccctcttctctcagccatgtgaagatacaacaagaacacctgcaaaccagtaagagggccttcaccagacactggctctgctggcc

SEQ ID NO: 203067 - DNA, 603 bp, Homo sapiens
ggagggatcaaaacatgtggattccctttctataccctyttacatgtgaatctcaatggctttcactacctcagaacaatcctaaactccctccgaggttgccttgcagaggatcccttctttttggggacgattaggaatctgcatttttggaccacaggcatctataaagagttgtgttgatcaagaaataaaattgtctaggccataagttactgtgaattgtctagctgggctattctctttattttttgttattccactattgacaatagcctagaatcaacctaagtgtccaagaagacttgttttaaccctgaggattactaatgttttcactgtggtcattgtggtagattatattaccattctcccattatctggtcttcctgctgtagtggccctatctcctagaagattatacacttctgtcctattgaaggaaaggtcagatttagacatgtgacctgtttggccagtgaaatgcaggtagaagtggcatgtgcaatttgtaagcagaaaatttcctttttcaaggatctgggagccatctctttcaaacataatcctccagaaagataataccttatttcccagtctcca

SEQ ID NO: 203068 - DNA, 603 bp, Homo sapiens
ggagggatcaaaacatgtggattccctttctatacccttttacatgtkaatctcaatggctttcactacctcagaacaatcctaaactccctccgaggttgccttgcagaggatcccttctttttggggacgattaggaatctgcatttttggaccacaggcatctataaagagttgtgttgatcaagaaataaaattgtctaggccataagttactgtgaattgtctagctgggctattctctttattttttgttattccactattgacaatagcctagaatcaacctaagtgtccaagaagacttgttttaaccctgaggattactaatgttttcactgtggtcattgtggtagattatattaccattctcccattatctggtcttcctgctgtagtggccctatctcctagaagattatacacttctgtcctattgaaggaaaggtcagatttagacatgtgacctgtttggccagtgaaatgcaggtagaagtggcatgtgcaatttgtaagcagaaaatttcctttttcaaggatctgggagccatctctttcaaacataatcctccagaaagataataccttatttcccagtctcca

SEQ ID NO: 203069 - DNA, 603 bp, Homo sapiens
ggagggatcaaaacatgtggattccctttctatacccttttacatgtgaatctcaatggctttcactrcctcagaacaatcctaaactccctccgaggttgccttgcagaggatcccttctttttggggacgattaggaatctgcatttttggaccacaggcatctataaagagttgtgttgatcaagaaataaaattgtctaggccataagttactgtgaattgtctagctgggctattctctttattttttgttattccactattgacaatagcctagaatcaacctaagtgtccaagaagacttgttttaaccctgaggattactaatgttttcactgtggtcattgtggtagattatattaccattctcccattatctggtcttcctgctgtagtggccctatctcctagaagattatacacttctgtcctattgaaggaaaggtcagatttagacatgtgacctgtttggccagtgaaatgcaggtagaagtggcatgtgcaatttgtaagcagaaaatttcctttttcaaggatctgggagccatctctttcaaacataatcctccagaaagataataccttatttcccagtctcca

SEQ ID NO: 203070 - DNA, 603 bp, Homo sapiens
ggagggatcaaaacatgtggattccctttctatacccttttacatgtgaatctcaatggctttcactacctcagaacaatcctaaactccctccsaggttgccttgcagaggatcccttctttttggggacgattaggaatctgcatttttggaccacaggcatctataaagagttgtgttgatcaagaaataaaattgtctaggccataagttactgtgaattgtctagctgggctattctctttattttttgttattccactattgacaatagcctagaatcaacctaagtgtccaagaagacttgttttaaccctgaggattactaatgttttcactgtggtcattgtggtagattatattaccattctcccattatctggtcttcctgctgtagtggccctatctcctagaagattatacacttctgtcctattgaaggaaaggtcagatttagacatgtgacctgtttggccagtgaaatgcaggtagaagtggcatgtgcaatttgtaagcagaaaatttcctttttcaaggatctgggagccatctctttcaaacataatcctccagaaagataataccttatttcccagtctcca

SEQ ID NO: 203071 - DNA, 507 bp, Homo sapiens
aacatttctatacaccaatagcagactatctgaaaaaggaatcaagaaagtaatcccatttaaaatagctattaaaaaaaacaaaatacctacaagtaaattaagccatggaaagatgaaaattattaaacatggataaaaacaattaaaaaattaaaataaatagaaagatatcccatgttcatggactaaaagaattgatattgwtgaaatgaccatactatgcaaatcaatctataaatccaatataatctctatcaaatttccaatttcattcttcacagatgttaaaaaaatcttaaaattcatgtgaaactacaaaacaccccaaatagccatataaatcttaagcaaaaagagcaatgctagaggtattacactatctaatttcaaaatatattacaaagctatcttaactaaaacagcatggtattggcataaaaacaggcatgtagaccagtggaacaaaaatagagagcccaggcataaaaccacgtatttacatgc

SEQ ID NO: 203072 - DNA, 520 bp, Homo sapiens
gaaataagctaaccacgataagacaaatatcacatgatctcattcatatgtgaaatctaaaaacactgatctaatagagagtagaagagtggttaccagactgggaaagatagggaggagaggttttaacaatgtgtcatgtatcaaaataccacattgtrccccatcaacatgtgaaattatcatgtatccacttaataaaagaaaagaaaaaagaaaatggaagagtcaagatactggggcactggaagaaatagaagagaaggtgagttggcagtaaggaagagagagtctgaaagagcatgtcacagagtggaacattaaagtttataacattagaaatcaatttttaagttattgaaaagttaagtttatagccatgaaagtgagtagctcaattgaagtgaaagtaaaagtcaatgaagattaaattagaaaatatattgcttggcatttagtaattacttcagaaatattaataaatcttaagaaaattaagaacaccaaagcattcatagtg

SEQ ID NO: 203073 - DNA, 520 bp, Homo sapiens
gaaataagctaaccacgataagacaaatatcacatgatctcattcatatgtgaaatctaaaaacactgatctaatagagagtagaagagtggttaccagactgggaaagatagggaggagaggttttaacaatgtgtcatgtatcaaaataccacattgtaccmcatcaacatgtgaaattatcatgtatccacttaataaaagaaaagaaaaaagaaaatggaagagtcaagatactggggcactggaagaaatagaagagaaggtgagttggcagtaaggaagagagagtctgaaagagcatgtcacagagtggaacattaaagtttataacattagaaatcaatttttaagttattgaaaagttaagtttatagccatgaaagtgagtagctcaattgaagtgaaagtaaaagtcaatgaagattaaattagaaaatatattgcttggcatttagtaattacttcagaaatattaataaatcttaagaaaattaagaacaccaaagcattcatagtg

SEQ ID NO: 203074 - DNA, 540 bp, Homo sapiens
cattgtggtaagtgaaataagctaaccacgataagacaaatatcacatgatctcattcatatgtgaaatctaaaaacactgatctaatagagagtagaagagtggttaccagactgggaaagatagggaggagaggttttaacaatgtgtcatgtatcaaaataccacattgtaccccatcaacatgtgaaattatcatgtatccacttaataaaagaaaagaaaaaagaaaatggaagagtcaagatactggggcactggaagaaatagaagagaaggtgagttggcagtaaggaagagagagtctgaaagagcatgtcacagagtggaacattaaagtttataacattagaaatcaatttttaagttattgaaaagttaagtttatagccatgaaagtgagtagctcaattgaagtgaaagtaaaagtcaatgaagattaaattagaaaatatattgcttggcatttagtarttacttcagaaatattaataaatcttaagaaaattaagaacaccaaagcattcatagtgggccatt

SEQ ID NO: 203075 - DNA, 438 bp, Homo sapiens
ttgcactcaactccactccactccactccacttcgttccattccattctgtatcattcctttccattccactccatttctttcctctacactccattccwttccactccatttcactctattccactccattccactccattcctttccattccactcaacttccttccgttccattccactcaattccattcctttcccttccactccattccactacgctccattccactacactccattctcctccactccactgtattatcttccattccagttcattccatcccattctattccattccattccagttcattccattccattccactccattccattccattccactccattccattgcactccaatcctctccactcaactccagtccactcctctccgctccactccattcccttccgttccattgaattc

SEQ ID NO: 203076 - DNA, 426 bp, Homo sapiens
ttccattccattgaattccactgcactctgatccattgcactcaactccactccactccactccacttcgttccattccattctgtatcattcctttccattccactccatttctttcctctacactccattccattccactccatttcactctattccactccattccactccattcctttccattccactcaacttcmttccgttccattccactcaattccattcctttcccttccactccattccactacgctccattccactacactccattctcctccactccactgtattatcttccattccagttcattccatcccattctattccattccattccagttcattccattccattccactccattccattccattccactccattccattgcactccaatcctctccactcaactccag

SEQ ID NO: 203077 - DNA, 426 bp, Homo sapiens
ttccattccattgaattccactgcactctgatccattgcactcaactccactccactccactccacttcgttccattccattctgtatcattcctttccattccactccatttctttcctctacactccattccattccactccatttcactctattccactccattccactccattcctttccattccactcaacttccttccgttccattccactcaattccattcctttcccttccactccattccactacgctccattccactacactccattctcctccactccactgtattatcttccattccagttcattccatcccattctattccattccattccasttcattccattccattccactccattccattccattccactccattccattgcactccaatcctctccactcaactccag

SEQ ID NO: 203078 - DNA, 426 bp, Homo sapiens
ttccattccattgaattccactgcactctgatccattgcactcaactccactccactccactccacttcgttccattccattctgtatcattcctttccattccactccatttctttcctctacactccattccattccactccatttcactctattccactccattccactccattcctttccattccactcaacttccttccgttccattccactcaattccattcctttcccttccactccattccactacgctccattccactacactccattctcctccactccactgtattatcttccattccagttcattccatcccattctattccattccattccagtycattccattccattccactccattccattccattccactccattccattgcactccaatcctctccactcaactccag

SEQ ID NO: 203079 - DNA, 283 bp, Homo sapiens
accaaaacagcatggtactggtataaaaatagccataaagaycaatggaacataatagagaacacagaagtaaagccaaatacttacagtcatctaatcttcaacaaaacaaacaaaaacataaagcagagaaagaataccctattcaacaaatggtgctgagataaatggcaagccacacatagaagaatgaaagtggatgctcatttctcaccctattcgaaaatcaactcaagatggatcaaggacttaaatctaatacctgaaaccataaaaattctag

SEQ ID NO: 203080 - DNA, 283 bp, Homo sapiens
accaaaacagcatggtactggtataaaaatagccataaagatcaatggaacataatagagaacacagaartaaagccaaatacttacagtcatctaatcttcaacaaaacaaacaaaaacataaagcagagaaagaataccctattcaacaaatggtgctgagataaatggcaagccacacatagaagaatgaaagtggatgctcatttctcaccctattcgaaaatcaactcaagatggatcaaggacttaaatctaatacctgaaaccataaaaattctag

SEQ ID NO: 203081 - DNA, 283 bp, Homo sapiens
accaaaacagcatggtactggtataaaaatagccataaagatcaatggaacataatagagaacacagaagtaaagccaaatacttacagtcatctaatcttcaacaaaacaaacraaaacataaagcagagaaagaataccctattcaacaaatggtgctgagataaatggcaagccacacatagaagaatgaaagtggatgctcatttctcaccctattcgaaaatcaactcaagatggatcaaggacttaaatctaatacctgaaaccataaaaattctag

SEQ ID NO: 203082 - DNA, 523 bp, Homo sapiens
agaaggactttatttgacaggtaatttttccatggtttagaataaaagaggtaataactagaaatatctcccacatartaggctctacagcaaattctactttaaaggctgttgttcatgtctttaactgtggctgcccttaatgtttttgtcatccacagacaattgtctcattttggtcctctttaaatgatggttttataatcagctataaaatttaacagatgcccttaaatgcaggattctgattaataacgctggagattgtgacattacaatagagggaaaactttcaaatagaagagtgaatgatgtttgggctactttggactgtatttttctaaatgttattaatatgtgttccaaaattattggaaacttctatagaaatgtaatctccagtgtcggagatagggcctgctgggaggtggctggtgcatgggagcagtttccagtggttcccagtgttggagatggggcctgctggaaggtagctggtccatgggagcagcctccagtggtt

SEQ ID NO: 203083 - DNA, 523 bp, Homo sapiens
agaaggactttatttgacaggtaatttttccatggtttagaataaaagaggtaataactagaaatatctcccacataataggctctacagcaaattctactttaaaggctgttgttcatgtctttaactgtggctgcccttaatgtttttgtcatccacagamaattgtctcattttggtcctctttaaatgatggttttataatcagctataaaatttaacagatgcccttaaatgcaggattctgattaataacgctggagattgtgacattacaatagagggaaaactttcaaatagaagagtgaatgatgtttgggctactttggactgtatttttctaaatgttattaatatgtgttccaaaattattggaaacttctatagaaatgtaatctccagtgtcggagatagggcctgctgggaggtggctggtgcatgggagcagtttccagtggttcccagtgttggagatggggcctgctggaaggtagctggtccatgggagcagcctccagtggtt

SEQ ID NO: 203084 - DNA, 424 bp, Homo sapiens
cactccaaatgtccacttgcagattctacaaaaagagactgccaaaactgctcaaccaaaaggaaggtttaactctgtgagatgaatgcacacatcacaaaatgtttctcagattgtttctgtctagattttatgtgaagttatttccttttctaccatagaacccgaagtgcttttaatgtccccttgcagattctacataaagagtttttcaaaactgctcaatcaaaagaaaggttcaactctgtgagatgaatgcttgcatcacaaagaagtttctaagatttcttctgtctagattttatgtgatgatatttccttttctaccatrcgtcacaaaccgctcaaaatgtccagttgtagattcttcaaaaagagagtttccaaactgctcaatcagaagaaaggttaactctctgagatg

SEQ ID NO: 203085 - DNA, 451 bp, Homo sapiens
caaaaggcaacatgtgaaggtacaaagtgatatatggagaacggtctctctcrtgatagaccccagccatctattcatgcctgctttccagaggcaatgcctatcataatgcttcttaaaaatgcctctacaggaagactttctagcatagtattttttttttttttttttttgagatggagtctcgctctgtcgcccagagtggaatgcagtgacgcaatcttggctcactgcaacctccacctcctgggttcaaacaattctctgcctagcttcccaagtagctggggttacaagagcctgccaccatgcccgaataattttttttgtatttttagtagagacggggtttcaccacattggccaggctggtcttgaactcctgacctcgtgttccacctgcctctgcctcccaaagtgctgggattagaggtgtgagccaccacaccca

SEQ ID NO: 203086 - DNA, 451 bp, Homo sapiens
caaaaggcaacatgtgaaggtacaaagtgatatatggagaacggtctctctcatgatagaccccagccatctattcatgcctgctttccagaggcaatgcctatcataatgcttcttaaaaatgcctctacaggaagactttctagcatagtattttttttttttttttttttgagatggagtctcgctctgtcgcccagagtggartgcagtgacgcaatcttggctcactgcaacctccacctcctgggttcaaacaattctctgcctagcttcccaagtagctggggttacaagagcctgccaccatgcccgaataattttttttgtatttttagtagagacggggtttcaccacattggccaggctggtcttgaactcctgacctcgtgttccacctgcctctgcctcccaaagtgctgggattagaggtgtgagccaccacaccca

SEQ ID NO: 203087 - DNA, 451 bp, Homo sapiens
caaaaggcaacatgtgaaggtacaaagtgatatatggagaacggtctctctcatgatagaccccagccatctattcatgcctgctttccagaggcaatgcctatcataatgcttcttaaaaatgcctctacaggaagactttctagcatagtattttttttttttttttttttgagatggagtctcgctctgtcgcccagagtggaatgcagtgacgcaatcttggctcactgcaacctccacytcctgggttcaaacaattctctgcctagcttcccaagtagctggggttacaagagcctgccaccatgcccgaataattttttttgtatttttagtagagacggggtttcaccacattggccaggctggtcttgaactcctgacctcgtgttccacctgcctctgcctcccaaagtgctgggattagaggtgtgagccaccacaccca

SEQ ID NO: 203088 - DNA, 451 bp, Homo sapiens
caaaaggcaacatgtgaaggtacaaagtgatatatggagaacggtctctctcatgatagaccccagccatctattcatgcctgctttccagaggcaatgcctatcataatgcttcttaaaaatgcctctacaggaagactttctagcatagtattttttttttttttttttttgagatggagtctcgctctgtcgcccagagtggaatgcagtgacgcaatcttggctcactgcaacctccacctcctgggttcaaacaattctctgcctagcttcccragtagctggggttacaagagcctgccaccatgcccgaataattttttttgtatttttagtagagacggggtttcaccacattggccaggctggtcttgaactcctgacctcgtgttccacctgcctctgcctcccaaagtgctgggattagaggtgtgagccaccacaccca

SEQ ID NO: 203089 - DNA, 322 bp, Homo sapiens
agtgggcactgaagttgcctgtctctatgtcaggtgacagctccagctgtgtatatgctgcagacacacaagctgaatttaagagaatccactctaaaacattacttgctatttagacatatgcttaaagttatttccttttaaaccttaggcagatggtgaaatrttcccgctgggttgtctcacaatgcataacaaagcttttcacatattttcacatagatgagaatgtttccatatgtctggcatgcttgtaatccagcactttgagaggtggaagcaggagaatcacttaagcccaggaattcaaaatcagcctagg

SEQ ID NO: 203090 - DNA, 322 bp, Homo sapiens
agtgggcactgaagttgcctgtctctatgtcaggtgacagctccagctgtgtatatgctgcagacacacaagctgaatttaagagaatccactctaaaacattacttgctatttagacatatgcttaaagttatttccttttaaaccttaggcagatggtgaaatgttcccrctgggttgtctcacaatgcataacaaagcttttcacatattttcacatagatgagaatgtttccatatgtctggcatgcttgtaatccagcactttgagaggtggaagcaggagaatcacttaagcccaggaattcaaaatcagcctagg

SEQ ID NO: 203091 - DNA, 322 bp, Homo sapiens
agtgggcactgaagttgcctgtctctatgtcaggtgacagctccagctgtgtatatgctgcagacacacaagctgaatttaagagaatccactctaaaacattacttgctatttagacatatgcttaaagttatttccttttaaaccttaggcagatggtgaaatgttcccgctgggttgtctcacaatgcataacaaagcttttcacatattttcacatagwtgagaatgtttccatatgtctggcatgcttgtaatccagcactttgagaggtggaagcaggagaatcacttaagcccaggaattcaaaatcagcctagg

SEQ ID NO: 203092 - DNA, 322 bp, Homo sapiens
agtgggcactgaagttgcctgtctctatgtcaggtgacagctccagctgtgtatatgctgcagacacacaagctgaatttaagagaatccactctaaaacattacttgctatttagacatatgcttaaagttatttccttttaaaccttaggcagatggtgaaatgttcccgctgggttgtctcacaatgcataacaaagcttttcacatattttcacatagatgagaatgtttcyatatgtctggcatgcttgtaatccagcactttgagaggtggaagcaggagaatcacttaagcccaggaattcaaaatcagcctagg

SEQ ID NO: 203093 - DNA, 278 bp, Homo sapiens
gcagcgctggtgtgaggagccacgagcaggccaggcctgtaaagcagartgatgggaaccaagatagagaaggcaaatcggggtcctgtggtcgctgaataatttgaatgaaatcagtaaacaggtgacagggatccatcgcaagagcatgggatgaaacgaggagtagtccacggtgattcctccgcagcggtgggtattaataatcgcgtatgtgacaccaaaacggtgggtattattgatagcgtatgtgacaccaaaaccaccccactcaagtt

SEQ ID NO: 203094 - DNA, 440 bp, Homo sapiens
tggttttaccctctaacaaacatgccagtggtctgcatggccattttttgggtatgtttggcttaaggtcagyaaactaaggcccacagtctaaatacggcctgctgcctatttttgtaaagtcttattagaatacagctatgccagctgggcacagtggctcatgcctgtaatcttagcactctgggaggctgaggcaggcagatcacttgagccctggaatttgagaccagcctgggcaacatggcagaaccccgtgtattagtccaattttacagtgctgataaagatgtacccgagactgggaagaaaagtttaattggacttacagttccacatggctaggggggcctcacaatcatggtggggggcgaaaagcacttcttacatggcagcagcaagagaaaaaacgaggaagcaaaagtggaaacccccgataa

SEQ ID NO: 203095 - DNA, 468 bp, Homo sapiens
taaaaacaaggctcataatgtcatcagaaacaagtcttcccttaggtctggggtatggggaccactgaaagtgcatggtccttatccgcttgggccgatcagaatcagtagcactgaaactcgacaatcaactttgatatctcctgggcaagtgctccactaagtgaaaaactttctttttacaacttctactcattcaccctagcaggaaacgtgagggctggcacaaatgtctccatcccatgcacgctgcctttcatcagccctgattgtctcttgcaatcagatttctggaatcatctcctgacttgcacactcaaagtgtggcggaggaacatgcagcatcagcatcacttgagaggctgttagaaatgtagttaggctccacctcacaccttagtagrgtcagccttttaacactacccccaggtgattcatgagcacagaaaattttgagaagcactgtcc

SEQ ID NO: 203096 - DNA, 511 bp, Homo sapiens
atgtatcctaacctgcaacatartctcactctacttttctttggctttctgagtcaggtttttgtgctaagatttgtcccattatatattgattaataaagttgaagtactcaagctattaatattttaaaatcattcccatcagatgccatgtttttcaaaagtgagcacaactcctgtgcttgtttttttctggtagttgtttccttgatggcatattgagcccatagtcaaaatgttttgggataatccattcatgccacctaggtagtataagtggatggtggagtggagggatggaaaagcaggagacatggggacatgtctcagaaagagctggagtgctcttaaatttcccagtcatcacatgaagactaacatgtttccaggaattaagtcctgggaacatagtcttttcctcttttcccctataaaccctcatctacagcagcaggaaatgctgaagcaagctttcctgaagagagtaaacgctatttttctagagttttaa

SEQ ID NO: 203097 - DNA, 513 bp, Homo sapiens
ccaaggatatgtttcccaaggatatgtatcctaacctgcaacatagtctcactctacttttctttggctttctgagtcaggtttttgtgctaagatttgtcccattatatattgattaataaagttgaagtactcaagctattaatattttaaaatcattcccatcagatgccatgtttttcaaaagtgagcacaactcctgtgcttgtttttttctggtagttgtttccttgatggcatattgagcccatagtcaaaatgttttgggataatccattyatgccacctaggtagtataagtggatggtggagtggagggatggaaaagcaggagacatggggacatgtctcagaaagagctggagtgctcttaaatttcccagtcatcacatgaagactaacatgtttccaggaattaagtcctgggaacatagtcttttcctcttttcccctataaaccctcatctacagcagcaggaaatgctgaagcaagctttcctgaagagagtaaac

SEQ ID NO: 203098 - DNA, 511 bp, Homo sapiens
atgtatcctaacctgcaacatagtctcactctacttttctttggctttctgagtcaggtttttgtgctaagatttgtcccattatatattgattaataaagttgaagtactcaagctattaatattttaaaatcattcccatcagatgccatgtttttcaaaagtgagcacaactcctgtgcttgtttttttctggtagttgtttccttgatggcatattgagcccatagtcaaaatgttttgggataatccattcatgccacctaggtagtataagtggatggtggagtggagggatggaaaagcaggagacatggggacatgtctcagaaagagctggagtgctcttaaatttcccrgtcatcacatgaagactaacatgtttccaggaattaagtcctgggaacatagtcttttcctcttttcccctataaaccctcatctacagcagcaggaaatgctgaagcaagctttcctgaagagagtaaacgctatttttctagagttttaa

SEQ ID NO: 203099 - DNA, 390 bp, Homo sapiens
acactacctgactatcctcaagaaatggaagctccttggactgatgactctcattctatttctaggacaagtacttagtgtccatatatgcttttcaaaaccatagttaaatgtgaaatgaagaraaaaacaaagtcttgctctctgtctagcatgatattgcatacctggaatgaatcctgcttgatcacagtgaacgatcttttgaatgttttgttgaatttggtttgctagtaatttgttgagaatttttgtacctattttcattagggatattggcctgtagttttctctttttatattgttgtgttcttgtctgggttttggaatcaacataaatgctggcttcataaaatgagtttggaacaattccctcctttttaattttcc

SEQ ID NO: 203100 - DNA, 525 bp, Homo sapiens
atggcctgggctggagtacagtggcatgatcttggctcactgcaacctccacctcccaggttcaagcaattctcctgcctcagcctcccgagtagctgggactacaggcatgtgccaccacgcttagctaatttttgtatttttagtagaaatggtgtttcaccatgttggccaggatgatctcraactccttaccagaggtgatctgcctgcctcggcctcccaaagtgctgggattataggcatgagccaccacgcccagccaagaatttgtttttctgtttatttcaagtgtttcttgattattgcagcatttgtataataggtgctttaaagtctttgtagatgttttcaacatctgtgtgattttgttgttggagtctgttggttgtcttttcgcccaatagctgaaattttcctagagatttttgttttagcagtcaatagacatggttaggtttatactgcaggttccaacttacctatagtaggctgtggttccaattccagtctaattttaaaaga

SEQ ID NO: 203101 - DNA, 594 bp, Homo sapiens
tagtgtggttatataggtcacaaatgtctactgactcaataaataaaaattctcaccagaaatgaatttggggtgttggaaaatgtggccactttggatatctttgggggcccatggggggttaagggtgaagacttgattctaaatgtcaattcagaaaagatacgatatttcatacaatctaattgaagtgcttgtgttgatggtgcaaatccccttgaagctgtttatttataagtgagagagatcccatttgagcatttcttacaatgatgctttctacttaaggattrtcctttttatctttgttgtgtatgtatattaagatcacccttctctgtagtttctttccaagtgccattttttcaaaactcctaagaatgagactgaatgaggagaattgaaatgatattgcagctgcaaagaggggcagggggaacctaggttttattgtaactctaaaggcacattttaaaccctgcaatatacttaagaataaaaattttaaactcacctgtcatgaaatgtatagttaataatcccttattgttaatatttcttaaatcatcattacttgctaatggctacatgttg

SEQ ID NO: 203102 - DNA, 594 bp, Homo sapiens
tagtgtggttatataggtcacaaatgtctactgactcaataaataaaaattctcaccagaaatgaatttggggtgttggaaaatgtggccactttggatatctttgggggcccatggggggttaagggtgaagacttgattctaaatgtcaattcagaaaagatacgatatttcatacaatctaattgaagtgcttgtgttgatggtgcaaatccccttgaagctgtttatttataagtgagagagatcccatttgagcatttcttacaatgatgctttctacttaaggattatcctttttatctttgttgtgtatgtatattaagatcacccttctctgtagtttctttccaagtgccattttttcaaaactcctaagaatgagactgaatgaggagaattgaaatgatattgcagctgcaaagaggggcagggggaacctaggttttattgtaactctaaaggcacattttaaaccctgcaatatacttaagaataaaaattttaaactcacctgtcatgaaatgtatagttaataatcccttattgttaatatttcttaaatcrtcattacttgctaatggctacatgttg

SEQ ID NO: 203103 - DNA, 626 bp, Homo sapiens
ttataaaaatggattcgaaaagtctcagctaaatttatatgtgaactgcataatggctgttaagggaaacttaggcatatttggaagtttttgaagctgacttaagaagagctatcatggcccctcccaaaaaagccccttgataccacagacagaaatgctgagttgggctggatagtacctttaattgctataatgctgtaagaagaataggtataaggtaaacaagattcaaaagaaacaacaagaaaaagatgaaaaggaagaaaataaaatatttatcgatcatctaatacatggtgggttccagtgctgtgctgtagttagctagtactagctcatgttagagagcccattgttaaattttcaagccagttgttaaaatcatcctttattgaaaatcaagttatataaatctacacttaaaatatatttttaaaaagccaataaatactcaaagcttattattttcwtattgattttctatatttcattctctatgctgttgaggagagtgtttacatctattagacgggaatgatgtaaattctagttaagtgtgctagtgcacatcttaactctgggttcagtgatgtcatattggtagcttgaaattagccatggtt

SEQ ID NO: 203104 - DNA, 467 bp, Homo sapiens
catgtgctgcttaagagccagcaaatgccttccagcagaaagcaatgtgcaaaatgttggtccaactcaatgagcttctcttctcttctctctccaggatctcaggccattagggcctgtctgcttcagaggccttctgatatcctttaaaagttttttttttttaatccagctattttagtggttctcacaagaagcacttgtctatgacaatccattccatcagacatagaagcagaagtcaaatattgtttcttgaaataatagtccaaaacatttttttcattttcaagaaggttatggtaagttttaatatttacagttattagctttcaaccagcagcagcaaaatacatccctgcattcactgmcatcaccttggccatgtgacttcttttcataaatgaaatgtggacagaaatgaatttggttatgtctaattagtatctttaagagatagcttgtag

SEQ ID NO: 203105 - DNA, 590 bp, Homo sapiens
ttgttgattcataaataagaatgtcatttaatattatactttacatgtcttggttgagggaaataatcaaaaccaatattagcatacatgtcttagttcatttttacattgctgtaaaggaatacctgaagctgggtaatttataaagaaaagagctttatttagttcacagttccgcaggttttacaagaagcacgggcagcttccactcctggtggaaggcatagagaaaccaggttttacagagattacatggtgtgagaggaggaaaagagagaggagaggtttctggcattttttttcttttttaaagaaagaacaaccagcacttgtggwatctaatagaataagaagttgctcacccccaagggagggcattaatctgcccacatgccccaaacacctttcatcaggccccgtctccaacactaaggatcaaatttcagcatgaggtttagaaaggacaaatattcaaattgtagcagtacaactgtggcagaatgctttttccaccacatccccttcctgcagcatgacaccattgtggaagacagtgtggcaattcctcaaggatctagagccagaaatac

SEQ ID NO: 203106 - DNA, 558 bp, Homo sapiens
caccaggcccagcagttactaggtgaagatgaggagaactgagcatggagattagaggagggaggtaacgagcatcagttccagcctccaaaacagctgcattgccaatagctctagttattcccaattttccccaaagaagaaagactcacagtgttakggagcctctcaagggataagttatagtggacataaagattcactttccagatccttcttcaaggaaagccagttttccccaaccactgggaatagtctgcatacagactctagctgttaacagtctgcctcagctgcagagagccactttttccaatggcacacccttcctggggtggccgatatcttatgattgactgtagcagtgatattaaggccattttgtctagcatgtgacagctctaatgagccacatttggcctagagcgctccatgaaattgatcaaggcttttctgagcctgcatcacagctcaacttcttcctctgctcaattcagcttccatcttcttttttccaaaggtgttaatccctaataaatattctgcttgccaaaacag

SEQ ID NO: 203107 - DNA, 558 bp, Homo sapiens
caccaggcccagcagttactaggtgaagatgaggagaactgagcatggagattagaggagggaggtaacgagcatcagttccagcctccaaaacagctgcattgccaatagctctagttattcccaattttccccaaagaagaaagactcacagtgttatggagcctctcaagggataagttatagtggacataaagattcactttccagatccttcttcaaggaaagscagttttccccaaccactgggaatagtctgcatacagactctagctgttaacagtctgcctcagctgcagagagccactttttccaatggcacacccttcctggggtggccgatatcttatgattgactgtagcagtgatattaaggccattttgtctagcatgtgacagctctaatgagccacatttggcctagagcgctccatgaaattgatcaaggcttttctgagcctgcatcacagctcaacttcttcctctgctcaattcagcttccatcttcttttttccaaaggtgttaatccctaataaatattctgcttgccaaaacag

SEQ ID NO: 203108 - DNA, 582 bp, Homo sapiens
gccactcctactatatcaaagacccattactacagattttttcctatctctttatttggttttacctttaacagctccctctctcatgcatttttctttattttatactaggatctctcaatattgaaaagaattctccattgacctttttttttaactgctaacatctttaaagccaaacttctaaaatgagttattaatgaatgcactctccatttcttcctcccattttcacctcgatcactccagtccagtttccaccttcatcattctgtggaaaagactctcacaatagtgtaaaccctggggaaattttttttatcatcttaattgcaaattcagtggcaccaagcactgctgatctctccattcttgaaggggactctctttagcttcagtgaccccaaactctctttcctactaacacttttaggggtttccctgtcattctttctcaagctcatctgggtcttcccacttttgtttagagaccgttatccagatttatgcattaagactggatttagcaatragtaagaagaaaacccaagttgcagtgcttaaataaagttcccacagatc

SEQ ID NO: 203109 - DNA, 576 bp, Homo sapiens
ggaatctgtccagaaataactttttgaactttctagacttcagttattttcaaacataaacctcatagtcaagatcatctatttatcaatmattgaacatgtctgtgcttgctatgtagccctctttccctgatatcaaatttccacttacctttccaagtgtatctcaaatacctccttttctatgaagcaattacagttgacctaaagtttaccttctttctatattttcaattttgacagcttgaacgttttaatagaaatcataattcagatcgaacttcaaaaaataaacagaaaaaattagaaaaatatttagtattgtgagtggtaaaaaaaaaatagattgttttcaacatatcagctaaagtcaaattggtgcattgcatatattatttctcaactaatattagttggtaggataataaaattaaagttttgcaattacctggtgaatggctcagcatagaaacaccctaagacttaagacacagaatacattagccatcctatatatatctcttcctgaacaaaccttcccactagataattttttttaatttttaaaatataact

SEQ ID NO: 203110 - DNA, 576 bp, Homo sapiens
ggaatctgtccagaaataactttttgaactttctagacttcagttattttcaaacataaacctcatagtcaagatcatctatttatcaataattgaacatgtctgtgcttgctatgtagccctctttccctgatatcaaatttccacttacctttccaagtgtatctcaaatacctccttttctatgaagcaattacagttgacctaaagtttaccttctttctatattttcaattttgacagcttgaacgttttaatagaaawcataattcagatcgaacttcaaaaaataaacagaaaaaattagaaaaatatttagtattgtgagtggtaaaaaaaaaatagattgttttcaacatatcagctaaagtcaaattggtgcattgcatatattatttctcaactaatattagttggtaggataataaaattaaagttttgcaattacctggtgaatggctcagcatagaaacaccctaagacttaagacacagaatacattagccatcctatatatatctcttcctgaacaaaccttcccactagataattttttttaatttttaaaatataact

SEQ ID NO: 203111 - DNA, 430 bp, Homo sapiens
gagtggaattcaaacgaatggaatggaatggaatggtttcaactggaatgcaattcattggaaagcaattgaatggaatcaamccgaaaggaatgtagtacaatggaatggaatggaatgcaacggaatggaatggaatggaatggaatgcaaaggaatgttatggaatggattggaatggaatggaatggaacggaatggattccagataagtggaatggaatggaatggaatgggaaggatttgaatggaatggaatggaatggaatggaatggaatggaatggaatcaagcgtaacggaattgaatggaaggcaatggaatcgaatcaacccgaaaggaatggattacaatttattggagtggaaaggaacggaatggaattgtatggaatggaatggaatcaacacaagtggaatggaatgtaatg

SEQ ID NO: 203112 - DNA, 430 bp, Homo sapiens
gagtggaattcaaacgaatggaatggaatggaatggtttcaactggaatgcaattcattggaaagcaattgaatggaatcaaaccgaaaggaatgtagtacaatggaatggaatggaatgyaacggaatggaatggaatggaatggaatgcaaaggaatgttatggaatggattggaatggaatggaatggaacggaatggattccagataagtggaatggaatggaatggaatgggaaggatttgaatggaatggaatggaatggaatggaatggaatggaatggaatcaagcgtaacggaattgaatggaaggcaatggaatcgaatcaacccgaaaggaatggattacaatttattggagtggaaaggaacggaatggaattgtatggaatggaatggaatcaacacaagtggaatggaatgtaatg

SEQ ID NO: 203113 - DNA, 443 bp, Homo sapiens
aagcattctgagaaacttctttgtgatgtgtgcattcatctcacagagttgcaccattcttttgattgagcagttttgaaacactcttttggtagaatctgcaagtggatatttggagygctttgaggtctagtttaggaaaggaaatatcttcacataaaaactacacagcagcattctctgaaacttccttgtgatgtgtgcattcatctcacagagttgaacctgtcttttgattgagcagatttgacacactctttttgtagaatcagcagctggaaatttggtgggcttggaggcctattgtggaaaagaaaatatcttcacataaaaactacacagaagcattctgagaaacttctttgtggtttgtgtattcaactcacattcttgaacctatcttttgatttagcaattttggatctctctttttctagaatctg

SEQ ID NO: 203114 - DNA, 319 bp, Homo sapiens
gtccctttccccagttgaggtgaagaaaaaagggtgaagattaactgatttctcaggtaaataatctattcctatgatttattaattcaacaaatactgaagtgctgtgtgcttgctggccacgaccctgggtataaagacagatacacccacccccacygccttgggtcccaggggtcttatatccaactgggaagacaataaacacaccaataaaatgttatcaatgacaacagcagcatattaagtgccaaatttgtggtgcgggcaataattgctacagaagttcatgggaaggaaagatcaatgcttggatatc

SEQ ID NO: 203115 - DNA, 419 bp, Homo sapiens
cttctctaatgaccaccccaaagggagagtctcctctctcytttacaggtgagagaaccaaggcacgcaccaatgaggttgcacagagcaggccaggaaaacccaccctggggaagctgagccttcctgggcctgggcagcccatcacagtgacagggccagtgagggggccacacactccagcatctgccaccagaatccttcaccagacagcttttctctagctcttcccaccaaagacctgaatggggcttaggaacatggatgctgttgaggacacaagtcagggtctggcccgtggatttaggagcctcaatgggaccgatttgtaaactgcctggtaacatggaaaacaccagcagactccagaggccacggtgaaaccggggcagaaaggaaatccctgcatgaaaatgacg

SEQ ID NO: 203116 - DNA, 419 bp, Homo sapiens
cttctctaatgaccaccccaaagggagagtctcctctctcctttacaggtgagagaaccaaggcacgcaccaatgaggttgcacagagcaggccaggaaaacccaccctggggaagctgagccttcctgggcctgggcagcccatcacagtgacagggccagtgagggggccacacactccagcatctgccaccagaatccttcaccagacagcttttctctasctcttcccaccaaagacctgaatggggcttaggaacatggatgctgttgaggacacaagtcagggtctggcccgtggatttaggagcctcaatgggaccgatttgtaaactgcctggtaacatggaaaacaccagcagactccagaggccacggtgaaaccggggcagaaaggaaatccctgcatgaaaatgacg

SEQ ID NO: 203117 - DNA, 398 bp, Homo sapiens
gggagagtctcctctctcctttacaggtgagagaaccaaggcacgcaccaatgaggttgcacagagcaggccaggaaaacccaccctggggaagctgagccttcctgggcctgggcagcccatcacagtgacagggccagtgagggggccacacactccagcatctgccaccagaatccttcaccagacagcttttctctagctcttcccaccaaagacctgaatggggcttaggaacatggatgctgttgaggacacaagtcagggtctggcccgtggatttaggagcctcaatgggaccgatttgtaaactgcctggtaacatggaaaacaccagcrgactccagaggccacggtgaaaccggggcagaaaggaaatccctgcatgaaaatgacgg

SEQ ID NO: 203118 - DNA, 584 bp, Homo sapiens
tatgtggcagtttgtgttctaggtatgggacacaaaagcacttttccttcatgaagttcacttgcagtttatttggataaaaaacaattttaaaatatacagactattatagtagatattgctaaatgccacgcatgatattttctaaattcaayttggctttctctaagccttcctctcacattagtaataatatataagctttttcctccaattaaatctatatggaaccatccagtattaaattatatggcctcaggagataaaaaataacaaagaattattcccagtggtagtgtcaacttttctacaaagttaattaatcactgcagatgaatgtggctggaacaggtgacagattgatgctgactgaaaagtaacaactttgaaaatcccaagcagataacataatttattggtgaaaatcacaacacactcataattagtaaatctttcagagtacataggaattgaaagaaaggaaaacaaaataaacatctaatttatatactgaaaatccttgttatctgaacatattattccatgtttaataaggtttgctgaatttgataatatattacaaa

SEQ ID NO: 203119 - DNA, 584 bp, Homo sapiens
tatgtggcagtttgtgttctaggtatgggacacaaaagcacttttccttcatgaagttcacttgcagtttatttggataaaaaacaattttaaaatatacagactattatagtagatattgctaaatgccacgcatgatattttctaaattcaatttggctttctctaagccttcctctcacattagtaataatatataagytttttcctccaattaaatctatatggaaccatccagtattaaattatatggcctcaggagataaaaaataacaaagaattattcccagtggtagtgtcaacttttctacaaagttaattaatcactgcagatgaatgtggctggaacaggtgacagattgatgctgactgaaaagtaacaactttgaaaatcccaagcagataacataatttattggtgaaaatcacaacacactcataattagtaaatctttcagagtacataggaattgaaagaaaggaaaacaaaataaacatctaatttatatactgaaaatccttgttatctgaacatattattccatgtttaataaggtttgctgaatttgataatatattacaaa

SEQ ID NO: 203120 - DNA, 584 bp, Homo sapiens
tatgtggcagtttgtgttctaggtatgggacacaaaagcacttttccttcatgaagttcacttgcagtttatttggataaaaaacaattttaaaatatacagactattatagtagatattgctaaatgccacgcatgatattttctaaattcaatttggctttctctaagccttcctctcacattagtaataatatataagctttttcctccaattaaatctatatggaaccatccagtattaaattatatggcctcaggagataaaaaataacaaagaattattcccartggtagtgtcaacttttctacaaagttaattaatcactgcagatgaatgtggctggaacaggtgacagattgatgctgactgaaaagtaacaactttgaaaatcccaagcagataacataatttattggtgaaaatcacaacacactcataattagtaaatctttcagagtacataggaattgaaagaaaggaaaacaaaataaacatctaatttatatactgaaaatccttgttatctgaacatattattccatgtttaataaggtttgctgaatttgataatatattacaaa

SEQ ID NO: 203121 - DNA, 592 bp, Homo sapiens
tttgggaaatcattacatgaagcatgagtgagagcctgaggagactgagaccagaagaaggaaaagccaacaggagtggcattgccactgtaggcagtaggggcttggttctactggggcctctgaagaaccaatgcatcccagaatttctgcccgaataatgggaaatggggggcatttatccactggcttctatactgtgttggttgagggtgttctttggggtatgaatraacctctgggctgcccttgtgcatggggcccattgacttcttcagcctcagaaagagcccttttctaaggcagatagtggcaagactggcttgagaggtgagggtttgttgtaatctgagtgtgagctcacgtagagctgtccatcacagtggtgaacacagaggctggccaagaggggtgtgctgtggggcactgagagcatctgctactggcagcaatccctaccctttgaaagtcaccgagctccttttcctcagttctggcctctgccactcccagacacatgggtggttcagaaaaacacactgcctttcccacccatggcctcatgaatttccaaaattacttcctcctgacc

SEQ ID NO: 203122 - DNA, 592 bp, Homo sapiens
tttgggaaatcattacatgaagcatgagtgagagcctgaggagactgagaccagaagaaggaaaagccaacaggagtggcattgccactgtaggcagtaggggcttggttctactggggcctctgaagaaccaatgcatcccagaatttctgcccgaataatgggaaatggggggcatttatccactggcttctatactgtgttggttgagggtgttctttggggtatgaataaacctctgggctgcccttgtgcatggggcccattgacttcttcagcctcagaaagagcccttttctaaggcagatagtggcaagactggcttgagaggtgaggstttgttgtaatctgagtgtgagctcacgtagagctgtccatcacagtggtgaacacagaggctggccaagaggggtgtgctgtggggcactgagagcatctgctactggcagcaatccctaccctttgaaagtcaccgagctccttttcctcagttctggcctctgccactcccagacacatgggtggttcagaaaaacacactgcctttcccacccatggcctcatgaatttccaaaattacttcctcctgacc

SEQ ID NO: 203123 - DNA, 516 bp, Homo sapiens
tttctcttttcctcactctctcccaccactctgtcatctatatactccctttgcctcactgagctcttcactgctcttcaaaagactcctcccctcctataaccagatttttttctgaccttgccatctattttgcctttaatgctcaccttttcttctgttcatcctatatgataactcaggctcctttaagacccatgtcagaaaggaaacatcatgaattacagatgcaagctgcaataagcaatgacttcgtagaaacccattccagctaagtattaaggaatgaaataaagatggtttattgatagcctctctatactctatagaatgagggtaggatttccattcctgcctttcttacaatgtgtaakccttcccccaaaatttccaactgaagtctcattcttcaaatatttattgaccctggactctgttctaaacttaaactagaaagagctgactctctagaggggcagtgaatactgatcacatccctaaaaatgtgcaattatt

SEQ ID NO: 203124 - DNA, 193 bp, Homo sapiens
gtgatctgtttaaatgaaactctccatttatatcaaatgtgctctttagtcagaataggagagagrgtaataaaaaaagagtacagttccgctgaaagaggccttgactctttatcatccatcaggcaaggtgaaaagctcactgaaaactccagtgagattacatttaacataaacttcctgagctgaattc

SEQ ID NO: 203125 - DNA, 570 bp, Homo sapiens
gacaagtgagtgccatgggttgcttttcaacgtggaaaataaataggagagataagatttttcttaccataagcaatgtcccataataactggcacagttctctctaagcacaaatgctttcacctctagagccagccttcattttctgtttatggctgggtccatgatgaaacacaatgatatgtagttatgacctacacaatatgctacaaaaaatccctcagctaatatcaccaatagatttcatcttctttttcacttttttccccatgtagcatgagcagatgaattaaaaaaaaactatatagaagtacacatttttccaagaatatgtaatgcctaaaatataattgcttaagtcataaaagatctggtctccaaacaagttatrtttatctaatgactgtccaactgtctttaaattactgtttaataactaccttgtgctcttattaaggaaaaatcatacatggtgtgatattgtgttatggtttattatttttattcagacacagacatgacaccataacattaagaagtcatgtctttggccatattcaaataaataa

SEQ ID NO: 203126 - DNA, 418 bp, Homo sapiens
atacctgagtgggccctacctgattttgaaaaagtttatctctaacctagacaacaggtattcttctcctcctcaattagtttaatcaaaccacactgacctttctgttaataccccttcaaagcctctgaatttaccattccctctgctatgaatgttttttttcctccccatcatccaaaaaggtagcatctttttattacccggaatttacctctatagccacactctgatggaaactttcattgactaggtaacacagcgacaatgatgtatgtagtggacctgaaatgtartggtcactcaatacacattagctagaactgaccatcaatattagttatattgctatttatactgtattagtttgctatggctgctgtaacgaagtaccacaaactggatgacttatacaaca

SEQ ID NO: 203127 - DNA, 478 bp, Homo sapiens
tagaaagaggtcttccatatgtaagctgatatcagtaagctgagccatgtatattttagaatacctgagtgggccctacctgattttgaaaaagtttatctctaacctagacaacaggtattcttctcctcctcaattagtttaatcaaaccacactgacctttctgttaataccccttcaaagcctctgaatttaccattccctctgctatgaatgttttttttcctccccatcatccaaaaaggtagcatctttttattacccggaatttacctctatagccacactctgatggaaactttcattgactaggtaacacagcgacaatgatgtatgtagtggacctgaaatgtagtggtcactcaatacacaytagctagaactgaccatcaatattagttatattgctatttatactgtattagtttgctatggctgctgtaacgaagtaccacaaactggatgacttatacaaca

SEQ ID NO: 203128 - DNA, 552 bp, Homo sapiens
cactgtgattacaaacctaccacttgctcctaaagcatctttacaattcttacattgacattatcataatattataaagactgtttgttttcaaacttttagcatcatttttctaaaaagcaaaaaataaaacaaatataatcacaaaacagaatttaaatattaacattctgatacaggataaataattgtatagctgaaacaacttcggaaatacaaaggagaagagaggtcagtagttgtgctgtggccctaacttccctattggaagtaatgaggaatcaagatatactctctaaatttgatagagcaagaaacacaattttaaatatactatttaacaaaactgggaagtagtgtatgtgagcccagtcctatttgtcaaagcaaagagtcaacasatacgtcaagaaatatacaataatgtactgtttaatattaccttagcaaccattagaagaaataaaagcatatgtaatcctactaagaaatgggactcacaaaggagggtataaatagggactgaagaaatgttaattttttacttactac

SEQ ID NO: 203129 - DNA, 589 bp, Homo sapiens
aagggatatttggtaatacgttaggtgttttttgtttttatcaatgatgagggatgatgctggcattaagtgtttggggaaagcattaagcaacattcctcagtgtgagtacagtcctgtycaatgaaggattgtttcatccaaaatgctaatagtactcccattgggaggcactgcatcaattacatacaagcaaggggtttttctgtctcctggttctgtgtttttcagccagcagttgcttctccccattcatgatctgtgcttccaccctcacttcccctatgggtccctggtcacttttctgctggctgcagttcctactgatggtgtgagcgatatagtctgacctttggagttggatctatttaagtaaaatttccaactctgctactccttggctgtatgcttttgacaaaatctatctaactgttcttagttttaaaatacttcttcaaagaagatatttaagtgcatcttattagtctcgtatccttttggggctctagcagagtatgcacaaatttaaaataatttctgactcacagaggtcttatgaaaattaaagagatgatacctgcaaagagct

SEQ ID NO: 203130 - DNA, 440 bp, Homo sapiens
aatatacctaatttttattatctgatgattgtgataaactatggattgagtttggacaatagaaagtattaataaatatttgtactttccctaggaaagagyagagctgtttaggcaagtgatttcctgaagcacatgaccctggagagctcagtgatgtggttaaaaaaagaccatttgtgtcgtgatctgactacaaggatgcaaccttaccccttagttaacaacgtgtaaaatggggtcttaattctctctgtcattacatagctgtataaagtcctaattagagtagagtattaaatgaactaaatttagcttctaacaccagctgtttcactaaccatctttcctgtcttcagtttcctcatctgtaacataaacagataggaattaaggatttctaaggattcacttcaaagtaacattttttgttttgctat

SEQ ID NO: 203131 - DNA, 590 bp, Homo sapiens
atgatttagcattattttacatttgtggacatttgcataagcagcaggtataaatcatattactacgagaaactcttgccctcaagcaacaaagtcttttacaataattagcatattttttaaaagttgataacaaaatacaaaraaaggagataatcctaatgaccataatgacaattactaataataaacatggcaaactatatatatatatatatataatatatatattctctaaaatattacaagacagtgaaaatgactgaaatataattccttgcacaaaacatagtttattctgggaaatataatctagagtaaagaagtcactgaagaacatacagaatatccaccatttataaaaagctcaataataagtgacattagacaacatgttatttattttatatatatatatgtatatatatggcattaaattattttatgaaaaaggaagaacaaagataaacacagtgattacctggtcttggttaccatggagttgagttaggacagggacccacaggtgcatggaaaggctttgttaatgtactagaccttggattagtgcttatttagttattatgcat

SEQ ID NO: 203132 - DNA, 590 bp, Homo sapiens
atgatttagcattattttacatttgtggacatttgcataagcagcaggtataaatcatattactacgagaaactcttgccctcaagcaacaaagtcttttacaataattagcatattttttaaaagttgataacaaaatacaaaaaaaggagataatcctaatgaccataatgacaattactaataataaacatggcaaactatatatatatatatatataatatatatattctctaaaatattacaagacagtgaaaatgactgaaatataattccttgcacaaaacatagtttattctgggaaatataatctagagtaaagaagtcactgaagaacatacagaatatccaccatttataaaaagctcaawaataagtgacattagacaacatgttatttattttatatatatatatgtatatatatggcattaaattattttatgaaaaaggaagaacaaagataaacacagtgattacctggtcttggttaccatggagttgagttaggacagggacccacaggtgcatggaaaggctttgttaatgtactagaccttggattagtgcttatttagttattatgcat

SEQ ID NO: 203133 - DNA, 623 bp, Homo sapiens
aattatcattttaaagaccctctctccaaatatggtcatattattaaatgctagggggtaggactacaatatataaagtcagrgcaatagcacaattttctccataacacacacagctaagcctcggtaaagagatgctttcagagctagttatttagaaagtataactttgaggggtggagttggggatggttaatgggtaaaaaagaatagttagaaaggatgaataagacctagtacttaatagcacaacagggtgactatagtcagtaacaacttaattgtttatcttaaaataactaaaataatataattggtttgtttttaacacaaaagataaatgcttgagatgatagatattccattttccatgatgtgattattacgcattgcatacctgtatcaaaatatctcatgtgtcccttaaatatatacacctactatttacccacaaaaattaaaaataaaaaaatagaaagtataacttggattttcccaagcacaatatgtactattggaaatctttgagttcttggtcctgattcttttcatgagtcaagattttgcgaggaaaagaagtagaagtagaacaaaaaggaaaacatataagaaattgtagattt

SEQ ID NO: 203134 - DNA, 623 bp, Homo sapiens
aattatcattttaaagaccctctctccaaatatggtcatattattaaatgctagggggtaggactacaatatataaagtcagggcaatagcacaattttctccataacacacacagctaagcctcggtaaagagatgctttcagagctagttatttagaaagtataactttgaggggtggagttggggatggttaatgggtaaaaaagaatagttagaaaggatgaataagacctagtacttaatagcacaacagggtgactatagtcagtaacaacttaattgtttatcttaaaatarctaaaataatataattggtttgtttttaacacaaaagataaatgcttgagatgatagatattccattttccatgatgtgattattacgcattgcatacctgtatcaaaatatctcatgtgtcccttaaatatatacacctactatttacccacaaaaattaaaaataaaaaaatagaaagtataacttggattttcccaagcacaatatgtactattggaaatctttgagttcttggtcctgattcttttcatgagtcaagattttgcgaggaaaagaagtagaagtagaacaaaaaggaaaacatataagaaattgtagattt

SEQ ID NO: 203135 - DNA, 456 bp, Homo sapiens
ggcaaaattttgttttcagaatgcagtattttaaatttcaggtattattatttttctgagtctctgaaaaatggttttaaggatttgcttttaatcctatttacatgttcacacactcaactacaaatatctttcattccttaggttaatatttttcaaagggttgttctgggaccacttgcgtgagaatcacctggattctgggatgctttgtgaaatgaaatgaagattcccgggtccataccctaccccctgcccccagcagccacagtctcttgggacagagcctagaaatcttgcctttgctaagyacctcggtagatttttatgcacagcaaaggttgagaaccactacctcttgttttgctgctgaaagtgataaaatgtgccaggaattttggaagtacttattaagccaatctgaacatcaaggagccatttaagtcagtaactcag

SEQ ID NO: 203136 - DNA, 582 bp, Homo sapiens
gaggaaagctggatggtacacagagcatatccatttaatctgggttttcgtcttcctcaaacattgtaaaaatggctatttcatcagccaagttttgtcagtttgggacagcagctgtgcaatcattggagataccactggccctggagtcagaagacacaggtttaaatcttgattcgactatttggttgttgattgaactcaaccaaatcatttaactctcatcatttaacctcatctgtaaaataagcttaatactctatatgccatagcattattgtgaggattgagccagcgtcaatgaatgtactgggtacctgggaagaggtcagtaaatgtctgtttaaaagaaaaggaaaaataaaagggtctcttctgtcctgggtgagccttctgatgcagagtttattttgaggagaaatagacaagttcagagtgtgttaaatttaggcttgagactaaagactgaacgttaagtcagcctggtttctggacttgtcttaaccagaatgtctrtggcctccgcagagagtatgaggattaattagttaatctttgtaaagtgctttgaaggtgaaaagt

SEQ ID NO: 203137 - DNA, 488 bp, Homo sapiens
tttttcatatttgcgccctgctcaaagctgacagactttcatggctttcagcatatgggttgtggtagtattcctgattatagcctatgcttcctccagaaatggaagaaatctaccaggtatagttctttcttattagtgacagaaggtrcaagatgcaataattttcctttgattaaaagaacaaacctggaggcatcacattaccagacttcaaattatactacaaggcgatagttaccaaaacagtatggtgcttatatacatgtaggcatgtcgaccaatggaactgaataaagaacccagaaataaagtcaaatatgtacagccaactgatctttgacaaagcatacaaaaacataaattagggaatggacaacctattcaataaatggttctgagaaaactggcaagccatgtgtagatgaatgaaactggatctgtgtctctcaccttataaaaaatcaactcaaggtaaatcaaagact

SEQ ID NO: 203138 - DNA, 488 bp, Homo sapiens
tttttcatatttgcgccctgctcaaagctgacagactttcatggctttcagcatatgggttgtggtagtattcctgattatagcctatgcttcctccagaaatggaagaaatctaccaggtatagttctttcttattagtgacagaaggtacaagatgcaataattttcctttgattaaaagaacaaacctggaggcatcacattaccagacttcaaattatactacaaggcgatagttaccaaaacagtatggtgcttatatacatgtaggcatgtcgaccaatggaactgaataaagaacccagaaataaagtcaaatatgtacagccaactgatctttgacaaagcatacaaaaacataaattagggaatggacaacctattcaataaatggttctgagaaaactggyaagccatgtgtagatgaatgaaactggatctgtgtctctcaccttataaaaaatcaactcaaggtaaatcaaagact

SEQ ID NO: 203139 - DNA, 467 bp, Homo sapiens
ctaccaattccaatagagagccttgatttgggattaggttactctgaaatattttccaaagtaactcaattttacagaatcaaagtgtacttgtggctcattttatagctatggagaatatgtatttctaatttcyactttagagggttttttttttaaccatcacaactaggaattttaattctttgtctgaaaaattatactgtacgtatttccctcaaaaccatttggtacaaagtactgcccattagaagcaagctgaacattttgaatatatattattcatctcatacaggatgaccttgctcagtaggtcataatttgaagatctattatgactgtgattaataggacttctcccgaccagtatctgaaataaatgcaaatggccactgtaacacaattacttggtttccattttaaagtctttccacttagaaactaagttatacatagaggttacacat

SEQ ID NO: 203140 - DNA, 467 bp, Homo sapiens
ctaccaattccaatagagagccttgatttgggattaggttactctgaaatattttccaaagtaactcaattttacagaatcaaagtgtacttgtggctcattttatagctatggagaatatgtatttctaatttctactttagagggttttttttttaaccatcacaactaggaattttaattctttgtctgaaaaattatactgtacgtatttccctcaaaaccatttggtayaaagtactgcccattagaagcaagctgaacattttgaatatatattattcatctcatacaggatgaccttgctcagtaggtcataatttgaagatctattatgactgtgattaataggacttctcccgaccagtatctgaaataaatgcaaatggccactgtaacacaattacttggtttccattttaaagtctttccacttagaaactaagttatacatagaggttacacat

SEQ ID NO: 203141 - DNA, 467 bp, Homo sapiens
ctaccaattccaatagagagccttgatttgggattaggttactctgaaatattttccaaagtaactcaattttacagaatcaaagtgtacttgtggctcattttatagctatggagaatatgtatttctaatttctactttagagggttttttttttaaccatcacaactaggaattttaattctttgtctgaaaaattatactgtacgtatttccctcaaaaccatttggtacraagtactgcccattagaagcaagctgaacattttgaatatatattattcatctcatacaggatgaccttgctcagtaggtcataatttgaagatctattatgactgtgattaataggacttctcccgaccagtatctgaaataaatgcaaatggccactgtaacacaattacttggtttccattttaaagtctttccacttagaaactaagttatacatagaggttacacat

SEQ ID NO: 203142 - DNA, 467 bp, Homo sapiens
ctaccaattccaatagagagccttgatttgggattaggttactctgaaatattttccaaagtaactcaattttacagaatcaaagtgtacttgtggctcattttatagctatggagaatatgtatttctaatttctactttagagggttttttttttaaccatcacaactaggaattttaattctttgtctgaaaaattatactgtacgtatttccctcaaaaccatttggtacaaagtactgcccattagaagcaagctgaacattttgaatatatattattcatctcatacrggatgaccttgctcagtaggtcataatttgaagatctattatgactgtgattaataggacttctcccgaccagtatctgaaataaatgcaaatggccactgtaacacaattacttggtttccattttaaagtctttccacttagaaactaagttatacatagaggttacacat

SEQ ID NO: 203143 - DNA, 486 bp, Homo sapiens
atcttcagtgataaacttggactaactgtggcccaggtatcagcactcccaagaattgccaggaggaagctttggcagacaccacaggtatggcaaggcctatctccctctgctgaatccaacaggggcaagcaagctggcatgtggcttgaggtgacccgaatatgtcagcacccctcagatgtctttctttgcacttttaaaaaaaatctcagaatttgctggcaacatggccaaataggaacagctccagtctgcagctcccagtgagatcaatgcagaatgcaggtgatttctgcatttccaactgaggtacctggttcatctcactgggactggttggacagtgggtgcagcgcacggagggtgagccaaagcagaatggggygtcgcctcacccgggaagtgcaaggggttgggggaattccctcccctagccaagggaagccccgagggactgtaccatgaggaacggtgcactccacc

SEQ ID NO: 203144 - DNA, 386 bp, Homo sapiens
tctgaaaaaagggcagcagccccagtcagagacctatagataaaacccccatctccctggarcagagcacctaggggaaagggcgcctgtgggcacagcttcagcagacttaaagcatctttgaaaagcctgatggctctgaagagagcagcagatctcccagcacagtattcgagctctgataagggtcagactgcctcctcaagtgggtccctaacccccgtgtatcctgactgggagacacctccccagtaggtgccaacaggcacctcatacaggagagctctggctggcatctggtgggtgcccctcttggacaaaacttccagaggaagaaacaggcagcaatctttgctgttctccagcctccgctggtgatgcccagg

SEQ ID NO: 203145 - DNA, 352 bp, Homo sapiens
gcagcagccccagtcagagacctatagataaaacccccatctccctggaacagascacctaggggaaagggcgcctgtgggcacagcttcagcagacttaaagcatctttgaaaagcctgatggctctgaagagagcagcagatctcccagcacagtattcgagctctgataagggtcagactgcctcctcaagtgggtccctaacccccgtgtatcctgactgggagacacctccccagtaggtgccaacaggcacctcatacaggagagctctggctggcatctggtgggtgcccctcttggacaaaacttccagaggaagaaacaggcagcaatctttgctgttctcca

SEQ ID NO: 203146 - DNA, 352 bp, Homo sapiens
gcagcagccccagtcagagacctatagataaaacccccatctccctggaacagagcacctaggggaaagggcgcctgtgggcacagcttcagcagacttaaagcatctttgaaaagcctgatggctctgaagagagcagcagatctcccwgcacagtattcgagctctgataagggtcagactgcctcctcaagtgggtccctaacccccgtgtatcctgactgggagacacctccccagtaggtgccaacaggcacctcatacaggagagctctggctggcatctggtgggtgcccctcttggacaaaacttccagaggaagaaacaggcagcaatctttgctgttctcca

SEQ ID NO: 203147 - DNA, 373 bp, Homo sapiens
caaggcatctctgaaaaaagggcagcagccccagtcagagacctatagataaaacccccatctccctggaacagagcacctaggggaaagggcgcctgtgggcacagcttcagcagacttaaagcatctttgaaaagcctgatggctctgaagagagcagcagatctcccagcacagtattcgagctctgataagggtcagactgcctcctcaagtgggtccctaacccccgtgtatcctgactgggagacacctccccagtaggtgccaayaggcacctcatacaggagagctctggctggcatctggtgggtgcccctcttggacaaaacttccagaggaagaaacaggcagcaatctttgctgttctcca

SEQ ID NO: 203148 - DNA, 386 bp, Homo sapiens
tctgaaaaaagggcagcagccccagtcagagacctatagataaaacccccatctccctggaacagagcacctaggggaaagggcgcctgtgggcacagcttcagcagacttaaagcatctttgaaaagcctgatggctctgaagagagcagcagatctcccagcacagtattcgagctctgataagggtcagactgcctcctcaagtgggtccctaacccccgtgtatcctgactgggagacacctccccagtaggtgccaacaggcacctcatacaggagagctctggctggcatctggtgggtgcccctctkggacaaaacttccagaggaagaaacaggcagcaatctttgctgttctccagcctccgctggtgatgcccagg

SEQ ID NO: 203149 - DNA, 586 bp, Homo sapiens
tttgtgggaatgtaaattagttcattcactgtggaaggcagtgtgaaaattcctcaaagatctagaaccagaaatgccatttgccccagcaatccctttactggatatatgcccaaaggaatataaatcattctattataaagatacatgcacagggctgggtgcagtggctcacacctgtaatcccagcactttgggaggccaaggcgggtggatcacctgaggacaggagtttgagaccagcctagccaacatggggaaactccatctctactaaaaatamaaaaattagccaggtatagtggtgcacacctgtaataccagctactttggaggctgaggcaggagaatcgctggaacccaggaggcagaggtcaaagtgagccaagatcataccattgcactccagcctgggcaacaagagcaaaactccatctcaaaaaaatatatatatatacatatacatacatatatatacacatatatatacatatatacagatattatatatgtaaatgtatatatatgtgtatatatatacacacatatatatacacatatatatacatattataactacatatat

SEQ ID NO: 203150 - DNA, 586 bp, Homo sapiens
tttgtgggaatgtaaattagttcattcactgtggaaggcagtgtgaaaattcctcaaagatctagaaccagaaatgccatttgccccagcaatccctttactggatatatgcccaaaggaatataaatcattctattataaagatacatgcacagggctgggtgcagtggctcacacctgtaatcccagcactttgggaggccaaggcgggtggatcacctgaggacaggagtttgagaccagcctagccaacatggggaaactccatctctactaaaaataaaaaaattagccaggtatagtggtgcacacctgtaataccagctactttggaggctgaggcaggagaatcgctggaacccaggaggcagaggtcaaagtgagccaagatcataccattgcactccagcctgggcaacaagagcaaaactccatctyaaaaaaatatatatatatacatatacatacatatatatacacatatatatacatatatacagatattatatatgtaaatgtatatatatgtgtatatatatacacacatatatatacacatatatatacatattataactacatatat

SEQ ID NO: 203151 - DNA, 524 bp, Homo sapiens
ggctcatgttcattgcagcattattcacaatacccaaatatgaaatcaacacaggtgtctatcaactgacaaatggatgaagaaaatgtagtgtatatatacaatggaatactactcagccttaataggaaggaaaacctgatatatgtgacaacatgaattaacccagaagatatcacgctaagtgaaataagccaggcacgaaaagacaaatatcacatgatctcactgatatgtggaatctraaaaagttgaattcatagaagtagagaatggaatggtgattatcagaggctagtagttgggggtagacatggaaaaggtagatgttgataaaagggttcaaagtttcagttagacaaagtttcagtgaactattgcacagaatggtgactgtaataaataacaaggtattgtatgtttcaaaatgactaacagagtagattttaaatgttttcaccacaaaaaagatatgtatgtcaataagatagacctaatctttccacaatttaaacatgtatcaa

SEQ ID NO: 203152 - DNA, 524 bp, Homo sapiens
ggctcatgttcattgcagcattattcacaatacccaaatatgaaatcaacacaggtgtctatcaactgacaaatggatgaagaaaatgtagtgtatatatacaatggaatactactcagccttaataggaaggaaaacctgatatatgtgacaacatgaattaacccagaagatatcacgctaagtgaaataagccaggcacgaaaagacaaatatcacatgatctcactgatatgtggaatctaaaaaagttgaattcatagaagtagagaatggaatggtgattatcagaggctagkagttgggggtagacatggaaaaggtagatgttgataaaagggttcaaagtttcagttagacaaagtttcagtgaactattgcacagaatggtgactgtaataaataacaaggtattgtatgtttcaaaatgactaacagagtagattttaaatgttttcaccacaaaaaagatatgtatgtcaataagatagacctaatctttccacaatttaaacatgtatcaa

SEQ ID NO: 203153 - DNA, 371 bp, Homo sapiens
gaattcatagaagtagagaatggaatggtgattatcagaggctagtagttgggggtagacatggaaaaggtagatgttgataaaagggttcaaagtttcagttagacaaagtttcagtgaactattgcacagaatggtgactgtaataaataacaaggtattrtatgtttcaaaatgactaacagagtagattttaaatgttttcaccacaaaaaagatatgtatgtcaataagatagacctaatctttccacaatttaaacatgtatcaaaacattacattgtaccccataaatagatacaattattatttgtcaatttaaaatttttcactaatttatattgttattgttgcaccaactcctttccacc

SEQ ID NO: 203154 - DNA, 371 bp, Homo sapiens
gaattcatagaagtagagaatggaatggtgattatcagaggctagtagttgggggtagacatggaaaaggtagatgttgataaaagggttcaaagtttcagttagacaaagtttcagtgaactattgcacagaatggtgactgtaataaataacaaggtattgtatgtttcaaaatgactaacagagtagattttaaatgttttcaccacaaaaaagatatgtatgtcaataagayagacctaatctttccacaatttaaacatgtatcaaaacattacattgtaccccataaatagatacaattattatttgtcaatttaaaatttttcactaatttatattgttattgttgcaccaactcctttccacc

SEQ ID NO: 203155 - DNA, 590 bp, Homo sapiens
aatggtgattatcagaggctagtagttgggggtagacatggaaaaggtagatgttgataaaagggttcaaagtttcagttagacaaagtttcagtgaactattgcacagaatggtgactgtaataaataacaaggtattgtatgtttcaaaatgactaacagagtagattttaaatgttttcaccacaaaaaagatatgtatgtcaataagatagacctaatctttccacaatttaaacatgtatcaaaacattacattgtaccccataaatagatacaattattatttgtcaatttaaaatttttcactaatttatattgttattgttgcaccaactcctttccaccaggcagattctcataaagactattttctcttttacatgaagcatttcctacacacctyttaatcacggtagcattgacgtcattccaccagattctatctccagtgttaaaataatcaagaacccagaaatctccaccagggggcaaccaatgcgtatcaaagtttcccactttcctttagatttacttatgggtaacttatgggaaaaaatacttaagtacttccctttttaaagaaaaaa

SEQ ID NO: 203156 - DNA, 590 bp, Homo sapiens
aatggtgattatcagaggctagtagttgggggtagacatggaaaaggtagatgttgataaaagggttcaaagtttcagttagacaaagtttcagtgaactattgcacagaatggtgactgtaataaataacaaggtattgtatgtttcaaaatgactaacagagtagattttaaatgttttcaccacaaaaaagatatgtatgtcaataagatagacctaatctttccacaatttaaacatgtatcaaaacattacattgtaccccataaatagatacaattattatttgtcaatttaaaatttttcactaatttatattgttattgttgcaccaactcctttccaccaggcagattctcataaagactattttctcttttacatgaagcatttcctacacacctcttaatcmcggtagcattgacgtcattccaccagattctatctccagtgttaaaataatcaagaacccagaaatctccaccagggggcaaccaatgcgtatcaaagtttcccactttcctttagatttacttatgggtaacttatgggaaaaaatacttaagtacttccctttttaaagaaaaaa

SEQ ID NO: 203157 - DNA, 489 bp, Homo sapiens
tctgaaacgaaaaagctttacaaaatccaagatccattcctgactaaagataaaagaaattttcagcaaactgtgaatacagaaaactttctcagcctgttaaagagtacctatgaaaaaaattatagctaacattatacttaatgatgaaatatttaatatatttcataacaggaacaagtcaaagatgtctactctaactaattctactcagcattcaacaaaatgaatatagtgaattcatactagaattttaaaagcaaatgtctttattcactgmcaacataatcatctataaagaaaatcctacataacctataaaaaactgatggaacttataagttttgcaagtttacaggatataatgtcaaacaaagatctattatgtgcccataagctaagaataaacaattgtaaattgaaataaaaatgtcacttaaaagggcatcagaaatataaaacttagagataaatataaagtacatatgc

SEQ ID NO: 203158 - DNA, 489 bp, Homo sapiens
tctgaaacgaaaaagctttacaaaatccaagatccattcctgactaaagataaaagaaattttcagcaaactgtgaatacagaaaactttctcagcctgttaaagagtacctatgaaaaaaattatagctaacattatacttaatgatgaaatatttaatatatttcataacaggaacaagtcaaagatgtctactctaactaattctactcagcattcaacaaaatgaatatagtgaattcatactagaattttaaaagcaaatgtctttattcactgacaacataatcatctataaagaaaatcctacataacctataaaaaactgatggaactwataagttttgcaagtttacaggatataatgtcaaacaaagatctattatgtgcccataagctaagaataaacaattgtaaattgaaataaaaatgtcacttaaaagggcatcagaaatataaaacttagagataaatataaagtacatatgc

SEQ ID NO: 203159 - DNA, 560 bp, Homo sapiens
atgacatataaataaataagaaatatgaattttttaaaaggtacaaaaaaattctgaggctgaaaagtacaataactaattaaaaagttactttttacttagggttccaatagaagatttgagcagctggaaaaaagaatcagtgaacttgatagatcaagtgaaatgattcagtctgaagagcaggaaaatgaaagaatgacaacaaaaaagaatagagcctaaagacctgtgtaacaacatcaagaatgcctacatacagaatcctggtggggagtgaggggcaggaagactatttgaagaaatgtgtttgaaagcttcccaaatttcactaaaaacaaatatatacattcaaaaagctcagtgmacttcatcaaggaaatatacaaagatattcacaccaagacacactacgtttcaaattgtcaaaaggcaaagcgaatgtttgaaagcagcaagagaaaggcaacgcgtcatttacaaaggatcctcaataagtttgacagcagatagtgcattataatccatggatgccagaagagcttaggaaaaaggcaatg

SEQ ID NO: 203160 - DNA, 560 bp, Homo sapiens
atgacatataaataaataagaaatatgaattttttaaaaggtacaaaaaaattctgaggctgaaaagtacaataactaattaaaaagttactttttacttagggttccaatagaagatttgagcagctggaaaaaagaatcagtgaacttgatagatcaagtgaaatgattcagtctgaagagcaggaaaatgaaagaatgacaacaaaaaagaatagagcctaaagacctgtgtaacaacatcaagaatgcctacatacagaatcctggtggggagtgaggggcaggaagactatttgaagaaatgtgtttgaaagcttcccaaatttcactaaaaacaaatatatacattcaaaaagctcagtgcacttcatcaaggaaatatacaaagatattcacaccaagacacactaygtttcaaattgtcaaaaggcaaagcgaatgtttgaaagcagcaagagaaaggcaacgcgtcatttacaaaggatcctcaataagtttgacagcagatagtgcattataatccatggatgccagaagagcttaggaaaaaggcaatg

SEQ ID NO: 203161 - DNA, 426 bp, Homo sapiens
aattagagggaaatttggtgaaagaaatatgggagaatgggatattgctctgtgaatgcttttgtgcataattgtacatttttaattaagttaatcttttacactctcaaagtgtgatattaagcaagcaaagataagttattacaagactctaaaacsgaatgcaatgagaaacaagtgaatccaaatatatttcaaatgaatgaatgacataatcaaacttaaggggaaaataataattaatctgattaatttttgactgttctcttatttcaaattgacttttgaacatactttgactacatactattgcttgaaaaaataaaatatctgcaaaaaattattaaatcttcatgataggattttttctttttatattagtataaatataacaattctgaaacaaatgtatgtgcattgtaagat

SEQ ID NO: 203162 - DNA, 451 bp, Homo sapiens
tgggaaagaaaactttgaaaagaaacctgtatgttagaagggattttaaaaacacgacaaatgaaaamaaatgggcaagactaaatcatagtgtcttggaatgcatgcatgaaggacacagccgtgaaaatgcaaggacgcctctactggaacagtcatgtttatcgtcacttttcaggagaaaggtggctgcagttgaggagagtcacatgcttcagggctggcaaagtcctatatcttgacttatgtgatgattacagggatgtttacaaaaatcaaactataagtttgttttgtgccatgttttgtattgtgtgtgtgtgttttgtttttcaacttaaaaataaataaaatcaaaaccaaggcttcattatcaagtagcacaaagtctccaatctataacctcctttgtctggatatctgcatttaactaccattgccagagctaatc

SEQ ID NO: 203163 - DNA, 451 bp, Homo sapiens
tgggaaagaaaactttgaaaagaaacctgtatgttagaagggattttaaaaacacgacaaatgaaaacaaatgggcaagactaaatcatagtgtcttggaatgcatrcatgaaggacacagccgtgaaaatgcaaggacgcctctactggaacagtcatgtttatcgtcacttttcaggagaaaggtggctgcagttgaggagagtcacatgcttcagggctggcaaagtcctatatcttgacttatgtgatgattacagggatgtttacaaaaatcaaactataagtttgttttgtgccatgttttgtattgtgtgtgtgtgttttgtttttcaacttaaaaataaataaaatcaaaaccaaggcttcattatcaagtagcacaaagtctccaatctataacctcctttgtctggatatctgcatttaactaccattgccagagctaatc

SEQ ID NO: 203164 - DNA, 572 bp, Homo sapiens
atacaacgagtgaaaaaaaacaaattcagagcaaagataaattaagaagtatctaatattcaaacatagtcaaagagagggagatttctggataatcacttaaacccatggttaaacataaatgcacatatgttaatgtttactgaataacttatctgtgccaagtggtgtattaatgattcatttttatttttcactaaatcttttctctaaagttggtgtagcctgcaactaaatgcaagaaatctgacctaggacctgcacttcttaccattttgctcatatttattccctgtgcatttttgtaacatgtatatgttatatatatagaaagagagagaggcagagatggaaagtaatttatggagtttgatgttatgtcagggtaattacatgattatataattaacaggtttctttttaaatcakctatatcaatagaaaaataaatgtaggaatcaagagactcattctgtccatctgtgatagttccatcatgatactgcattgtcaagtcattgctccaaaaatatggtttagctcaacactgagtgactataggaaaccagaaa

SEQ ID NO: 203165 - DNA, 505 bp, Homo sapiens
tgatattccccttcctgtgtccaagtgttctcattgttcaagtcccacctatgagtgaaaacatgcggtgtttggttttttgttcttgagatagatgatgctttaaattgaccactctagctgcattgtgggaggaaaaaagattttaraacaagactagaaacagaataattagaaaaatgcaactacaatgcagatgagtgattatcaaggtctgaactgaatagtggaaatagagataaggaggcaaattcaagatatgtgcgtgacagtaaaattaacatgacctggtgtttgattgactctgtaaagtgaaaggaaaggatgaataatcaacaaataatatttattctaccaaatgcctccatgccgctttgatgacaggataatatgtaagcttttctatatttcagaaactatatgacatgacgaaaagtaaaaaggggatgggggtaaggaggtatcctgaattgactgagaaataaggaggtattccacagagaat

SEQ ID NO: 203166 - DNA, 609 bp, Homo sapiens
aagcttttctatatttcagaaactatatgacatgacgaaaagtaaaaaggggatgggggtaaggaggtatcctgaattgactgagaaataaggaggtattccacagagaatataaawaaacatatacttagtgttcaaggaataataaaaaagagaacatctatgtgtccaccatacaggatatgaaatagaacatttgccggccatggtggctcacacctgtaatcccagtactttgggaggccgaggtgggaggatcacttaagcccaggacacaggttgcagtgagccaagatcacactatcgtactccagcctgggccaccatgtctcagaaaaataaaaaaactagatgtcttggaggattggaaacaaaatagaactttactagtgccttagactcccattgggtgctccttgccaattgtgttctcctttatttcctgctggatatgaccactgtccttccattgcattgtatgtgttttttaatagactttaatggttctcaagtgatgcattatttagtttggttctttgaaacttatataaatgaaattattttgtagaagttctttcacctttatcagaaggtactttcaccttgatt

SEQ ID NO: 203167 - DNA, 609 bp, Homo sapiens
aagcttttctatatttcagaaactatatgacatgacgaaaagtaaaaaggggatgggggtaaggaggtatcctgaattgactgagaaataaggaggtattccacagagaatataaataaacatatacttagtgttcaaggaataataaaaaagagaacatctatgtgtccaccatacaggatatgaaatagaacatttgccggccatggtggctcacacctgtaatcccagtactttgggaggccgaggtgggaggatcacttaagcccaggacacaggttgcagtgagccaagatcacactatygtactccagcctgggccaccatgtctcagaaaaataaaaaaactagatgtcttggaggattggaaacaaaatagaactttactagtgccttagactcccattgggtgctccttgccaattgtgttctcctttatttcctgctggatatgaccactgtccttccattgcattgtatgtgttttttaatagactttaatggttctcaagtgatgcattatttagtttggttctttgaaacttatataaatgaaattattttgtagaagttctttcacctttatcagaaggtactttcaccttgatt

SEQ ID NO: 203168 - DNA, 603 bp, Homo sapiens
cgaaaagtaaaaaggggatgggggtaaggaggtatcctgaattgactgagaaataaggaggtattccacagagaatataaataaacatatacttagtgttcaaggaataataaaaaagagaacatctatgtgtccaccatacaggatatgaaatagaacatttgccggccatggtggctcacacctgtaatcccagtactttgggaggccgaggtgggaggatcacttaagcccaggacacaggttgcagtgagccaagatcacactatcgtactccagcctgggccaccatgtctcagaaaaataaaaaaactagatgtcttggaggattggaaacaaaatagaactttactagtgccttagackcccattgggtgctccttgccaattgtgttctcctttatttcctgctggatatgaccactgtccttccattgcattgtatgtgttttttaatagactttaatggttctcaagtgatgcattatttagtttggttctttgaaacttatataaatgaaattattttgtagaagttctttcacctttatcagaaggtactttcaccttgattcaataataagtttgcatattacaaccttg

SEQ ID NO: 203169 - DNA, 518 bp, Homo sapiens
agatctattgttgatgaacacttgaaatttttccagtttttaacyattacaaacaatgctgctatgaacattcttttgtaaatcacctggttcatatgtgcaagatatcctctggggtatatatttaaaagtaaaattattgagttattcaacattaccatgaaatgctacactattttttttaacaatcctaccaatttacacttctaccacgaacagataagcattaccattggtcttcatttgtaggaaccatatttgtcttttgctctgggggctttgttttgttttgctttgttttttgcttaaaagtgctttggctattagggatctttttttggctccatgtgaactttaggatttttttttaattttgtgagaaataacgttggtaatttgatgggaattgcattaactctatagattgtatgggtgatatggtcactttagctattgatttttctaatccatgagcatgggatgtttttccatttgtttatgtcatctataatttcttt

SEQ ID NO: 203170 - DNA, 508 bp, Homo sapiens
ttgatgaacacttgaaatttttccagtttttaaccattacaaacaatgctgctatgaacattcttttgtaaatcacctggttcatatgtgcaagatatcctctggggtatatatttaaaagtaaaattattgagttattcaacattaccatgaratgctacactattttttttaacaatcctaccaatttacacttctaccacgaacagataagcattaccattggtcttcatttgtaggaaccatatttgtcttttgctctgggggctttgttttgttttgctttgttttttgcttaaaagtgctttggctattagggatctttttttggctccatgtgaactttaggatttttttttaattttgtgagaaataacgttggtaatttgatgggaattgcattaactctatagattgtatgggtgatatggtcactttagctattgatttttctaatccatgagcatgggatgtttttccatttgtttatgtcatctataatttcttt

SEQ ID NO: 203171 - DNA, 508 bp, Homo sapiens
ttgatgaacacttgaaatttttccagtttttaaccattacaaacaatgctgctatgaacattcttttgtaaatcacctggttcatatgtgcaagatatcctctggggtatatatttaaaagtaaaattattgagttattcaacattaccatgaaatgctacactattttttttaacaatcctaccaatttacacttctaccacgaacagataagcattaccrttggtcttcatttgtaggaaccatatttgtcttttgctctgggggctttgttttgttttgctttgttttttgcttaaaagtgctttggctattagggatctttttttggctccatgtgaactttaggatttttttttaattttgtgagaaataacgttggtaatttgatgggaattgcattaactctatagattgtatgggtgatatggtcactttagctattgatttttctaatccatgagcatgggatgtttttccatttgtttatgtcatctataatttcttt

SEQ ID NO: 203172 - DNA, 551 bp, Homo sapiens
tcagttctcttctattcctagtttgttattattacaaatagtttcaaatgtgaacaagtgcttttcccacagctattgaaataaccatatttttttcttttattcagttaatgtggttaatttcattgtttggttttctaattttaaaccatacattcttgaaattactgcacttagtcaygatgtatttttctttggagtatattgttggattatatttgcaaacatttttgtttagaattattatgtagtatattagtctgtaatttcatttcttttaatatccttgtatggttttactatcatggaggtaccaccatataaaacaagttggaaagtgttatgtcttcccaattctctaaaaatattcatgtaacattggcattatttctttattaaatatttggtaatatttctttattaaatattgcatccacctagccctggagttctttttacaggaaaaaaaaattttctaaataaaatttctacaatgaaaaaaaaactactcagtttttctagtttttttctgatcatttcataaaagtagg

SEQ ID NO: 203173 - DNA, 621 bp, Homo sapiens
gggtacaaaaaaagaaagatttaataagacctagtatttgatagcacaacagggggattgcagtctaaaattcaattatacatttaaaaataactgaaagagtataaytggattgtttataacacaaataataaatgcttgaggggatgaatatccaattttccattatgtacttattgtacattgcatgcctgtaccaaaatatttcatgtaccccataaatgtatacacctgctatgtacccacaaaaattaaatttaaaaacaatacattgttatccactatagtcaccatattgcacaatagatctgttgaattcattcctcctgtacaatgcaattttgtaccctttgaccaacatctacccaatcctcctggtaaccatcattctactctgtacttctatgtgttcagccttcttagacctccacatacaagtgagattatgcagtatctggctttctgtgcctggattattttactcagtataatgtcctcccggttcattcatgttgtcacaaatgatactttttttattttttaaggttgtatactattctattgtgtatgtgtaccacattttcttcatccactcatgtgtcgatggatacttaagttaat

SEQ ID NO: 203174 - DNA, 621 bp, Homo sapiens
gggtacaaaaaaagaaagatttaataagacctagtatttgatagcacaacagggggattgcagtctaaaattcaattatacatttaaaaataactgaaagagtataattggattgtttataacacaaataataaatgcttgaggggatgaatatccaattttccattatgtacttattgtacattgcatgcctgtaccaaaatatttcatgtaccccawaaatgtatacacctgctatgtacccacaaaaattaaatttaaaaacaatacattgttatccactatagtcaccatattgcacaatagatctgttgaattcattcctcctgtacaatgcaattttgtaccctttgaccaacatctacccaatcctcctggtaaccatcattctactctgtacttctatgtgttcagccttcttagacctccacatacaagtgagattatgcagtatctggctttctgtgcctggattattttactcagtataatgtcctcccggttcattcatgttgtcacaaatgatactttttttattttttaaggttgtatactattctattgtgtatgtgtaccacattttcttcatccactcatgtgtcgatggatacttaagttaat

SEQ ID NO: 203175 - DNA, 621 bp, Homo sapiens
gggtacaaaaaaagaaagatttaataagacctagtatttgatagcacaacagggggattgcagtctaaaattcaattatacatttaaaaataactgaaagagtataattggattgtttataacacaaataataaatgcttgaggggatgaatatccaattttccattatgtacttattgtacattgcatgcctgtaccaaaatatttcatgtaccccataaatgtatacacctgctatgtacccacaaaaattaaatttaaaaacaatacattgttatccactatagtcaccatattgcacaatagatctgttgaattcattcctcctgtacaatgcaattttgtacccttygaccaacatctacccaatcctcctggtaaccatcattctactctgtacttctatgtgttcagccttcttagacctccacatacaagtgagattatgcagtatctggctttctgtgcctggattattttactcagtataatgtcctcccggttcattcatgttgtcacaaatgatactttttttattttttaaggttgtatactattctattgtgtatgtgtaccacattttcttcatccactcatgtgtcgatggatacttaagttaat

SEQ ID NO: 203176 - DNA, 621 bp, Homo sapiens
gggtacaaaaaaagaaagatttaataagacctagtatttgatagcacaacagggggattgcagtctaaaattcaattatacatttaaaaataactgaaagagtataattggattgtttataacacaaataataaatgcttgaggggatgaatatccaattttccattatgtacttattgtacattgcatgcctgtaccaaaatatttcatgtaccccataaatgtatacacctgctatgtacccacaaaaattaaatttaaaaacaatacattgttatccactatagtcaccatattgcacaatagatctgttgaattcattcctcctgtacaatgcaattttgtaccctttgaccaacatctacccaatcctcctggtaaccatcattctactctgtacttctatgtgttcagccttcttagacctccacatacaagtgagattatgcagtatctggctttctgtgcctggattattttactcagtataatgtcctcccggttcattcatgttgtcacaaatgatactttttttattttttaaggttgtatactattctattgtgtatgtgtaccacrttttcttcatccactcatgtgtcgatggatacttaagttaat

SEQ ID NO: 203177 - DNA, 560 bp, Homo sapiens
ttccccatgtgtgttcctggcacctttgttgaaagtcaattgactataatatgtagatttatttatgggctctttattctgtgtaattggtctatgtgtctgcgtttatgccagtaccatggtgtttcgattgctatagctatgtagtataatttgaagtcaggtaatgtgatatctcctgccttgcttttttcgatcaagattattttggcttttcagagttttttgtgattccatacagatttgagagttgtttttctatttctgtgggaaaatgtcataggaattttgatagagattgcattcaatatgtacatcactttggatagtatggacatttcaaacatattactttttccaatccatgaacatgakatatctttccatttatttgtggcttcttcaattgttttcatcaatgttttgtagttttcagtgtaaagatcattcacctctttgtttaaatttacatctaagtattttttgttgctattataaataggattgttttcttgatttctttttttgtatagtttgttgttgatgtgtagaaatgctac

SEQ ID NO: 203178 - DNA, 609 bp, Homo sapiens
gtttatgccagtaccatggtgtttcgattgctatagctatgtagtataatttgaagtcaggtaatgtgatatctcctgccttgcttttttcgatcaagattattttggcttttcagagttttttgtgattccatacagatttgagagttgtttttctatttctgtgggaaaatgtcataggaattttgatagagattgcattcaatatgtacatcactttggatagtatggacatttcaaacatattactttttccaatccatgaacatgatatatctttccatttatttgtggcttcttcaatygttttcatcaatgttttgtagttttcagtgtaaagatcattcacctctttgtttaaatttacatctaagtattttttgttgctattataaataggattgttttcttgatttctttttttgtatagtttgttgttgatgtgtagaaatgctactgaattttgtatgttcacattgtatcctgcaactttactaaattcatttatgaattctaaattttttggcagagttattggtgttttctatatataagatcatgtcaactgcaaacagaaacaatttaacttcttcctttccaattttcatg

SEQ ID NO: 203179 - DNA, 609 bp, Homo sapiens
gtttatgccagtaccatggtgtttcgattgctatagctatgtagtataatttgaagtcaggtaatgtgatatctcctgccttgcttttttcgatcaagattattttggcttttcagagttttttgtgattccatacagatttgagagttgtttttctatttctgtgggaaaatgtcataggaattttgatagagattgcattcaatatgtacatcactttggatagtatggacatttcaaacatattactttttccaatccatgaacatgatatatctttccatttatttgtggcttcttcaattgytttcatcaatgttttgtagttttcagtgtaaagatcattcacctctttgtttaaatttacatctaagtattttttgttgctattataaataggattgttttcttgatttctttttttgtatagtttgttgttgatgtgtagaaatgctactgaattttgtatgttcacattgtatcctgcaactttactaaattcatttatgaattctaaattttttggcagagttattggtgttttctatatataagatcatgtcaactgcaaacagaaacaatttaacttcttcctttccaattttcatg

SEQ ID NO: 203180 - DNA, 589 bp, Homo sapiens
catgaacatgatatatctttccatttatttgtggcttcttcaattgttttcatcaatgttttgtagttttcagtgtaaagatcattcacctctttgtttaaatttacatctaagtattttttgttgctattataaataggattgttttcttgatttctttttttgtatagtttgttgttgatgtgtagaaatgctacygaattttgtatgttcacattgtatcctgcaactttactaaattcatttatgaattctaaattttttggcagagttattggtgttttctatatataagatcatgtcaactgcaaacagaaacaatttaacttcttcctttccaattttcatgccttttatttctttcttttgcctaattgctctggctaggacatccagtactatgttgaatagaagttctgagagtgggcacccttgtatgaagttttccacaacatctcttatctttttattagctatatattaatacggatgtttcttcttcatcaggagtttgaaaaatatgtcttttctctatattgttcttaatcagtcttcctagaagtatttcaatttcaaaaagtagcaacaa

SEQ ID NO: 203181 - DNA, 589 bp, Homo sapiens
catgaacatgatatatctttccatttatttgtggcttcttcaattgttttcatcaatgttttgtagttttcagtgtaaagatcattcacctctttgtttaaatttacatctaagtattttttgttgctattataaataggattgttttcttgatttctttttttgtatagtttgttgttgatgtgtagaaatgctactgaattttgtatgttcacattgtatcctgcaactttactaaattcatttatgaattctaaattttttggcagagttattggtgttttctrtatataagatcatgtcaactgcaaacagaaacaatttaacttcttcctttccaattttcatgccttttatttctttcttttgcctaattgctctggctaggacatccagtactatgttgaatagaagttctgagagtgggcacccttgtatgaagttttccacaacatctcttatctttttattagctatatattaatacggatgtttcttcttcatcaggagtttgaaaaatatgtcttttctctatattgttcttaatcagtcttcctagaagtatttcaatttcaaaaagtagcaacaa

SEQ ID NO: 203182 - DNA, 167 bp, Homo sapiens
ctaagccttgcaaatgaaactgaatttctcacttgatacytgcctgtgacttgcaatcatgaaaaccaagaattgtgttatgtcactgtgtactgcttgttacctgaaatccacactaggctgggatcaagggttgaatctttcagatttgctccataacctgtgtg

SEQ ID NO: 203183 - DNA, 167 bp, Homo sapiens
ctaagccttgcaaatgaaactgaatttctcacttgatacttgcctrtgacttgcaatcatgaaaaccaagaattgtgttatgtcactgtgtactgcttgttacctgaaatccacactaggctgggatcaagggttgaatctttcagatttgctccataacctgtgtg

SEQ ID NO: 203184 - DNA, 550 bp, Homo sapiens
caatctttcacaattatgaagccctaaatggcttcccatcctgcaatgatttcataaggagcctatgccacctgtcatgtaaggctttttccatgcctaataaatatgttttggagggatttcaccagtgtttctgctaagatacatgcataaaatggmcacagaggttgtgagaaatctctgcagtttctctttgtctatacacatgaaagtattgaagaccagcacttggattagttaagataatgttttaattcatcactgtctcctcctccccttggtaccagcttttatgttcattgcattccccacccttttaagtactcagtacctcctgcatggtaacctattctgatatttgatattatcatgcttaatttgactgaatccattcggatattttatctttaagaaatttgtagttttatacttttaatttatgataaaattagattaatatcaaacattaacaagtgacttttaggaaggtatatgagctttcttattgacttcaaactataaagtacaaactgtgacactagaaatttag

SEQ ID NO: 203185 - DNA, 550 bp, Homo sapiens
caatctttcacaattatgaagccctaaatggcttcccatcctgcaatgatttcataaggagcctatgccacctgtcatgtaaggctttttccatgcctaataaatatgttttggagggatttcaccagtgtttctgctaagatacatgcataaaatggacacagaggttgtgagaaatctctgcagtttctctttgtctatacacatgaaagtattgaagaccagcacttggattagttaagataatgttttaattcatcactgtctcctcctccccttggtaccagcttttatgttcattgcattccccacccytttaagtactcagtacctcctgcatggtaacctattctgatatttgatattatcatgcttaatttgactgaatccattcggatattttatctttaagaaatttgtagttttatacttttaatttatgataaaattagattaatatcaaacattaacaagtgacttttaggaaggtatatgagctttcttattgacttcaaactataaagtacaaactgtgacactagaaatttag

SEQ ID NO: 203186 - DNA, 535 bp, Homo sapiens
ccataatttatcttagaccccaaaactcacagaggcacacatcatatctctaatacttgctcaccaccactggcatgagtctctctctatcctcttctacgtgaagtgattatactgtcacctctggagctaactgtccacagtctcaagatgcacactttttacaaccagaagcctatggactgggtgagggagcagaaacagccacaggtactgcccatcagggtaatgtaagtcagcatgcaaacaactgatcagatgaacatgaatagcaaggtgctgaggcactgggaagagggaccggaaaactctataaytgttgaaaaagactcaagcccttgggaagggaaatgcctatggaattatataaagaccattttatccaagttggtcatcattcagatgaaaaccatgaggcccagaaaagtaaactgagtttccagaattcacacaattgatagaataggaaccagaattcaggcctcttgcttcctattccagaaagacaaattgcaataataatcaaataatatga

SEQ ID NO: 203187 - DNA, 399 bp, Homo sapiens
aggcacacatcatatctctaatacttgctcaccaccactggcatgagtctctctctatcctcttctacgtgaagtgattatactgtcacctctggagctaactgtccacagtctcaagatgcacactttttacaaccagaagcctatggactgggtgagggagcagaaacagccacaggtactgcccatcagggtaatgtaagtcagcatgcaaacaactgatcagatgaacatgaatagcaaggtgctgaggcactgggaagagggaccggaaaactctataattgttgaaaaagactcaagcccttgggaagggaaatgcctayggaattatataaagaccattttatccaagttggtcatcattcagatgaaaaccatgaggcccagaaaagtaaa

SEQ ID NO: 203188 - DNA, 588 bp, Homo sapiens
attataatgttcccaacacaaagaaaagataaatattcgaggtgatgaatatccaaattactctgatttgatcattacacattgtatacatgtatcaaaaatatcacatgtaccccaaaacatgtacaactatgatacatcaataaaaaacaacaaaaaaaccaaaagaatagaaatcaaaaataaatacataaatacataaaatagggataataatacctcccttgcttgcttgctcccttgctccatttgtaagaaataagtgatataatataggtaaaaatacttaacctcatacctaccacayagtatagcacaataaacgttatttattataatctgaggcctacctacataagtgactttcaagtatagaaaattatttctcaaattttaaatactccctgattctcaggtatggtaattagacctggctttaggtaaacctctcatgtctacacttggatttaatcacttaagtatatttcccagcaccccccccaaaaaaaaattgctcctaggtggacacactaatcaaagacttcctgagaaatgcaggaagaagttttgtcctctgaccacgctacg

SEQ ID NO: 203189 - DNA, 588 bp, Homo sapiens
attataatgttcccaacacaaagaaaagataaatattcgaggtgatgaatatccaaattactctgatttgatcattacacattgtatacatgtatcaaaaatatcacatgtaccccaaaacatgtacaactatgatacatcaataaaaaacaacaaaaaaaccaaaagaatagaaatcaaaaataaatacataaatacataaaatagggataataatacctcccttgcttgcttgctcccttgctccatttgtaagaaataagtgatataatataggtaaaaatacttaacctcatacctaccacatagtatagcacaataaacgttatttattataatctgaggcctacctacataagtgactttcaagtatagaaaattatttctcaaattttaaatactccctgattctcaggtatggtaattagacctggctttaggtaaasctctcatgtctacacttggatttaatcacttaagtatatttcccagcaccccccccaaaaaaaaattgctcctaggtggacacactaatcaaagacttcctgagaaatgcaggaagaagttttgtcctctgaccacgctacg

SEQ ID NO: 203190 - DNA, 588 bp, Homo sapiens
attataatgttcccaacacaaagaaaagataaatattcgaggtgatgaatatccaaattactctgatttgatcattacacattgtatacatgtatcaaaaatatcacatgtaccccaaaacatgtacaactatgatacatcaataaaaaacaacaaaaaaaccaaaagaatagaaatcaaaaataaatacataaatacataaaatagggataataatacctcccttgcttgcttgctcccttgctccatttgtaagaaataagtgatataatataggtaaaaatacttaacctcatacctaccacatagtatagcacaataaacgttatttattataatctgaggcctacctacataagtgactttcaagtatagaaaattatttctcaaattttaaatactccctgattctcaggtatggtaattagacctggctttaggtaaacctctcatgtctacacttggatttaatcacttaagtatatttcccagyaccccccccaaaaaaaaattgctcctaggtggacacactaatcaaagacttcctgagaaatgcaggaagaagttttgtcctctgaccacgctacg

SEQ ID NO: 203191 - DNA, 588 bp, Homo sapiens
attataatgttcccaacacaaagaaaagataaatattcgaggtgatgaatatccaaattactctgatttgatcattacacattgtatacatgtatcaaaaatatcacatgtaccccaaaacatgtacaactatgatacatcaataaaaaacaacaaaaaaaccaaaagaatagaaatcaaaaataaatacataaatacataaaatagggataataatacctcccttgcttgcttgctcccttgctccatttgtaagaaataagtgatataatataggtaaaaatacttaacctcatacctaccacatagtatagcacaataaacgttatttattataatctgaggcctacctacataagtgactttcaagtatagaaaattatttctcaaattttaaatactccctgattctcaggtatggtaattagacctggctttaggtaaacctctcatgtctacacttggatttaatcacttaagtatatttcccagcrccccccccaaaaaaaaattgctcctaggtggacacactaatcaaagacttcctgagaaatgcaggaagaagttttgtcctctgaccacgctacg

SEQ ID NO: 203192 - DNA, 635 bp, Homo sapiens
ctcacgcctgtcagcccagcactttgggaggtcaaagcaagcaaatcgcttgagatcagcagttyaagaagtgtaacaaatcctctacaatataagtagagtgaaaagagatagctacagtgatgagggaaggcactatagtgatgtggcatttgagtatagccataaaagaggataaatattacaatacatgaatatagggtctaaagaagtcttttcaagtagattgcaaaatatttcaaaaatggtaagtttggtgtatgttgaagcatacagattgtctacatcctaaaaatcattttggtgaagaaaggaaaataagaaaggtagtcaatattcatttgttgcctatcattagaaacttctcaaaggtatatgagaattattaaataaatttagggagccagtgaaggtatgggtcccgggaattgaggatgaagccagtaattagggaagatgccccatctataagtgcgatgtatcaaatggaggaaaagaaaaacggagggaaggagttcccttaagagaagattgaaatagagcagacttggggggctacacagaggaactgggactacacagttccagctttaaggctatagaaacagaaatagaaatactggtaagtaaaaacc

SEQ ID NO: 203193 - DNA, 635 bp, Homo sapiens
ctcacgcctgtcagcccagcactttgggaggtcaaagcaagcaaatcgcttgagatcagcagtttaagaagtgtaacaaatcctctacaatataagtagagtgaaaagagatagctacagtgatgagggaaggcactatagtgatgtggcatttgagtatagccataaaagaggataaatattacaatacatgaatatagggtctaaagaagtcttttcaagtagattgyaaaatatttcaaaaatggtaagtttggtgtatgttgaagcatacagattgtctacatcctaaaaatcattttggtgaagaaaggaaaataagaaaggtagtcaatattcatttgttgcctatcattagaaacttctcaaaggtatatgagaattattaaataaatttagggagccagtgaaggtatgggtcccgggaattgaggatgaagccagtaattagggaagatgccccatctataagtgcgatgtatcaaatggaggaaaagaaaaacggagggaaggagttcccttaagagaagattgaaatagagcagacttggggggctacacagaggaactgggactacacagttccagctttaaggctatagaaacagaaatagaaatactggtaagtaaaaacc

SEQ ID NO: 203194 - DNA, 635 bp, Homo sapiens
ctcacgcctgtcagcccagcactttgggaggtcaaagcaagcaaatcgcttgagatcagcagtttaagaagtgtaacaaatcctctacaatataagtagagtgaaaagagatagctacagtgatgagggaaggcactatagtgatgtggcatttgagtatagccataaaagaggataaatattacaatacatgaatatagggtctaaagaagtcttttcaagtagattgcaaaatatttcaaaaatggtaagtttggtgtatgttgaagcatacagattgtctacatcctaaaaatcattttggtgaagaaaggaaaataagaaaggtagtcaakattcatttgttgcctatcattagaaacttctcaaaggtatatgagaattattaaataaatttagggagccagtgaaggtatgggtcccgggaattgaggatgaagccagtaattagggaagatgccccatctataagtgcgatgtatcaaatggaggaaaagaaaaacggagggaaggagttcccttaagagaagattgaaatagagcagacttggggggctacacagaggaactgggactacacagttccagctttaaggctatagaaacagaaatagaaatactggtaagtaaaaacc

SEQ ID NO: 203195 - DNA, 558 bp, Homo sapiens
ctatcattagaaacttctcaaaggtatatgagaattattaaataaatttaggragccagtgaaggtatgggtcccgggaattgaggatgaagccagtaattagggaagatgccccatctataagtgcgatgtatcaaatggaggaaaagaaaaacggagggaaggagttcccttaagagaagattgaaatagagcagacttggggggctacacagaggaactgggactacacagttccagctttaaggctatagaaacagaaatagaaatactggtaagtaaaaacccaaaggattggtgacttatcacagctggagtgaatacgaaggagcatgaactcaaagaaaatatcaagatttaagcaagaataaataggacaatggtaggtccatttttagaaattagaaagttgaacataaaatatgtcagggtggagaaaataatcacgtgtattttaagcaaataagagtattagatattgagatgctcaggtgaaaacatatgacaggatatatgggggaaaagtacaaattcaacatgtaattgtatagtaatcca

SEQ ID NO: 203196 - DNA, 558 bp, Homo sapiens
ctatcattagaaacttctcaaaggtatatgagaattattaaataaatttagggagccagtgaaggtatgggtcccgggaattgaggatgaagccagtaattagggaagatgccccatctataagtgygatgtatcaaatggaggaaaagaaaaacggagggaaggagttcccttaagagaagattgaaatagagcagacttggggggctacacagaggaactgggactacacagttccagctttaaggctatagaaacagaaatagaaatactggtaagtaaaaacccaaaggattggtgacttatcacagctggagtgaatacgaaggagcatgaactcaaagaaaatatcaagatttaagcaagaataaataggacaatggtaggtccatttttagaaattagaaagttgaacataaaatatgtcagggtggagaaaataatcacgtgtattttaagcaaataagagtattagatattgagatgctcaggtgaaaacatatgacaggatatatgggggaaaagtacaaattcaacatgtaattgtatagtaatcca

SEQ ID NO: 203197 - DNA, 558 bp, Homo sapiens
ctatcattagaaacttctcaaaggtatatgagaattattaaataaatttagggagccagtgaaggtatgggtcccgggaattgaggatgaagccagtaattagggaagatgccccatctataagtgcgatgtatcaaatggaggaaaagaaaaacggagggaaggagttcccttaagagaagattgaaatagagcagacttggggggctacacagaggaactgggactacacagttccagctttaaggctatagaaacagaaatagawatactggtaagtaaaaacccaaaggattggtgacttatcacagctggagtgaatacgaaggagcatgaactcaaagaaaatatcaagatttaagcaagaataaataggacaatggtaggtccatttttagaaattagaaagttgaacataaaatatgtcagggtggagaaaataatcacgtgtattttaagcaaataagagtattagatattgagatgctcaggtgaaaacatatgacaggatatatgggggaaaagtacaaattcaacatgtaattgtatagtaatcca

SEQ ID NO: 203198 - DNA, 649 bp, Homo sapiens
tatgggtcccgggaattgaggatgaagccagtaattagggaagatgccccatctataagtgcgatgtatcaaatggaggaaaagaaaaacggagggaaggagttcccttaagagaagattgaaatagagcagacttggggggctacacagaggaactgggactacacagttccagctttaaggctatagaaacagaaatagaaatactggtaagtaaaaaccmaaaggattggtgacttatcacagctggagtgaatacgaaggagcatgaactcaaagaaaatatcaagatttaagcaagaataaataggacaatggtaggtccatttttagaaattagaaagttgaacataaaatatgtcagggtggagaaaataatcacgtgtattttaagcaaataagagtattagatattgagatgctcaggtgaaaacatatgacaggatatatgggggaaaagtacaaattcaacatgtaattgtatagtaatccatataaaaataatagacggatgtgtaagagtgcataaggtccctgaaggaaataatacacaggaaaaaaagattaaaaagccaagacccaactatagaaactatccacattgattatgtaaagtaggaaaaggaatcaataaactagacagaacatc

SEQ ID NO: 203199 - DNA, 649 bp, Homo sapiens
tatgggtcccgggaattgaggatgaagccagtaattagggaagatgccccatctataagtgcgatgtatcaaatggaggaaaagaaaaacggagggaaggagttcccttaagagaagattgaaatagagcagacttggggggctacacagaggaactgggactacacagttccagctttaaggctatagaaacagaaatagaaatactggtaagtaaaaacccaaaggattggtgacttatcacagctggagtgaatacgaaggagcatgaactcaaagaaaatatcaagatttaagcamgaataaataggacaatggtaggtccatttttagaaattagaaagttgaacataaaatatgtcagggtggagaaaataatcacgtgtattttaagcaaataagagtattagatattgagatgctcaggtgaaaacatatgacaggatatatgggggaaaagtacaaattcaacatgtaattgtatagtaatccatataaaaataatagacggatgtgtaagagtgcataaggtccctgaaggaaataatacacaggaaaaaaagattaaaaagccaagacccaactatagaaactatccacattgattatgtaaagtaggaaaaggaatcaataaactagacagaacatc

SEQ ID NO: 203200 - DNA, 487 bp, Homo sapiens
cacacagctatatgtggctagataaaacaatcacactgacaatcatcctatgctttctgaatccatcactcttctactttttcagatcttttctttctccctcatccttaccatgtaatgaactcattttgcatgtcaagggctaaaagttgaatattttaaaagttctcattttcccactactatataaaccaacaaatayctttagtctgcattcacaaataacataacaaatgagctcttcatatttctatctgtggtgaattaagatgactagaaattttgtggcaccatcctgttgaaaacgtggggacatattctttctccttgaacctgggtgggctctttgactgctttgaccaataaaatacagtgaaagtaaaacttccagttttgatgtccagatgttaaaagccttgaagcttccatttctacatcttggaaccaacgtgtgtggggtgctgagtcagtatcgaagaattctgct

SEQ ID NO: 203201 - DNA, 487 bp, Homo sapiens
cacacagctatatgtggctagataaaacaatcacactgacaatcatcctatgctttctgaatccatcactcttctactttttcagatcttttctttctccctcatccttaccatgtaatgaactcattttgcatgtcaagggctaaaagttgaatattttaaaagttctcattttcccactactatataaaccaacaaatacctttagtctgcattcacaaataacataacaaatgagctcttcatatttctatctgtggtgaattaagatgactagaaattttgtggcaccatccygttgaaaacgtggggacatattctttctccttgaacctgggtgggctctttgactgctttgaccaataaaatacagtgaaagtaaaacttccagttttgatgtccagatgttaaaagccttgaagcttccatttctacatcttggaaccaacgtgtgtggggtgctgagtcagtatcgaagaattctgct

SEQ ID NO: 203202 - DNA, 426 bp, Homo sapiens
tccacaggctcaacaccacatggaagctgccaaagcttgaggcttgcaccctctgaagccatggcctgagctgtrccttgaccccttttagctgtggctggagcagctgggacacagagcaccaagtccctaggctgtacacaggcaaacagcagaggggccctgggcccagcctatgaaaccattttttcctcctaggcctctgggtgtgtgatggaaggggctgccacaaagatctctgacatggcctgaagacttagcgattaacatttggctccttgttacttatgcaaatttctgcagccagcttgaatttctcctcagaaaatggatttttcttttctatcacagtgtcatgctacaaattttctgaacgtttatgctctgttttcctgttaaaactgagtgcttttaacacacccaagt

SEQ ID NO: 203203 - DNA, 592 bp, Homo sapiens
tttttgggttatctttacaacagcaccccactctaccagtaccaatgtactgtattagtctgttttcatgctgctgataaagacatacctgagactgagtgatttatraagaaaaagacacttaatggactcacatttccaggtggatggggaggcctcacaatcatggtggaaggcaaaaggcacatctctacatgatggcagacaagacagaatgagagctgagtgaaaggggaacccccttataaaatcatcagctcttgtgagacttattcaagaccacgagaacagtatgggggaaatactcctgtgattcagttatctcccgttggatccctcccacaagacacggaaattatgggagctacaattcaagatgagatttgggtggggacacagccaaaccatattgctgctgaatagatcatgtagacaggctctcaaactacacggagagcaagagaggcccaccttaccacaacatttcatccaatccactaataaaacaggcacatcactgaagccaccttcaactctccagactacccagctgccagctgaataccacagatggctacagttaataccacac

SEQ ID NO: 203204 - DNA, 592 bp, Homo sapiens
tttttgggttatctttacaacagcaccccactctaccagtaccaatgtactgtattagtctgttttcatgctgctgataaagacatacctgagactgagtgatttataaagaaaaagacacttaatggactcacatttccaggtggatggggaggcctcacaatcatggtggaaggcaaaaggcacrtctctacatgatggcagacaagacagaatgagagctgagtgaaaggggaacccccttataaaatcatcagctcttgtgagacttattcaagaccacgagaacagtatgggggaaatactcctgtgattcagttatctcccgttggatccctcccacaagacacggaaattatgggagctacaattcaagatgagatttgggtggggacacagccaaaccatattgctgctgaatagatcatgtagacaggctctcaaactacacggagagcaagagaggcccaccttaccacaacatttcatccaatccactaataaaacaggcacatcactgaagccaccttcaactctccagactacccagctgccagctgaataccacagatggctacagttaataccacac

SEQ ID NO: 203205 - DNA, 592 bp, Homo sapiens
tttttgggttatctttacaacagcaccccactctaccagtaccaatgtactgtattagtctgttttcatgctgctgataaagacatacctgagactgagtgatttataaagaaaaagacacttaatggactcacatttccaggtggatggggaggcctcacaatcatggtggaaggcaaaaggcacatctctacatgatggcagacaagacagaatgagagctragtgaaaggggaacccccttataaaatcatcagctcttgtgagacttattcaagaccacgagaacagtatgggggaaatactcctgtgattcagttatctcccgttggatccctcccacaagacacggaaattatgggagctacaattcaagatgagatttgggtggggacacagccaaaccatattgctgctgaatagatcatgtagacaggctctcaaactacacggagagcaagagaggcccaccttaccacaacatttcatccaatccactaataaaacaggcacatcactgaagccaccttcaactctccagactacccagctgccagctgaataccacagatggctacagttaataccacac

SEQ ID NO: 203206 - DNA, 398 bp, Homo sapiens
cttctaaaagtccgccatatttcccatctctctcatcttcacgggtccttttatttatgttttaattcaractgatcaagcatctactatgtgctacagagataagatagaaagaggaatagatatatatattatatattatatataattataatatatataatttattatatatataaattataatgcttcgcagtataactttatcacttcaatataacatgctgtatatacagacccatgttttctacttgctttttgttgttgttcagagaaggatcactgggtctggggcaatcagagaagacgtcatgaggactggaaaaccttatttcttgaagttcaagctcaagtatcaacaaggaagaaaatgccaaatagaaggaatgatatgagcg

SEQ ID NO: 203207 - DNA, 602 bp, Homo sapiens
cataatctcctcttaatccaaaatacatgcaagtaacgtgtccagtaatatttacagcacatatcaatggcactgcattagatacttcatgaaaccaggaaggcaactgactgtttccccttcctgtcaatattctgaatcctgctgtattaattctgtttttcattgtctgtatttttttatggtttgacattttggggtcttgctaatcccagagactgcccctcccaggactagctaactctgagagatggtaaatggcttgcctggcttgcctatgaccacacctttgatatgtaaaccaatcaatccagagccatattctgaaccacctcctctatttggctttaaccctgcaagaggcaattttcccctgcccttattattccagggccaggcatcagacaactacaactataggcagctcatgaatcctggagcactctaaaattattcaaactagccaatcccaaacctggccagccctttcccctgcctcacaatacagtcttttgcctgttctttcccctcactttttctgccccctsacctatgcaggtgctttcccatatggccccatgtgaggtgttatgcctcctgtt

SEQ ID NO: 203208 - DNA, 619 bp, Homo sapiens
aagccttaacaaatagtctagttacatttaaaataacaactttcattattctacttaagactttgtcaattcagtcttaagcaagggccaaataccctgtgtctaacgcagaacttcactctagctacaaatatgtgtatgacaagccaagacaagattttaggagctttgattaatttttaaaggagtcttcccctgaagcaaaatacaatttgtattcctatgttaggagccctgaggttgttacacaccagtatgcattctgtgttaagatttgtgatgggtgacaagttaatacttttctatatatgggagaagaaccattgtaaaaagaggatggraacatttatttccttaaaattctctgtgcaggagaacactcagacataggcacatttctagtttgaagcccattgttctaagttgcattttctctaattcttttgaaaaaaaagtaaagcttaacactgtaatttaattagagtttaccaagttagaaactggacaggtctgctgatagatcccaatttctatactttttttgtttaaccaccttgtgagtagaaaatggacacctgagatgaagaaactttgccaagtgactttggattataagaaa

SEQ ID NO: 203209 - DNA, 585 bp, Homo sapiens
aaataaacctctaaaatgattggggctcccctcagacattttctttagttttacacagaaatgaataatagcattgtatttccattttttagcctctttatgaatatttgtcaacgacttcatcaaaattaactttatccatgtattgatgttccatagcacagccatattagtctagttttacttgtaattgattaaagaatacttattaattttaattttcaaaagtttctttcacatgaagcaatggttatacaaacagaaagacaaactcctaagaatacaattggcagaaattcataaaaagtcacatttcacaaaaaattccagaaattgtaatactgtttgtgacttggttctttggtatcaattctagtgcttttcaaatgtctttgtgtctaaaattttcactaaaatatctttataacaaaattyatcaaaaatttatattcatttggtaaaaacttcagaattttattttcttcccactaaaatcagaaataataattggatgtagtgactactgatgctatttgatccattgtttatgagtaactcgtatattgggtcttcatgtttataatc

SEQ ID NO: 203210 - DNA, 621 bp, Homo sapiens
ggcccggctgcattaatggacgttttctacagatgcaaattttccacataaaagacagctttgcaaggccacttccgttagctgaccctgcagcagccatttcaaaatatgtcaaaaaatgtcttttagagtaaatatttttattttcttctctctttatatatatgtatatatatacacacacatatagatatatatttatatattaaataagataatataatataaagcaaaatagaaataaaatctgggacacaaaggaggttcaggtatgacatacaaaccacatacaccatatacttaccaagagtggaatatgcattccgttytatgcctttagcagtcaatttaaagagagaacatttgttcagtttcaaaatttataatatctaaaatatgaaagtcctcatcatgtttgtaaaggaatggaaggcatgcaaatgaagaaccatatggaatgcagaacaaaattgcccggcaagataagagaattagaaagtgatacagtcgttaagttaaatagattacttctgctttggtggccagaatgaatcatttatttaataagtacttacctaacactcactatattccaggcaggtgtctaaaaattttaagaaa

SEQ ID NO: 203211 - DNA, 222 bp, Homo sapiens
tgtatatcttttttaaccctatgtaaccactgcctacatgttataactaaagaayagaagaaaagtgtttttataaaataatgatagctaccatttgttgcatgtttattatgtgctatacctcgggctaaatgcttgatgcacattatcttatttatcttcctaggaactctgtaagtgagagcatcagtaattctctccattttacgtatggggaaatgg

SEQ ID NO: 203212 - DNA, 474 bp, Homo sapiens
tctccagtaccctcaggcttactagagtggggaaaactccgccctggtaaatttgtggtcagactggttctgtgctcttgaaccctgctttctgttgtttaagatgtttatcaagacaatatgtgcaccactgaacatagactttatcagtagttctgctttttccctttgccttgtgatctttgttggacccttaccagtagttctgcttttgccctttgtcctgttccctcagaagcatgtgatctttgttagacccttaktagtagttctgccttttgccctttgaagcatgtgatctttgtacctactccctgttcttataccccctccccatttaaaacctttaataaaaacttgctggttttgagcctcaggtgggcatcatggtcctactgatatgtgatgccacccccagctgcccagttgtaaaattcctctctttatactgtctctctttatttctcagctggc

SEQ ID NO: 203213 - DNA, 509 bp, Homo sapiens
agacaattttcttgttttaattcttttcaaaagatggcttataataagctgtagaactctgacaggtgctctcaaatacaggtttctgataactttggaataaagggaaaacacacagaactcatgaagagctaaaatattcacaaacccataaaaaaactgaggcaatctttttgayttttgcttggaatattgctgatccttgtttttttttcagagtcaaggaaacttattttgaactatttatgacttttaataattgagtaaggtatactcctgtcaacaaaatacagagcatgtttgtctctctgcctggcttctccagaatttgcaaactagttgtgaatattcttaacttatggcaatataaatgtttgcatcagtgcaataagaatccattttcttttgcaagagggtgcaattgataaactagtttttttaccaaggtgttgactggaagggtatgcttccttttaaggagtcaagctcaacttgcagagccgataaga

SEQ ID NO: 203214 - DNA, 576 bp, Homo sapiens
cccatacctggttctgtcaacatttttggttttcagattatgtgctttatgaggcaaaacatagcaacacaaacatttaaattgcttccatgttttacaacctcaactgctgtattttatataaagggcacaaaatgaatactgttattgatgaaaattgggttaccctgaggactcttgcttaactgaaatcacaaatggagcagacagaaaaatcaaaagtatatgctgagaacggtgagtaaagagtgaactcctcagagcagtaatatttttcatttctagaggccagaagtaagaaaagagagattttttttcttcatttgggaaatttgatttccaatgttacttgaacacaatayaagtaatataagttttaaaaatgaatagttttacttagaaaaaaagttatttgtatgagggactcaaaaatagttttaaaatattactatatgccagaatctgattttgtttctttgttttgttttatttcttttggtttctatttatcctgggcctgcaggttttattttttaaatgtaacaaagctgatttgatgttcctcaaaatgcttct

SEQ ID NO: 203215 - DNA, 567 bp, Homo sapiens
agagaaccttgttttgcttttactttaatgctcaatttacaagaaaaccatataatatccttttgaatttagtcaatatgttcacatattgaatttttgcaagattaatttgtacaatycctttacaacttgtttggacttttagctttatcttatcaaattcaaaacaatcttttaaacctaagcaagaacttacatttccacaccttcttataatcttttactaaaaacacatcctactgttcttatacagcttgcatgtaaatctatttccagtagtttcaattacatgttataatggttactcctagcaatttttaactttaatgtaaaacttggtaagttgttttgattatgtgctaggtgcatccaaggtttgactaattccagcataattaagggcgtggttatttctatatgtccccaggccttaccaattgtggagcaggcaagacaaatagttctcaaaacccaaaaagcagtttatgaccttaaaacatttagcaaacctagcagttgacctgcataatttagtccacctatttatattttgatgacatctgcact

SEQ ID NO: 203216 - DNA, 567 bp, Homo sapiens
agagaaccttgttttgcttttactttaatgctcaatttacaagaaaaccatataatatccttttgaatttagtcaatatgttcacatattgaatttttgcaagattaatttgtacaattcctttacaacttgtttggacttttagctttatcttatcaaattcaaaacaatcttttaaacctaagcaagaacttacatttccacaccttcttataatcttttactaaaaacacatcctactgttcttatacagcttgcatgtaaatctatttccagtagtttcaattacatgttataatggttactcctagcaatttttaactttaatgtaaaacttggtaagttgttttgattatgtgctaggtgcatccaaggtttgactaattccagcataattaagggcgtggttatttctatatgtccccaggccttaccaattgtggagcaggcaagacaaatagttctcaaaacccaaaaagcagtttaygaccttaaaacatttagcaaacctagcagttgacctgcataatttagtccacctatttatattttgatgacatctgcact

SEQ ID NO: 203217 - DNA, 605 bp, Homo sapiens
atcatgagaacagcaagggaaagacctgctcccatgattcagttacctgctactgggtccctcccmcaacatgtggaaatcacaggagctacaattcaagatgagatttgggtagggaccaagcaaaaccatatcactcattttccacaattatctattaaaagtaaataatgtaaatatattttggaagaaaaaaacattgctaatttaataactcaaacttgtaatgctttaaaattgggtttcccaatttaaagcaccaacatgtttagctgtagaaaaggagatagagttcctgaccattatagctctcgataatttgagtggttatgaagagagacttaaggcaacatatagaaatactagcttctggatgctctttttaaataagaatttacttatgttatatttattttatacttttctatcatatatactaccagtcaaaatcctaaacttcttgggtcaaaacagaagtgaatcacatactgcttatttctttattccattttttgtacatgaccgtagctagcaagatgttgaacttgttcaattcttttgatttttactttcatgtactgattgcatgaaatgttcatccttag

SEQ ID NO: 203218 - DNA, 569 bp, Homo sapiens
ggaaagacctgctcccatgattcagttacctgctactgggtccctcccccaacatgtggaaatcacaggagctacaattcaagatgagatttgggtagggaccaagcaaaaccatatcactcattttccacaattatctattaaaagtaaataatgtaaatatattttggaagaaaaaaacattgctaatttaataactcaaacttgtaatgctttaaaattgggtttcycaatttaaagcaccaacatgtttagctgtagaaaaggagatagagttcctgaccattatagctctcgataatttgagtggttatgaagagagacttaaggcaacatatagaaatactagcttctggatgctctttttaaataagaatttacttatgttatatttattttatacttttctatcatatatactaccagtcaaaatcctaaacttcttgggtcaaaacagaagtgaatcacatactgcttatttctttattccattttttgtacatgaccgtagctagcaagatgttgaacttgttcaattcttttgatttttactttcatgtactgattgc

SEQ ID NO: 203219 - DNA, 542 bp, Homo sapiens
tgaaaaaagccattgcctcccttgattgattagaatttcatttcctgagtctttgagggttttcaataaagaaaaaaaaatctatgttaattatcaatamtttaaaaggctagtaaggttacctgatgtatttccggctttgattcaacttcttggaaagatatttcaaagctttttgacttggaaaagaggaataagaaatagtggccgggtattctatttcttcacaagaaacggggcagctagagttatgtgttcctactgtacataaatccttaaattcaatgtggtctgaaatgaaaatcaggacagggaattcagagaagagaaatatttcatcatgggtaggatagttttataaagtttatcatttcactttcaatattaaaaaaaggtggttaccaacaacaaatggtgtttactctgaaacaaatatgttactctgaatatagcagaggagatacaatataaggcctggaagttccaatctttgaattcattgagtcactggattgggatctttattggatttaagaaattat

SEQ ID NO: 203220 - DNA, 564 bp, Homo sapiens
ctgggtttactcctacggctgattctaaagacttagtcttttagccttaatacaatatttgtctattgctatagcccatgtgactcagcagttagccacaatgtttagtcagtaatcttgaaaataaccaaaggagattgtccacttacaaygtgcggacaatttgtggaatgtttggctaactgtaaggaagtgctctttatgaataaaatacaataagtaaaaaaaaaaaactacctccaacactgagttaggaaaaaacctcatttttctgaattatttcttgctctggcaataatatttcttccattataaagagcaattcagaaaaaaaagatggtagatggaacacagaaaacaaaaataaaaacaaacaaacaaaagaacaatgaaattttggaaataaccaatatctgaaaagctgttttggagattgcttcctcaaattgttagtggaattacctcagcgaatttgtttaacgtttagaatcttccgtttattcatatatcagtacacttaaagggatgtgtgagaatctaaccaaataagatcatattcctgaa

SEQ ID NO: 203221 - DNA, 604 bp, Homo sapiens
cttctggcctccatctttctcccatgctggaggcttcctgccctggaataacagactccaagttcttcaacttttggactcttggacttatatcagtgatttgccatgggctctggggccttcggccacagactgaaggctacaatattggcttccctccttttgaggtgttgggacttggactggcttcctggcttgcagacctattgtgggacttcaccttgtaattttgtaagtcaatactctttaataaactccccttcatatatacatcgatcctgttagttttgtccctttggagaatcctgactaatacagtctattaaaataatgataaacgttgacaaataacatttacaccaatattctaaggcactttggtgacagaatatctattaacacatgtttytcctgggaaatagcaaagcttataaaataagtacttttatccccagatggataggaaactaggcttcaactggtgatagtaccagatagttaataaatggcagagccagaatttgccctcgagcttgttgatttcaaagctagtgccttttagccaccatgccatttgcctctgtattatatcagcctagccacc

SEQ ID NO: 203222 - DNA, 581 bp, Homo sapiens
gagactgtgaggttgcctagcgctccacttgcttcaggctacatgcatttcactccatccttcgctgcatttagcccatggatacaatagaagagaccaggatcataatatgactcatgagtccatgccacctttgcctttatggggtccttcatttaaaaaaataaaaaaactattaaaattaaaaatttaaaactgcattggcataatggcaaataaattactcttatgtaataaaacttttatgacctaaagtttaatttttcctttagattttaaaataaaacattttcrtgagcccccaaaagtattgtgggccttaggtactgtgcctagtgtgtatatgaataagttggccctgggagagagtgatggccaagctgatttgtataaaagaatgcacccacacacaaaggagggggaaagagagaaagtgggcaggagggcacacagaagaccaagataaagagcacaggaacagcatgtggggaagcaacatggggtgagtgggaaggacttacatctccatttggtcatcagtgaatctatgtccataagagaagtcagcaactgaaaaggca

SEQ ID NO: 203223 - DNA, 351 bp, Homo sapiens
tgattccattccattccattccatttcaatccattcccttccattccatttcattccattccattccattccattccattccattccattcctttccattccattccatgccattcaactcgggttgattccattcctttccattccattctagttgaacccattccattccattccattgcattccattccattccattccattccattgcacacgggttcattccattccattccattccattccattccattccatttcgttccattccattctattccttaccattccattcmattccattcccttccatgccatttcactcgggtttattccattcctttccattc

SEQ ID NO: 203224 - DNA, 579 bp, Homo sapiens
  misc_feature (1)...(579): n = A,T,C or G
tggggaagggggatgggactgccacttacgccctttttcatgtcctcaagcccccacactccactgaatacgagaactgagggcatgctggggtctttccttccaagttctggcctgagatgaggtctggagaacaagaacggaagccctccacccagggactcaggactagcagatacagaacaacccaggagagctgcgaggagtgcattggtcatttagggtcatggccagtcccagatttgacccagaacaagtctcacttaccctggctcatgctaaccctcaggccatccaaatcagggccatgacccctccccaacccagacaccaggarggaggaggagggagagagagggaagggccctccccgcagaatccaggctcttacatcagattcttgccctggacaggatatcctgtatttaccaggcggaaagtgtatggaggggaggtgaggtgggtggccttcagcagtaacatgaactacaactacctcccgaaaatattcctcttagacgcctgctcaagagtgggatcatttagaagtcagtttgagggtggggnnnnnnnnnnnnn

SEQ ID NO: 203225 - DNA, 514 bp, Homo sapiens
ctggaatttgagacatttctgttccttccaggcaaaacagctaggacatacatgttcctcagaatgggatctrtgccaaatataaaagatgcgagagctagatgtaacgatgatcactaaagaatcgttcatagtgtggtgagagagaaactttagcccccaagctaacagccttcaatggcccccttggctgctcacaggtatcagagagaatacagtgaatttaaacgacagcagctggagctggatgatgagctgaagagtgttgaaaaccagatgcgttatgcccagacgcagctggataagctgaagaaaaccaacgtctttaatgcaaccttccacatctggtaatgagagctaggggatgaggagcactgcacatatctagaccttagctgttgaccactaagcctgggtgcccacttcccacaaaagagggactgtaggttatcttcacccaactaggtttctttcattcatagtgatgggataggcacagtagggattggaattc

SEQ ID NO: 203226 - DNA, 388 bp, Homo sapiens
cttctccttgttgaggcattaggtgatcccctaaggaacaccctcatctccgctgccaggctgataactgggttaagttccagcacaccctggctggaaatgaaccgggccagatgagggagaaaaagagaatccacacctaaggaattgtaggaaacagacagccagagcgagggaagggcttctgggataggattttagggtgtttgatcaggtgggwtggagtgggaggttggataaataagaatggattaacttggagactctttcttagaacatgagatgttaacacccaattgaggaccctgagggacaggaaaactcagctgctaggccagggtggtacttagatgcctggagaaaagcaacggaattgttaacacagagc

SEQ ID NO: 203227 - DNA, 388 bp, Homo sapiens
cttctccttgttgaggcattaggtgatcccctaaggaacaccctcatctccgctgccaggctgataactgggttaagttccagcacaccctggctggaaatgaaccgggccagatgagggagaaaaagagaatccacacctaaggaattgtaggaaacagacagccagagcgagggaagggcttctgggataggattttagggtgtttgatcaggtgggttggagtgggaggttggmtaaataagaatggattaacttggagactctttcttagaacatgagatgttaacacccaattgaggaccctgagggacaggaaaactcagctgctaggccagggtggtacttagatgcctggagaaaagcaacggaattgttaacacagagc

SEQ ID NO: 203228 - DNA, 253 bp, Homo sapiens
acgcccgcccaggcggggtgggggaggctgcaccggcgctcaggtcgccgcagcggcccggcagccgccgcagtgatgtcaaccgcatccgccgcagtccccggcagccmtaaaacgcgccgcggcccgcggaaaccccagcccggctcctcccgccagggccgaggaggagaggacgcgcgggtccccggagtcccccactccgtctgcctaagccgtggagaccgggagtggacgcacggcggtgcctgga

SEQ ID NO: 203229 - DNA, 541 bp, Homo sapiens
ttctaataattcagcagctgtaagttttcacacttaaaacctttggtgcccaacaggcctgagttaaaatccctgagcaggccgggcgtggtagtttcatcgttaaaagtaactttrttcttgtttatatcatggacttccccaaccctgaaggagaaggaaaatatctatcccacaaaatcttgcacgtgggaagtgcttcgcattatttctgggctgtatgttattattggatctatttgaaatatggaattaatctccttgtagcctcttttgttcctcagtttccccatctgtcatttattttctagtttctatctagtggtgtatcagtcacctatctacaggtgtgaggaatcaagcagtctctaaacatggcttcctccattgtctgtcactcctgtgaagcaggcaataccccagagtcaagaggaggaaattattgttccagctgagaggtcataagttaaagagccttgcatagaacggtaaacatgatatcctctcaaaatgctccttgcaggaagactaataaatgtca

SEQ ID NO: 203230 - DNA, 541 bp, Homo sapiens
ttctaataattcagcagctgtaagttttcacacttaaaacctttggtgcccaacaggcctgagttaaaatccctgagcaggccgggcgtggtagtttcatcgttaaaagtaactttattcttgtttatatcatggacttccccaaccctgaaggagaaggaaaatatctatcycacaaaatcttgcacgtgggaagtgcttcgcattatttctgggctgtatgttattattggatctatttgaaatatggaattaatctccttgtagcctcttttgttcctcagtttccccatctgtcatttattttctagtttctatctagtggtgtatcagtcacctatctacaggtgtgaggaatcaagcagtctctaaacatggcttcctccattgtctgtcactcctgtgaagcaggcaataccccagagtcaagaggaggaaattattgttccagctgagaggtcataagttaaagagccttgcatagaacggtaaacatgatatcctctcaaaatgctccttgcaggaagactaataaatgtca

SEQ ID NO: 203231 - DNA, 566 bp, Homo sapiens
aatactttattcatatgtttagactaaacgctctacttacctgttgtcagaatcactctcaaactggtagggtttggagagctaagtaacattctaataattcagcagctgtaagttttcacacttaaaacctttggtgcccaacaggcctgagttaaaatccctgagcaggccgggcgtggtagtttcatcgttaaaagtaactttattcttgtttatatcatggacttccccaaccctgaaggagaaggaaaatatctatcccacaaaatcttgcacgtgggaagtgctkcgcattatttctgggctgtatgttattattggatctatttgaaatatggaattaatctccttgtagcctcttttgttcctcagtttccccatctgtcatttattttctagtttctatctagtggtgtatcagtcacctatctacaggtgtgaggaatcaagcagtctctaaacatggcttcctccattgtctgtcactcctgtgaagcaggcaataccccagagtcaagaggaggaaattattgttccagctgagaggtcataagttaaagagc

SEQ ID NO: 203232 - DNA, 352 bp, Homo sapiens
ataatctttgaggggggaactgggagtggggagggaggaagatttatctttattttgaaatgtctatattgtttgaatatattacattttcctttttaaatacgtaatttttactttaaaacattttaataaagatttttggagatsattaatttagcaaacgcctactgaaatttgttgtgttccacattctgtggcagacacaagggaagaaaaagtataaaagagacatgcacctttgctggaagaactcagtctcactgaagaccatttatagataattatagcacagtggaaaaagccccactgagagagagagactaatgctgtgtggcggggtcacagaagactt

SEQ ID NO: 203233 - DNA, 352 bp, Homo sapiens
ataatctttgaggggggaactgggagtggggagggaggaagatttatctttattttgaaatgtctatattgtttgaatatattacattttcctttttaaatacgtaatttttactttaaaacattttaataaagatttttggagatgrttaatttagcaaacgcctactgaaatttgttgtgttccacattctgtggcagacacaagggaagaaaaagtataaaagagacatgcacctttgctggaagaactcagtctcactgaagaccatttatagataattatagcacagtggaaaaagccccactgagagagagagactaatgctgtgtggcggggtcacagaagactt

SEQ ID NO: 203234 - DNA, 352 bp, Homo sapiens
ataatctttgaggggggaactgggagtggggagggaggaagatttatctttattttgaaatgtctatattgtttgaatatattacattttcctttttaaatacgtaatttttactttaaaacattttaataaagatttttggagatgattaatttagcaaacgcctactgaaatttgttgtgttccacattctgtggcagacacaagggaagaaaaagtataaaaragacatgcacctttgctggaagaactcagtctcactgaagaccatttatagataattatagcacagtggaaaaagccccactgagagagagagactaatgctgtgtggcggggtcacagaagactt

SEQ ID NO: 203235 - DNA, 432 bp, Homo sapiens
tcaatgcccctggactgatattggggttgggggtggtctccaaaggaaaggcagggtggtctcagaagatgggacagtgagtgctgggcagacaaaaagaagagcggtcccarccaggttttcacccgaggaatgatgagtcagtaactgtggagcagggcggagtggggcatggagtttattctagctgtctgtctgttcatttgtttgtttagcttttatttatttgtttttaatttttaattaattaattttgagacagagtctcactctgtcgcccaggctggagtgtagtggtgcgatcgcagctcactgcaatctccgccttccaggctcaagggatcctcccgccttagcctcctgaatagctgggaccacaggcgcacatcaccatgcccagctaatttttggatttttagtagagatggggtt

SEQ ID NO: 203236 - DNA, 432 bp, Homo sapiens
tcaatgcccctggactgatattggggttgggggtggtctccaaaggaaaggcagggtggtctcagaagatgggacagtgagtgctgggcagacaaaaagaagagcggtcccaaccaggttttcacccgaggaatgatgagtcagtaactgtggagcagggcggagtggggcatggagtttattctagctgtctgtctgttcatttgtttgtttagcttttatttatttgtttttaatttttaattaattaattttgagacagagtctcactctgtcgcccaggctggagtgtagyggtgcgatcgcagctcactgcaatctccgccttccaggctcaagggatcctcccgccttagcctcctgaatagctgggaccacaggcgcacatcaccatgcccagctaatttttggatttttagtagagatggggtt

SEQ ID NO: 203237 - DNA, 399 bp, Homo sapiens
tctggcaagactgtgcccacagtactaaatttcaaccatcagctaaagctaagacattgcctctgttaaacaaagcaggaactcctcagtttgtccaagctccataacacctaagttcactcattgtcactacctgcatggctacgcgtacctgagttttcaaaccctagcaggactatttcttctatgtgcctcaactaaccataactgagagttatatggaaaaagtttctcctagatttaatatgcctggttttgggtaaacccaaaacaatctgtttattaatagtacactataataatgtatatgctctactgtggcatgcaaaatgtaaaatgaatgctgctgatgtaytacaaagtatatgaaaattataaccaacttagtgtacttccatg

SEQ ID NO: 203238 - DNA, 596 bp, Homo sapiens
gccaaggagctcagcactctctgcttgcatcgggtgttcttcaatgcttgtggggtgaatccacagtgaggtgaccatggtgggaccaggccacagccagagggagcctggccaagtctgggactgagtcttcattccttgctcacctctctgggtgacttcgggtaagttcagaggggccaggacccaaccacagggccagatacaccttcccgggaagtgttgcttcatccgagacttaaaggacaaggacacataaagcaaaaaaagaggcaggaaatggacattctaagaggaaagaacagtcggtatcaagtcctgcagggaggagtggagagcaagagttgtgacagtcacaagcaaccgaggggattcacacgagggtggagcagagtgagaagggggatgtgggagagaagggyggagtccctgggtccctgagccagaggaggaagctccatcatctctgttgggaaggtctttaaagcggacgtaacatgagcaggtgtgcatctagaaatgacattgctctggtttctagaaagagaagatatttagggaagccattgatggcctccagtgagaacaggcagaaa

SEQ ID NO: 203239 - DNA, 422 bp, Homo sapiens
aatatcagcaaagtgtgaaagcaaaataaaracattttcagacatgtagcatctcaaaaaataagaacaactcccatgcaccttttcttagaaagctactggaggatatactacatcaaacaaaggagtagatcaagaaagaggaagacttaggctccaggaaacaaggaatataacacataggaggcaaaaagatgtcccagaattgcaactgggaagtaaggctgaagaccaactagtccagactaaaacagtagactgtaaaagggccagaatcagaaggaaaaacattaaagacagacaataattatctaattattgaccatgtggaaaataatattgagaagaattttataatatcaaaggaatatctggaaaacatcactgactgatgcctagaaaagtcagcaatgcattgttgg

SEQ ID NO: 203240 - DNA, 404 bp, Homo sapiens
acccacaggctctctattcactttatcaaagatcaagggtaggagtaggtttccttttcccccaccartggccaacccgcccatccagcctccggccacattgggatcccccagaagccaccaggccctgctccctgcagccgcaaagcacagacaatggcagccttccctcttgtgccccctgctcaccccggagccaggctcctctgacttcccctccaaatccaaccctcttattcctcagatcgtgcgtacgtagggccacgaaagtgcacgttaactcaaggccaggcatctttggaaggaaatcaatacataattatgtgttctgtctgccacatggcccagagccaggctgattgggaattagagaaagtgaaaacagagtggtcaaggccagccca

SEQ ID NO: 203241 - DNA, 404 bp, Homo sapiens
acccacaggctctctattcactttatcaaagatcaagggtaggagtaggtttccttttcccccaccaatggccaacccgcccatccagcctcyggccacattgggatcccccagaagccaccaggccctgctccctgcagccgcaaagcacagacaatggcagccttccctcttgtgccccctgctcaccccggagccaggctcctctgacttcccctccaaatccaaccctcttattcctcagatcgtgcgtacgtagggccacgaaagtgcacgttaactcaaggccaggcatctttggaaggaaatcaatacataattatgtgttctgtctgccacatggcccagagccaggctgattgggaattagagaaagtgaaaacagagtggtcaaggccagccca

SEQ ID NO: 203242 - DNA, 404 bp, Homo sapiens
acccacaggctctctattcactttatcaaagatcaagggtaggagtaggtttccttttcccccaccaatggccaacccgcccatccagcctccggccacattgggatcccccagaagccaccaggccctgctccctgcagccgcaaagcacagacaatggcagccttccctcttgtgccccctgctcacccyggagccaggctcctctgacttcccctccaaatccaaccctcttattcctcagatcgtgcgtacgtagggccacgaaagtgcacgttaactcaaggccaggcatctttggaaggaaatcaatacataattatgtgttctgtctgccacatggcccagagccaggctgattgggaattagagaaagtgaaaacagagtggtcaaggccagccca

SEQ ID NO: 203243 - DNA, 404 bp, Homo sapiens
acccacaggctctctattcactttatcaaagatcaagggtaggagtaggtttccttttcccccaccaatggccaacccgcccatccagcctccggccacattgggatcccccagaagccaccaggccctgctccctgcagccgcaaagcacagacaatggcagccttccctcttgtgccccctgctcaccccggagccaggctcctctgacttcccctccaaatccaaccctcttattcctcagatcgtgcgtaygtagggccacgaaagtgcacgttaactcaaggccaggcatctttggaaggaaatcaatacataattatgtgttctgtctgccacatggcccagagccaggctgattgggaattagagaaagtgaaaacagagtggtcaaggccagccca

SEQ ID NO: 203244 - DNA, 454 bp, Homo sapiens
ttaggaaattaaataaaacacttttaaataactcatagatcaatgaagaaatcacagggaaattggraagtgtttcaaactgaatgacaataaaagcaacacatatcaaaatttgcaggatatggttgaagtggagattagaagggaagttggatctttaaatgcctagattaataaagaaaaaaaggcacaaaatcaaagatctaagcatccaccttcagacacaaaaaaagaagagcaaatgaaactcagtgtaaacaggaaatggaaaacaataagaagacagaaaatcgatgatatagaaatgagatagacaattaatcttttctttgaaaagattaataaaactgacagaccctttgaagaagactagccaagaaaaaaaggagatcatctatgaaccagaaaatgggccctcaccagacactcaatctgatggcacattgatcctgga

SEQ ID NO: 203245 - DNA, 441 bp, Homo sapiens
attaggaaattaaataaaacacttttaaataactcatagatcaatgaagaaatcacagggaaattggaaagtgtttcaaactgaatgacaataaaagcaacacatatcaaaatttgyaggatatggttgaagtggagattagaagggaagttggatctttaaatgcctagattaataaagaaaaaaaggcacaaaatcaaagatctaagcatccaccttcagacacaaaaaaagaagagcaaatgaaactcagtgtaaacaggaaatggaaaacaataagaagacagaaaatcgatgatatagaaatgagatagacaattaatcttttctttgaaaagattaataaaactgacagaccctttgaagaagactagccaagaaaaaaaggagatcatctatgaaccagaaaatgggccctcaccagacactcaatctgatggc

SEQ ID NO: 203246 - DNA, 657 bp, Homo sapiens
atagtataataatcaaatcaggatatttggcatatccattactcatatattaatcatttttgtggtgagaacattaaaaggcctctcttctagtaattttgtaatatacaataatatctctctgtcaaccatcrttattctacttaacaatagaatgccagaactgactcagcattcataattttaacttggtatccattgatgaacctcttctcattctctcttccccactcccttccacagtttctggtaaccacggttctacttgtttctattatatcaacttttttgtttttaagattctgcatatgaatgagatcacgtgttatttatctttctgtgtttggtttatttcacttaatttgaggtcctccaggttcatccatgttggcacaaaagacaatattttactctttttatggctgaataatattccattgtgtatctgcaccacattttatttaggcattaatctgtcattggacacctaggttgatttgatgtcttggctattatgaatagtgctgcaataaacatgggagtgcacatatctccttgacattctgatttcacgtcctctggatatgtacccagcactgggattgctggatcatatggtagttctatttttaattttttgaggagactccaaactgt

SEQ ID NO: 203247 - DNA, 555 bp, Homo sapiens
aaactgtctctgttttcactttagaagactggtagccacgaagtcaggaagtgtagctcttaaaaggtctctgaaggcaataggtgttgaataagctgttaaacaagagaattgggagtcctttgtcatccttctgagagaaacattgattgatgtgagcagggctcagtattggttttagataaacaagacaaaggcaaagattgagagtaactgttgrgactaaggtttagaaaaggtgatttcagaaaaaaatattgccaacaaaataacaaggaactttgttatttttctcttgcctttccttatggtcaggttcacatcgaacaatctgtacacccagctacctcctttacaggggagatctaatcttgcatatatatgctgttcgttcacctttccccttagtatggaaggaagaaggcatagcctcatctcttatagggtaataggtttagtgggacttagagaaaatgcaacaagctgcatgaactttaaaaagtaaacttattatccctgggtataaagctagtagctctgccaaagaaagacaag

SEQ ID NO: 203248 - DNA, 555 bp, Homo sapiens
aaactgtctctgttttcactttagaagactggtagccacgaagtcaggaagtgtagctcttaaaaggtctctgaaggcaataggtgttgaataagctgttaaacaagagaattgggagtcctttgtcatccttctgagagaaacattgattgatgtgagcagggctcagtattggttttagataaacaagacaaaggcaaagattgagagtaactgttgagactaaggtttagaaaaggtgrtttcagaaaaaaatattgccaacaaaataacaaggaactttgttatttttctcttgcctttccttatggtcaggttcacatcgaacaatctgtacacccagctacctcctttacaggggagatctaatcttgcatatatatgctgttcgttcacctttccccttagtatggaaggaagaaggcatagcctcatctcttatagggtaataggtttagtgggacttagagaaaatgcaacaagctgcatgaactttaaaaagtaaacttattatccctgggtataaagctagtagctctgccaaagaaagacaag

SEQ ID NO: 203249 - DNA, 555 bp, Homo sapiens
aaactgtctctgttttcactttagaagactggtagccacgaagtcaggaagtgtagctcttaaaaggtctctgaaggcaataggtgttgaataagctgttaaacaagagaattgggagtcctttgtcatccttctgagagaaacattgattgatgtgagcagggctcagtattggttttagataaacaagacaaaggcaaagattgagagtaactgttgagactaaggtttagaaaaggtgatttcagaaaaaaatattgccaacaaaataacaaggaactttgttatttytctcttgcctttccttatggtcaggttcacatcgaacaatctgtacacccagctacctcctttacaggggagatctaatcttgcatatatatgctgttcgttcacctttccccttagtatggaaggaagaaggcatagcctcatctcttatagggtaataggtttagtgggacttagagaaaatgcaacaagctgcatgaactttaaaaagtaaacttattatccctgggtataaagctagtagctctgccaaagaaagacaag

SEQ ID NO: 203250 - DNA, 548 bp, Homo sapiens
tctagctctatttttcatctaaactgtctctgttttcactttagaagactggtagccacgaagtcaggaagtgtagctcttaaaaggtctctgaaggcaataggtgttgaataagctgttaaacaagagaattgggagtcctttgtcatccttctgagagaaacattgattgatgtgagcagggctcagtattggttttagataaacaagacaaaggcaaagattgagagtaactgttgagactaaggtttagaaaaggtgatttcagaaaaaaatattgccaacaaaataacaaggaactttgttatttttctcttgcctttccttatggtcaggttcacatcgaacaatctgwacacccagctacctcctttacaggggagatctaatcttgcatatatatgctgttcgttcacctttccccttagtatggaaggaagaaggcatagcctcatctcttatagggtaataggtttagtgggacttagagaaaatgcaacaagctgcatgaactttaaaaagtaaacttattatccctgggtataaag

SEQ ID NO: 203251 - DNA, 555 bp, Homo sapiens
aaactgtctctgttttcactttagaagactggtagccacgaagtcaggaagtgtagctcttaaaaggtctctgaaggcaataggtgttgaataagctgttaaacaagagaattgggagtcctttgtcatccttctgagagaaacattgattgatgtgagcagggctcagtattggttttagataaacaagacaaaggcaaagattgagagtaactgttgagactaaggtttagaaaaggtgatttcagaaaaaaatattgccaacaaaataacaaggaactttgttatttttctcttgcctttccttatggtcaggttcacatcgaacaatctgtacacccagctacctcctttacaggggagrtctaatcttgcatatatatgctgttcgttcacctttccccttagtatggaaggaagaaggcatagcctcatctcttatagggtaataggtttagtgggacttagagaaaatgcaacaagctgcatgaactttaaaaagtaaacttattatccctgggtataaagctagtagctctgccaaagaaagacaag

SEQ ID NO: 203252 - DNA, 558 bp, Homo sapiens
attaatatctatttctctggtggtatgctgaatgacacactgatgttacaagattcctgttttattttttatctcctttctgattagagaactccctttagctattcttttagagtaggtctgctggcaacaaaatctctgttttcttacatctgagaatgtcttcagttccctttcattaccgaaggtgtcttttctaggaataagattatgagttgacagctatttttttgaagcccctaaaaaatattatgccattttctactggtgtctatggcttctgatgaaaaatttagtagtatctggactgtttttccagtatatataagggtttgtttccctattcttttatttgagttttcttccttgtctttagttttcagaagtttaattttaatagaggtttttatggatttatttgaatttatcttgttagggattcattcagcttctcttttcctaatagctttgttgagatataattcacacagcataatattcatcctttaaaagtgktttttggaatattcacagatttgtgcaattataccactacct

SEQ ID NO: 203253 - DNA, 506 bp, Homo sapiens
caccagttttacatgtactcctgtgtaggtgcctgtgtgtttgtgtgtgtgttttatattcagttctgtgtgattttatcatgggagtatttctgtataacaccactacagtcaagattaggacaggttccaacatttcccggatccttcatgctgccgttttgtaactgcaaccccagtccctaacctctgagaacaactaatctgtgttccatttgtatacttttatcattttgagaatattatgtaaagtaagttatacagtatgcaaccctttggaattgacatttttcacttaccrtaagtgtcttgggattcatccaagttgcttcatgcatcagttatgtgttcttttttattgctaagttgtattccatagtctggatgagctatagtttttaaccatttacctatgttttcagttaggggttattatacagcagttgtgaacactcatattttttatatgaagctacgtattcattacctaggataaatacccaaga

SEQ ID NO: 203254 - DNA, 565 bp, Homo sapiens
aactataaacaagctggaatggctatgctgatattggacaaaaatgaacttgatatgaagaagaagacagaaaatatcattagagataaagaataaaagttttaggtatcagaaatatataaaaattataaattaacaactgaattcccaaatatgtaatgtaaaactctcaaaattgacgagaagatagggaactcagaaataatggttatagacttcaatactccactattaaccacggaaggaataaccaaaaaggagactaacgtggcaataaagaagttgaacaacactagaaatgcatagaaataacatacacctctaagacattgcattccacaatagcagagtacatagctagtgtaggtgaaacgttcactatcaccaggacctgggtcataagattagcctaaaaaaaatgmaaggattaaattcatattaagcatgtttttaaccacaatggaataatattagaaatcaattacaaaggaagtttgagaaatttacagatatgtggaaattcaagcccttaaaataccagtgggttcaaagaagagaaagcaga

SEQ ID NO: 203255 - DNA, 228 bp, Homo sapiens
ccagcacttcccatcacttgaacagggcacataggcatccttgcaggcaggctgaggctttgggggagccaggagcactgccccagcctcayctgtcccgtcagctccccctgctccatgactctgatgccatgttggacatggagccaagcagagtgccacactccccagggggtttctgcctcctccggcttctcttgggaaagcagccctgagcctgagggttgt

SEQ ID NO: 203256 - DNA, 514 bp, Homo sapiens
tttgtcccgtcacaagttactaagagtactcatgtatgtctattgacaaatatactgagtgtttgtttttaaccaaaccttcagagaaactttaaaaaatagtagaagagttagagggtaccaaaaagttggctgactgatttctattagcttattaccatcctactttcaaaaaatctctattataagtggagttaaccctaaaacaacagcagaaacagcagcatgggcaacaggatacaactactgaaaggaagaaacacatgtcaggctctcagacacagcatatcctaatcatcgcactacacaagttcaggaccaaatccaacctaagaaaagtagagaacaaaatctgtattctcctttcacattgcatcttctcttcttttcccttcctgtttaagctcttttgttttaatctccttttcaatttcttctcctgyctcctccttttttttttttttttcccactctccctggattttacttttctttctatggtctttacacatag

SEQ ID NO: 203257 - DNA, 399 bp, Homo sapiens
acagccaaaccatatcagtcacctctacttyagatattctggtttttgccctggacaccatccttgggctcttccttagtttcactctgtcacctataaatcatactccccaactgtttacccagcctagcacttggaactgtaaatcctgtatgtttagatagggcatgaaggctgtctgaagctgcaaatcttttgtcatgatacaaatatgctatgaccactaagtggtcaacatagtgagctttgagttgatttaattgccagtaaatacatggaccagtaaacaaatttactaagtagttgactgagagagaaaagttgggggagtttactgctagaaacaaatatttggatgggttatgctaattaaaaatggaaagtttgcactctggatag

SEQ ID NO: 203258 - DNA, 419 bp, Homo sapiens
gaattcaaaatgagatctggttggggacacagccaaaccatatcagtcacctctacttcagatattctggtttttgccctggacaccatccttgggctcttccttagtttcactctgtcacctataaatcatactccccaactgtttacccagcctagcacttggaactgtaaatcctgtatgtttagatagggcatgaaggctgtctgaagctgcaaatcttttgtsatgatacaaatatgctatgaccactaagtggtcaacatagtgagctttgagttgatttaattgccagtaaatacatggaccagtaaacaaatttactaagtagttgactgagagagaaaagttgggggagtttactgctagaaacaaatatttggatgggttatgctaattaaaaatggaaagtttgcact

SEQ ID NO: 203259 - DNA, 413 bp, Homo sapiens
acagccaaaccatatcagtcacctctacttcagatattctggtttttgccctggacaccatccttgggctcttccttagtttcactctgtcacctataaatcatactccccaactgtttacccagcctagcacttggaactgtaaatcctgtatgtttagatagggcatgaaggctgtctgaagctgcaaatcttttgtcatgatacaaatatgctatgaccactaagtggtcaacatagtgagctttgagttgatttaattgccagtaaatacatggaccagtaaacaaattwactaagtagttgactgagagagaaaagttgggggagtttactgctagaaacaaatatttggatgggttatgctaattaaaaatggaaagtttgcactctggatagggataaatgaattc

SEQ ID NO: 203260 - DNA, 201 bp, Homo sapiens
aaactggggcttgaaaatgtgaaacattcagcaggaacttctctgatacagacctaaaatcaacaaaagcagtcacagccatcatgcccaagatcaatccaactccacaaaagtcartacacaaaaaacctaagtccagaaactgtcccaggaaaataaaagctaccatatgagaaatttcccaaatgtaggttagggttt

SEQ ID NO: 203261 - DNA, 536 bp, Homo sapiens
ggagtaaaacaatctcaatacttttcagtactttctccactatagtgccttgcttctagaacagcaaagtggaaaacatcaggttcatacaccacctccatgcccccataccccatacacattgggtttgcttccacacagcctatattttaaactgagtctctctcaagaccagttactcttagtagagagccggaggacttggaccttaggtcttagagggtactgtagctactacattttgaaagaaaaacccaaagcctcccaggtttctaaacctctggagaaagctatcagccattattatgacttcaattaggtgcacacaacagggaaatcaaatacctttgggatactggcatggttcaaagtcagacctcaaagcctgctgtatttgaatgttggggcactctgcagccaatatcaacagcaggtggagagcctgtagtgggggccaaatcagaaatttttcatttttatcattatagcacttytataccttttacatatacaattttaaaggcctgacattgaaa

SEQ ID NO: 203262 - DNA, 447 bp, Homo sapiens
ttgcccatcagaggagctgattctcggcctccacgcccttttcttttggtcctcttctgtggaagggccccaaagctctctctccttccactagacctccgaggctttttgttcccgtgggtgctcctcttattgagagggcccacggggagctctccctgccagtcaccagcactctggaaacagtcatcctcgggggccaggctcacggacagctcttgcagcttcccctcctggttccccatcgtgatccccaggatgtggtctgagctcaggagattggttagcagtctctccctctctgttgtgagtttgtacagctcagttagaatgtctttcgtkggagtctgcttgaaaaatatgtcgcctggatgttcgtccggctcctggctgaggctgatgatgtctgactcctccctgacttggtagcagttatgaaaaccttta

SEQ ID NO: 203263 - DNA, 447 bp, Homo sapiens
ttgcccatcagaggagctgattctcggcctccacgcccttttcttttggtcctcttctgtggaagggccccaaagctctctctccttccactagacctccgaggctttttgttcccgtgggtgctcctcttattgagagggcccacggggagctctccctgccagtcaccagcactctggaaacagtcatcctcgggggccaggctcacggacagctcttgcagcttcccctcctggttccccatcgtgatccccaggatgtggtctgagctcaggagattggttagcagtctctccctctctgttgtgagtttgtacagctcagttagaatgtctttcgtgggagtctgcttgaaaaatatgtcgcctggatgttcgtccggctcctggctgaggctgatgatgtctgmctcctccctgacttggtagcagttatgaaaaccttta

SEQ ID NO: 203264 - DNA, 298 bp, Homo sapiens
gcccttgtatgaaaatcctctgacttccccctttggaagacagaagctgatgtagcagagttccgtaatgggcttatgcaattggagggtacaatgagtgccttccattatgcctacctaattattcatgccttggagatgcyggtttgtggtcaggcttcccaggctccagtggtgaggcatgtgatggtggctatgcagagaaagcagctgacagtcatctccagcaatgagactgcctgttagaggaacaggggaagaaagcagcttgtctaacagagtgcataaatcacacacc

SEQ ID NO: 203265 - DNA, 609 bp, Homo sapiens
aatggacaaatgcgatcacatcaagttaaaaagcttctgcacagcaaatgatacaaccaacaaagtgaagagataacccacaggatgggagaaaacatttgcaaactacccatccgacaagggattaataaccagaatatataaggagctcgactctayaggaaaacaaatctaataattctatcaaaagatgggcaaagatttgaatagacatttctcaaaagaagacatatacactttgggaggccagggtgggtaaattacttgagatcagtagttcaaaaccagcctggccaacatggtgaaaccctgtctccactaaaaacctaaaaattagccgggtgtggtggcgctcacctgtaatcccggctacttgggaggctgaggcaggagaatcgcttgaacccgggaggcagaggttgcagtgagccgagatcgcaacactgtactccaggcctgggtgacagagcaaaactccatcttaaaaaaaatatatatatatatatacgaatggcaaacaggggtatgaaaaagtgctcaacatcactgatcatcagagaaatgcaaatcaaaactacaatgaatatcatctcacactagttaaaatgg

SEQ ID NO: 203266 - DNA, 421 bp, Homo sapiens
cagggtgattacagtcaacaataatttgttgtacatttaaaaataactaaaacagtatagctggaatgtttgtaatgcaaagaaatgataaatgtttgaggtgatggataccccatttaccctgatgtgattattatgcactatatgcctgtatcagaatatttcatgtaccccataagtatatatacctactatgtacccataaaaattaaaaattaaatcagggggaaagggcttatttcctaagcatactcatacatctcctgtagatgatgatgttagccagatagtgatgtaaaaccagtgatgtgttgaggatctcaatatctaattttcatggaaatcatgtggaaagctaatactcatttttctttakgtaattaagctttgaaaaggtaagggagaggcaaagaaagaattc

SEQ ID NO: 203267 - DNA, 643 bp, Homo sapiens
gcctccagctgcatgactcctaaaccataatttctaatcttttggctaatttgttagtcctacaaaggcagtttagtccccaggcaagaagggggtttgttttgggaaagggctattgtcactttgttttaaactatcaactaagttcctcccaaagtgaattyggcttatgtccaaaaatgaacaaggagagcttggtggttagaagcaagatggagttggttaagtcagatctgttacactgtctcagatatttattttgcaatggtggtttcaggagtttgatatctgagttcatttttacattttaaatgcatgtttataaaatcatttgtgtatgtaaacatttattttaaagtgtttgtgtttctttgtttgatcactctgatatttttattattcaaaggcatttggggaatacaaccccaatttttaacattgtatgtataggacataaggctctaaattatctgtgcattttagagtttacatagcaccaagctttttaacagatatgatctcatttaaacctcaggacaggtctggaggaaggtattttttccaggtaaagaggaaaccaggcctagtaatttgcctacagtcacccagctggttaaaggctgagcatgaatatttaaatata

SEQ ID NO: 203268 - DNA, 556 bp, Homo sapiens
tgatgctggtgtttatattttattccactagaactcagaagactaatggaaggacaagctataatttgtattttaagcagcaacttcagtggaaacctcactgtctctggctcttctaacctctccaggagagaaaaaaatggttaatatgctctgttgaatatttatagtcatcctttcccccctgacataattaaaatttatctgtctctccattcaacaagtatttacggacagcctactgtatatgagcccttatgttaagtgctggggcctgctctcctgggaggtggaggtgacacaaggccatcaagaaatcctgtaattcctatagtgccgtggaggagaggagggaaaggagtgaagagtgatgggagtaggaggccctgctgtcactaagtggcaaggaagacctcttgctggagatccaataatgcagtggcccaggcagagggacagcaagtggaaaggactggaagctggcttgcttcttgagaaacagcaagggggtcaagsggttggaggatagacagtgaatgaatctttctgcagtaga

SEQ ID NO: 203269 - DNA, 303 bp, Homo sapiens
ctgtattcacatggaagttgcagctgaatcagtctgaagataactggagcatctgcatctcagcccagtgaaggcttagcaatgtgatgaaataatgtaaattatttggaaaataatagagcggtgggtgtaagaagaggtagcagttcaccttcaggagaaaragctttttagccctctggccctgggctgggagggccatgcatagattctgaaggcagagaaatgattcatgagcttgacattccaaccacttgttttcacatgggttagaaataagaagcactgctttgggaacataga

SEQ ID NO: 203270 - DNA, 472 bp, Homo sapiens
gaccaacatccttctgcccggtggcttgctctcagctcctcttcgttgggccttgggcagccagactgtctagttttaatccttgctctgccacctgtgaccttggacaagttacctaccttcagttacctcatctacaaaatgcagatattaataataccctcttttyaatttattcagaggattaaaagagttaataaaaagtaaaaaataaaaagacttggtaagcataggcacagaggaaaaaaaagtaaaaataaataattaaataaaaagaccagtgcctagcacataaaagttcatcaggaattaattctataatatgaactcaattttgcaaaacttcaaagtacatataacttttaacttactagggtatacataccagtaataaatttacaacggtagacatgtttgcctactgtaaatataacaaagactaaacaagcagatactaaatcattaagcaatt

SEQ ID NO: 203271 - DNA, 472 bp, Homo sapiens
gaccaacatccttctgcccggtggcttgctctcagctcctcttcgttgggccttgggcagccagactgtctagttttaatccttgctctgccacctgtgaccttggacaagttacctaccttcagttacctcatctacaaaatgcagatattaataataccctcttttcaatttatycagaggattaaaagagttaataaaaagtaaaaaataaaaagacttggtaagcataggcacagaggaaaaaaaagtaaaaataaataattaaataaaaagaccagtgcctagcacataaaagttcatcaggaattaattctataatatgaactcaattttgcaaaacttcaaagtacatataacttttaacttactagggtatacataccagtaataaatttacaacggtagacatgtttgcctactgtaaatataacaaagactaaacaagcagatactaaatcattaagcaatt

SEQ ID NO: 203272 - DNA, 608 bp, Homo sapiens
attcatactgatctttgtctccaaggggttcctgctgaatattgagacagttgaagattactaggggaaaaaattcttaataatcgaagtaaggatcatctaaggataatatgccacatatacagacacagtcacattttcagctttacaaaagttcagttatcaaagttgtacagcaaacactatcctaagcttagcgtcttcaggcatttgatttataatcactgtaaagaaaaatcagtcacaaaatgccactkttgtatgattctatttatatgaaatgcccaggataggcaaatctacagagatagaagttagatcagaggttgccaggatcaatggtgggggagagaggtacagggagtgactgctagtgggtacggggttctttttggggagatgaaaatgttctgaaattagggagtggtaatggctgcataactctgaatatactaaaaaccactgaactgtacacttgaagggtgaggcttatcatacaaaaactgtatcacaataaagctcttagtttaaaaaatgtttgtctatgtcaagaaacaaagaaatagggtcatagctagaagatatgggatataaaatactggaacaaa

SEQ ID NO: 203273 - DNA, 608 bp, Homo sapiens
attcatactgatctttgtctccaaggggttcctgctgaatattgagacagttgaagattactaggggaaaaaattcttaataatcgaagtaaggatcatctaaggataatatgccacatatacagacacagtcacattttcagctttacaaaagttcagttatcaaagttgtacagcaaacactatcctaagcttagcgtcttcaggcatttgatttataatcactgtaaagaaaaatcagtcacaaaatgccacttttgtatgattctatttatatgaaatgcccaggataggcaaatctacagagatagaagttagatcagaggttgccaggatcaatggtgggggagagagstacagggagtgactgctagtgggtacggggttctttttggggagatgaaaatgttctgaaattagggagtggtaatggctgcataactctgaatatactaaaaaccactgaactgtacacttgaagggtgaggcttatcatacaaaaactgtatcacaataaagctcttagtttaaaaaatgtttgtctatgtcaagaaacaaagaaatagggtcatagctagaagatatgggatataaaatactggaacaaa

SEQ ID NO: 203274 - DNA, 518 bp, Homo sapiens
gaattcttcttttttgacaatgctctaaaaaagataaaaattatccttaactagtgaaccacacaaaagtaggccacaagccagcactrgcccaccatccatagttcaccagctgtgtagttcaccattgacttgcattgtgaatttagaacatgaaaagtcaacaagaaacataggtagggacaataaaaggtgagaggtcagatcaaaagcactctccacactcaaactggtatacttccaaatagatgattctcagtggatgaatttttaaaacagaaaacggccctacagaagaaaacatgcctgtctggaccttggctctaaagaaaaaagaaaaaaaaaaagaagtattatctgagattcctgatcaaaagcctgaatttgggactagaaaccacactatttgtgtgacacaaagtcctaagataaattactactataattaaaagattataaaagaaaggaaaaagcctcttaagtttgaggaggtgccaggtatataatgcctttttatg

SEQ ID NO: 203275 - DNA, 539 bp, Homo sapiens
agtcaatatagactgaggtacagtgtctccagacacatcttcaattgctgctggaagattaagggaagctagcactctgaaaaaatgagatactatgttatattgaagtctaaaacaatttaactcatcaatatttactttatttaatttaatcttctataaccaaatcaacagcaatggagttagcacccagaaaaactggataagccctatcaatgaaaaacaaagcaaagattaacagaaaaacaaaaaaatcagtgattgatacaattaaaccaaaatcattaaaaaattaagttcacaattcagaattaaaagccaaaaaataggctggtgcagtggctcacacctgtaatcccagcacttgggaggccaaggcaggcggatcacctgaggtcaggaattcaagrccagcctggccaacacggtgaaaccccatctctactaaaaatacaaaaattagtcaggcgtagtggtgagcacctataatcccagctacttgggaggctgaggcacaagaatcacctgaagccaggaga

SEQ ID NO: 203276 - DNA, 539 bp, Homo sapiens
agtcaatatagactgaggtacagtgtctccagacacatcttcaattgctgctggaagattaagggaagctagcactctgaaaaaatgagatactatgttatattgaagtctaaaacaatttaactcatcaatatttactttatttaatttaatcttctataaccaaatcaacagcaatggagttagcacccagaaaaactggataagccctatcaatgaaaaacaaagcaaagattaacagaaaaacaaaaaaatcagtgattgatacaattaaaccaaaatcattaaaaaattaagttcacaattcagaattaaaagccaaaaaataggctggtgcagtggctcacacctgtaatcccagcacttgggaggccaaggcaggcggatcacctgaggtcaggaattcaaggccagcctggccaacacggtgaaaccccatctctactaaaaatacaaaaattagtcaggcgtagtrgtgagcacctataatcccagctacttgggaggctgaggcacaagaatcacctgaagccaggaga

SEQ ID NO: 203277 - DNA, 439 bp, Homo sapiens
ctacgggtatttagaaaccctggacaagggagaggcagtagatttcaaccaacatattctgaggaagcagcttaaaatgtgacagcatatcttgtgtttaggtcaattggtctaaggtaactcaaatgtataaatcataaagctttagagatgttcttggagagaaatgtgtaataacataggtgtcaggaaaactactatggaccactctgtataaaaggtgctgggagagtaatttactttggcccgyaaggctcaggttaacagagggaggaacagcaaacaaatcctgagaaccatataggagtgaatgacagacagggataccagcatctattatcaaaggacccagaggaaacggggaagaatagagtggagctgagtaagtcagtgttcagtaggttttaaaagaaggtaactatcaaaggagaggaatatt

SEQ ID NO: 203278 - DNA, 439 bp, Homo sapiens
ctacgggtatttagaaaccctggacaagggagaggcagtagatttcaaccaacatattctgaggaagcagcttaaaatgtgacagcatatcttgtgtttaggtcaattggtctaaggtaactcaaatgtataaatcataaagctttagagatgttcttggagagaaatgtgtaataacataggtgtcaggaaaactactatggaccactctgtataaaaggtgctgggagagtaatttactttggcccgcaaggctcaggttaacagagggaggaacagcaaacaaatcctgagaascatataggagtgaatgacagacagggataccagcatctattatcaaaggacccagaggaaacggggaagaatagagtggagctgagtaagtcagtgttcagtaggttttaaaagaaggtaactatcaaaggagaggaatatt

SEQ ID NO: 203279 - DNA, 436 bp, Homo sapiens
cgaattcctttctgtcattatctccatgccaaaccatctttattatttatctrtttatatgtaacatatcacccccaaacttagcattttaaaacacacattatttcaatttttgttggtgggaatccacatgtggattagctgtggcctctgactctcactcttttaaaagtctgcagtcatcttaaggctggacagggaatgatttatttgcagactcactcacatagttgttggctttagttttgtgccaggtgttgtgctgtaaactcccttggttccttgtcacgtgggtctctccacaaagcatcacacaacatggcaactctctttatcaaagcaagcaagcgagagggcaagagggaatgccagcaagagttgggggtggctagcaaggggcaagacatagttccttgttagctaaccaaggaagtaa

SEQ ID NO: 203280 - DNA, 435 bp, Homo sapiens
gaattcctttctgtcattatctccatgccaaaccatctttattatttatctatttatatgtaacatatcacccccaaacttakcattttaaaacacacattatttcaatttttgttggtgggaatccacatgtggattagctgtggcctctgactctcactcttttaaaagtctgcagtcatcttaaggctggacagggaatgatttatttgcagactcactcacatagttgttggctttagttttgtgccaggtgttgtgctgtaaactcccttggttccttgtcacgtgggtctctccacaaagcatcacacaacatggcaactctctttatcaaagcaagcaagcgagagggcaagagggaatgccagcaagagttgggggtggctagcaaggggcaagacatagttccttgttagctaaccaaggaagtaa

SEQ ID NO: 203281 - DNA, 428 bp, Homo sapiens
accatctttattatttatctatttatatgtaacatatcacccccaaacttagcattttaaaayacacattatttcaatttttgttggtgggaatccacatgtggattagctgtggcctctgactctcactcttttaaaagtctgcagtcatcttaaggctggacagggaatgatttatttgcagactcactcacatagttgttggctttagttttgtgccaggtgttgtgctgtaaactcccttggttccttgtcacgtgggtctctccacaaagcatcacacaacatggcaactctctttatcaaagcaagcaagcgagagggcaagagggaatgccagcaagagttgggggtggctagcaaggggcaagacatagttccttgttagctaaccaaggaagtaacaccgcattacttttgttgaattc

SEQ ID NO: 203282 - DNA, 435 bp, Homo sapiens
gaattcctttctgtcattatctccatgccaaaccatctttattatttatctatttatatgtaacatatcacccccaaacttagcattttaaaacacacattatttcaatttttgttggtgggaatccacatgtggattagctgtggcctctgactctcactcttttaaaagtctgcagtcatcttaaggctggacagggaatgatttatttgcagactcactcacatagttgttggctttasttttgtgccaggtgttgtgctgtaaactcccttggttccttgtcacgtgggtctctccacaaagcatcacacaacatggcaactctctttatcaaagcaagcaagcgagagggcaagagggaatgccagcaagagttgggggtggctagcaaggggcaagacatagttccttgttagctaaccaaggaagtaa

SEQ ID NO: 203283 - DNA, 435 bp, Homo sapiens
gaattcctttctgtcattatctccatgccaaaccatctttattatttatctatttatatgtaacatatcacccccaaacttagcattttaaaacacacattatttcaatttttgttggtgggaatccacatgtggattagctgtggcctctgactctcactcttttaaaagtctgcagtcatcttaaggctggacagggaatgatttatttgcagactcactcacatagttgttggctttagttttgtgccaggtgttgtgctgtaaactccmttggttccttgtcacgtgggtctctccacaaagcatcacacaacatggcaactctctttatcaaagcaagcaagcgagagggcaagagggaatgccagcaagagttgggggtggctagcaaggggcaagacatagttccttgttagctaaccaaggaagtaa

SEQ ID NO: 203284 - DNA, 428 bp, Homo sapiens
accatctttattatttatctatttatatgtaacatatcacccccaaacttagcattttaaaacacacattatttcaatttttgttggtgggaatccacatgtggattagctgtggcctctgactctcactcttttaaaagtctgcagtcatcttaaggctggacagggaatgatttatttgcagactcactcacatagttgttggctttagttttgtgccaggtgttgtgctgtaaactcccttggttccttgtcacgtgggtctctccacaaagcatcacacaacatggcaactctctttatcaaagcaagcaagcgagagggcaagaggraatgccagcaagagttgggggtggctagcaaggggcaagacatagttccttgttagctaaccaaggaagtaacaccgcattacttttgttgaattc

SEQ ID NO: 203285 - DNA, 421 bp, Homo sapiens
aattcctttctgtcattatctccatgccaaaccatctttattatttatctatttatatgtaacatatcacccccaaacttagcattttaaaacacacattatttcaatttttgttggtgggaatccacatgtggattagctgtggcctctgactctcactcttttaaaagtctgcagtcatcttaaggctggacagggaatgatttatttgcagactcactcacatagttgttggctttagttttgtgccaggtgttgtgctgtaaactcccttggttccttgtcacgtgggtctctccacaaagcatcacacaacatggcaactctctttatcaaagcaagcaagcgagagggcaagagggaatgccagyaagagttgggggtggctagcaaggggcaagacatagttccttgttagcta

SEQ ID NO: 203286 - DNA, 374 bp, Homo sapiens
gagatctgtgcagggagaagcatattatagaagcgagaaacaaagatacttatttaattgaaacatacattatattattttttactatttaaggaaaaatatgttttgtgacgagtttgtttagtgaccttgcagttgcacagttagggaattagtygggcatggtggctcacacaatcccagccactcgggaggctgtggcaggagaaccatccaaacccgggaggcagaggtcccacaagccgagacctcgccactgcactccagcctgggcaacaagagcaaatctcccccttaaaaaaaaaatgtgactgggtttcactattctgtccaggccggtctggaactcctaggcccaagcgatctggcgcttg

SEQ ID NO: 203287 - DNA, 381 bp, Homo sapiens
gaagggggagatctgtgcagggagaagcatattatagaagcgagaaacaaagatacttatttaattgaaacatacattatattattttttactatttaaggaaaaatatgttttgtgacgagtttgtttagtgaccttgcagttgcacagttagggaattagttgggcatggtggctcacacaatcccagccactcgggaggctgtggcaggagaaccatccaaacccgggaggcagaggtcccrcaagccgagacctcgccactgcactccagcctgggcaacaagagcaaatctcccccttaaaaaaaaaatgtgactgggtttcactattctgtccaggccggtctggaactcctaggcccaagcgatctggcgcttg

SEQ ID NO: 203288 - DNA, 429 bp, Homo sapiens
tgacaaattagctttagatcacattactctctggattaaaaaattgttcttgttcattacttgtatttgttctttgcttatagttttacaatgagttgactgaaatmctggtcaggttccagaacaaatgcagcgatatagttttggcatggaagacagaaagagatgaactcttaaagtaagtctgttttgtgtatcaaattgtacttaagaattttcttttaaaaaatcatgtggagacttttggtgtgaacttggtagtatgagagcagtttccctccttttctcatggaagaaggaactagatagagtattttacaaagcaacaagtaaacagctgcacagtctgggaatgaaaggatgaaaagaagcagaaactctagatgcaggaagtacagtgaggtcacagaaatgataaaacagttcagg

SEQ ID NO: 203289 - DNA, 457 bp, Homo sapiens
gggcaaaactgaatttctctcaaagaagaaaaaccagacagaacagttatttaactttctgtaaacagagcacttatttcatgatactcaagaacattttcttaaaacaagtgaaggttgttgaaagaggatatcacatggtaggggaaattgatcaagaactgtcagcatcaaggcatataaattattggccttaaaaggtaatggcagaatcctttaggcagtcaggcaaaacaatcaaaccagtatataaaaaggtgaaaaaaattaggctggcagctctgtatgccagaagagagtggagtgattgctgtaatctcaaggatagtaaatatgagctaaagattttatatcatatagtaaatacatgctaaagattttatatccaaactgtccttcgggtrcataaaaagccatatattcattagtaataaatataaagagctgaaagagtctt

SEQ ID NO: 203290 - DNA, 390 bp, Homo sapiens
acttttaacaaatgcattacccatgtaacccacctcctttgaagatatggaacattttatcatccasaaagttctcctgtgctttcatcctgtccggcactcccccagcagctgatgaacatgctgaggacattggtacaggattctggcctccccaaaagagctgctttgacaagcctgcttgccttacccagcactaagggttctctcaaaatttccatctttaaactgcttgtacctataaccctcccacatcaaatccatagataaaccagcccacagcctaatatttactgtatacccaagctttcagaaatacgactcccaggagtggggactggtggctgcatcccctcctcctcctggaagcctctaccagcctacagagcc

SEQ ID NO: 203291 - DNA, 414 bp, Homo sapiens
aatgcacagatctggtttacattttgatgacttttaacaaatgcattacccatgtaacccacctcctttgaagatatggaacattttatcatccacaaagttctcctgtgctttcatcctgtccggcactcccccagcagctgatgaacatgctgaggacattkgtacaggattctggcctccccaaaagagctgctttgacaagcctgcttgccttacccagcactaagggttctctcaaaatttccatctttaaactgcttgtacctataaccctcccacatcaaatccatagataaaccagcccacagcctaatatttactgtatacccaagctttcagaaatacgactcccaggagtggggactggtggctgcatcccctcctcctcctggaagcctctaccagcctaca

SEQ ID NO: 203292 - DNA, 557 bp, Homo sapiens
tcccctaggacctgtcagcaggctcaatctggaaaccactttttttcccaaggtagtacggtgcatctacaagagcactgctttgcaatccgatggaattgggcctaaaacctctctgtgctttcaaatacctctttttaggaggttttcaagtctttcccagataatctcattcatttattacctgtagtcttgtgattttggcaagtcaggaaatatcactattttttgttttatagacaggggagagagrcttcctattaatctcttagcatcaacctaaatcacagttctttaggaacatcattgagtcaggggttaatcacctagaaaatcttcctcacaaagccatcctggagtatgcaaatacccaggaataggctgaggaataattgcaggtagctggctccacaaatagtttttaaatgtgattggaaggcactctgtggttgtagccatgcaatataaatgctaagtaacaatgatggggtccatggaaatgatgagaactctttgcccccccatggcctctggactaaaacaaccaaaccctgaaa

SEQ ID NO: 203293 - DNA, 557 bp, Homo sapiens
tcccctaggacctgtcagcaggctcaatctggaaaccactttttttcccaaggtagtacggtgcatctacaagagcactgctttgcaatccgatggaattgggcctaaaacctctctgtgctttcaaatacctctttttaggaggttttcaagtctttcccagataatctcattcatttattacctgtagtcttgtgattttggcaagtcaggaaatatcactattttttgttttatagacaggggagagagacttcctattaatctcttagcatcaacctaaatcacagttctttaggaacatcattgagtcaggggttaatcacctagaaaatcttcctcacaaagccatcctggagtatgcaaatacccaggaataggctgaggaataattgcaggtagctggstccacaaatagtttttaaatgtgattggaaggcactctgtggttgtagccatgcaatataaatgctaagtaacaatgatggggtccatggaaatgatgagaactctttgcccccccatggcctctggactaaaacaaccaaaccctgaaa

SEQ ID NO: 203294 - DNA, 539 bp, Homo sapiens
tttggcaagtcaggaaatatcactattttttgttttatagacaggggagagagacttcctattaatctcttagcatcaacctaaatcacagttctttaggaacatcattgagtcaggggttaatcacctagaaaatcttcctcacaaagccatcctggagtatgcaaatacccaggaataggctgaggaataattgcaggtagctggctccacaaatagtttttaaatgtgattggaaggcactctgtggttgtagccatgcartataaatgctaagtaacaatgatggggtccatggaaatgatgagaactctttgcccccccatggcctctggactaaaacaaccaaaccctgaaaactacttctgcatgccatttatgtgtgggtggcccccacctctctgtgctcatgaaaaatgttatttccttgggggatgagagggtggatctagtgaaaggaaagaaggccacttgacttcatttcaggggtccccagacccatcttctttttcctttgcccaagggaaaggatgtgcctc

SEQ ID NO: 203295 - DNA, 637 bp, Homo sapiens
gtggtccgtggggccatatcaagtgatatagtgtagatgctctatgatcaaatgcaacgcttgaaaggtttatctgacctatccttcctggtgagcataattgttactgtattgtctggttatagacaccaaggggaaccactgcacctataagcgtatgtttgatttttatattcatatacccagcccagtgatattttaccttctgtctgctcatactgtcagttccccaawattacttattgacattactggtagtagaagttttcactgaagccatgcactgtgtaaccattattgggagatggttctcatctgatgtcttgtttttctgtacatcttgtgcgcagaggtactgattacttttgttctgaaatatcttttgagtgatttttatataggaaacacctttggaagatatagtttttctttgcactgcaaagggggaggctgatttactgtccagtataacgattatgtctccctctaggacaaaggtcaggcaggtttagaatggattacaatcggctaataattgcccgatagaaattgattcgagtttcccagttgtcagggctttcttctgtgactcaatccactgattgtgtgggtgtcacatagccctctttattcctgt

SEQ ID NO: 203296 - DNA, 385 bp, Homo sapiens
gtcatttgttcccttgtgtgtgaatttttagaacaggtatcagattctttctgtgtaggacactttttgtttgtttttggagtcaatgctctaaggtctcttccgtgtctttaaaacttgggttttgaatatgatttctatgaagaaaagcgagtcatcagaatcctgtctttgtggactgttgacatcatagctgagactgccacagttggtgctgcagactcaaagtcaagtgctcccatagacgccccactcgctgccatagtgaagacccccatttgcctccagaggtcaarcttccttgtccaagttggaaagtagacaagaaaatcctcagccacttcccccatttcttttctcacttgctcctcatcccttcatgttt

SEQ ID NO: 203297 - DNA, 431 bp, Homo sapiens
ggacaaaggataagccagctttgcctcaggtagagctctcaaccagagaccaccttggctctgcatctcatcaataattattgagacccagctttatgcaagcttccgtactaagtgctgaatactgatgtgcgatcttgaaatttcaacctgaaatacaaattactyacaagtgaaaggaaggatgatccatgttaaaaggagagaggggatcataggggagaacacctagagtgtcagttagtacttggagaatcctgttgtctcaaaggaagacatagtggttaagggcaggtctcttcaccacacagagcttggaaaagagaagagagcaattgcttgaatagaataggaatgccctttgttcacctggctggttcctaagtgtgtttcaaaactgcttgcaagtcactgttagacattgcccttct

SEQ ID NO: 203298 - DNA, 431 bp, Homo sapiens
tacagggaggcagttctggaagcaatgggacaaaggataagccagctttgcctcaggtagagctctcaaccagagaccaccttggctctgcatctcatcaataattattgagacccagctttatgcaagcttccgtactaagtgctgaatactgatgtgcgatcttgaaatttcaacctgaaatacaaattacttacaagtgaaaggaaggatgatccatgttaaaaggagagaggggatcataggggagaacacctagagtgtcarttagtacttggagaatcctgttgtctcaaaggaagacatagtggttaagggcaggtctcttcaccacacagagcttggaaaagagaagagagcaattgcttgaatagaataggaatgccctttgttcacctggctggttcctaagtgtgtttcaaaactgcttg

SEQ ID NO: 203299 - DNA, 486 bp, Homo sapiens
aagaagcaaggatcacaagaagcctacccagctgaacccagaatggaggagagagggtggagtataactggcgggcagccccacattccctggcayagaataattcaagtaggctgacaaggaaagccactccttaatgtcactcttctccacccaaattccttacttttaccctgttggccagaacccactttcacttccatacttacctgccctccttcctttcctgaaaccccttcttcaggccagttatggtctctattttccctaggctcatcacggaatgtctcaagaagatcagatagtgggcatgggctcagctttctggagcgctcttgcacgacttcctgaccttctctcaatagaaatctgagccatagagctctactgagtaaagcaggggccaggaaaagccaaggtcaaagaccatcgcaggtggcttccctctagcccaggaacagtgccctctcctaagctgcatggctg

SEQ ID NO: 203300 - DNA, 486 bp, Homo sapiens
aagaagcaaggatcacaagaagcctacccagctgaacccagaatggaggagagagggtggagtataactggcgggcagccccacattccctggcatagaataattcaagtaggctgacaaggaaagccactccttaatgtcactcttctcyacccaaattccttacttttaccctgttggccagaacccactttcacttccatacttacctgccctccttcctttcctgaaaccccttcttcaggccagttatggtctctattttccctaggctcatcacggaatgtctcaagaagatcagatagtgggcatgggctcagctttctggagcgctcttgcacgacttcctgaccttctctcaatagaaatctgagccatagagctctactgagtaaagcaggggccaggaaaagccaaggtcaaagaccatcgcaggtggcttccctctagcccaggaacagtgccctctcctaagctgcatggctg

SEQ ID NO: 203301 - DNA, 542 bp, Homo sapiens
ggaattcatattgtgctcacaccagtcatatgagctaagtagcagtatcatctcctttattttattttagtttttgagacaaaktcttgctctgtcactcaagctggagtgcagtggcgtgatctcagctcactgcaacctccacctcccaggttcaagcaattctcctgcctcatcctcccaaatagctgggactgactatagctgcaccactacacctggctaattttttttggtctttttagtagatacagggtttcactatgttggccaggctggtcttgaactccaggcctcaagggatctgccagccttggcttcccaaagtgctaggattacaggtgtgaaccactgtgcctggcctcatgttctttatagatgagtgaactgaggccagtgaagtcccacatacctagtgagtggcagagctagacatggagcccagaccatgcagaggctgacccacgattttagcactacctcaggctgcctccccctcgtcctctctccctcctcaagaatcatccatttttctgtgctga

SEQ ID NO: 203302 - DNA, 523 bp, Homo sapiens
tccttagaaacctaatgcagaaacagaaaaccaaatatcacgtgttctcacttgtaagtgggagttaagtgatgagaactcatggacacaaaaaaaggaacaacatacattggggcctagttgagggtggagggtaagaggagggagaggagcagaaaaaatagttattcagtactaggcttagtacctgggtgatgaaatattctgtaaatgaacccctgttacacgagtttatatatataacaaacytgcacatgtacccctgaacttaaaataaaagttaaaaaaacaaaaataataaaatgtaaaatgtggttcaaaaagaagaggtcataaagactgaagaaaggtttgttcattgtcaattggttaatttgttcataatccactgcttatgccagttcctgtactaggggctgaaggacacagacaaattgtacttgctgtgccaggggctgacattcttttcagctgggtgagtaggagatgtggaacaaggtatacttgaggaggatttcacaga

SEQ ID NO: 203303 - DNA, 540 bp, Homo sapiens
ttttgtgagaatataaatggagctacaggtcattatccttagaaacctaatgcagaaacagaaaaccaaatatcacgtgttctcacttgtaagtgggagttaagtgatgagaactcatggacacaaaaaaaggaacaacatacattggggcctagttgagggtggagggtaagaggagggagaggagcagaaaaaatagttattcagtactaggcttagtacctgggtgatgaaatattctgtaaatgaacccctgttacacgagtttatatatataacaaacctgcacatgtacccctgaacttaaaataaaagttaaaaaaacaaaaataataaaatgtaaaatgtggttcaaaaagaagaggtcataaagactgaagaaaggtttgttcattgtcaattggttaatttgttcataatccactgcttatgccagttcctgtactaggggctgaaggacacagacaamttgtacttgctgtgccaggggctgacattcttttcagctgggtgagtaggagatgtggaacaaggtatact

SEQ ID NO: 203304 - DNA, 662 bp, Homo sapiens
agggaacaatcattcaaatcataacagcatgataagcatatctttcctgcacaattgcttactgtttctatctttgtttcaccttcctttttctctgcctttcatcctaccttctttgaactgtctttagaaaatcaaaatgcccccatttccttagaaggtcacaacccacctcagactgataaagaaactgatatttatagaacacatccaaatataatcagcctaaaatttyttggacaaaacaaactaacaaacataagtacaaagcagagattatagaggcttagacaattagtcaaactcctctatcacgaagtatgtccttcacccagttatgtttccctgacatactaaccatctattgagcactcaccaagcaggtgtattgagagagaagaggggatgtagtagtatgaaatgaattcagctccagataataggaaacccaaccaacagtggcttgaacaagtaaaggatttatttgactcatgcaaaaataagcccaaggtcattttgtttaagtgtaacagtgccatcaaagaccccctcaacatgcagttcttcagcttctaatatgtcatcctcaacatgaaggtcttcagcttcaagcttgtcttttcttggtaacatcagatgaactgtgtgaattacatccattt

SEQ ID NO: 203305 - DNA, 573 bp, Homo sapiens
ggagatagccaacgtaataatgtctgccatgtgacagatacaataaataaataaataaatattaatgctgttgacatttgcaaagtagcatatattatgctaagagcattcacacacattatttygtttcatcctcaagacttcttctaaagccggtgatccttcttctgttcttctccacttccatcttcaggctaaggcaatggaaattgaaactcaaaatgatttttttttttctgaaactgaatataagtctgaaggattctagaaatatatatatatatattctcttgtgttcaatgtactctattcattgagtctaagaattccttgagagccagggggttatttatttatggtattcttttcagcctcctactgtaatgtccagcatgtgttatgtgcccattaaaggccaattgaatttaaacaaggagcaccatttcttaaaattctcaacagtaaggctacaagtacaagaaaaatatactttattttctagccatatcaaagctttgcttactcagatttttttttccattattttgcataaccaagattttactgaagtaa

SEQ ID NO: 203306 - DNA, 573 bp, Homo sapiens
ggagatagccaacgtaataatgtctgccatgtgacagatacaataaataaataaataaatattaatgctgttgacatttgcaaagtagcatatattatgctaagagcattcacacacattattttgtttcatcctcaagacttcttctaaagccggtgatccttcttctgttcttctccacttccatcttcaggctaaggcaatggaaattgaaactcaaaatgatttttttttttctgaaactgaatataagtctgaaggattctagaaatatatatatatatattctcttgtgttcaatgtactctattcattgagtctaagaattccttgagagccagggggttatttatttatggtattcttttcagcctcctactgtaatgtccagcatgtgttatgtgcccattaaaggccaattgaatttaaacaaggagcaccatttcttaaaattctcaacagtaaggctacaagtacaagaaaaatrtactttattttctagccatatcaaagctttgcttactcagatttttttttccattattttgcataaccaagattttactgaagtaa

SEQ ID NO: 203307 - DNA, 613 bp, Homo sapiens
aactctttaaaaataacaagaagaatagcactaataacaagagaaaaacattttatacatttttatcttaagtcctattctcattragttatagtatgctatgtctttagtgaaaactatatatttccataatgaataaaagagactccaggaaggcttgactttggacactggaactcttatttttcttttagaggcaatgattggacactgcttggaaggagtccaatcatcataacagcagtttactggagtacccctgcaaagctggaatatgatgctctggcaagttaaacaagtattttgcccttctgtttttgcttattgactgaaataagaaatgtgatgtactcagagtaggggtgaactgttaaaacactgtacccttcagtattcctcaaactgagacaatcatgaaaatgaaggaaagactgtgaaatttccctagtttagaggagactcagcccagaagacatgacaactaaataaaatgtggtattgtggattggtcttggaatataaaaagaacatcatggaaaaactgtgaaatccagataaagtctgaagtttagtaaatagtaatgtaccaatgtcagtttcttagttttgccaa

SEQ ID NO: 203308 - DNA, 609 bp, Homo sapiens
gattgtgaatgataagtgtacagagccagacttgctggaccgcccattcagttattgccgtatcagggagctctttctcttggaaaaaaaaaaaaygcaaggaaaacaaaaaagtaatatttttattataaagcacaacactgccttataataaaatagaattgatataaaatacatcttaaccagttgttacagccaattttaaagaacttctctttgtatgcaaatgtgtttccgctaactccatgcaaaagccctgtgtgccttttatagattcccataaacatttctgcaaaccagactttggtttttacagaaacatgacacgttttaaatgcctcctagccacacacgtgtgaaatacacacacacaaacacacacacacggactagtctgaggccatacctagtttatatcatccttattcattgagggcccaatcacctgaaaatggctgagatatttttttccctggctcttacatcataggagacacaggtttagattctgttgaaagagaggaaaaatcaagtattttccatgcaaatgttttgcttctatacattttgttttccctgtatctcttttactgagagagcttctttaaa

SEQ ID NO: 203309 - DNA, 549 bp, Homo sapiens
aaattgatgctattatgtcatataggtgattgtcaacaawaggcaagcaaatttcaacttcaaagtacttgtatttgctctttcttttacctggaaaatgttttccttgatatctacagagctctctcttgccttcttcaatattttactaaaattctgctatcttatcagaggcccttcctgggataggcaagctatctacattatcactcagcccctgtcatcactctacctgtgattcttatcctggtataagaatgttattattcaacttctttcatatattgcttgataccaagactgccaagaatgacatagtattataggtttttgttttctgagactcctttaaacactgtacctgcattatgtcatataacaccgaaacaaagttataaggtaggtttagtatcattttgcaaaaaaaaccagattgagattcagagaggctatataattttatacagtaacacagctaacaaaaaccatcacttcagcctacatctgtttccttctcctctactagtaagctgccacctgtaattctac

SEQ ID NO: 203310 - DNA, 549 bp, Homo sapiens
aaattgatgctattatgtcatataggtgattgtcaacaaaaggcaagcaaatttcaacttcaaagtacttgtatttgctctttcttttacctggaaaatgttttccttgatatctacagagctctctcttgccttcttcaatattttactaaaattctgctatcttatcagaggcccttcctgggataggcaagctatctacattatcactcagcccctgtcatcactctayctgtgattcttatcctggtataagaatgttattattcaacttctttcatatattgcttgataccaagactgccaagaatgacatagtattataggtttttgttttctgagactcctttaaacactgtacctgcattatgtcatataacaccgaaacaaagttataaggtaggtttagtatcattttgcaaaaaaaaccagattgagattcagagaggctatataattttatacagtaacacagctaacaaaaaccatcacttcagcctacatctgtttccttctcctctactagtaagctgccacctgtaattctac

SEQ ID NO: 203311 - DNA, 549 bp, Homo sapiens
aaattgatgctattatgtcatataggtgattgtcaacaaaaggcaagcaaatttcaacttcaaagtacttgtatttgctctttcttttacctggaaaatgttttccttgatatctacagagctctctcttgccttcttcaatattttactaaaattctgctatcttatcagaggcccttcctgggataggcaagctatctacattatcactcagcccctgtcatcactctacctgtgattcttatcctggtataagaatgttattattcaacttctttcatatattgcttgataccaagactgccaagaatgacatagtattataggtttttgttttctgagactcctttaaacactgtacctgcattatgtcatataacaccgaaacaaagttataaggtaggtttagtatcattttgcaaaaaaaamcagattgagattcagagaggctatataattttatacagtaacacagctaacaaaaaccatcacttcagcctacatctgtttccttctcctctactagtaagctgccacctgtaattctac

SEQ ID NO: 203312 - DNA, 549 bp, Homo sapiens
aaattgatgctattatgtcatataggtgattgtcaacaaaaggcaagcaaatttcaacttcaaagtacttgtatttgctctttcttttacctggaaaatgttttccttgatatctacagagctctctcttgccttcttcaatattttactaaaattctgctatcttatcagaggcccttcctgggataggcaagctatctacattatcactcagcccctgtcatcactctacctgtgattcttatcctggtataagaatgttattattcaacttctttcatatattgcttgataccaagactgccaagaatgacatagtattataggtttttgttttctgagactcctttaaacactgtacctgcattatgtcatataacaccgaaacaaagttataaggtaggtttagtatcattttgcaaaaaaaaccagattgagattcagagaggctatataattttmtacagtaacacagctaacaaaaaccatcacttcagcctacatctgtttccttctcctctactagtaagctgccacctgtaattctac

SEQ ID NO: 203313 - DNA, 585 bp, Homo sapiens
cttcccgggggatgtcagagaataagggaagctttcaggactttcttccaactcttccttactattgttcatgagatggagctgatagtaaggccctgtggggatcaagaatgttagtgatcagaaaactaaattcactgtttcactgctctaaataaaagtggatggacttctgcctcagctcagcttcgagaaggtggaagaggagcrggaacactggaaaactgtttctcctttttctctcctccggccctcatggtgagaggtgagatatcttgatgaaaaagaggatccaggtttgctgggcttcatctcggctctgccagttactagttatgtgaccttggggatattatttcacctctctaaatctcatttttcttatctatatagtgggggcaattcaaatgcatgagatttttgagaactttagatttaatgtacttacattttatagaacaatgttgggcacagagtaagtattctgtgagtgtggtcttttattttcctttattgtcagtaaaatactctcttatcctcactttagatgcatcaagaaccccatatactttctcatacgattca

SEQ ID NO: 203314 - DNA, 501 bp, Homo sapiens
tgtatcttctgatactgtcatcctgttaaactgaacttaagtatgtcaccagtattaaggttgttcaaggcaaaaactcatatttggagactacaccaaggatctcttgtctacgtatttccaatttacttgttctgtctttattttccaagtcccaactcggggtttgatatcctgacttgaaaccacattttcccgcctcatattttaacacctttcattctgtccctggcacttaagacttcagtgatcaggaaaggttttggttttagttcctccttaacttttggctttccatattgcctttactgggaattctattccagattccactggactttccctttgcctgaatcattgtttaacttactccagggagagtgasagggtagaagaattagacaggcaaagctttgttaagtgttattcctctttgccatcacaaatatgcaatagaaacacagtgactcttaaccaattttgaataacaagcaattaaca

SEQ ID NO: 203315 - DNA, 647 bp, Homo sapiens
acctgagttcccggcctgccaacctgatctatagatttcacactcaagactgcaacatctcacatacctgttggtcatctttaagtcttctttgaaaaaaggatggattgtttatttatttatttttgctattgtgttgtgtgagttccttatatattttggatattaaccacttatttaggtataggatttgtaaatattttctacacatctacaggctgtattttcatttgctgtacagaacctttttagcttgatgaagttccactttatttttgcttttgttggtgtgatawcaaaaatatcattgctgaggtcaatgtgaaggagattttcccctgtgttttctcataggagttttatagttgaaggtcttaacatttatgtcttcaattcattttaagtcaattttgtgtatggtgtaagaaaaagatccaattttgctcttttgcctgtggatatccagttctcccaacaccatttattgaagaatcctatcctcattgttattcttggtgttttggcctaagattagttaattgtacctactcgggtttatttctgggctctctattctgtcacaatggtctacatatctgtttttatatcagtattatattgttttgattactatagctttataacaa

SEQ ID NO: 203316 - DNA, 529 bp, Homo sapiens
atgcatattttttcttttgaaactctaatgtcaaaaaagtcacaaamtgaaaatatatgcttacttgtaaattcaataagactgtaaataccatgaaggaagagctttttcttgtttaccactgtaattcccatgatacgtatgcatggaagatgttcaatgactttttgcacatgttacgacattagcagccagagttgtaaagaactatataagcacggtgaaacaattggagcaagttgaaagacactttattctgcccatatcagaataagtttgcagctgaaaaatgtgagtcccgatggtggaaacgaaaaatactgaagctcattctctgataagtaaaattttttgaaaccctaccattcacctttttcctcctattcttcccttttcaatgatacccaggttgtctcttccacactcctacattacccaggacacccatgattacacttgtaccccacctcctgatgccactcttactactttgatgaactagatacccactctgttgatatcgcttctc

SEQ ID NO: 203317 - DNA, 608 bp, Homo sapiens
tctaatccaattggctatctccctttcaccctggtatttcatccagaaaacatacataaaaacagaacatcataraacaatggatgtccctcgtgactctcatgtttatatagatgccattggaatcccacgaggagtgccagatagatttaaggcccaaaatcaaatagctgcaagtttgaatccgtgttgttctggtggtcaactctaaataaaaatgtagattgggccgggagtggtggcacacgcctgtaatcccagcatgttaggaggctgaggcgggtggatcacaagatcaggagtttgagaccagcctgaccaacatggtgacagcccccagctactcaggaggctgaaggagagtaggttgaacccaggaggtggaagttgcagtgaaccattgcaccattgcactccagcctgggcgacagagtgagactccatctcaaaaaaaacacaaaaaatgtaacccagcaacgattcattaattatactagggatgctattaagggaacagtttaacaattagggcccaccagtcaaacggcctgagaaaatacaatagcattagacatgatactagcggagaaaggtgtagtttgtgtcat

SEQ ID NO: 203318 - DNA, 608 bp, Homo sapiens
tctaatccaattggctatctccctttcaccctggtatttcatccagaaaacatacataaaaacagaacatcatagaacaatggatgtccctcgtgactctcatgtttatatagatgccattggaatcccacgaggagtgccagatagatttaaggcccaaaatcaaatagctgcaagtttgaatccrtgttgttctggtggtcaactctaaataaaaatgtagattgggccgggagtggtggcacacgcctgtaatcccagcatgttaggaggctgaggcgggtggatcacaagatcaggagtttgagaccagcctgaccaacatggtgacagcccccagctactcaggaggctgaaggagagtaggttgaacccaggaggtggaagttgcagtgaaccattgcaccattgcactccagcctgggcgacagagtgagactccatctcaaaaaaaacacaaaaaatgtaacccagcaacgattcattaattatactagggatgctattaagggaacagtttaacaattagggcccaccagtcaaacggcctgagaaaatacaatagcattagacatgatactagcggagaaaggtgtagtttgtgtcat

SEQ ID NO: 203319 - DNA, 540 bp, Homo sapiens
aaggaaggaaggaaggaaggaaggaaaaggaatcaaagcatataacagcaaygaaaacaaaaaaaattcaaccaaacacaagtgaagacagcatgaaaagaaaaagatattattaagttggtgcaaaagtaattgcagtttttgccattaaaagtaatggcaaaaatactaaagcgtaatactaaattgtcagacaaaaattaacaaaatggcagtagaaagtacttacctatcaataattgtttaagtatcaaataaattatctaataaaaacacattgctatggtttgaatctccccttcaaatttcatgtgggaatttaactgctattgttataaaattataaagttagacgtttaagaagataataggtcctgagggacctactctcgtgaatgaattaatgtcattatttccagagtgggttagtcggcaggaaagtgggtctattataaaagtacgctctctggtgtgcaccttcagtcatcctcatgcctttggccattttgtgatgtggaaatacgattctcatcagatgtc

SEQ ID NO: 203320 - DNA, 555 bp, Homo sapiens
tagctggacccagctccctggtcatggagctgtcttgtcttggtcctgtgcaaaggggtcattgtgatatattgcttggccaagcagctaggtgatatgactctcctgaatgggccctgctctcagagaggattttcacccatcactgggccagtcatataggtgatgtgtctctcctctgttgcctggaccctgcccaagtaagaattgtgacatcacttacccrgcacccaggtgataggactctcatgtctggttcctgcccacaggtgaaattgtgacatatacatggtcacagctcacaggtgaggtgataactcacatacctggatccagctaagagaacagattttgactctgatatctaggcttagagcaacaggcaaggtccttggtctcctacttaaataaaggtcatagtgtattatgataccaaggcatactgtgtaaagtcctcaaataatacagtgtcataacaggacccagaacaaaggtgagattgtgactcttatatgcacatccagctgaatagaattgtcaccctcacatatagac

SEQ ID NO: 203321 - DNA, 556 bp, Homo sapiens
ccacgattttccctgtgtgctgggctctattttggcactctgtagcacttgagagcttcatacaatgtgcatgcaastcataatagtctctggccatcctacaagttgaagacccagaaccttagtttttgctctaagactaactacaagagtcatatcttcaggtatgagtcatcattccacctgtaagctgtgcccatgtgtttttcccaattccaactgtggagacagaccaggcacaagggttgcatcacctgggtgctggccagagatatgtcacaattgccactttgggcagggtcaaaatctccccttagtgcaggggcaattcaggagggtcatatcacctaggtggtgggcccagcgatatgtcacaatgccccccatgggcagggccaaagcaggacagttatatcatctggaagctgggcccagtgatatgtcacaatgccttttgggggcagggttcaggaaggaaagaagagtcacatcacctaggtgatgggtctagagatatttcacaatgccttctgtaattagaacccaggaaaaagag

SEQ ID NO: 203322 - DNA, 566 bp, Homo sapiens
ttccctgtgtgctgggctctattttggcactctgtagcacttgagagcttcatacaatgtgcatgcaactcataatagtctcyggccatcctacaagttgaagacccagaaccttagtttttgctctaagactaactacaagagtcatatcttcaggtatgagtcatcattccacctgtaagctgtgcccatgtgtttttcccaattccaactgtggagacagaccaggcacaagggttgcatcacctgggtgctggccagagatatgtcacaattgccactttgggcagggtcaaaatctccccttagtgcaggggcaattcaggagggtcatatcacctaggtggtgggcccagcgatatgtcacaatgccccccatgggcagggccaaagcaggacagttatatcatctggaagctgggcccagtgatatgtcacaatgccttttgggggcagggttcaggaaggaaagaagagtcacatcacctaggtgatgggtctagagatatttcacaatgccttctgtaattagaacccaggaaaaagagttatatcatttgggttaa

SEQ ID NO: 203323 - DNA, 566 bp, Homo sapiens
ttccctgtgtgctgggctctattttggcactctgtagcacttgagagcttcatacaatgtgcatgcaactcataatagtctctggccatcctacaagttgaagacccagaaccttagtttttgctctaagactaactacaagagtcatatcttcaggtatgagtcatcattccacctgtaagctgtgcccatgtgtttttcccaattccaactgtggagacagaccaggcacaagggttgcatcacctgggtgctggccagagatatgtcacaattgccactttggkcagggtcaaaatctccccttagtgcaggggcaattcaggagggtcatatcacctaggtggtgggcccagcgatatgtcacaatgccccccatgggcagggccaaagcaggacagttatatcatctggaagctgggcccagtgatatgtcacaatgccttttgggggcagggttcaggaaggaaagaagagtcacatcacctaggtgatgggtctagagatatttcacaatgccttctgtaattagaacccaggaaaaagagttatatcatttgggttaa

SEQ ID NO: 203324 - DNA, 566 bp, Homo sapiens
ttccctgtgtgctgggctctattttggcactctgtagcacttgagagcttcatacaatgtgcatgcaactcataatagtctctggccatcctacaagttgaagacccagaaccttagtttttgctctaagactaactacaagagtcatatcttcaggtatgagtcatcattccacctgtaagctgtgcccatgtgtttttcccaattccaactgtggagacagaccaggcacaagggttgcatcacctgggtgctggccagagatatgtcacaattgccactttgggcagggtcaaaatctccccttagtgcaggggcaattcaggagggtcatatcacctaggtsgtgggcccagcgatatgtcacaatgccccccatgggcagggccaaagcaggacagttatatcatctggaagctgggcccagtgatatgtcacaatgccttttgggggcagggttcaggaaggaaagaagagtcacatcacctaggtgatgggtctagagatatttcacaatgccttctgtaattagaacccaggaaaaagagttatatcatttgggttaa

SEQ ID NO: 203325 - DNA, 561 bp, Homo sapiens
tcctgtaaacaaattcaaggcaaaaaagaatcacataacataggtgatgggcctaaagatatctcacagtatcccctgtggactggcccaggcagaaagggagagacacatcgcytaggtgatcggcccagtaatgtgtcacaatacccaggagggcagagcccagcaggaaagtcacattatctagatacttaacctagttatatttcacaatctaaactgtgggtggggcctaggaaaaagggaaaaatcagtcagatactaagcgatgatatatgtcacaatcacacctgtgaaaaagttcagagataaaatttacaatctctcacacacccccgcttcagggtcagagtcaatacctcctgtgagtttcacccaaaaggcaagtaacaacctcaacagtggactggatccatgcatgagagccccaactccacccgcagagagtgtcccagtcaaaaagtcaaaatatcacagtggtgctgattcttggtgcaaaaatcaccatgttacctgtgtttagaatccatatataaaagtaaaaatgccaacttttgactg

SEQ ID NO: 203326 - DNA, 561 bp, Homo sapiens
tcctgtaaacaaattcaaggcaaaaaagaatcacataacataggtgatgggcctaaagatatctcacagtatcccctgtggactggcccaggcagaaagggagagacacatcgcctaggtgatcggcccagtaatgtgtcacaatacccaggagggcagagcccagcaggaaagtcacattatctagatrcttaacctagttatatttcacaatctaaactgtgggtggggcctaggaaaaagggaaaaatcagtcagatactaagcgatgatatatgtcacaatcacacctgtgaaaaagttcagagataaaatttacaatctctcacacacccccgcttcagggtcagagtcaatacctcctgtgagtttcacccaaaaggcaagtaacaacctcaacagtggactggatccatgcatgagagccccaactccacccgcagagagtgtcccagtcaaaaagtcaaaatatcacagtggtgctgattcttggtgcaaaaatcaccatgttacctgtgtttagaatccatatataaaagtaaaaatgccaacttttgactg

SEQ ID NO: 203327 - DNA, 561 bp, Homo sapiens
tcctgtaaacaaattcaaggcaaaaaagaatcacataacataggtgatgggcctaaagatatctcacagtatcccctgtggactggcccaggcagaaagggagagacacatcgcctaggtgatcggcccagtaatgtgtcacaatacccaggagggcagagcccagcaggaaagtcacattatctagatacttaacctagttatatttcacaatctaaactgtgggtggggcytaggaaaaagggaaaaatcagtcagatactaagcgatgatatatgtcacaatcacacctgtgaaaaagttcagagataaaatttacaatctctcacacacccccgcttcagggtcagagtcaatacctcctgtgagtttcacccaaaaggcaagtaacaacctcaacagtggactggatccatgcatgagagccccaactccacccgcagagagtgtcccagtcaaaaagtcaaaatatcacagtggtgctgattcttggtgcaaaaatcaccatgttacctgtgtttagaatccatatataaaagtaaaaatgccaacttttgactg

SEQ ID NO: 203328 - DNA, 651 bp, Homo sapiens
tagggtcattatgaaaaccagtataaaagagtttttattttaaaaaattctttttaatagtactactaaacaacccagcaatcccacttctgcatatataactaaagaaataaaatcagcatctcaaagaaatatcagcaacatcatgttcattgcagcatcattcacaattgccaagatgtgaaaacaatctaaatgtttgtggatgctgaatggatgaagagaatgtggtatatatgcatagtacaatattatacagccataaaaaatgacatccygtcatttcaacaagatggatggacctagaggacattatgctaagtgaaatagccaaaaacagaaagacaaatacagtatgatctcacttctatgaagaatataaaaaggttgaactcacagaagcagagtatgaaagcagttgccagggctcagaagtggagaagatggaagatattcaaagggtacaaattttcagcaataacataaataagttttggagatctaatgtatagcttcatgactatagttaataatgttatgtatactttgaatgtgctaagacagtagaccttaagtgttctcactacaaaaaaaggtaaccatgtgaggtgatacgtgtgtgtcctcattaacttgattgtgttagtcact

SEQ ID NO: 203329 - DNA, 651 bp, Homo sapiens
tagggtcattatgaaaaccagtataaaagagtttttattttaaaaaattctttttaatagtactactaaacaacccagcaatcccacttctgcatatataactaaagaaataaaatcagcatctcaaagaaatatcagcaacatcatgttcattgcagcatcattcacaattgccaagatgtgaaaacaatctaaatgtttgtggatgctgaatggatgaagagaatgtggtatatatgcatagtacaatattatacagccataaaaaatgacatcctgtcatttcaacaagatggatggacctagaggacattatgctaagtgaaatagccaaaaacagaaagacaaatacwgtatgatctcacttctatgaagaatataaaaaggttgaactcacagaagcagagtatgaaagcagttgccagggctcagaagtggagaagatggaagatattcaaagggtacaaattttcagcaataacataaataagttttggagatctaatgtatagcttcatgactatagttaataatgttatgtatactttgaatgtgctaagacagtagaccttaagtgttctcactacaaaaaaaggtaaccatgtgaggtgatacgtgtgtgtcctcattaacttgattgtgttagtcact

SEQ ID NO: 203330 - DNA, 582 bp, Homo sapiens
acaggtctggggctgttaataaaatctctcatcttgtttgttagttgtttttttttaatagttgaagtatatttttgctgggtgtattctaggataaaagttttttccttcagtatgttaagtatgtcatgtcaccatctccyggcctgtaggattttcactgaagagtccactgtcaaacatattggtacttgtttgaatgttgttttttttctattgctgttttcagaatcctttatctttgacctttgagaattttattattaaagacattcaggtggtcatatttaagtgaattgtgcttagtattctacaaccttcttatacttgaatattaattttttaggtatgggaagttctcattatacctttgaataaactttctacccagaactttttttctacctcctcttgaaggccataactcttagcccttttgaggcttttttttaaatctcatctgactgtatcttttcaaataacctgtgttcaaactcactgattctttcttctgcttgatcagttctgctgttgagagactctgatgcgttcttcaatatcatttaaattttcagaaccaga

SEQ ID NO: 203331 - DNA, 515 bp, Homo sapiens
atttaaattttcagaaccagaatttttgcttgattcttcaaaatgattttaatcaatttgttaagtttattggatcagattctgaatttctttttttttgttgttattttgaattttgctgagctttttcaaaacagctgttttgaatttcctgtctgaaaggttacatatctctgtctctcaggatttgyacactagtgccttatttggttttaatgaggttatgttttcctgaatagtcttaatttttgtggatgttcattaatgtctgggcattaataagtcaggcatttattttagtctttgcattctgggctttttaatacttgtctttcttagaaaggcttcccaggtattcaaagggaatcgagtgttgtaatctaagtctttgatcattgcagtcatatctgcattaggggacaccccaacctgaataacactgtgatgcttgcagacttgtagaggtaccaccttggtggtcttaggtaagaaccaagagagtctctgggttacca

SEQ ID NO: 203332 - DNA, 515 bp, Homo sapiens
atttaaattttcagaaccagaatttttgcttgattcttcaaaatgattttaatcaatttgttaagtttattggatcagattctgaatttctttttttttgttgttattttgaattttgctgagctttttcaaaacagctgttttgaatttcctgtctgaaaggttacatatctctgtctctcaggatttgtacactagtgccttatttggttttaatgaggttatgttttcctgaatagtcttaatttttgtggatgttcattaatgtctgggcattaataagtcaggcatttattttagtctttgcattctgggctttttaatacttgtctttcttagaaaggcttcccaggtattcaaagggaatygagtgttgtaatctaagtctttgatcattgcagtcatatctgcattaggggacaccccaacctgaataacactgtgatgcttgcagacttgtagaggtaccaccttggtggtcttaggtaagaaccaagagagtctctgggttacca

SEQ ID NO: 203333 - DNA, 556 bp, Homo sapiens
tacttggttaataaattttttttgccaactaatttttargttcacttggtaaatttaaaggtagtttaaaatgtatatttaaataacttttctctataagtgaagaaaatcatttatcttgagataattttactttaaacagttgctttagagtctttcttggaaagtattctattatcaaataaagccgggtgcagtggctcatgcctgtaatcccggcactttgagaggccaaggcaggcagattacctgaggtcgggagtttgagaccaggctgaccaacatggagaagccccatctctactaaaaatacaaaattagccgggcgtggtggcgcatgcctgtaatcccagctactcaggaggctgagacaggagaatcgcttgaacccaggaggtggaggttgcggtgagctgaaatcgcaccattgcactccagcctgagccacaaaagcgaaactccgtctcaaaaaaaaaaaaaagaaaagaaaagataagaaagaattacattgttctgaacaatgataattaacatattttattattgagtgataggt

SEQ ID NO: 203334 - DNA, 556 bp, Homo sapiens
tacttggttaataaattttttttgccaactaatttttaagttcacttggtaaatttaaaggtagtttaaaatgtatatttaaataacttttctctataagtgaagaaaatcatttatcttgagataattttactttaaacagttgctttagagtctttcttggaaagtattctattatcaaataaagccgggtgcagtggctcatgcctgtaatcccggcactttgagaggccaaggcaggcagattacctgaggtcgggagtttgagaccaggctgaccaacatggagaagccccatctctactaaaaatacaaaattagccgggcgtggtggcgcatgcctgtaatcccagctactcaggaggctgagacaggagaatcgcttgaacccaggaggtggaggttgcggtgagctgaaatcgcaccattgcactccagcctgagccacaaaagcgaaactccrtctcaaaaaaaaaaaaaagaaaagaaaagataagaaagaattacattgttctgaacaatgataattaacatattttattattgagtgataggt

SEQ ID NO: 203335 - DNA, 601 bp, Homo sapiens
gcctctttattctgtctgtaaaactgcattcttttgtcaacatctgcctctggtaaccaattattccacattttactttgttattaaaacttyattagattctacatgtaagtgaaatcatgcagtacttttctttgtgtgtctggcttattgtacctagcaaagtatcctgtaaatgtatccatattttttcaattgacaatattcccccctttttaaggctacataatattccattctgtttactattattctaaatatatacaccacatttacaataaaattgtaatttaaatatatattcatctaatggttggaaaaatcatgtgtaatgtaaaaatatttgtgtgaaagcatatattaacataattcagcatataaatatctagttaataatagctaatttgtactgagcactaaccataacactgtacacgtgttaataaattttgttgtcacattgttgtagtctggctgtgtctgcacccaaatctcattttgaattgtagttcccataatccctatgtgtcatgggagacatctggtgggaggtaattgaatcatgtggtcagttactctcattctgttctcatgatagtta

SEQ ID NO: 203336 - DNA, 601 bp, Homo sapiens
gcctctttattctgtctgtaaaactgcattcttttgtcaacatctgcctctggtaaccaattattccacattttactttgttattaaaacttcattagattctacatgtaagtgaaatcatgcagtacttttctttgtgtgtctggcttattgtacctagcaaagtatcctgtaaatgtatccatattttttcaattgacaatattcccccctttttaaggctacataatattccattctgtttactattattctaaatatatacaccacatttacaataaaattgtaatttaaatatatattcatctaatggttggaaaaatcatgtgtaatgtaaaaatatttgtgtgaaagcatatattaacataattcagcatataaatatctagttaataatagctaatttgtactgagcactaaccataacactgtacaygtgttaataaattttgttgtcacattgttgtagtctggctgtgtctgcacccaaatctcattttgaattgtagttcccataatccctatgtgtcatgggagacatctggtgggaggtaattgaatcatgtggtcagttactctcattctgttctcatgatagtta

SEQ ID NO: 203337 - DNA, 512 bp, Homo sapiens
acatttaataattatcccttaatattaactctccaataagtttaatttctaagctatattttctaactaattttgtatatgctacactttgtcttagaatctaataaaaaaattttactaagacaaacagtgctacttgatttaatcttctcacctgtggacagtgtatgcctcytatctcaattaactgatctggaagttacatcgagaagctataaataagctcaaactcccaagtttaacacagtttttcaccatattaaaaaattccaaacttctcatcagaatctacaaagtactgtgtgaaatgacattgtacagagagagcagtgagaaagctgtagccatagcacagaaaaaaggggaagggctgtgatggacacatcatttggatagacataaacagacacaaaacaaaagataatcagaaaattaaaaaagcagaatttttatttaaattcagagaggccgttctgcagcctgggaacagatgtcctctgcacatgcagaat

SEQ ID NO: 203338 - DNA, 512 bp, Homo sapiens
acatttaataattatcccttaatattaactctccaataagtttaatttctaagctatattttctaactaattttgtatatgctacactttgtcttagaatctaataaaaaaattttactaagacaaacagtgctacttgatttaatcttctcacctgtggacagtgtatgcctcctatctcaattaactgatctggaagttacatcgagaagctataaataagctcaaactcccaagtttaacacagtttttcaccatattaaaaaattccaaacttctcatcagaatctacaaagtactgtgtgaaatgacattgtacagagagagcagtgagaaagctgtagccatagyacagaaaaaaggggaagggctgtgatggacacatcatttggatagacataaacagacacaaaacaaaagataatcagaaaattaaaaaagcagaatttttatttaaattcagagaggccgttctgcagcctgggaacagatgtcctctgcacatgcagaat

SEQ ID NO: 203339 - DNA, 512 bp, Homo sapiens
acatttaataattatcccttaatattaactctccaataagtttaatttctaagctatattttctaactaattttgtatatgctacactttgtcttagaatctaataaaaaaattttactaagacaaacagtgctacttgatttaatcttctcacctgtggacagtgtatgcctcctatctcaattaactgatctggaagttacatcgagaagctataaataagctcaaactcccaagtttaacacagtttttcaccatattaaaaaattccaaacttctcatcagaatctacaaagtactgtgtgaaatgacattgtacagagagagcagtgagaaagctgtagccatagcacagaaaaaaggggaagrgctgtgatggacacatcatttggatagacataaacagacacaaaacaaaagataatcagaaaattaaaaaagcagaatttttatttaaattcagagaggccgttctgcagcctgggaacagatgtcctctgcacatgcagaat

SEQ ID NO: 203340 - DNA, 290 bp, Homo sapiens
ggtttgtagaaaagattgaggtgtggttaaatgctccgtcacattttttaygtatgtggagtttctctccagtataaaattgtttaattaacaaggatggagaaccagttaaagactttgccacatttttttctacaattgcaggggttctctccagtatcaattatcttacatttattcaggtttgaggactttttaaagacatttccatattccttattatagggtttctcttcatattaattctcttacgtataataagggttcaagactagttaaaagctttacca

SEQ ID NO: 203341 - DNA, 290 bp, Homo sapiens
ggtttgtagaaaagattgaggtgtggttaaatgctccgtcacattttttacgtatgtggagtttctctccagtataaaattgtttaattaacaaggatggagaaccagttaaagactttgccacatttttttctacaattgcaggggttctctccagtatcaattatcttacatttattcaggtttgaggactttttaaagacatttccatattccttattatagggtttctcttyatattaattctcttacgtataataagggttcaagactagttaaaagctttacca

SEQ ID NO: 203342 - DNA, 290 bp, Homo sapiens
ggtttgtagaaaagattgaggtgtggttaaatgctccgtcacattttttacgtatgtggagtttctctccagtataaaattgtttaattaacaaggatggagaaccagttaaagactttgccacatttttttctacaattgcaggggttctctccagtatcaattatcttacatttattcaggtttgaggactttttaaagacatttccatattccttattatagggtttctcttcrtattaattctcttacgtataataagggttcaagactagttaaaagctttacca

SEQ ID NO: 203343 - DNA, 597 bp, Homo sapiens
gtggagtttctctccagtataaaattgtttaattaacaaggatggagaaccagttaaagactttgccacatttttttctacaattgcaggggttctctccagtatcaattatcttacatttattcaggtttgaggactttttaaagacatttccatattccttattatagggtttctcttcatattaattctcttacrtataataagggttcaagactagttaaaagctttaccacattctttgcttttgtagggtttctctctagaatgaatgatcagatattgtgtaaggcctgagatgtgcttaaaggttttgtcccatttttaacccttgtagggtctctctactacaaattctcttaggctttgggaggctgagacagatggatcacctgaggtcaggagttcgagaccagcctggtcaatacgttgaaaccccatctctaccaaaaatacaaaaatcagccagtgtggtggcatgcacctgcaatcccagctactccggagactgaggcaggagaatcaattgaatcatgcaggcagaggttgcagtgagctgagatagtgccactgcactcccacctgggtgaaaaagtg

SEQ ID NO: 203344 - DNA, 400 bp, Homo sapiens
ggagatttgaacaccttcctataagaggaggctttgacaactgttattaggagagaaatgtgacctgatttccattttagagccttcaacctggctgcctggtaagttgaaagttgagttggaagaratgcagattggaatcaggcagacagattaggaagctactgcaatagtccatgcaagaaatggcaataacctgaactgaggcagtggcataatgaaactggagaggaagggatggatggtaggtgatatggtttccctgtgtctccacccaaatctcatcttgaattgtaataatccccaggtgtcaagagtggggccatgtggagataattgaatcatgggggtggtttcccccatactgttctcatggtactgaataagtgtcatgagatct

SEQ ID NO: 203345 - DNA, 400 bp, Homo sapiens
ggagatttgaacaccttcctataagaggaggctttgacaactgttattaggagagaaatgtgacctgatttccattttagagccttcaacctggctgcctggtaagttgaaagttgagttggaagagatgcagattggaatcaggcagacagattaggaagctactgcaatagtccatgcaagaaatggcaataacctgaactgaggcagtggcataatgaaactggagaggaagggatggatggtaggtgatatggyttccctgtgtctccacccaaatctcatcttgaattgtaataatccccaggtgtcaagagtggggccatgtggagataattgaatcatgggggtggtttcccccatactgttctcatggtactgaataagtgtcatgagatct

SEQ ID NO: 203346 - DNA, 382 bp, Homo sapiens
ccttcctataagaggaggctttgacaactgttattaggagagaaatgtgacctgatttccattttagagccttcaacctggctgcctggtaagttgaaagttgagttggaagagatgcagattggaatcaggcagacagattaggaagctactgcaatagtccatgcaagaaatggcaataacctgaactgaggcagtggcataatgaaactggagaggaagggatggatggtaggtgatatggtttccctgtgtctccacccaaatctcatcttgaattgtaataatccccaggtgtcaagrgtggggccatgtggagataattgaatcatgggggtggtttcccccatactgttctcatggtactgaataagtgtcatga

SEQ ID NO: 203347 - DNA, 380 bp, Homo sapiens
tgcattcccacctacggtgtataagcattcccttttctccacagcctcaccagcatgttgttttttgactttttaataaatagccatctgactggtgtgagatggtatctcaytgtagttttgatttgcatttctctgatgattggtgatgctgagcatttttttcttatatttagtggccacctgtatgtcttcttagaaacactattttttaaaaagaaataaatatgtatgcatacacatgcacatattatagacaaaaattggttgtcatttttttctagtagaataatttatatatatttccttatagaaaacattacaaaaatgacaattctctctgaactgaaagtacagattaatattaaccacagttagca

SEQ ID NO: 203348 - DNA, 388 bp, Homo sapiens
tggactaatttgcattcccacctacggtgtataagcattcccttttctccacagcctcaccagcatgttgttttttgactttttaataaatagccatctgactggtgtgagatggtatctcactgtagttttgatttgcatttctctgatgattrgtgatgctgagcatttttttcttatatttagtggccacctgtatgtcttcttagaaacactattttttaaaaagaaataaatatgtatgcatacacatgcacatattatagacaaaaattggttgtcatttttttctagtagaataatttatatatatttccttatagaaaacattacaaaaatgacaattctctctgaactgaaagtacagattaatattaaccacagttag

SEQ ID NO: 203349 - DNA, 388 bp, Homo sapiens
tggactaatttgcattcccacctacggtgtataagcattcccttttctccacagcctcaccagcatgttgttttttgactttttaataaatagccatctgactggtgtgagatggtatctcactgtagttttgatttgcatttctctgatgattggtgatgctgagcatttttttcttatatttagtggccacctgtatgtcttcttagaaacactattttttaaaaagaaataaatatgtatgcatrcacatgcacatattatagacaaaaattggttgtcatttttttctagtagaataatttatatatatttccttatagaaaacattacaaaaatgacaattctctctgaactgaaagtacagattaatattaaccacagttag

SEQ ID NO: 203350 - DNA, 380 bp, Homo sapiens
tgcattcccacctacggtgtataagcattcccttttctccacagcctcaccagcatgttgttttttgactttttaataaatagccatctgactggtgtgagatggtatctcactgtagttttgatttgcatttctctgatgattggtgatgctgagcatttttttcttatatttagtggccacctgtatgtcttcttagaaacactattttttaaaaagaaataaatatgtatgcatacacatgcacatattatagrcaaaaattggttgtcatttttttctagtagaataatttatatatatttccttatagaaaacattacaaaaatgacaattctctctgaactgaaagtacagattaatattaaccacagttagca

SEQ ID NO: 203351 - DNA, 563 bp, Homo sapiens
taacagtagcatagaaagactatgcacagtgatgcaacagggaaaatctatttggcttccccactgtcacttacacacacacgcacatataacattacatgctcatcatatatactttattttgtgtcttatatattatatttcatgcattcaaagtgacagaatgaataagtcagtaattaattccaagaataataaactcctagaaagcaataatacaaaaaataaataacaagtgaaaactggaaaaataaaaagtcatgaaaagackttcatagaagagcaaacaccaattgctgaaaaaaaaatgatatgaagaaaggctaaacctctttaattttaagggacatgaacatcaaaatttcttttcaagtaagattttacatgcagtccattggcagaaattcagtctgacaacaccaaatattagagaagatgtggatcagtaggattatttggtcattgtgaagggataggaagtgctgaacactttaaaaacaaaattggtactgtttttcgcatgggaacatctgtaccaaaggacaaggacaataatgtttata

SEQ ID NO: 203352 - DNA, 514 bp, Homo sapiens
acaaaaagtttcagttagttcttttctatattttctatttctctcatcactgtgttcatgcatttctttaagaacctgttcacagtaataatggtatttttaayttctttgtctgcatgttctttcacttaatttacttctgagtctgtttctattgactaattttttttcttattacagatcatattttttttgcttctaggtatatctaataattctttagtgtgatgatggacattgtatagtttacattgctaagtgtcttgattttttgtttgtttgtttaaagcagggatgttcaatcttctggcttccttggaccacattggaggaagacgaattgtcttcggccacaaactaaaactaatgatagctgataagccaaaaaaattattaaaaaatctcataatgttttaagaaagtttatgaatttttgttgggctgcattcaaagccagtacaggttggaagagcttggtttaaagagtactggtcttttttctaggaagcaatta

SEQ ID NO: 203353 - DNA, 514 bp, Homo sapiens
acaaaaagtttcagttagttcttttctatattttctatttctctcatcactgtgttcatgcatttctttaagaacctgttcacagtaataatggtatttttaatttctttgtctgcatgttctttcacttaatttacttctgagtctgtttctattgactaattttttttcttattacagatcatattttttttgcttctaggtatatctaataattctttagtgtgatgatggacattgtatagtttacattgctaagtgtcttsattttttgtttgtttgtttaaagcagggatgttcaatcttctggcttccttggaccacattggaggaagacgaattgtcttcggccacaaactaaaactaatgatagctgataagccaaaaaaattattaaaaaatctcataatgttttaagaaagtttatgaatttttgttgggctgcattcaaagccagtacaggttggaagagcttggtttaaagagtactggtcttttttctaggaagcaatta

SEQ ID NO: 203354 - DNA, 432 bp, Homo sapiens
aacagccacccacagtcagttagaaatctctctgttgtactcgcagattacatttttaatcaatcactttctcttctcctattcaatcagcaaatatccaagcaactattaattttcatatgaagaaaatgtaactttttcctgcttactttctgttgttttcacaatcacttctctactaagcatacagagtgactattatgaactaaactgtgttccccgaaaatcagtatgttgaarttttaactcccaaacagatggtggttagaggtgaggtctttgggcaacaataaggtttaaatgagttattgagagtgagaattagtacccttcttaaaaacagatcaaacaacttgctctctctatccacctatgagaacacagcaagaaagcacccatctgctagctgggaagagaggcatcaataggaat

SEQ ID NO: 203355 - DNA, 432 bp, Homo sapiens
aacagccacccacagtcagttagaaatctctctgttgtactcgcagattacatttttaatcaatcactttctcttctcctattcaatcagcaaatatccaagcaactattaattttcatatgaagaaaatgtaactttttcctgcttactttctgttgttttcacaatcacttctctactaagcatacagagtgactattatgaactaaactgtgttccccgaaaatcagtatgttgaagttttaactcccaaacagatggtggttagaggtgaggtctttgggcaacaataaggtttaaatgagttawtgagagtgagaattagtacccttcttaaaaacagatcaaacaacttgctctctctatccacctatgagaacacagcaagaaagcacccatctgctagctgggaagagaggcatcaataggaat

SEQ ID NO: 203356 - DNA, 442 bp, Homo sapiens
gtttcatgggctgggcccaggaccccgctgctctgtgcagtctcaggacatatgccctgcatctaagccactctagttccagctgtggctaaaaggggcttaggtacagctctggccattgcttcagagaatgtgagtgccaagccttggcagcttccatgtggtgttggacctgaagatatgcagaagcctagggtttgggtgcctctgcctagatttcagaggatgtatggaaacacttggatgtccaggcagaagtctgctgcaggggtatagccctcatggagaacctctactctagcagttcagaaaggaaattrgttggagtccccagaataccctctgggttattgcctagtggagctgtgagaagagggccaccaacctccagtccccagaatggtaggtcaaacttacagtttgcaccatgtgcctgaaaaag

SEQ ID NO: 203357 - DNA, 409 bp, Homo sapiens
aagatttacaagtgttgattgcatgttttaaacaatgttacttagaaaatgtgccatgtgttgttcatgatgttaaacagcaaaaatatattgtagtcagttagctttcaacaatttcattgtaattttatgtctcaaaagactgttattgtctttgtattatttgttctaaagaaagtgtgtatctgtatatgtgtgtrtatatatatgtatatatatatatcctaagaattacaaggattaagtagtcttgtgtttgatctgcacaagatgcttaaaaaaacttttttctgaatcattgagtgaatgaatggatttttaaaattattattatactttaagttcaggatacatgtgcggaacgtgcaggtttgttacataggtatacatgtgccatgatggtttgctg

SEQ ID NO: 203358 - DNA, 537 bp, Homo sapiens
tctgagataatttttgtgaaaggtttaaggtctgtgtctctayttactttttttgcatggagctgtctagttgtttcagcaccatttgtgaaaaagactatttttgctctattgcagtgcctttgcttctttgtcagaaatcagttgacttatttatttggttagattcctgggctttctgctccgttgatatatttgtctgttcttttgtcaacaccatactgtcctgattaccatagctgtagagtaagtcttgaaatctatagtgtcagttctccaactttattcttctccttcaaaatagtgttggcaattttggctcttttgcccctgcatacaaacttcagaatcagtttatcaatattcacaaaataacttgttggcaatggcactgggtctatacataaagatgggaaaaactgacatcatgaaaatatcgaatctatccatgcttatgaaatttctcctcatttaattagttctttggtttatgtaataggaaacttatctttgtttgttttccttatgtaaatttta

SEQ ID NO: 203359 - DNA, 537 bp, Homo sapiens
tctgagataatttttgtgaaaggtttaaggtctgtgtctctatttactttttttgcrtggagctgtctagttgtttcagcaccatttgtgaaaaagactatttttgctctattgcagtgcctttgcttctttgtcagaaatcagttgacttatttatttggttagattcctgggctttctgctccgttgatatatttgtctgttcttttgtcaacaccatactgtcctgattaccatagctgtagagtaagtcttgaaatctatagtgtcagttctccaactttattcttctccttcaaaatagtgttggcaattttggctcttttgcccctgcatacaaacttcagaatcagtttatcaatattcacaaaataacttgttggcaatggcactgggtctatacataaagatgggaaaaactgacatcatgaaaatatcgaatctatccatgcttatgaaatttctcctcatttaattagttctttggtttatgtaataggaaacttatctttgtttgttttccttatgtaaatttta

SEQ ID NO: 203360 - DNA, 627 bp, Homo sapiens
taggttgattctatatgttgactattttgaataatgctgcaatgaacataggagggtaaatatgtctttgagatactgattttgtttcctttggatatatacccagaagtagaattgctgaatcatatggcacttctatttttaattgtttgtggaaccaccatactgttttccataatggctgtactaattcatattcccaacaacaatgttcgagagttattttactttacattctcatcaacacttgttatttctttttttttwattgtagtcattttagcgggtgtgaagtggtatctcattgtggctttgttttgcatttcactgatgattagtgatgttgagccatttttcctacacctgttggcctttttatgacttattttgaaaaaaaaaaaggccaactcaaattgctagtttgtttgtttatttgtttgtttttggtactgagttgtttgagttccttagatgttttgtctattaaccccttatcagatgtatggtttgcaaatatcttcttccatatcataggattcctcttcattctgttgattgcttcccttgctgtgtggaagtttttagcttgatgcaatcttatttgtctattttctattgtgttgcctg

SEQ ID NO: 203361 - DNA, 518 bp, Homo sapiens
ttgtgctgatgccctgaacgtgatgaacggtacaattgttgccaagaaccctaaagcataaaacctataaaacctatccaggacatgctaagagatggtgaaattgttcttacaartgttagtgaacttgtattttcaaagctaaagtggttgaagttgcagaggccaggaaatccaggaaatgagcatttatctttgcagaattattgtatatcagtggtcatcttcttccctctcttattgaaaatatcattatttcccagagtaatgcttatctgcttttctctccttttctttttgcaaataggcaacaccttccactcacctcttttcccattatgtttctttgaacttagtagacacattatcgttaacacattgtagacccaacaaaaaaatactgcttactaaatgaagtaccacagaacagatatacatattttaaaaaaaagactttttgaaactgagatgaatatctagtaaatagaatcttggagtcagagtaggctatatatatc

SEQ ID NO: 203362 - DNA, 571 bp, Homo sapiens
attatagtcaaaatctttgccttgagttatgtttgtgatggcatctttttctctccaccaaaatgaatatatacagtgaagtcacttatatatttttttccaattgaaatatttataactttgtattagtcagggttctccagagaaacagaaccaatagaatacacacagacacacacasacacacacacacacacacacacacatatatatagagagatttattataagcaactggcacacacaattataaaggctggcaattaccaaatcctgcagtgtgaatcagttagctagagacctagaggagctatggtttagttccagtcagaatctaaaggtctgagaaccaagagacctaaatgtatagttctaatctgaagcctggcgggttcaagacccagagcaagccaatgtttcagtttaagtgtgaaagcagtaaaaaaaagccaatgtcccagttgaaacaccatcaacaggaaaaattctctctcatccaagggagggatggcagttttgttttattcaggacttcaactgattggatgaggtccagctgcattatggaagg

SEQ ID NO: 203363 - DNA, 571 bp, Homo sapiens
attatagtcaaaatctttgccttgagttatgtttgtgatggcatctttttctctccaccaaaatgaatatatacagtgaagtcacttatatatttttttccaattgaaatatttataactttgtattagtcagggttctccagagaaacagaaccaatagaatacacacagacacacacagacacacacacacacacacacacacatatatatagagagatttattataagcaactggcacacacaattataaaggctggcaattaccaaatcctgcagtgtgaatcagttagctagagacctagaggagctatggtttagttccagtcagaatctaaaggtctgagaaccaagagacctaaatgtatagttctaatctgaagcctggcgggttcaagacccagagcaagccaatgtttyagtttaagtgtgaaagcagtaaaaaaaagccaatgtcccagttgaaacaccatcaacaggaaaaattctctctcatccaagggagggatggcagttttgttttattcaggacttcaactgattggatgaggtccagctgcattatggaagg

SEQ ID NO: 203364 - DNA, 329 bp, Homo sapiens
cttgcttcttccagcttctagtggcttgaggtctttcttagctttgagctgcataacatcagtatgtatcttcatcctcacatggctttcttccctgtgtgtggtgtctcccctctgtttgtcccttattggggcattgtcattggacttaggcccacctggataatcaagaatcatcttatctttatattattaattacatctgcaaagaccttttctctaaatgagttcacatttacggattctgaggattatgtcacacacatctcttttgggggcgtggggcgcaacattcaggccactacaytgcttttatatttaattggctc

SEQ ID NO: 203365 - DNA, 454 bp, Homo sapiens
gctatctcagcttactgcaatctccgcttccagggtcaagtgattctcctgcctcagcctcctgagtagctggggttacaggcgcctgccaccatgccgagttaatttttgtacttttagtagagtcgaggtttcaccatgttggccagactggccttgacctcctggccctcaggtgatctgcctgcctcggcctcccaaagtgttgggattacaggcatgagccactatgcgaggcctagataataattamtttaaaaaaagaaagtctttctgtagttttcttatatcactagtttttatagggataagttttaatgaccattattttatttttcataatatctgtattataatattcactcacataaataaaatatgcagaaatttgcaaattggtgttttcttgtcccttcttaacaactgcataggacacttgcctggccccataaaa

SEQ ID NO: 203366 - DNA, 620 bp, Homo sapiens
tagaactctttctagtcttgacattcacaacttattaaaaaggcttagtttcttcccaaccaaaaacacaacaggataaaagaataaagaaaaagggtgttccctaactcagtcttaaaataattacacagaaaatgagttgcatacctctgggcttgtaaaataaagggaggcaaaaggaaaaaaaaataaccaagcacattctctttcttttaactgcatgagtaatatagtgtgttgaagaagaatatcattatatcctggcctgaagtattttttaaaattatgtrttattctcccctgattaaaaagtgagtatagcatgtgtgaaacagctttaaaatattgcagtaagaactttctcactccacttaaatagaagttatttcctccataaactcctcaaacaagttttactttgtagagacacttgaatgacttccttttcatcaacttaactaacgttatgccccagaatctgccattgcaaaccaaagtgcaatgatgatgcaaagaacatatgacaaaagaagttataaaatttggctctgcagaagatttacaacaaaaagcaggtagaattgacttaactgttctcaacatcttcggcaaaatccaca

SEQ ID NO: 203367 - DNA, 564 bp, Homo sapiens
ttcccaaccaaaaacacaacaggataaaagaataaagaaaaagggtgttccctaactcagtcttaaaataattacacagaaaatgagttgcatacctctgggcttgtaaaataaagggaggcaaaaggaaaaaaaaataaccaagcacattctctttcttttaactgcatgagtaatatagtgtgttgaagaagaatatcattatatcctggcctgaagtattttttaaaattatgtgttattctcccctgattaaaaagtgagtatagcatgtgtgaaacagctttaaaatatkgcagtaagaactttctcactccacttaaatagaagttatttcctccataaactcctcaaacaagttttactttgtagagacacttgaatgacttccttttcatcaacttaactaacgttatgccccagaatctgccattgcaaaccaaagtgcaatgatgatgcaaagaacatatgacaaaagaagttataaaatttggctctgcagaagatttacaacaaaaagcaggtagaattgacttaactgttctcaacatcttcggcaaaatc

SEQ ID NO: 203368 - DNA, 542 bp, Homo sapiens
aacctcaagtatgaaccaccatacctggctattttgtttgtttgttgttttgtagagatgaggccttgccatgttgcccaggctggtcttggctcctagactcaagggatcctcccacctcagcctcccaaagtgctgggattacagagccaccatgcctggccttttacttttggccctctattttcttcatcattaagctcccccttttgttggattatacccaccagcatgtacatatgccttgatatctttaatttttataaaatgccttttctttacccttkgcctaccaatttttaaaaatatatgccccattattacttttcctgcagtcacaatatatgtctttaatataacagtgcaccttcacagaattatactcagaggatgagaaggaagataaaataggacaggataaataaggtaaaagaaagatctcaatagctgagaactttcaaaatttctacaaaaatgattactaatatagccaggaaactcataaaatctgaaggaggggaaagctataacaaatatcttat

SEQ ID NO: 203369 - DNA, 564 bp, Homo sapiens
aaaataatgcctcctttcttttcctgactctggctttgagtaaaggtgctaatgagaactgtgggggagtgagcccctaaaatagagtcaggaaagaggagccaaccaggatggcacttgggaaaagttatgagcaaagacatgtttaaattggaattgtattagaaaattctaaaaatgtttgtgaggatacaaattgtataagacacaaagtatttctgagaaagaaatatagagaaaagtcaaaaagggaggttgtgaactgcatgttatctatttcaacatgcatttagtcagaattcacctgcaccaaacactgaatattaatataaaatcagaatgataatattgggcttcagatctggcctgctctactaataagttacaatgataagtattatgatgggtaggagaaaccagtgcattcttatcctataaaactaaacaataatcaaagtaaacaaggtgttaataaatgttttatcaccaggatattccrtatcaaatgtgaaaaaatcagtaatgactgtgaagtaatttcccagaaagaaaaaataattaaac

SEQ ID NO: 203370 - DNA, 560 bp, Homo sapiens
gggtgtggtttgtggtaccctccaagattataacagtaacagcaaagatcactgatcacagatcatcataacagatataataataattaaaatgtttgaaatattatgagaattagcaaaatgtggcgcagaaacatgaagtgagcacatgctgttggaaaaaatggagccaatagaactattctacactgtgttgccacaaaacttcaatttgtaaacaatgcagtatcttcagaatacaataaaatgaaatccaataaaatgaagtatatctgtatatggaaagaataaaaagaaccctaacaaatacagggctctaataactttgagtctatgcyattagtctaaatttccagaaatctaatttaaaacaaaactggggtcaaaaaactgctaacctaacattaagcaaaataagaattaattgtatgggattgaactgacaaaaaattataatttttaatgtgcttttgtttaaaacattgctcattattttttaattttccagatttaagttaactttgttttaacctatatataatttgcagcaatttggtaat

SEQ ID NO: 203371 - DNA, 584 bp, Homo sapiens
gacataatttttccaccttattttccatgttgtggccctgactgctattgtctatatttcaaactaataataataataataataccaaatgaaaatctttgagaaatatgtctttctttctccagtgcagtgaaaataaattaaaccaaatgtctcaactaagggaagctcatagtaatctccagtgaaagggtaaatattcttcagaaaacatattagtaagataacttttcagtcagcaatagttctagaagtattgatacaaaaactctggataccatggaggtttagtggatgatcctaaycaatttaaagtcagctaatgttttgtcctgagcagaagaaccaaccaacttaaaatatgacatttattcttgttttcttcctggccagaatctgatgtcaccaagttttgatatatttatcttcattcaacacatatttggatatttactatttgatgcatactattctaggaactcatgaattactggtaaatcaaagcctagtacctatcagcactttataaaaatccttcttctcttctgcaaacaaataaatagtagatgccaggtgtcagtaaa

SEQ ID NO: 203372 - DNA, 525 bp, Homo sapiens
ctaagtatcattatcatcccaaatttacagatgaagaaatggaagcccagaaagtcagaggaccaaagttactcaatctacaaatgtggcccccaaatacaaatatagatgccctatttcacagttttaatttttttgctggcagccactttgagaacacaaactccagaggcagagttctaatgtgtgaatcctggctctggccacttgatagttgtgtagycttagtgaagttgcttgctatctttgtgccttaccttcctcatctgtaatgcgagaataagaacattataaatataactccatatagacgtgttgtcaatattgtggtaacagcctagccatgtagaatactatgataacatttaatttttaaaatatcctcatcattatgcaggacagttctccatgtgaccttgtacctacctagttttcccactttcttgcttgtagttctcacgaataactgcagaaagttctgggaatgcagcctcctgagatacggagggactgcctgcaaaagcc

SEQ ID NO: 203373 - DNA, 525 bp, Homo sapiens
ctaagtatcattatcatcccaaatttacagatgaagaaatggaagcccagaaagtcagaggaccaaagttactcaatctacaaatgtggcccccaaatacaaatatagatgccctatttcacagttttaatttttttgctggcagccactttgagaacacaaactccagaggcagagttctaatgtgtgaatcctggctctggccacttgatagttgtgtagtcttagtgaagytgcttgctatctttgtgccttaccttcctcatctgtaatgcgagaataagaacattataaatataactccatatagacgtgttgtcaatattgtggtaacagcctagccatgtagaatactatgataacatttaatttttaaaatatcctcatcattatgcaggacagttctccatgtgaccttgtacctacctagttttcccactttcttgcttgtagttctcacgaataactgcagaaagttctgggaatgcagcctcctgagatacggagggactgcctgcaaaagcc

SEQ ID NO: 203374 - DNA, 498 bp, Homo sapiens
ttctgatccaccgccattctgatcaccaaacttttctaagtgacttgccacttgtctccaagtatataaagggtgattggtgggccttttatcattcattgtgctggacacatttggggacatgaaaatctcattttatgacattcaatctggggaawtttttttttttttttaatttcttcagttccattttctctttctatattgctaaatgtctatttagatattatgttttctgggtcaatgttctcaatttctcatttttgttttcctgttttctactgttttcttgttttttaccttctctgtgatttcattaatttatcatcatttttgactgttttgtaaatctaaaaaattctcctatcatgcatatccaagagctttttaaggtcactgaatgtgttttttgtttgctttgtttctatttttattttttatgtatgtatgtatgtatgtatgtatgtatgtatgtatgtatttattttgagatggaat

SEQ ID NO: 203375 - DNA, 541 bp, Homo sapiens
ggaggtctatcacacctattatcaaaggtgagcgttttgctaagtgctggtaccacaaggacatagatcagattctgttctaattctttcatatgtaagccaaagtggacgcatgtgacaagcataggctgttatttgtggtacaataaagttactaacatattgttataagactaaaagcattggtggattattttgccttgaaartcagaagagctctcacaaagtaatttcttgttcaattatgcatagaatgaaagcaactacatttgaacacattttcaacatgatttgaaaatactgatgttattaaatcatatctttacattttggggtaaggcttctttttttaaagagtcacactaaatattgtctcttgtcttgtttttaatgcaaggatcttcagaaaagttgttctttctctgttccaattatagttaaaagctatatggtcaacaaaacacacgaacagttattataatttgtattaacatatatgaatcattttaattacctactttgaagtatggatgcttttgta

SEQ ID NO: 203376 - DNA, 541 bp, Homo sapiens
ggaggtctatcacacctattatcaaaggtgagcgttttgctaagtgctggtaccacaaggacatagatcagattctgttctaattctttcatatgtaagccaaagtggacgcatgtgacaagcataggctgttatttgtggtacaataaagttactaacatattgttataagactaaaagcattggtggattattttgccttgaaaatcagaagagctctcacaaagtaatttcttgttcaattatgcatagaatgaaagcaactacatttgaacacattttcaacatgatttgaaaatactgatgttattaaatcatatctttacattttggggtaaggcttctttttttaaagagtcacactaaatattgtctcttgtcttgtttttaawgcaaggatcttcagaaaagttgttctttctctgttccaattatagttaaaagctatatggtcaacaaaacacacgaacagttattataatttgtattaacatatatgaatcattttaattacctactttgaagtatggatgcttttgta

SEQ ID NO: 203377 - DNA, 447 bp, Homo sapiens
gatattaaccctttatcggatatttgctttgaaaatattttctcccattctgtagctcgctttttcattttgttgactgttttctttgctgtgaagaagacactttctagtttggtgtagttccgctatattttttcttttgttatccatacttttcatgtcatattttaaaaaattattgcaaaaaccactgcacagagttttgtttttttttttaacctatgttttcttctaggagttttagggcatcgggtcttatattacactctttaattcatttccaattaattttaatatttagtgtaagataaaagtccaaattcatttttgcatctgaatatcttttccccaacatcatttatggaagagaataacccttccctatcatgtattcttagcacccttttcraagataagttcactgtgtatgtgtaggtttatttcttg

SEQ ID NO: 203378 - DNA, 588 bp, Homo sapiens
taatgcattttccacttaggatattttcaatttaggatgagtttattgggatgtaaccactctataagttaggaagcatctgtgtttgtcagatgaccaaacaaaccaatcccgacacctagctcctgggtgagggcatctcttaggcctaggtaatgacttgcacacttcattgcacacatgtctctgtgatggtccttaggctgtgcagtaattcctggcgctgccccataacacttcaagtgccttgtgggtaaggagggtgaactgtcggggagggagtggaatcgggtttgggggttgtgtgctagacttggaatgaccagcttagaaccctggctccactaggaactctgcaccttggggcaatgttcttaatctactcaaacctcattctctttctctccacgagggactggtaatttgcatggagctactcggaggattaaccgtgattacccagagaaaggacaccttgcctgggccgtttcargtactccacacatgttccttgatattattgatctcattcttgcaacatcagcatctgtcctggtgggtgctcaagtaaatattttatgactgaaa

SEQ ID NO: 203379 - DNA, 274 bp, Homo sapiens
aggagattccatttccaaccagcaatcaccagcgactcacatctgcccgactggrggagtgggacatggggcacacgaggcaagcccacacaagccttgctgcgtgctttttctccagagccctttttctgactatagggtcaaaaataacacctgaagcgcctggcccagagcagcagtgcttcgctggcaataggcattcgataaatgatgtttttttctcttgggccttatctgcaaaattattaagtaagcttttattgtctgccaacca

SEQ ID NO: 203380 - DNA, 532 bp, Homo sapiens
caaatgagtagagaaacaggcctagaacccagatcttcggctctgaacatggttttctttcctttatttcatattactgccttagtataaaatgttcctcataagataactgaaaatttgcaggtaacaaagtcttgaatcttgaagacaatttttaaaaagtagggcacatagataaatggaatcagaaaacaaaccatgtaaaacagcttgcacgccatctaacagatctatcagggccagacttgcacctgccatctttcctctttcccttttcctcatggctctctgcaaaagacacactgagtatgtatggagagtgtttmggaattaaattagtgagaaaggtgtgtgtgtgtgtgtgtgtgtgtgtgcgtgtgtgcgtgtgcgtgtgtgtgcgtgtgtgcatgcgtgtgtgtgtgtgtgtacttttttaaaaaaagaatatgaaaacaaacctttttatgcatttaaggttattcatttaggatagcatcagaaatattttctgaaaaagctcagaaaaaaaaga

SEQ ID NO: 203381 - DNA, 490 bp, Homo sapiens
tccttcccccttcttttcatttcattcccccaatattgtcatccgtatcacaactatatgtgttgtaaattcaattttactgaattatagctattgcttatgctttttttgaataaattaatagatgaaattaataggtgaatttctttttttaaagaaattaatagatgaataaaagtgcatattctggaatttttcattcgtactgtggatccaggtaatcatamagtatcatctcctttcaaccttaaggattttagtatttcttgtaggtcaagtatgctggcaatgaattcctttagcttttgtttatttggggaaatttcttcatttcacttttaacttttgaagaataattttactgggtatagaattcttgattgacaatttttctttcaacattttgaataaatcatccacttctacctggactctcttgtaaccatgaattgtttcattgtatatgatgagttattttttctttgttttc

SEQ ID NO: 203382 - DNA, 542 bp, Homo sapiens
tcaatcttgtcactccaaaagaacacacggctggtatttatgagaaacatatggctttgggccggacaccaggggagtgaggcttgctcccaaaatagccccttatctttactccaccattagggaaatagcaaaacctcttgttcttaatacttctagatgtgagtcaagaacaaggttcagggaacacatgcatgtctcttggatggactttttataggccttcttcattagctgctatcatttaaatgtgtcccctccaaaattcaagtgttaaaacttagtggccattgtgataatattaagaggtggggcctttaagaggtgattaagccatgagggctcctctttcttgaygggattaaggaccttctaaaagaggctttatgctacattcagctcttgcccttctgtcttccaccaagtaaggacacagcattcctcctctctggaggatgcagccacaaggtgccattttggaagcacagagcacccctcaccaaacaaccaaacttgccactgccttgatcttgaagcaccca

SEQ ID NO: 203383 - DNA, 493 bp, Homo sapiens
tgtttttgcttatgcaaacgtaagagattgtcattagcattctgaatttttctaactgatgtgtttttgcaagagtttggctagaaatatgattaagatatgtcccagctgggcagcttcttccactgcagcttcattcaatagccacaaaggggatagaataggctttttgtgattgtttttcacayagttggaaacatttcaaagcatcagatcttttttttttaagcaaactctgctttatttgcattccatctatttccagtgcataaggagcattgtaaatgtatgctttcaaagttaaaagtgtaaaataaaaagacatatcttctattttttaaaagactcaggatttgcaaagaatttacatatcactgacaatactgatgggacacattcaaaaggagaattgaggaagtaattctggtaaaacaggaagtttttctaggctgataatgaagtgtaacactttctccttgactgttggaaaaac

SEQ ID NO: 203384 - DNA, 537 bp, Homo sapiens
caaaagtaaaactaaaaagtgatgagtagatctgagatacaaagacagcagatattggcaaagatatggattgaaactctgggagtggagatggtgcctgaaggggaagagttgccagcaactaggggtcaggacaaagatgaggatccagcaaaggaggctcaggaggagaaactggaaaagtgttaagaaagtcaagggaatgtggtgtcacagaggcaaggcaagagtaaatcaagacagaggggccagtgttcaatagtggtaagttcttctgataaggctagtacaatgataacttgttgttcactgggttcagcaccaagaaggtaactctagtgagagctgttttggtggaattacaagaaagaaccagatttcagtgggttgaagaaggaatgaaaaatgaagtgragacagagcatagacagttatgtcaagaaattcagcactgaacagaaggagagaaaaatgtcagtatctggaggtgtatgtgggcttcagagagtcttttataaattgaaagaaactgaagca

SEQ ID NO: 203385 - DNA, 565 bp, Homo sapiens
gttatgctcttcctgctttttccaagacactctgcctctctccagatcctccagctgtcctctcctttcagctccactctcacctcaagcttttgaaaacaaaggtcaggaacagaagaacttggagatggctctgcttttagcccagcctcaaaccacctccaggctggagtaagagcagcttctctgggtttgagcaggaggccagagatatagaagaaaaaaatttgtatctcaaaatatccttgtcatgcataaagattrtaatgacaaaaaatgatagaaggattgcaaacatcaaaattatttaatagtggggatataatcttgtaccaatcagtagaacagattttgttttcaaacattaccataatttaatcctcataatagtctttgaatataatgtaataattaggaataattttgaagacaaggcatcagcctggatacattgtaaagaccaaaagtcaccaacaaaaacgaaaatatctgatgtgtttgggtggtggaattttgtgtcaattatttttgtaacaaggattatgtaacatcatggaaaagaaat

SEQ ID NO: 203386 - DNA, 588 bp, Homo sapiens
ggggtaagttcctatctgggcaggaataatgtttcagcacaacagctaagtgggcaaaacttcctcttattcagccttttggttccactcagatcttcgattggacaaggcccacccacaytggggaaggcgatctgttttactcagtctatcaattcaaaagttaatctcactcagaattgcccacaaagacacatccagaacaatatttgaccaaacgtctgggcaccccatggcccagctgagttaagacataaaattaatcactacagagctttcagcaatcccctctaagtaactgatatatatctttactgattttctgtctagctgttataagacttgagcaaaattatcaaacaatttgacctgacatttccttctattagctgccagatatgttccatataaaggagtcagactggcctaaacacaaagtggtggtaacagggctaccaggtaggttagcctatcagtaacttaaagcacagccagacgcagtgatgggaacagtaggaatgagagctaggcataagcccaggtaagtggctcatgcttattttagtgatcagggccatatcttgtgca

SEQ ID NO: 203387 - DNA, 588 bp, Homo sapiens
ggggtaagttcctatctgggcaggaataatgtttcagcacaacagctaagtgggcaaaacttcctcttattcagccttttggttccactcagatcttcgattggacaaggcccacccacattggggaaggcgatctgttttactcagtctatcaattcaaaagttaatctcactcagaattgcccacaaagacacatccagaacaatatttgaccaaacgtctgggcaccccatggcccagctgagttaagacataaaattaatcactacagagctttyagcaatcccctctaagtaactgatatatatctttactgattttctgtctagctgttataagacttgagcaaaattatcaaacaatttgacctgacatttccttctattagctgccagatatgttccatataaaggagtcagactggcctaaacacaaagtggtggtaacagggctaccaggtaggttagcctatcagtaacttaaagcacagccagacgcagtgatgggaacagtaggaatgagagctaggcataagcccaggtaagtggctcatgcttattttagtgatcagggccatatcttgtgca

SEQ ID NO: 203388 - DNA, 606 bp, Homo sapiens
gaggaagagcacattgtcaaactaaataacgagaaagagagagaggtactcctatttaaaaaaaaaaaaaaaaagatatttattcattcaggagcatggcattgcaacaggaatatgcatgccatagtaaactatgtgcatattcatggaggtaaaaaaagactaaggtttccaaaggaaaaatgaggaggattacacatcattatcttcggctacaaagatcaataataagggtgatgccagtccaagtctggacagacagytgttgggcagatgtcctcgcagaagcattttttatgtaaggctgtgatggcctttgtgtaaagttgcagtttctgtagagtctgagatagttttgttattaagcatacaagcataagaactctatagccttttccggctctatttgtcagggattttttataacactagtgactcagttttgattttgacgacattcaggcatgaaggaggcacatatgccatcttaacaccttcctggtaggacccatgtcacttctactcatactccactagagagaacttattctcatggccacatataatgccaagatggggctgggaaatgtagaccctggtttggaa

SEQ ID NO: 203389 - DNA, 606 bp, Homo sapiens
gaggaagagcacattgtcaaactaaataacgagaaagagagagaggtactcctatttaaaaaaaaaaaaaaaaagatatttattcattcaggagcatggcattgcaacaggaatatgcatgccatagtaaactatgtgcatattcatggaggtaaaaaaagactaaggtttccaaaggaaaaatgaggaggattacacatcattatcttcggctacaaagatcaataataagggtgatgccagtccaagtctggacagacagctgttgggcagatgtcctcgcagaagcattttttatgtaaggctgtgatggcctttgtgtaaagttgcagtttctgtagagtctgagatagttttgttattaagcatacaagcataagaactctatagccttttccggctctatttgtcagggattttttataacactagtgactcagttttgattttgacracattcaggcatgaaggaggcacatatgccatcttaacaccttcctggtaggacccatgtcacttctactcatactccactagagagaacttattctcatggccacatataatgccaagatggggctgggaaatgtagaccctggtttggaa

SEQ ID NO: 203390 - DNA, 418 bp, Homo sapiens
aagcttacagctcctgccacactcccatgagggcagtgactttgccttattcctcctccacatatccccagtgtccaatagagtgctcagtaatttcaaccctcttaccacctccaaggccaccmttaatgcactcacagtgccaaccccaatgatgtatactcccctttctgattaattctgtcccttaatacttactattacctaacacattatatatttcatttttttgatttgttacatttctatctcccccactaggatgtaagtttcatgaaggtaagaaattctatttgttggtgtccctatcttatctttagcacctagaagaatgtctggcacattagagttactgaatagataattgtcaaatgaaagactaaacatagcaacccttttcctttgaaggctaacctgt

SEQ ID NO: 203391 - DNA, 565 bp, Homo sapiens
agaaataatttctgggcacaagagtagaaagagaagctttggaatcaaagaacgggaatcaaatctttgtttctaccactttgaagtccaaaagtactgcaatttcatctctacatggtgatagtgatacctatgctacagggtggctgagaaaataaaattatttgactttttgtacacaaaagcatttctgggcactgtgctaagaattcacggtgttatttctttttctttttgcggtgttatttctagttaaaatattcaaccaatatataatgagtagggtagaaaatagacctgatataggtgaaatctctatatgyccctgtaattgtaattaaggccatcttgggaataaaatgttataacactgtccatatgatttcaaattgtgctctcaattttctaccccaggaaaaaagcacatgattgcacatcaaaaaacttctgctcagtggctaagtttcagattagagttaatttcaaggttgattggaatgtcagagttaatgattttgtccccaaaaacttggaatttgtaattatcctaaagactgtaaacagc

SEQ ID NO: 203392 - DNA, 608 bp, Homo sapiens
tttgctttcaaatttcatacagaacactgtgtgcaaatgattacataattgcatttgttaatgtcttcaggagatggctggtgggtgagtgcccatggactagagtgcccaagctgagagggcccttggggctcatccatcaaattctctatcttgcagatggggagactgaacttcagctaagtgtagtgacttgctcaggccacatagcaaactggtgtcttaattaaaaggtttgggctrggcgcagtggctcacgcctgtaatcccagcactttgggaggccgaggcgggtggatcacgaggtcaggagatcgagaccatcctggctaacacggtgaaacctcgtctctactaaaaatacaaaaaattagccaggcgcagtggcaggcgcctgtagtcctagctactcaggaggctgaggcaggagaatgtcatgaacctgggaggcagagcttgcagtgagccgagatagcgccactgcactccagcctgggcgaaagagcgacactccgtctcaaaaaaaaaaaaaaaaaaaagtttgtgtccatttctggtaccagaagtgtacaacctaagaagcttgaagggagggcacattccattaa

SEQ ID NO: 203393 - DNA, 608 bp, Homo sapiens
tttgctttcaaatttcatacagaacactgtgtgcaaatgattacataattgcatttgttaatgtcttcaggagatggctggtgggtgagtgcccatggactagagtgcccaagctgagagggcccttggggctcatccatcaaattctctatcttgcagatggggagactgaacttcagctaagtgtagtgacttgctcaggccacatagcaaactggtgtcttaattaaaaggtttgggctgggcgcagtggctcacgcctgtaatcccagcactttgggaggccgaggcgggyggatcacgaggtcaggagatcgagaccatcctggctaacacggtgaaacctcgtctctactaaaaatacaaaaaattagccaggcgcagtggcaggcgcctgtagtcctagctactcaggaggctgaggcaggagaatgtcatgaacctgggaggcagagcttgcagtgagccgagatagcgccactgcactccagcctgggcgaaagagcgacactccgtctcaaaaaaaaaaaaaaaaaaaagtttgtgtccatttctggtaccagaagtgtacaacctaagaagcttgaagggagggcacattccattaa

SEQ ID NO: 203394 - DNA, 609 bp, Homo sapiens
ttgctttcaaatttcatacagaacactgtgtgcaaatgattacataattgcatttgttaatgtcttcaggagatggctggtgggtgagtgcccatggactagagtgcccaagctgagagggcccttggggctcatccatcaaattctctatcttgcagatggggagactgaacttcagctaagtgtagtgacttgctcaggccacatagcaaactggtgtcttaattaaaaggtttgggctgggcgcagtggctcacgcctgtaatcccagcactttgggaggccgaggcgggtggatcacgaggtcaggagatcgagaccatcctggctaacacggtgaaacctcgtctctactaaaaatacaaaaaattagccaggcgcagtggcaggcgcctgtagtcctagctactyaggaggctgaggcaggagaatgtcatgaacctgggaggcagagcttgcagtgagccgagatagcgccactgcactccagcctgggcgaaagagcgacactccgtctcaaaaaaaaaaaaaaaaaaaagtttgtgtccatttctggtaccagaagtgtacaacctaagaagcttgaagggagggcacattccattaaca

SEQ ID NO: 203395 - DNA, 608 bp, Homo sapiens
tttgctttcaaatttcatacagaacactgtgtgcaaatgattacataattgcatttgttaatgtcttcaggagatggctggtgggtgagtgcccatggactagagtgcccaagctgagagggcccttggggctcatccatcaaattctctatcttgcagatggggagactgaacttcagctaagtgtagtgacttgctcaggccacatagcaaactggtgtcttaattaaaaggtttgggctgggcgcagtggctcacgcctgtaatcccagcactttgggaggccgaggcgggtggatcacgaggtcaggagatcgagaccatcctggctaacacggtgaaacctcgtctctactaaaaatacaaaaaattagccaggcgcagtggcaggcgcctgtagtcctagctactcaggaggctgaggcaggagaatgtcatgaacctgggaggcagagcttgcagtgagccgagatagcgccactgcactccagcctgggcgaaagagcgasactccgtctcaaaaaaaaaaaaaaaaaaaagtttgtgtccatttctggtaccagaagtgtacaacctaagaagcttgaagggagggcacattccattaa

SEQ ID NO: 203396 - DNA, 533 bp, Homo sapiens
cagttatgggggctggtaagtccaaaatctgcagggcaggctggaagtccggaaattcagctatgagttgatgtggtaatcttgagtctcaaatccatgggacaggacagcagcctggtaactcagggggagtttctgtattacagaaagttggcacataaaattaactattaaaatagtctttttcccccctatttctcatactttctsagacttaggtgagctctaaaggaaagctttcttaagttctcttagagtcagttgctgatttagagtgcacgtaaagactggcataggggctgggacttaggagactcctgagtaatgaatgtggcagacaggatccatctatggaggatttttggttaggatctttcttaaaggactggatctttagcgctcttaggaaaaggtctgagcatccagcatggctcctaagtcccttcactgtagggcctttgcctatttgtgcagcatcccgatgatcactcctctgcattctcaatgctcccactgcagagacatgtcatgtt

SEQ ID NO: 203397 - DNA, 530 bp, Homo sapiens
gcatgctgtccctagatacaagaccataaggagtccttatttggaatttcaagtgcatcaagttacttgttctgcttatccctttcctgccttgacctgtttttgatattcggactctgctcaccttcctaaaaaattagccttagtgtgtgtttctgataccacattttggtaacttttttgggggggaatccagttaaatccaagcctaaagtctttttttggctcttcccctaatcttagaatccgtaccttaatcactgttcccccatccatttaacagatctccctccagctgattgagagatgtggctaaaagacaactcagtctgtccctggctccctttttctactgctggacmtttggaggtgcttctcttctgctaggactttctcctattgccactgactgactccagccccagcactaccccatcctttccactctgggaatggacatgtgtctgatggacccgagtctcacccacatcctgctgaggccaggaaccagctcacctagtcatgtgcag

SEQ ID NO: 203398 - DNA, 530 bp, Homo sapiens
gcatgctgtccctagatacaagaccataaggagtccttatttggaatttcaagtgcatcaagttacttgttctgcttatccctttcctgccttgacctgtttttgatattcggactctgctcaccttcctaaaaaattagccttagtgtgtgtttctgataccacattttggtaacttttttgggggggaatccagttaaatccaagcctaaagtctttttttggctcttcccctaatcttagaatccgtaccttaatcactgttcccccatccatttaacagatctccctccagctgattgagagatgtggctaaaagacaactcagtctgtccctggctccctttttctactgctggacatttggaggtgcttctcttctgctaggactttctcctattgccactgactgactccagccccagcactacccyatcctttccactctgggaatggacatgtgtctgatggacccgagtctcacccacatcctgctgaggccaggaaccagctcacctagtcatgtgcag

SEQ ID NO: 203399 - DNA, 594 bp, Homo sapiens
ggcacaagggagggcaacctgattctttaaggtgatgggggaggcttgaggaaaaccatctggaggaagtttcatctcagctacctccagatggttttcttcctggagaaagttgtgctctccaggatttaggcaaatggagtggggaacaatagggagagtgttccaaggtgagatgaccacatgggcaaaggcctgcagataacaagcgtgtaactcttgaagaactgaaagagactcagtctggaaggttcccaacactttcacaccatgagcaccttaaaatctacggaattttgtcaaactgccagattggggaggtagtcaggaggtctcatctgagaagaaagtccctttttgagcagtaaggtagctgtgaacctccgcatgagagaagcagaaagacaggtctgagtgaggccttttggaacccttgtctgctgttagccttgtatttccaggttgctccatcaaccttgctggtagatttccaaaaggtgyctcttgatgtgtggcttctcccatatcctcttgcataatggttgaagagaaactgactacagttttaaaaacagaataaactgccccgctgag

SEQ ID NO: 203400 - DNA, 387 bp, Homo sapiens
cttcactgccattgcttcatcctttctcatcccctgactaacctactcgtcctccttccgccttctggttcatcmacagcattgccacaaattgatctttccacaaagctgaccaaatcatctcactctgctgtttaaatccctctgtgactccccagccccttcagaacaaagtggtacaaagttgtctttggcctggctgctgcccacactcaacctggagcctgtcagggtgtagcactgtcatccctgtacgtgcgccatccctttgctcctaacctcttcctgtcctccctctgccccagccaggccagcaggattctgccgaaccatcgcccattcttaagaaccctccagggaaccctcccgcttgagtttaaagaattc

SEQ ID NO: 203401 - DNA, 314 bp, Homo sapiens
ctttctttcttatcatgatccaggggttgtatagtgtcaaggggccagctgggccagagtcctctacattctgaggtctgcctgcagtgagtgtgcaaaatactctaggctacaaactaatctaaacaaggcaaagacaccggctgctttactttttctttcttttttttttttttttttttttttttttttttgctatttcacaggttagttgtaraaaccagctcttctgttcttagaagtcattgctgataagctaaataaggcctggtgctgattgcggaaaatactgttcattagtgccattgaaacaa

SEQ ID NO: 203402 - DNA, 663 bp, Homo sapiens
ccttggtaaatatgccaagttttcaattagggcatcttaaaagtccctaccctagaaacagggacaaaagttaaaatggaatgagccttaaacaactgaatacacatctctccacctttattctatatgataatttccctcaaaaacagaatggataaataaatacattgtggtacattaatacaatggaatactgtataaccataaaaaataaactctcgcatacacmatgtgtatgatctcacatacattatattgaatgaaagaagcttgacaccaaagagtacatacttttcaattctacctataaaaagttcaaaaaagggaaaataatctgtggtgatagagatcaccacgatgcttaatttatgaaattaatgattgaaaattattaagtcacttttgagattttggattgctagtaatattatgtaccttgatctgggtggcatttacatgagttatttacaatgtgaaaagaagtttgaagtatacagtttagatttgtgtacacttctctgtgtattaaattttaataaaaagatttactcagaaaacaaaaatacacataaaaaattctgaaagaaaaagcatcaaaatttcaggaacattgaattttttttggtctcaaatcaatgataatttcttttttaaaaaagaaat

SEQ ID NO: 203403 - DNA, 546 bp, Homo sapiens
gttagtttaaaacttggttgccaagcattttaatcatcgataatctatactacaaataggattatcactgatcaactattgaaaaaattataatggcaacaaaatttaaataatggaacaatgtgctttttttccctccagaaacttttctttagcttactccatggaaatcatacattgcttttttcagttgactcatttgctctgttaacatgattccataggaaacaratttatttattaccaaaaataacagccatgttattttagcatgaatgcccctgcagaacctagctttcccaaagaatttttttaatgagaacatccaaagtatttctcacttgattaatcaaacatgcaatctctgaactatattcatagttttccagtataatgctgtgtttcaaataatgcctacattgagtacttaaaattagtgtattcatttatttattatacaatcatttaataagcacctactctgtagcagtgtgtcatgctgtagctatgaagactgattagtcttgcttctttatctcaaagagt

SEQ ID NO: 203404 - DNA, 509 bp, Homo sapiens
ctcaagatctgatggtttttaagcatttggcatttcccctgtttgtactcactccatcctgccacactgtgaagaaggtgcctgactctcctttgccttctaccatgattgtaagtttcttgagacctccccagcaatgcagaactgtgagtcaattaaaactttttcctttataaattacccagtcttgagtatttattcatagcagtgtgagaatgcactaatacargagtaaaaaaataaattaattaacaaaagaaatcctagaactagcaattgattatactaaagttgcaggatataaacttaaaatacacaagccaattgctttcctatataccatcaaagaacagatgaaatatgaattttaaaacacaataccagttacattagcatcataaaaagacatacttttgccaacaaatatgtacaaaatttatataacaaaactaaaaaattctgttgtatgaaatgaaagaactaaataaatggagacatatctcatgttc

SEQ ID NO: 203405 - DNA, 402 bp, Homo sapiens
aaaaccacaatgagataccatctcacaccaagatcaaagagttggactaccattcaactcagcaattccattattgttcatatacccaaaggaaaataaatcattctaccaaaaagacacatgcacttgtacattcatcacagcactagtcacaagagcaaaaacatgaaatcaaaccaggygcttatcgataatggggtaaagaaaatacatcatggtataccatgcagccataaaaaaaataaaatcaagtctttgcagcaacatggatttagctggaggacatagatattctaagtgaactaatatggaaacagaaaaccaaataccacatgttctcagtgggagcttaacatggggtatgcatggacataaagatgggaacaattacactggaaacga

SEQ ID NO: 203406 - DNA, 402 bp, Homo sapiens
aaaaccacaatgagataccatctcacaccaagatcaaagagttggactaccattcaactcagcaattccattattgttcatatacccaaaggaaaataaatcattctaccaaaaagacacatgcacttgtacattcatcacagcactagtcacaagagcaaaaacatgaaatcaaaccaggtgcttatcgataatgggrtaaagaaaatacatcatggtataccatgcagccataaaaaaaataaaatcaagtctttgcagcaacatggatttagctggaggacatagatattctaagtgaactaatatggaaacagaaaaccaaataccacatgttctcagtgggagcttaacatggggtatgcatggacataaagatgggaacaattacactggaaacga

SEQ ID NO: 203407 - DNA, 402 bp, Homo sapiens
aaaaccacaatgagataccatctcacaccaagatcaaagagttggactaccattcaactcagcaattccattattgttcatatacccaaaggaaaataaatcattctaccaaaaagacacatgcacttgtacattcatcacagcactagtcacaagagcaaaaacatgaaatcaaaccaggtgcttatcgataatggggtaaagaaaatacatcayggtataccatgcagccataaaaaaaataaaatcaagtctttgcagcaacatggatttagctggaggacatagatattctaagtgaactaatatggaaacagaaaaccaaataccacatgttctcagtgggagcttaacatggggtatgcatggacataaagatgggaacaattacactggaaacga

SEQ ID NO: 203408 - DNA, 626 bp, Homo sapiens
ccataaaaaagaatgagattatgtcctttgcagggacatggatggagctggagaccattatccttagcaaactaatgcaggaacagaaaaccaaatacagcatattctcattagtagaagctaaatggtgagaacacatggacacgtagaggagaacaacatacatggtggcctttcagagggtgaagggtgggaggagggagaggatgaagaaaaataattaatgagcactagacttaatacctgggtgatgaaataatctgtacaacaaacccccatggcataagtttacctatgtaacaaacctgaacttgtacctttaacttaaaagttaaaaaaataaagattaataggctctaatttcatattatgcatcctttgctaacacatgagtaaatttttctcaacttgaaaaaaaaaagtgaagtggcataaccactttggaaaatattttggcagtttctttaaatgtaaacatatacctactctatgatacaactatccaactcctaagtattaacccaagaaaaaaaatgaaatgatcmaaatgtgcatcaacaaataaatggataaacaagcagtggggtatccacacaatgaaataccacgcagcaaatagaatggaa

SEQ ID NO: 203409 - DNA, 551 bp, Homo sapiens
acatgcgagggatctaggctgcatgcttcttatcatctcatgcttgatgatctaaggtggaacagtttcaacccaaaaccatccctcttcttcatccatggaaaagctgtcttccaaaaaactggtccctggtgccaaaaaagttggggactgctggtgtaaactataacgtatatgcttggtcaagcaatatcagcagagcactccagcctgggcaacacagtgagacccagtttcttaaaaaagatgctctaaatacrtcaattatattcatcttcactgaaactctgtgacattgatattataaccccattttacaagtgaggaaattaagacactaagatcacacaactaatgtgaaagtccagtgtttttctagaacactttaaaattttaaattaagtttaaaaaaaaatcttgttcatgtcactctttgattcaattttacttgacagtacactctccgctggaaaagccccacctaaggaatccctgaactgtgctatctcaacactgtcaccctggcaccagcaagtcaagacaaaccaccc

SEQ ID NO: 203410 - DNA, 551 bp, Homo sapiens
acatgcgagggatctaggctgcatgcttcttatcatctcatgcttgatgatctaaggtggaacagtttcaacccaaaaccatccctcttcttcatccatggaaaagctgtcttccaaaaaactggtccctggtgccaaaaaagttggggactgctggtgtaaactataacgtatatgcttggtcaagcaatatcagcagagcactccagcctgggcaacacagtgagacccagtttcttaaaaaagatgctctaaatacgtcaattatattcatcttcactgaaactctgtgacattgatattataaccccattttacaagtgagraaattaagacactaagatcacacaactaatgtgaaagtccagtgtttttctagaacactttaaaattttaaattaagtttaaaaaaaaatcttgttcatgtcactctttgattcaattttacttgacagtacactctccgctggaaaagccccacctaaggaatccctgaactgtgctatctcaacactgtcaccctggcaccagcaagtcaagacaaaccaccc

SEQ ID NO: 203411 - DNA, 654 bp, Homo sapiens
ctatattaaatagcaaaattaccacctatccctattataccatgggcacattaaaatagaaaaacatgatttcatatatatataaaactagtaatcaagtactaatagattacctcaagaatttttatgggtacaaaagtgcccttgaaatcagtgggtgttttgttcaaggaaagaagaaaaagaacatagtcatgttccctagtttgaaaatgaaatttttgtttcattactggtacctattgctgggtttcattcaacaagcataggcatgccactgcttgcagttcctataaaccttgagagctaggaggctgaagggacgaaaattccagaaatgggattcagagactgtgttctacatactgttaagtatacaggggctttttacacaatattagtccattcatttgtatagtggaagctactgccttactcaaaaggtggccatgaatattaattgaactaagacacaagtaaagtgcctggcasaaagtagctgtccaataagtattaatttcactatttctaccacctttaacatctcaagaccttatacagcatagggttcaatgaaacacccactttagtcaaaccccttaaatgaaagatcacaaaacaaaatactcctagaccctggataaatgtgaacca

SEQ ID NO: 203412 - DNA, 568 bp, Homo sapiens
aggtgtggttaaaatgcatgttttagagtcagagagtatggcttcaaattctggttctgcaacttacaggctgtgtaaactcaggcaagttacttaacatttcaaagcttctattttctgaactgcaaaatgcagatgataaaaatactttattagaattgttgtgagaataaaatgagataaatccacataaaatgtttgaaaagtacactctacatggtgctaagtgtgtgtgctaaatcaaactgagccgttatcaatattactatttttttaaaccataagtctggcttttagaaatgataatgagttctgaatcatagtatgcctctgaaatattrgaataaagtaacccagatcctgacactgcctgacacctgggagagattaggaggtagggtgccaatcagatatcacagctcagaaatgctttgtagcatgtcagaagttgagttcttccctcgcccccacttatttgtggcaggatcccagactccacctgctggtgcagataaggctcctgaaactcagttcccacattcctcaggattaacgcagagcctgtacc

SEQ ID NO: 203413 - DNA, 570 bp, Homo sapiens
attaaaaccactctaaaagatcaagcaaagaaatcttcagctttgattaatcraactattcaaaattcaatgatgttagacagggaaccttgacccattcagccttaagccagaagctatgcattcttttacctcgctccaaccttaagactgcagcaaattcatttaactctactttagtcacataaaactgaaatttatgaaaagttcaacctgtcatttccctaggaatgcctcctgatgaacgttcattgatgactgattgatacaaaccctttgtgggggaaaagaaagatggcatactgaaattacgaacccctgaaggaaactatgatagtagatccagcatgaagtccattttcatgatctactaaattataaaggaaatgaatattaatttcagtaattgtggtaacaaagtaacaaggtaattgccttgtgcgagggcaagatgaaaattatatatcatttcatggaaagaatgaaaaaggtatgaatatatttttaaatcattgcctaggtaattaacaaatataatgaaagcatttcaccttctagcaactgatagga

SEQ ID NO: 203414 - DNA, 570 bp, Homo sapiens
attaaaaccactctaaaagatcaagcaaagaaatcttcagctttgattaatcgaactattcaaaattcaatgatgttagacagggaaccttgacccattcagccttaagccagaagctatgcattcttttacctcgctccaaccttaagactgcagcaaattcatttaactctactttagtcacataaaactgaaatttatgaaaagttcaacctgtcatttccctaggaatgcctcctgatgaacgtwcattgatgactgattgatacaaaccctttgtgggggaaaagaaagatggcatactgaaattacgaacccctgaaggaaactatgatagtagatccagcatgaagtccattttcatgatctactaaattataaaggaaatgaatattaatttcagtaattgtggtaacaaagtaacaaggtaattgccttgtgcgagggcaagatgaaaattatatatcatttcatggaaagaatgaaaaaggtatgaatatatttttaaatcattgcctaggtaattaacaaatataatgaaagcatttcaccttctagcaactgatagga

SEQ ID NO: 203415 - DNA, 463 bp, Homo sapiens
tttattcctcagtggagagtctgaataatgcatcacagtgtccaccataattgctgccctcaaagatgtagtacaaggtctgaaccagcaaacaacacatagtttctaggaattttctagtttaagtgacttccttcactattatccctaataagctacttgtaaaatgtttgctttaaatatcccaacatctctgtgccctgctgttttcattatcttggtccccatgaaaggaatgcttccaccgggaagcaattctttctgttaacaatracgaaaattattaacttattttttaactagaggccgagattactacttggccacatttgattctttatgccactgagttagcaaaaaaggaggttaccatatttctggggtaattgatactggtaattaaggaaaaactgtgttgcttctatgcaatggagagagggagaagtaaacgtggaatctgcta

SEQ ID NO: 203416 - DNA, 463 bp, Homo sapiens
tttattcctcagtggagagtctgaataatgcatcacagtgtccaccataattgctgccctcaaagatgtagtacaaggtctgaaccagcaaacaacacatagtttctaggaattttctagtttaagtgacttccttcactattatccctaataagctacttgtaaaatgtttgctttaaatatcccaacatctctgtgccctgctgttttcattatcttggtccccatgaaaggaatgcttccaccgggaagcaattctttctgttaacaataacraaaattattaacttattttttaactagaggccgagattactacttggccacatttgattctttatgccactgagttagcaaaaaaggaggttaccatatttctggggtaattgatactggtaattaaggaaaaactgtgttgcttctatgcaatggagagagggagaagtaaacgtggaatctgcta

SEQ ID NO: 203417 - DNA, 463 bp, Homo sapiens
tttattcctcagtggagagtctgaataatgcatcacagtgtccaccataattgctgccctcaaagatgtagtacaaggtctgaaccagcaaacaacacatagtttctaggaattttctagtttaagtgacttccttcactattatccctaataagctacttgtaaaatgtttgctttaaatatcccaacatctctgtgccctgctgttttcattatcttggtccccatgaaaggaatgcttccaccgggaagcaattctttctgttaacaataacgaaaattrttaacttattttttaactagaggccgagattactacttggccacatttgattctttatgccactgagttagcaaaaaaggaggttaccatatttctggggtaattgatactggtaattaaggaaaaactgtgttgcttctatgcaatggagagagggagaagtaaacgtggaatctgcta

SEQ ID NO: 203418 - DNA, 620 bp, Homo sapiens
tgctgaattttcagttaaacctttttttctgcatatggtgattttattctccacacaacttctacttttcattgctattatgaaaagcatattctgtatgaaatttttccagcaatgttcttttatgaaacagccttcattttctctgaagtacaagcaccaaatccataaatgtgagattcataactactgatagataggaagccctctgggttcacagattcctaactcactgttctgaatgttcactgtcagtactagcgacctgctcccatccactggggccactctaggccctggcccctagctgcaggctagctgctatgaygtttctaccttgaaccagtgccactcattaaaatgaggaccatgggaattaacaacatattagaatctacttgaagcctacttcttctatagaactaaaagaaaagctttggagagaaaatttgtatttggggaaaagaaaaattcttatgaagaaaagtgaaattcctctgctttattatctgtgaagcaataggtaaaagtaaattgattattgatttttttatgtctgtgctttccagaaaggatttatctatctcatatttaaaatgcacccagacagaagaggggca

SEQ ID NO: 203419 - DNA, 620 bp, Homo sapiens
tgctgaattttcagttaaacctttttttctgcatatggtgattttattctccacacaacttctacttttcattgctattatgaaaagcatattctgtatgaaatttttccagcaatgttcttttatgaaacagccttcattttctctgaagtacaagcaccaaatccataaatgtgagattcataactactgatagataggaagccctctgggttcacagattcctaactcactgttctgaatgttcactgtcagtactagcgacctgctcccatccactggggccactctaggccctggcccctagctgcaggctagctgctatgacgtttctaccttgaaccagtgccactcattaaaatgaggaccatgggaattaacaacatattagaatctacttgaagcctacttcttctatagaactaaaagaaaagctttggagagaaaatttgtatttggggaaaagaaaaattcttatgaagaaaagtgaaattcctctgctttattatctgtgmagcaataggtaaaagtaaattgattattgatttttttatgtctgtgctttccagaaaggatttatctatctcatatttaaaatgcacccagacagaagaggggca

SEQ ID NO: 203420 - DNA, 546 bp, Homo sapiens
tatttattacttctatttgtactttatcttttcctcttactaaatttatgctttaggaatgatctgttttctgttagaatttttttttcatttttaacatcagaataatatatatttgtttatttcattgataaactttaycagttttatttcatattccattatttttaatcacaatttaaaagaattaaagagcaggtacagtttatataaatgctaatcaggaatctgttaatcttcacttatggaaatgttccaaaattttttccaagctgaaaatacgagcatctcctcaaactagcttcctttcaccagtgtcccacagatgctcacatcaatacaatctgacacaaggaaaaaagtcacataggaaaagttataggggaaagaacctggaaagtattcttaccaaatacacttaaaatagcttatttttgcagagatttaaaaaagtaatattttgcttggtgcttacttgagccttggaagagaatgaagaagtgaagggcccagaagctgaaattccgatggcattacagttgattt

SEQ ID NO: 203421 - DNA, 546 bp, Homo sapiens
tatttattacttctatttgtactttatcttttcctcttactaaatttatgctttaggaatgatctgttttctgttagaatttttttttcatttttaacatcagaataatatatatttgtttatttcattgataaactttaccagttttatttcatattccattatttttaatcacaatttaaaagaattaaagagcaggtacagtttatataaatgctartcaggaatctgttaatcttcacttatggaaatgttccaaaattttttccaagctgaaaatacgagcatctcctcaaactagcttcctttcaccagtgtcccacagatgctcacatcaatacaatctgacacaaggaaaaaagtcacataggaaaagttataggggaaagaacctggaaagtattcttaccaaatacacttaaaatagcttatttttgcagagatttaaaaaagtaatattttgcttggtgcttacttgagccttggaagagaatgaagaagtgaagggcccagaagctgaaattccgatggcattacagttgattt

SEQ ID NO: 203422 - DNA, 483 bp, Homo sapiens
tggggttacacacttcagatgcccaggttattacttccctatgtagggtcccttgctagtcatgtctatgaactataggtatggcagattgtaactaggcctacctaamcaatggcttactctgaatatttaccaaaatttgcattttttgtatagaacaccaccttaaaatgtctatgttaattttactgacatccctgccactttggatttctttgaggaggggctggggtaaggctgaattaaatactaccccacagtgcactgtagcatgtctttttgcttatctttttccaattccttttcccaagagtaagacgaaaatccttctttaagtgtaatctttttgaaaagagaagtaccttgtcaggaattgatagtaatcttttagtaagtttaggcaaaatacacagaaccccatctagcttttaatttaaaagtatatttggtttttggaaatgcaaagattggtcatgttatgat

SEQ ID NO: 203423 - DNA, 483 bp, Homo sapiens
tggggttacacacttcagatgcccaggttattacttccctatgtagggtcccttgctagtcatgtctatgaactataggtatggcagattgtaactaggcctacctaaacaatggcttactctgaatatttaccaaaatttgcattttttgtwtagaacaccaccttaaaatgtctatgttaattttactgacatccctgccactttggatttctttgaggaggggctggggtaaggctgaattaaatactaccccacagtgcactgtagcatgtctttttgcttatctttttccaattccttttcccaagagtaagacgaaaatccttctttaagtgtaatctttttgaaaagagaagtaccttgtcaggaattgatagtaatcttttagtaagtttaggcaaaatacacagaaccccatctagcttttaatttaaaagtatatttggtttttggaaatgcaaagattggtcatgttatgat

SEQ ID NO: 203424 - DNA, 543 bp, Homo sapiens
ccaccttaaaatgtctatgttaattttactgacatccctgccactttggatttctttgaggaggggctggggtaaggctgaattaaatactaccccacagtgcactgtagcatgtctttttgcttatctttttccaattccttttcccaagagtaagacgaaaatccttctttaagtgtaatctttttgaaaagagaagtaccttgtcaggaattgatagtaatcttttagtaagtttaggcaaaatacacagaaccccatctagcttttaatttaaaagtatatttggtttttggaaatgcaaagattggtcatgttatgataatgacatttactaagctcttatgattcactactaaaacaaagaattatgagtggttaacctcttagtaggattattgtataaataaaactttcaaactgaaacaatacaaartttgtgttcttgtcttttcattgtgggatatctaagccttttatattaacaattaacaatatcatatcaacattatgattaatctaaattccgatgtgagctaatgt

SEQ ID NO: 203425 - DNA, 629 bp, Homo sapiens
gtcaaggccgtttggcccatatctcagaatcaatcacagaatgtactttctgaagtgtttctttattatagcaaatgyccaaaagacaatagtagaaatcaataaagctagaatagggttaagtctacatgttctaaataggcataatctttaagagtgtattatcatgaaacaagtttcaggaccctaaactgacactggaagaaaaaaaattcaaattctcatcagatccacagtccaaaatctcaacatttctattactgaagagggttcccaccataccgtcatttaaacattgtcttagactctttgaaggctgccaatatagggcatgtctacaaataaatttcttatctgttctttccatatccccttcatttttgttttgaattttaaaggatatgtttgtaattctgtgtccatcttcccactagatgtagctcttttataaaaatatttagctctcaagtgtcatttttaaatattagtctagtcattcctacactcaattttactggaatatctggattcctaccactcaacaacatgtttctggaatgaaatttgctaaaaaaaaaaagtatattcataagatatatatttacatgggctctataatacagatgaac

SEQ ID NO: 203426 - DNA, 629 bp, Homo sapiens
gtcaaggccgtttggcccatatctcagaatcaatcacagaatgtactttctgaagtgtttctttattatagcaaatgtccaaaagacaatagtagaaatcaataaagctagaatagggttaagtctacatgttctraataggcataatctttaagagtgtattatcatgaaacaagtttcaggaccctaaactgacactggaagaaaaaaaattcaaattctcatcagatccacagtccaaaatctcaacatttctattactgaagagggttcccaccataccgtcatttaaacattgtcttagactctttgaaggctgccaatatagggcatgtctacaaataaatttcttatctgttctttccatatccccttcatttttgttttgaattttaaaggatatgtttgtaattctgtgtccatcttcccactagatgtagctcttttataaaaatatttagctctcaagtgtcatttttaaatattagtctagtcattcctacactcaattttactggaatatctggattcctaccactcaacaacatgtttctggaatgaaatttgctaaaaaaaaaaagtatattcataagatatatatttacatgggctctataatacagatgaac

SEQ ID NO: 203427 - DNA, 629 bp, Homo sapiens
gtcaaggccgtttggcccatatctcagaatcaatcacagaatgtactttctgaagtgtttctttattatagcaaatgtccaaaagacaatagtagaaatcaataaagctagaatagggttaagtctacatgttctaaataggcataatctttaagagtgtattatcatgaaacaagtttcaggaccctaaactgacactggaagaaaaaaaattcaaattctcatcagatccacagtccaaaayctcaacatttctattactgaagagggttcccaccataccgtcatttaaacattgtcttagactctttgaaggctgccaatatagggcatgtctacaaataaatttcttatctgttctttccatatccccttcatttttgttttgaattttaaaggatatgtttgtaattctgtgtccatcttcccactagatgtagctcttttataaaaatatttagctctcaagtgtcatttttaaatattagtctagtcattcctacactcaattttactggaatatctggattcctaccactcaacaacatgtttctggaatgaaatttgctaaaaaaaaaaagtatattcataagatatatatttacatgggctctataatacagatgaac

SEQ ID NO: 203428 - DNA, 629 bp, Homo sapiens
gtcaaggccgtttggcccatatctcagaatcaatcacagaatgtactttctgaagtgtttctttattatagcaaatgtccaaaagacaatagtagaaatcaataaagctagaatagggttaagtctacatgttctaaataggcataatctttaagagtgtattatcatgaaacaagtttcaggaccctaaactgacactggaagaaaaaaaattcaaattctcatcagatccacagtccaaaatctcaacatttctattactgaagagggttcccaccataccgtcatttaaacattgtcttagactctttgaaggctgccaatatagrgcatgtctacaaataaatttcttatctgttctttccatatccccttcatttttgttttgaattttaaaggatatgtttgtaattctgtgtccatcttcccactagatgtagctcttttataaaaatatttagctctcaagtgtcatttttaaatattagtctagtcattcctacactcaattttactggaatatctggattcctaccactcaacaacatgtttctggaatgaaatttgctaaaaaaaaaaagtatattcataagatatatatttacatgggctctataatacagatgaac

SEQ ID NO: 203429 - DNA, 445 bp, Homo sapiens
agaaaccctacatggtagaagatattggggaccaatattcaacattcttaaagaaaataaattccaacccagcatttcatatcttgccaaactaagcttcataagcaagggagaaataagatcctttttaggyaagcaaatgctgagggaattcattaccaccagacttgccttacaagagttcctgaaggaagtactaaaaatggaaaagaaagaccattaccagccaccacaaaaacacacttaagtatataagccagtgacactataaagcaaccacacaaacaactctgcataataaccagctaacatcatgatgacaggatcaaatccacacatgtcaacactaaccttgaatgtaaataagctaaatgtcccaattaataggcacagagtggcaagctagatagagaaccaagacccattcacatgcagtgacatgaat

SEQ ID NO: 203430 - DNA, 585 bp, Homo sapiens
aagtgccacccaagtcctttcctccgaagccggactgtgtcattcagcacttcctctgctgtccccctctccttacaaccattttgttctctttgtgtgtatgtgtgtgtgtgtgtgtgtgcatgcatgtgtgtgtgtgtaatcccagctactcargaggctgaggtgtgagccacccctcccaacttatttgtgttaggttgtcctattttatgcatatttgactgtgagactcctgacagcctctttagaaaaatgatcatttctgttttgacctgcagagtatttcagtatttctgagtctctttcttgcctagaacccctcaccctaggcctccgtgagatgctgaccttgcccaggtctccacagagctgagcctgcactgaggttgctgggctctgttcacctggctatgtgacttcagcaggaccgtggtcttctctgacccttggtttccttttcattagtgggggtctgagtgaactgctggggccattgtgagggtgaaggtggcagcacccacactcggcttgctcacaaaccaggtcggcaaactgtttgtgtgaatggtgtgatactaaata

SEQ ID NO: 203431 - DNA, 585 bp, Homo sapiens
aagtgccacccaagtcctttcctccgaagccggactgtgtcattcagcacttcctctgctgtccccctctccttacaaccattttgttctctttgtgtgtatgtgtgtgtgtgtgtgtgtgcatgcatgtgtgtgtgtgtaatcccagctactcaggaggctgaggtgtgagccacccctcccaacttatttgtgttaggttgtcctattttatgcatatttgactgtgagactcctgacagcctctttagaaaaatgatcatttctgttttgacctgcagagtatttcagtatttctgagtctctttcttgcctaraacccctcaccctaggcctccgtgagatgctgaccttgcccaggtctccacagagctgagcctgcactgaggttgctgggctctgttcacctggctatgtgacttcagcaggaccgtggtcttctctgacccttggtttccttttcattagtgggggtctgagtgaactgctggggccattgtgagggtgaaggtggcagcacccacactcggcttgctcacaaaccaggtcggcaaactgtttgtgtgaatggtgtgatactaaata

SEQ ID NO: 203432 - DNA, 585 bp, Homo sapiens
aagtgccacccaagtcctttcctccgaagccggactgtgtcattcagcacttcctctgctgtccccctctccttacaaccattttgttctctttgtgtgtatgtgtgtgtgtgtgtgtgtgcatgcatgtgtgtgtgtgtaatcccagctactcaggaggctgaggtgtgagccacccctcccaacttatttgtgttaggttgtcctattttatgcatatttgactgtgagactcctgacagcctctttagaaaaatgatcatttctgttttgacctgcagagtatttcagtatttctgagtctctttcttgcctagaacccctcaccctargcctccgtgagatgctgaccttgcccaggtctccacagagctgagcctgcactgaggttgctgggctctgttcacctggctatgtgacttcagcaggaccgtggtcttctctgacccttggtttccttttcattagtgggggtctgagtgaactgctggggccattgtgagggtgaaggtggcagcacccacactcggcttgctcacaaaccaggtcggcaaactgtttgtgtgaatggtgtgatactaaata

SEQ ID NO: 203433 - DNA, 554 bp, Homo sapiens
ccttccaggcaggagagccagccctcccctgactgtggctcctgagccaggcctgggctgagacaggagctcctagctatgacccagccctgacagccagcagggccatcctccggggaggtcccaggaggagaccctggaggaaagaagagatgttaattggcctgggagggtgggagaggcacagatgtaccagtttgtgtgcagcttggaggctgaggagagccctctggggccctcgcaggctcaggtggccgcagggccaacctgggtggggacggtggacaggcacgctatccrtggtttctctgtgagagctggggccatggcagggctggttgctcaccccgtgtgcaaggggcaggaaggacagagctcatactggaggctccgtgagaactggggccagggtgagactgggtgagagtggaaagtggggtgatggcaggcagggaggccaggctatctccagaaggacagtagagcatcctattagagttggccaggcagatagaggagagagaaaggtgggcgagagggccagagaggccttg

SEQ ID NO: 203434 - DNA, 554 bp, Homo sapiens
ccttccaggcaggagagccagccctcccctgactgtggctcctgagccaggcctgggctgagacaggagctcctagctatgacccagccctgacagccagcagggccatcctccggggaggtcccaggaggagaccctggaggaaagaagagatgttaattggcctgggagggtgggagaggcacagatgtaccagtttgtgtgcagcttggaggctgaggagagccctctggggccctcgcaggctcaggtggccgcagggccaacctgggtggggacggtggacaggcacgctatccgtggtttctctgtgagagctggggccatggcagggctggttgctcaccccgtgtgcaaggggcaggaaggacagagctcatactggaggctccgtgagaactggggccagggtgagactgggtgagagtggaaagtggggtgatggcaggcagggaggccakgctatctccagaaggacagtagagcatcctattagagttggccaggcagatagaggagagagaaaggtgggcgagagggccagagaggccttg

SEQ ID NO: 203435 - DNA, 493 bp, Homo sapiens
gggggacaaagtaacagggcagcagagctggggtggggccaggctgggcagactggggaatgagacctactcagaacaccgccctcggcagagccacccacccctatccttgcaaaccctctgccccagggcccactctaaacccatgagagctgtggcaggacagggtgactccaggccyggccaggaggctccggctgactccgcccccttctccttcccctccccacttcccattccacaggcctccacagggcaggggccgtgacaggggtgacagaagttcggagaggtcactgagtccctgcaattagcagtaatgagttgacacatgccacaggtcaagtgctaatgcaggctgataattaactcaacctgctaggaagcggtgcagcccctcctccctctgatcaattatcctcaggatgttgaacagccccgccccagggctaatggggtcacattccaaccataatgacgtggctgctgcacc

SEQ ID NO: 203436 - DNA, 478 bp, Homo sapiens
atattgaacttgaagcatcggattacatgtttgttcaatagcaataaactcccaaagttttatggggtcataaaaccgctgtctcggctcccacttaggtggtatgtaatgtacacaggctggtttccccgctaatggggcggtgcaagtgatttggggctattagctggaaacatcacatctgcatttcccaaattctcataaataaggtggccccaccrgagtgcaccagacccagccttgtagttcgaggagaggaagaaaggcagagtgggttggagccatgagaaatgattagagagggagggagaccaggcggggtggggggaggcaagggatgtcaggagaaaagagggtgcagggctcagcccagatgcccaccgcccttgagcgcatccctgcccagcctctggcttaggaggactcagaggacaggcacctcctcccagggtcctgggccccagccttgccctctaga

SEQ ID NO: 203437 - DNA, 461 bp, Homo sapiens
ctatatatattgaacttgaagcatcggattacatgtttgttcaatagcaataaactcccaaagttttatggggtcataaaaccgctgtctcggctcccacttaggtggtatgtaatgtacacaggctggtttccccgctaatggggcggtgcaagtgatttggggctattagctggaaacatcacatctgcatttcccaaattctcataaataaggtggccccaccagagtgcaccagacccagccttgtagttsgaggagaggaagaaaggcagagtgggttggagccatgagaaatgattagagagggagggagaccaggcggggtggggggaggcaagggatgtcaggagaaaagagggtgcagggctcagcccagatgcccaccgcccttgagcgcatccctgcccagcctctggcttaggaggactcagaggacaggcacctcctcccagggtcct

SEQ ID NO: 203438 - DNA, 478 bp, Homo sapiens
atattgaacttgaagcatcggattacatgtttgttcaatagcaataaactcccaaagttttatggggtcataaaaccgctgtctcggctcccacttaggtggtatgtaatgtacacaggctggtttccccgctaatggggcggtgcaagtgatttggggctattagctggaaacatcacatctgcatttcccaaattctcataaataaggtggccccaccagagtgcaccagacccagccttgtagttcgaggagaggaagaaaggcagagtgggttggagccatgagaaatgattagagagggagggagaccaggcggggtgsggggaggcaagggatgtcaggagaaaagagggtgcagggctcagcccagatgcccaccgcccttgagcgcatccctgcccagcctctggcttaggaggactcagaggacaggcacctcctcccagggtcctgggccccagccttgccctctaga

SEQ ID NO: 203439 - DNA, 478 bp, Homo sapiens
atattgaacttgaagcatcggattacatgtttgttcaatagcaataaactcccaaagttttatggggtcataaaaccgctgtctcggctcccacttaggtggtatgtaatgtacacaggctggtttccccgctaatggggcggtgcaagtgatttggggctattagctggaaacatcacatctgcatttcccaaattctcataaataaggtggccccaccagagtgcaccagacccagccttgtagttcgaggagaggaagaaaggcagagtgggttggagccatgagaaatgattagagagggagggagaccaggcggggtggggggaggcaagggatgtcaggagaaaagagggkgcagggctcagcccagatgcccaccgcccttgagcgcatccctgcccagcctctggcttaggaggactcagaggacaggcacctcctcccagggtcctgggccccagccttgccctctaga

SEQ ID NO: 203440 - DNA, 424 bp, Homo sapiens
gaattcaaataatcatcttagggtgacatcagcaagatggcagaacaggaggccctcsactcacctctccccacacaaacaatgatctggcagccattcatggacaaaactgcctttgcaagagttttaatatccaggcaggaggtggcaaaactctagcaaagcccaaaaccaaggagagctgctttgagaaggcaggtccacacaccagtgacaggttcccagttgcagactgaaagcagctttgtcctcctatggacttgggtccagctccactagatcatggtcttgcaactagccccatccactaagcacctaggaggaaccatgaccatttatgcccccagtaacaggccttctaaccatggtcctgactgcagaaactaaagcagccctgacctggcttcagccccactctaccaca

SEQ ID NO: 203441 - DNA, 417 bp, Homo sapiens
caagatggcagaacaggaggccctccactcacctctccccacacaaacaatgatctggyagccattcatggacaaaactgcctttgcaagagttttaatatccaggcaggaggtggcaaaactctagcaaagcccaaaaccaaggagagctgctttgagaaggcaggtccacacaccagtgacaggttcccagttgcagactgaaagcagctttgtcctcctatggacttgggtccagctccactagatcatggtcttgcaactagccccatccactaagcacctaggaggaaccatgaccatttatgcccccagtaacaggccttctaaccatggtcctgactgcagaaactaaagcagccctgacctggcttcagccccactctaccacagtcagtcttgcctgcccaggaattc

SEQ ID NO: 203442 - DNA, 411 bp, Homo sapiens
gaattcaaataatcatcttagggtgacatcagcaagatggcagaacaggaggccctccactcacctctccccacacaaacaatgatctggcrgccattcatggacaaaactgcctttgcaagagttttaatatccaggcaggaggtggcaaaactctagcaaagcccaaaaccaaggagagctgctttgagaaggcaggtccacacaccagtgacaggttcccagttgcagactgaaagcagctttgtcctcctatggacttgggtccagctccactagatcatggtcttgcaactagccccatccactaagcacctaggaggaaccatgaccatttatgcccccagtaacaggccttctaaccatggtcctgactgcagaaactaaagcagccctgacctggcttcagcc

SEQ ID NO: 203443 - DNA, 417 bp, Homo sapiens
caagatggcagaacaggaggccctccactcacctctccccacacaaacaatgatctggcagccattcatggacaaaactgcctttgcaagagttttaatatccaggcaggaggtggcaaaactctagcaaagcccaaaaccaaggagagctgctttgagaaggcaggtccacacaccagtgacaggttmccagttgcagactgaaagcagctttgtcctcctatggacttgggtccagctccactagatcatggtcttgcaactagccccatccactaagcacctaggaggaaccatgaccatttatgcccccagtaacaggccttctaaccatggtcctgactgcagaaactaaagcagccctgacctggcttcagccccactctaccacagtcagtcttgcctgcccaggaattc

SEQ ID NO: 203444 - DNA, 411 bp, Homo sapiens
gaattcaaataatcatcttagggtgacatcagcaagatggcagaacaggaggccctccactcacctctccccacacaaacaatgatctggcagccattcatggacaaaactgcctttgcaagagttttaatatccaggcaggaggtggcaaaactctagcaaagcccaaaaccaaggagagctgctttgagaaggcaggtccacacaccagtgacaggttcccagttgcagactgaaagcagctttrtcctcctatggacttgggtccagctccactagatcatggtcttgcaactagccccatccactaagcacctaggaggaaccatgaccatttatgcccccagtaacaggccttctaaccatggtcctgactgcagaaactaaagcagccctgacctggcttcagcc

SEQ ID NO: 203445 - DNA, 417 bp, Homo sapiens
caagatggcagaacaggaggccctccactcacctctccccacacaaacaatgatctggcagccattcatggacaaaactgcctttgcaagagttttaatatccaggcaggaggtggcaaaactctagcaaagcccaaaaccaaggagagctgctttgagaaggcaggtccacacaccagtgacaggttcccagttgcagactgaaagcagctttgtcctcctatggacktgggtccagctccactagatcatggtcttgcaactagccccatccactaagcacctaggaggaaccatgaccatttatgcccccagtaacaggccttctaaccatggtcctgactgcagaaactaaagcagccctgacctggcttcagccccactctaccacagtcagtcttgcctgcccaggaattc

SEQ ID NO: 203446 - DNA, 417 bp, Homo sapiens
caagatggcagaacaggaggccctccactcacctctccccacacaaacaatgatctggcagccattcatggacaaaactgcctttgcaagagttttaatatccaggcaggaggtggcaaaactctagcaaagcccaaaaccaaggagagctgctttgagaaggcaggtccacacaccagtgacaggttcccagttgcagactgaaagcagctttgtcctcctatggacttgggtccagctccactagatcatggtcttgcaactagccccatccactaagcacctaggaggaaccatgaccatttaygcccccagtaacaggccttctaaccatggtcctgactgcagaaactaaagcagccctgacctggcttcagccccactctaccacagtcagtcttgcctgcccaggaattc

SEQ ID NO: 203447 - DNA, 422 bp, Homo sapiens
aagatggcagaacaggaggccctccactcacctctccccacacaaacaatgatctggcagccattcatggacaaaactgcctttgcaagagttttaatatccaggcaggaggtggcaaaactctagcaaagcccaaaaccaaggagagctgctttgagaaggcaggtccacacaccagtgacaggttcccagttgcagactgaaagcagctttgtcctcctatggacttgggtccagctccactagatcatggtcttgcaactagccccatccactaagcacctaggaggaaccatgaccatttatgcccccagtaacaggccttctaaccatggtcctgactgcagaaactaaagcagccctgacctggcttcagccccactctaccacagtcagtcwtgcctgcccaggaattcagtgat

SEQ ID NO: 203448 - DNA, 480 bp, Homo sapiens
cagccctgggactgggaggtccctggcagtygcctgctgcccagtgtgaccagaaaggcagccctgtcccaccatagccacaggcagcagaagtctgggcagagttcatcttcttgacctttggccactgccttcccagctgcccgcagggggttccccctgctgaggagagaccaggtggaccccagctgcctgtcacccttcatctgggacttgctgtcaaaccctaggatagtctcataaaggggaggctgggccagcctgctgctgtctgcttcaggaccaggcagagagtgaggctgggggttctcacaccttactccaccgggcacatcccaacctgcactggggcccacccgagcgcttgttctggtctcagccgctcccttggcagctgcagcccccatgcagaagaggctcccaggcccaagctctgtgtgacccagagaaataaagatgcctcagtgtggcccaaatgtg

SEQ ID NO: 203449 - DNA, 480 bp, Homo sapiens
cagccctgggactgggaggtccctggcagtcgcctgctgcccagtgtgaccagaaaggcagccctgtcccaccatagccacaggcagcagaagtctgggcagagttcatcttcttgacctttggccactgccttcccagctgcccgcagggggttccccctgctgaggagagaccaggtggaccccagctgcctgtcacccttcatctgggacttgctgtcaaaccctaggatagtctcataaaggggaggctgggccagcctgctgctgtctgcttcaggrccaggcagagagtgaggctgggggttctcacaccttactccaccgggcacatcccaacctgcactggggcccacccgagcgcttgttctggtctcagccgctcccttggcagctgcagcccccatgcagaagaggctcccaggcccaagctctgtgtgacccagagaaataaagatgcctcagtgtggcccaaatgtg

SEQ ID NO: 203450 - DNA, 480 bp, Homo sapiens
cagccctgggactgggaggtccctggcagtcgcctgctgcccagtgtgaccagaaaggcagccctgtcccaccatagccacaggcagcagaagtctgggcagagttcatcttcttgacctttggccactgccttcccagctgcccgcagggggttccccctgctgaggagagaccaggtggaccccagctgcctgtcacccttcatctgggacttgctgtcaaaccctaggatagtctcataaaggggaggctgggccagcctgctgctgtctgcttcaggaccaggcagagagtgaggctgggggttctcacaccttactccaccgggcacatcccaacctgcactggggcccacycgagcgcttgttctggtctcagccgctcccttggcagctgcagcccccatgcagaagaggctcccaggcccaagctctgtgtgacccagagaaataaagatgcctcagtgtggcccaaatgtg

SEQ ID NO: 203451 - DNA, 480 bp, Homo sapiens
cagccctgggactgggaggtccctggcagtcgcctgctgcccagtgtgaccagaaaggcagccctgtcccaccatagccacaggcagcagaagtctgggcagagttcatcttcttgacctttggccactgccttcccagctgcccgcagggggttccccctgctgaggagagaccaggtggaccccagctgcctgtcacccttcatctgggacttgctgtcaaaccctaggatagtctcataaaggggaggctgggccagcctgctgctgtctgcttcaggaccaggcagagagtgaggctgggggttctcacaccttactccaccgggcacatcccaacctgcactggggcccacccgagygcttgttctggtctcagccgctcccttggcagctgcagcccccatgcagaagaggctcccaggcccaagctctgtgtgacccagagaaataaagatgcctcagtgtggcccaaatgtg

SEQ ID NO: 203452 - DNA, 624 bp, Homo sapiens
ataagtcggatcttcgttgtgtgagtgggtaagagatgaactggggggaggggtgtgtgtttgggcagtgagcaagccggcaagagaatgtgagtgggcggccagttggttggcaagtgagaggctgtggagaggttgctgctgggacgggctgtgcaattaaacagttgarcagatcttaatagcagactggggcggtgctctccgcaggcctgcggggagcagggagcaggggaagcaagcgagctggaagcatctttgggcacagagctagatacgaatttcagaagcacataacctgaggaatagaatgcaaccagaggagggagaaatagagattccaggcagcgtttcctaaacttaaaaagttttgaatacccagttttgccttgttctggggacctctggcaatgttgttcaagggaggaatttttaatttcatagaaaagtgaattttaccaccacaagagaacatgagaccaaggtcataaatccctttgtttggagtgtccgttctgaactccttgtatacttttatttgcaggaagaggctataccagcaagtattatggttttactgggtggggcggcaaggccaggaagagatggagatgctgttaaagg

SEQ ID NO: 203453 - DNA, 384 bp, Homo sapiens
gaattccagtctccaaaagtttaatccttgctgtagtgattaacatgaaactgaaggagggcatgtgacacatggttttgcaacattcacgttttggcagagccccaattttgtggaattttttttttttttttttataaagacgttgggtttttcagagaaattcatttgtggctttttgaaagtgacaaacatgttaactgtatttcagtcaataatacttatcagaaaagctttttttttgtttcaaagaatcccacgtggttcctctaatttctagtattaattgtagttcrctaattaggagagttctgtgaaaagaaaatagttggaagagagactgtggttcattttctttagttatatctacattggagaacattt

SEQ ID NO: 203454 - DNA, 292 bp, Homo sapiens
atttattttcatatgcctattaattttccatctgttgaactgaagccagggagagatgaatgcacaaagctgcttcacccttctgcttcctcccaggctgagtctctacytcgtgtgtcccctctcgctcctggagtccccagtcagctcttagaggaatccttgggaaccttgttcacatgatactaaatgacaaaaccttttttgacctttccccctacagacagaccttcctctagtgtctttgtccaaggttgaatgattgcacttattacactcgagtggaattatt

SEQ ID NO: 203455 - DNA, 543 bp, Homo sapiens
accgattgtaaaatattacgtcatattcaagtgcattccccttgggtatacccatgccttgcagggcctcagattcagcaagtgacagagatagagatttgtttctctaattgtccgttcacgggttgaggcaataacaacaacactaaccaaataaaagctagcagtgttgaaggctttccagatagcaggcattgtgctaagcactttatatggatgaatttatttaatccgcatgacatttaatctgcatgacaatcccagagggatggtactaatagtctactcataagagatatgcactgaagcctgtgccagtcttaaacttgcctargaaggtgccagattatgtgttgggtctttgcctgagtccaagaacagtttctaggcaaccaaatgccaatgtcagtcctcatagggatccttaccaaagtttgacccaggggcctgaggccagcatggatttgccagagagttgattaaatcctattcatgggagctgaacacttcctttattaagaataatggattaaagcaagaaaa

SEQ ID NO: 203456 - DNA, 540 bp, Homo sapiens
tccctgtcttcctgagtagcctccaggaaagtcagcacgtctctcaaccaactataaactttacctatggaaaaatgaagtgttgggccattagatgatctcttagtgctcacctattttgagacttcagtgagataatatttttaaagtgctccatttagtgcctgacacctgattctaataacaaatacttttatagcctatattatgtgccaagtgttctaatcattatatgcatgttagttgaatatactattattgtctctattttagaagaaaggaagctgagtcacagaaaggctggttaacctgctcaaggttatgcacctagtaagagacatataaagctctcagtaagccgtagttgttgacactttctgaagctggcagttttggtcgttgatgtgctgctttacgcttttcttttttctctstaggtgtcatagagacgtcagatcgactggaccgtgaatcgacctcccattattggctaacagtctttgcaaccgatcagggtgtcgtgcctctttcatcgttcat

SEQ ID NO: 203457 - DNA, 435 bp, Homo sapiens
tactccgctaaacatctttgttaaatctactttataatcctcactgtagaccttacagatagcaatctgaggaggagaatcttaattagagctctggaaactggctctctaacgagaccgactttccaaataattkttcacatggccctctccccttccagacctcacatggaagggcagtcacgtggcatggatctgtcagaacagttcaccaacatccagaggcctctccaggaagggcagatgataccgtgagacctgcagagtccacgcccgccatccccactctgccactacgctttctctcgctgcaaagccatttgcagaacatgtacaaaccacggagctaagaacacagagctaacaggactgtccgtttggtgacagatttttaggtagtccatagaatttctacttctacaaaaacagaaaact

SEQ ID NO: 203458 - DNA, 585 bp, Homo sapiens
gttgggtttacaggcgtgagccacctcgcctggccacaggaacttctttccttacttattagccgtaaatccaatcatgtctttttgagtgttattcttttggatgaattctgcagcactgatggctcttatctttttcttctacttctgggttcttcttttgttctacttctttgaccattccttccttcctttgactaatcacctgcaagtgaagtgaccatctctccatttcattcctgcctggctcaacacatttctgtaattcctaaatcctgtcttttaacttcttttaactctctttctcttccctcccttgactcttatgtctgctactatgcattctctcatgggggtggaactccatccattatgtatttatgttatatatttatatgaatgccctaccaatacctcaagctcaccatccccgaaatggaaattgcgttcttctcacccacaccacttcttactccacatatctgtggagcaggctcttccacatttctgttgatgctgccattgrtttcctcacacccaggcttgaaattttagaataaattttaacgagtctccctgtttccc

SEQ ID NO: 203459 - DNA, 544 bp, Homo sapiens
tttgtaattaataagtattttgtgaggaggtattttgagactatataaatattctgcatctcagccaaattttatttacttctatcatttatttatatctatatgaacttatagttacaatwttattgatgtcactgtcatcatttattttatactcaaattaactcatagttgaccacctggggtgccttcaatgtattcctttgttatgtcaccatctttctttgtatctttctcctttctggtgcaagatgtttcaggcttattttcttgttttgtaccttccttgtgtcagccttaaagtctgtcatttcttcaagtgccttgtttccttttggtaaataatagtatttggaaatgaggatcaaggtgccaggtgtgttcctgcagttgaagtgccgctcctcccaggtgctttcatttagcagaaacagctagagcatatgcatgagcatacataggtgtgtaaacacattaagactttgctctgtcaaagcataagtttccagcaacatctccagttccaaaccaaccaacagagttg

SEQ ID NO: 203460 - DNA, 544 bp, Homo sapiens
tttgtaattaataagtattttgtgaggaggtattttgagactatataaatattctgcatctcagccaaattttatttacttctatcatttatttatatctatatgaacttatagttacaatattattgatgtcactgtcatcatttattttatactcaaattaactcatagttgaccacctggggtgccttcaatgtattcctttgttatgtcaccatctttctttgtatctytctcctttctggtgcaagatgtttcaggcttattttcttgttttgtaccttccttgtgtcagccttaaagtctgtcatttcttcaagtgccttgtttccttttggtaaataatagtatttggaaatgaggatcaaggtgccaggtgtgttcctgcagttgaagtgccgctcctcccaggtgctttcatttagcagaaacagctagagcatatgcatgagcatacataggtgtgtaaacacattaagactttgctctgtcaaagcataagtttccagcaacatctccagttccaaaccaaccaacagagttg

SEQ ID NO: 203461 - DNA, 546 bp, Homo sapiens
aatccaccatgataggatctacaaacatgataggatctactaaactagcttgtcttattgtaatatattgatcaagcctcttatttatactctctccccaagggagaagatgaatgggctatatgctgacagagtttgctggactgagttgcactaattaacagatgagagtcagcctaaagaggcttgacttgcgcagtttcataagaccttatcctctctattcttcaacttttcagtcaacggtttagatcaaggccaagagggagctactcatcccatgtgcagatataawcaagttaagagggacagaaagtatttgaaagcaggaccctagatcttggaggatgaagtaacaggacatgtctaacaagaataattttaacaggaatacatataaatataatgtcctgcagcagagccaaagaaaaaataataaaagtatcaaatggtggagacctggcttaggagcatcatgaatgctagtggataataagctcattgggagttaaaatataaagtgactgtcttgctgcaaaataaaag

SEQ ID NO: 203462 - DNA, 628 bp, Homo sapiens
tctggtgcgggttctcttcctgttttctagaaatccacctttttttctctgtccttataaggcagggagagctctagtgtccctttatcttcttataagggcaccaactctactggatcagggctttacatttatgacttcatttaaccttaattatctccttaaaggccttctctccaatttagtcacrtgggaggctagggtttcaacatatgaatttgaggagggtcacactccagtccatagcaataggtaaatctataaaaacaaaaagcaaatgggtgcttctaggggatagggaggagggagaaattgggagtaaatgcttaattgtctcccagttttatttggggctgatgaaaagattttggaattaaaatggtggttgtaaaactgtgaatgtactaaataccactgagttgctagttttaaaatggttatttctatgctatgtgaactttacctcgatgaaaacagaagcaaaaacaaaaagattaagcaaaaaggtaagtcagaaaaaagagaaaaagaaatcaacattctttcatagctagctctgccattcacatgccccagttcccaatagatagtctctttgtctctcagcttaaatgttaagtttcaaaga

SEQ ID NO: 203463 - DNA, 531 bp, Homo sapiens
atgcacatgtatgtttattgtggcactattcacaatagatgctagtatttctgtgtggagtaactgaaggatggcccacatctccagtgtgtaggtgttccttggaatgmcgtctgaggtctgaaggggatatgcctttgtttaaatgagcacaggttacaccaggaggttcccttggtatcgcccgtgttactccgtctctcttcaatccctttctgctcttggcccagacacacaccttttccttctttaccatgtggattataattctggccttggtccatcctctgtgagctttaatttctttagcacctgctttggaaagattttgtttctcacaaaatttcctcttccttactcataaggaaaatgcattctgtgcttggcacctctgaaaattgaagtaaatgatttctctaagcctttctgcaggttttgctatttattccattaagattttccttgtcctctttctctcattttttttgtggccagtgtttcctcagtttcaaatatggttatttgctttca

SEQ ID NO: 203464 - DNA, 525 bp, Homo sapiens
atgcataaagttcttggtataattctggtgcatgatgtggtaggtatcattgttccaagcaacttaagatgacccaagtaccaagcactgctagcctgattgaggacacaatttatcttcctttaccttaccctctgtgcactgcaatgaagtatgcacccagaatgcgtcccttacatktcagaatcttaagataatggctttaggaagaacacatgaatgggccaagagctgctgcagtgaaaaatgctgacatgtaccagaggatagtctgaggcaataaggttcacattgctcttttgaaatgtaatcaccagaaactcaaaattaagaaaaaaaagcttttaaaaaatttttaagagaaaaatacagtcatttatttaataatgaaagattctataaagttattgaatgttttatcatttaaaataacttttaaaaattatacttctgaagcatttaaaccattatgtagttctcaaaattgtattggtcattttctctctgtgacatttgtaaatatgt

SEQ ID NO: 203465 - DNA, 609 bp, Homo sapiens
ctcctaaatattacagtgtttacttgctagaaataatggtgttttcttacataaccgcaaggtggttattaatttcagtagatgctgatgtaataccttgatgtaatctgctgtccctattccagttttgtcaattgactcaataatatcctttatagcattttttacctccattatgggatcagtcaaaggctaagtattgcctttagttgtcatgtatctttagtctccttcaatctgaaacatttctataggctttctttttcttttatgatactgacatttaaaaaaatacagcctcctccctgcttaaaatagagtgtatctaatttgccggatggcaatctcatatttcctcataattcgcttcagtttatgcattctaggccacttaagtgatgtccttctcagggcatggcatttggaagtacatggtgtccatctgcccctcattggtgatgttaactttgatcactcagtcaaggtcatttttcatttctctactgtttaattactatttctctctttctcttaccaattagcaaaatgtagagaracattttaaggtcatgcaaatacatatcattctccttatcaaaatttccccat

SEQ ID NO: 203466 - DNA, 467 bp, Homo sapiens
tctttttttgataagtgatggcctgtgtatgcrgatgagcatattatcagtctatttctgcatagaaaatttcagagccagccattatccttaactaatgcaggagcagaaaaccaaatagtgtatgttctcacttataagtggaagctaaataatgagaatacgtgaacatatagaaggggacaacacacactggggcctgtcggagggtgaaggatgggaggagaagaggatcaggaaaaataattaatggggactaggcttaatatctgagtgataaaataatctgtacattgaaccccaatgacacaagtttacctatgtaacaaacctgcacatgtacccctgaacttaaaagtaaagttttaaaaaaagaaagttttggaaccagagggctcttttcattttgaatggtttcccttttgtttcagctcatttttgtagtgctttacttagtacaagtctgt

SEQ ID NO: 203467 - DNA, 617 bp, Homo sapiens
cttagtcattagcacagtgtatggattataagggaagttgaataaatrtaggaatgaagaacaagtgggagaaaggaaagtaggggagagacaaacgaaagttcttaactgtaaatacaagctctgaacaggataaggagaggtggagagagtaggagaggaacctacacctggccattagggaaaaggtggaaaattgccaaacatggatgtggaaaccctttttctacttctcatgaggggcagtccatgatcccctgtaaaagggtgtgttcattatgttgggacaatgaagaataaggcaaaaactagtctcctagacttgtcccaccgaggaccagagaagagacactaactagagaatctgagtgcccatggattcctgagtaatttacatcatgttcactgccagtgaaatgcagagatggcagtggctcaaaaattaagatggcttctttttaaaatgttgtaacaaataaaagaatcccactgagaacacaaagaaaaaagaaattaaagagccaggaggtggaggtatgagggggtagcgactctaaaagccttctttcggctccatatcaaacagatttgctctttttaggagattatggaagctt

SEQ ID NO: 203468 - DNA, 546 bp, Homo sapiens
tggaaggaacaaagttgtccttcagtgggtgaatgaataaataaactgtggtacatcttgacaatgggatattattcagcactaaaaggaaatgagctatcaagccatgaaaagacatgaaggaaccttaaatgcatactactaaatgaaagtagcccagtctgaaaaaactacttactgtatgattccaaatatatggcagtctggaaaagccaaaactatgaagacagtaaaaggatcagtggttgctaggggttgtggggagggagggatgaatctgcagagcagagaggattttaagggcagtgaaaatactctgatactataaaggtggtgacatgtcattatacatttgtccaaacccatagaatrtacaacaccaagagtgaaccctaatgtaagctatggtctttggatgatgatgtgttagtgtaagttcattgattggaacaaatgtgcctttctgatatggtatattgatagtgggagaggctatgcacttgttggggaaggggatacataagaactctctgcactttccactca

SEQ ID NO: 203469 - DNA, 585 bp, Homo sapiens
tacctcaaaacagctgttttaaattctctgtctgaaagttcatatatttttgtcacttgggattggtcactggttccttatttagtttgtttgatgagatcatgttttcctggatgttcttggtgcttgtggatgttcttcaatgtctggacattgaagagttaggcattcattctaatcttcacattctgtgcttgtttgtacccatccttcttgagaaggcgtttcaggtattcaaagggaattcagtgttataatctattataactcyttggtcactacagtcatgtctacacacagaagtgccacaatcctagcaaagccacaactctcacagacttgcagaagtactgctgtggttggcttgggtaagatctgggagaattccctggattaccaggcagagtgtctcatttttttccctcactttcccccaagcagaaggagtctctctttgcagaagactgcttggaaatgggggaggagtggtgaaagcactcttgtggccaccacagctgggactggactggttcacatctgaagccagcacattattgggccttgcccaaggcttgtggtggctac

SEQ ID NO: 203470 - DNA, 630 bp, Homo sapiens
cttattgtttgtgtgtgtgtggtgggggaggtgaagtcaggggttccttgcctcttctcccgtgtttctgatcttgccttcaggtgaagttgtgcctcagactgccttcccccacttccaggattcctctatgttgataagggagaaagattttctgctcagatgtgtccacaattctggtgggcaggattacagttccttcaaggcaaaggactcagctcttcttgctgttccatcatgtcctcgcagcacctgatctaaacaggtgggctcgtggtcttttctctcagtatcttgatggacatgtcacgttgattctgctttgcaatttgaccatcttagatagagtcagaagaagtgggaagcccatcttacatctatcagcctcaggcatatgtgtcatcccagcatattaaagaaactctgaattggacaatcacttccttggtttcttttctctaatttttytttatgtgaacagcttccttaggatgctagaggggagaagggccaagtgttaagtttaagaaacacaatcctgtatcatccttaaagtgttacgagagggtaaattctatgaaagctgaagttgtggattctagaatagagaaagacctgcattgaatcctg

SEQ ID NO: 203471 - DNA, 549 bp, Homo sapiens
atctctacatgtctaactttatttcctactgcttttcaccacacatatttctgacctttcccatgaatacgtatacatactcatggctctagtgccttaataaagcatttttaatgtttggtttcctcttctttttccctccattttactttcttaaaatttttcaggaagctttctgaactccatttcttcttgattctttcagtatctattcctagtattgcaaaattcattatacatagtatctgacataatctgacaattgcaagcatgttcagttgttaacttagtgagtataggaatcacaattatttctttttcattatctgaaggaagacagygcaatgtattggaaacagcctgggatttggaaatagaaagtagggattcttttgatgacttatcattgataataattagtgtatagccacattttctttagattatattagggcttcatctctctgtgtgctgctatgtggtgccttagagataaactatcttttctctgttagtttacagatttatagaaatctgttacccagcatg

SEQ ID NO: 203472 - DNA, 520 bp, Homo sapiens
tttgcaggacattgtgggtgagtttctgccaaaaataaattatcaatattttccttgcacaatacagatagattgattgagcaataaatatatatccatatctacatatatgtatatataccagatcaaaaatctgagcaatctctgggcaaattaataaaatagatggggctgtctggaccctctggcattttcttcaattctgcccttttcagctttgcagcattcacttctgccatacggtgagaaaagcatgccaggtgacctggaatgctggtttctttaagtcaccacactcacacccagtaatgacatktacctgtgcagaggattttgctgccttcatcaaaaaaggataaatctcccaccagagaccttcacactttagagctttagaggaactagactttctatccttttgtgttgattcttctttttatcccaatacttaacgtgtgaatacatcctgactcgaaggtttagatggtgatggcctgaacaccatcttaggattttccac

SEQ ID NO: 203473 - DNA, 520 bp, Homo sapiens
tttgcaggacattgtgggtgagtttctgccaaaaataaattatcaatattttccttgcacaatacagatagattgattgagcaataaatatatatccatatctacatatatgtatatataccagatcaaaaatctgagcaatctctgggcaaattaataaaatagatggggctgtctggaccctctggcattttcttcaattctgcccttttcagctttgcagcattcacttctgccatacggtgagaaaagcatgccaggtgacctggaatgctggtttctttaagtcaccacactcacacccagtaatgacatgtacctgtgcagaggattttgctgccttcatcaaaaaaggataaatctcccaccagagaccttcacactttagagctttagaggaactagactttctatccttttgtgttgattcttctttttatcccaayacttaacgtgtgaatacatcctgactcgaaggtttagatggtgatggcctgaacaccatcttaggattttccac

SEQ ID NO: 203474 - DNA, 627 bp, Homo sapiens
gtactatccttggagagagtaaatatcttgggcagtcatgccttttatgattttcctctaacactgatgtcccattcatttgaattttacttaaaaaaagtgaacccacagacctaccatgcctatacttctgtgtcgtatgtgagcctgtgggatagctatgaaaagtcaaataaatacaaaacargtgcccaagtactggaaacaaggggagagcaagaccaaattgattccagtacaatgcaagatacaccctttatcccactttaaccccaaattctgcctctgcagccaccatttctcttgttgtggctttgatcctctcacacatatgcagcatattatgagactgcagtgccaccgggaaaggcaaggtttccatgcagttcagcccacaggtcccctctctcctctcatattaatgctggtgtgttcaccctaagaatgggtgcagtctcccaacctgcatggaccacaatgccacattacattttaagatttaaactctttactcacaaaatggttgtcaaaaggcaaataacccctacactcattcactacaagcttgaagtatccaccaacatcaactctaatttgctatttaataaaaatcataaattgaaatct

SEQ ID NO: 203475 - DNA, 356 bp, Homo sapiens
ttcaactaatcaacatctttatccatttggttggttgtttttggttttttgtttgttgttttgttttgttttgtttcactggatgaacagaatggttaataggcttactatggggtatgaaaaggcctttggctaaaaagccttcaactataggcttgtgtctttattttctctctctctctctcrctctctcttgcttcaagggatgttagggaagtttgggtaacagtttggcagaactttaataggtctgtccaattattttccttatgtcagtggcattttcattcacagagtgtcaagatctctgcatggggtatatacatcaacaataatgaagaaagcaaaggtatacc

SEQ ID NO: 203476 - DNA, 537 bp, Homo sapiens
tctatagtttcatcttttctctgtttgcatgatttaattgcagtccaattaatttttattgcaaatgtttaagatatggcttttgggaaactttgtcctactttccagccctattttttgactctgagatttattagggaaagggggatcctacagrcccctttttggatcagtctcatttcttttgccaccaagaatttagtatctaagattccaaccaacatcagtacaagtggatataaatcagttaactctattgagtgcatacgaggtatatgcactcaaaacaattctaaattcttctatgaatagctgctgatcatgcctggattaagagaacttcataattatagttcttaattcagcttggctccaaggttttaattctactgtagctttcatctggctcatgggcaagatgatagatgtttagaggcaattgacattttgaggcctttaaacaagtctttaggaaaaggtagggcatctggacaaggtgagtaggtaagatgagtccatgggtgtgcagaagaggaa

SEQ ID NO: 203477 - DNA, 537 bp, Homo sapiens
tctatagtttcatcttttctctgtttgcatgatttaattgcagtccaattaatttttattgcaaatgtttaagatatggcttttgggaaactttgtcctactttccagccctattttttgactctgagatttattagggaaagggggatcctacaggcccctttttggatcagtctcatttcttttgccaccaagaatttagtatctaagattccaaccaacatsagtacaagtggatataaatcagttaactctattgagtgcatacgaggtatatgcactcaaaacaattctaaattcttctatgaatagctgctgatcatgcctggattaagagaacttcataattatagttcttaattcagcttggctccaaggttttaattctactgtagctttcatctggctcatgggcaagatgatagatgtttagaggcaattgacattttgaggcctttaaacaagtctttaggaaaaggtagggcatctggacaaggtgagtaggtaagatgagtccatgggtgtgcagaagaggaa

SEQ ID NO: 203478 - DNA, 313 bp, Homo sapiens
cgacacattgttgctccaagcagcagtcccgggtgagcccagcctatgagttatcccagcccagatgtcagagaagttggtgaaggagacatcttcagccccattgttctagtcctagcatttgagctatttcagctatagcagctgttcaagtttcattagctgaggcatcagacattgtggaacttggagttaccattcctatggtgctctgtctgaattactgacccacagaattcacrgcagaacccacagtgatggccctatgctattaaatttggaggtagtgtgtcctacaacaatagataactag

SEQ ID NO: 203479 - DNA, 534 bp, Homo sapiens
ttgtgttaactcttatactataattaaaagtgatttatggaccaccattacaatattctgtattcgtttatagatttacctttaccagcaagctttatactttcacatgtttttgtgttgctctttagcatccttttctttcaacttgaaggacactctatagcattgcctggaagtctaatggtgaggaactccttcagcttttatctgggaaatkcagtgtttctgcttcatttttgaatgtcagttttgccatattctttttttttttttttttacttttagcactttgaatatattctcttatttcctgctggcctgcaaggcttctgctgagaaacccattgatattcttatgtagaatccttttcatatggtgagtagctttcctcttcccactttcaaaattctctctttgtctttgacttttggcaatttgattgtaatgtagacttttacaagtttatcttaattgggatcctttaggcttcttttatctgtatgtccatttccttccccaaatttgggaaaatt

SEQ ID NO: 203480 - DNA, 576 bp, Homo sapiens
ggaatccctgctctagaccttgtattgaaagataatacataccacaaatacaaaaagacagatttatttaagagcacatgggcacctctgtcactcargatctgttgttgagggctgacatatgcaaccgtaaacatttgttcttacaagtaacatcttctggacctcaaagaaaaacttttttttttttttaaatatctcttaatatacgtccctgaaacatgctttaaaggtttgtggtttgtgtcattgccaatgttgaagctagtccctattttagaatgtgggaaatatttgaacaactgaagcatttaggtaaaagaagaggcgaattagtcaatttgtccaatctttcttttcaaaaagctttaatatggatattcctgctcaataaagaatcacttcccagtgacatatagggtactttctcttgcttctctgtcttctggttctggagatacatcagttggtatggtatttataggagttacaggtggcagatgaagaactattaactttgtaatagttaaaatttatattaccctgaaatttatatataggaagaagtaacatgta

SEQ ID NO: 203481 - DNA, 570 bp, Homo sapiens
ttgcaacaaatagagaatatcaataaagggatagaaatttgtaaaattagccaaataaaaattctgaagttgacaagtacaattgatatgaaaattctctagaggagctcaacagcagatttgagcaaacagaaaaaaggaatcagkgaacttgaataggtcatttgaggtaattcattgtgaggaacagaaaaaatcaagaataaagaaaaataaagagtgcttaaaaggctttggaacaccatgaagcacaattacattcacatatttgaagttccagaaggatgagagaaagtaagagaaaaaaggatatttgaaagaataacgactcaaaatttatcaaattagacacaaaacatcaatctacatatataagaagctgaacaaagtccaagtaggaaaaaacttaaaaagagtcacatggaattacatccttattaaattgttgaaaacaagaacaaagaatcaagaaagcagcaagagagaagcaatcaatagtacaaaaggctctcaataagatgaacaacaaatttttcatcagaaacttctggaaaccaaaaagcagggagg

SEQ ID NO: 203482 - DNA, 554 bp, Homo sapiens
agctatttttaagatcaaatgaggaaatatatctggacacactgaaaattctaaaattcagcccccaaatgaatgacattaagcagttatctcatgttaatttgcattaaaatgtctgcttcagccactaaattgtgagcttcttaagtatagagataatgtcttattcatcaacacatctccaacacttaaacagtaccatagtgttaatattaatttatttgtgtatttattaatcaattagcatgtatcatatatttactatattccagccactttgatcatccagtcaatgcttattagatatataggtgtaattgaaaatattttccaagacttttgaaggagaaaggtgagaaaagaagtttgggatttctgagcagtgcatattgattttgtacttttatttttgtctgatctttctattttctgagactggaattcattmtcgtcaatcaaccacagctggggatacttagtaaataagcaactctaactacatcattttggtgctagcatgaagatccagatctgatattcctgctatttacccg

SEQ ID NO: 203483 - DNA, 538 bp, Homo sapiens
gaattcattctcgtcaatcaaccacagctggggatacttagtaaataagcaactctaactacatcattttggtgctagcatgaagatccagatctgatattcctgctatttacccgacagaaactaggtgccctagttctgataactaagcctctctctccctggctccctccccgcaccttttttttctttttgcccttacatgcccccaaggatcttggttatattactgttttgctgccttgggttttattctcagttatatctgtaatagcttaccattatgcctacaagtgaatggagttggttttgctatttcatcttccagctgaaatgtcatcaccttaaacctacagtttaaatgtgctcctttgtgataaygataaagtggaaaaaacgagtgtagttgtgtgtttttatttaatttttattattctaactgacatgtattattcctatgtgtaccagtcactatactcatatgtgcactatttcatttaatcatcctaataaccctaagaaaatgtaactagggact

SEQ ID NO: 203484 - DNA, 538 bp, Homo sapiens
gaattcattctcgtcaatcaaccacagctggggatacttagtaaataagcaactctaactacatcattttggtgctagcatgaagatccagatctgatattcctgctatttacccgacagaaactaggtgccctagttctgataactaagcctctctctccctggctccctccccgcaccttttttttctttttgcccttacatgcccccaaggatcttggttatattactgttttgctgccttgggttttattctcagttatatctgtaatagcttaccattatgcctacaagtgaatggagttggttttgctatttcatcttccagctgaaatgtcatcaccttaaacctacagtttaaatgtgctcctttgtgataacgayaaagtggaaaaaacgagtgtagttgtgtgtttttatttaatttttattattctaactgacatgtattattcctatgtgtaccagtcactatactcatatgtgcactatttcatttaatcatcctaataaccctaagaaaatgtaactagggact

SEQ ID NO: 203485 - DNA, 538 bp, Homo sapiens
gaattcattctcgtcaatcaaccacagctggggatacttagtaaataagcaactctaactacatcattttggtgctagcatgaagatccagatctgatattcctgctatttacccgacagaaactaggtgccctagttctgataactaagcctctctctccctggctccctccccgcaccttttttttctttttgcccttacatgcccccaaggatcttggttatattactgttttgctgccttgggttttattctcagttatatctgtaatagcttaccattatgcctacaagtgaatggagttggttttgctatttcatcttccagctgaaatgtcatcaccttaaacctacagtttaaatgtgctcctttgtgataacgataaagtggaaaaaacgagtgtagttgtgtgtttttatttaatttttattattctaactgacatgtattattcctatgtgtaccagycactatactcatatgtgcactatttcatttaatcatcctaataaccctaagaaaatgtaactagggact

SEQ ID NO: 203486 - DNA, 441 bp, Homo sapiens
gcttcttttggtatagtcatggagtaagcagtgactgagacttaatcaagtttacatagagccacacacatccagtagttgagagtaatggagtggggatatgttttgatgctgtgtgtaaaagagtgagcaaactggagcatctgtggcagagagtgaaggaagtaaatagggcatgggcagggaaaaggtggtataccattgattagaggttcaggacaagtcaagaaattattggagtcaaagttctaagggaagtgtatttgtcagggttctctagagggaaataatgaataggatattatatatatataatatcctataattatatattatatatatataggggagcttattaagtattaactcacatgatcacaaggtgccgcaataggctgtctacaaggtgagawgcaaggagagccagtccaagtcccacaa

SEQ ID NO: 203487 - DNA, 545 bp, Homo sapiens
gcaaccttaatttcctcttcctatgtaacatgccatattcataaattcctgagattaggacacggacccctttgggcccatcattctgcctatcgcagtgaggttacttacattataaaacaactagtatgtattaatagaaatcgcacagtgacattcaattatgtgtgattcacaccatctgtgtaaagggaaagtcaccaacaagatacaacacagaagggaaaaataaatcacaatacttacaaaaggatcagagtgtagaagttgaaaaaaaaaaggagaacagattggttaactttcctagtgcttcgctttttgaatcatacatttattagcatggcttaggaattagtaacattgattactaagataaaatggaagcagcataaaagtttatttccctctgtcaaaccgcacatatctaatatttacattagcaagtggctttcaggaattcaatctgtttccatcatgtttgtctgacctcccctaragacttgctcactgcacctggccagtgaaaagaaaccttggaggacaca

SEQ ID NO: 203488 - DNA, 579 bp, Homo sapiens
ataatcttaagaatatttttattttttattaattccatagatgatwtaaagtgtaactagtgctgagaatcataggtttatgggcatgcaaccctgaactgtgcaatttcttctgatttcaaaagccagatggaatacaacctagttaataagcatcaggatttggggaaagacaagggggatgataggtcagcttctttagctttcaagaaatcctttttattttaaataataaggaaaatcttagccagatgacccatttaagtcaacatagactgtgcacatttgatgagtcagcaaaatccaaaccataaccaaaaataatgacaaagacatgcaattgtcatgcagcattttatattgcacaaacatttttatgagctttgttttgaaacatcatcttaacaatgattctgaaggtaggcactattatactcctttaaatgcaagcaaaattaatctcacattgttgcattattcaaaattatttggaaacaagtgacgtaattgcaactcaacttcatagcagcaaaaagagaaatgtagtgatgtagtggccccaagaatttatgctctgca

SEQ ID NO: 203489 - DNA, 601 bp, Homo sapiens
ctggggcccaaaatgaacttttactcaaagtgatccagggtgctatagttcaatgtgatttaggctggcaagttatagttggttctatatagaattggaattaaaacagagtagaatcaagtaaagaataaagtaagatgtcatgagaaacttgatttaatagaggacactggatgtgaraggcagaaagtaataaagagaaaaggctacatagagaccagagggccaaatccaaaatctcagggtcttggtggcaccttcttattttgtctgtgaacagagctgatggagccctgttagagagccttctagtactaactttgtcttagcattgtagcaggacaagccacagacaaaacccctcagacaccgagttaaagaaagaacaggtttattcaactgggagcatcggcaagactcctgtcttaagagccgagctccccaagtgagcaattcctgtcccttttaagggctcacaactctaagggggtccgcttaagagggtcgtgattgattgagcaagcaggaggtacgtgactgggggctgcatgcaccagtaattagatcggaacaaaacaggacagggattttcacagttctt

SEQ ID NO: 203490 - DNA, 601 bp, Homo sapiens
ctggggcccaaaatgaacttttactcaaagtgatccagggtgctatagttcaatgtgatttaggctggcaagttatagttggttctatatagaattggaattaaaacagagtagaatcaagtaaagaataaagtaagatgtcatgagaaacttgatttaatagaggacactggatgtgagaggcagaaagtaataaagagaaaaggytacatagagaccagagggccaaatccaaaatctcagggtcttggtggcaccttcttattttgtctgtgaacagagctgatggagccctgttagagagccttctagtactaactttgtcttagcattgtagcaggacaagccacagacaaaacccctcagacaccgagttaaagaaagaacaggtttattcaactgggagcatcggcaagactcctgtcttaagagccgagctccccaagtgagcaattcctgtcccttttaagggctcacaactctaagggggtccgcttaagagggtcgtgattgattgagcaagcaggaggtacgtgactgggggctgcatgcaccagtaattagatcggaacaaaacaggacagggattttcacagttctt

SEQ ID NO: 203491 - DNA, 614 bp, Homo sapiens
gatttagcagacgtatgtctatagttatcaataatctcaaatttttcccacatgctcctgttttcctctttcctctggccagatataggtgattcctctttttgtttagccagcatcatggtgccttttctctccaactrggggttgatcattggaccgaagttgagagaacttttttttttagaaagcaaatagatacgaaaaattacagaacctcacccctaggaggtcacttctccaagttttgactcctctgtttttgcctactttacagagtcctcatgtacatttcctctgtgtttgtatgttttagtatgtaagtccaaatgcctgcttctgaatcttatgttgtaattttatatatctttgtatatacacttatccatattaaatttcaactcaacagctgtttaccaagcaactgctatgtaaaagtactgcattgtgcattgctgatacagatgtggatatctctaatcttgaaggagctcgacatttaacgatgcatttatccttttacatgaatgaccatgacacaatatggaaactactaccagcgatagatttgcaaagtattgtgatcacaaagatgccaacttgtttggttctaccaa

SEQ ID NO: 203492 - DNA, 323 bp, Homo sapiens
aatagtgtgatgttattgaattagggcaaatacatgacactgtgaaatccttaataaattatgcatgaggcattctgaattgtttacctcaatttggacaattttagagattaaagagtactgtgtaatttagtttgtagttttagggcataatggggagaagagaaacatagcttgtatttgttccagcttatttttgtattagtgtcytacttcacaattgtgtttgaaaacatttatttatttactttacattaatattgcttatcgttcaatgttttcagaagtaaatcaacttcaatagaagttaaaaatgaaagctt

SEQ ID NO: 203493 - DNA, 550 bp, Homo sapiens
aggaaccacagaaaacccccacaggaagtctgagtatggcaggcagaagatacatgttttggtgttcatgtacctgatcttttccctatcaggccaagggtttaagcagctatacttctccacttaaggccccagatcctgtctgtggcctcatctcctgctctcttctctgttgattttagtgacttcgcactcctcttgagctctcaagcytaggggtaataaccctctttattttgtctagcccaaggatgcttcaccaccccttataaatttcccttaccttggcccacacctttgtaaatattcctacattaataatcattcttcaatcaacactttgccatatttctgccagggcccaactattccaaatattaaagcattaaaaacaaacaaacaaacccaccgaaagtagtagtagaaattattcttatcttattgtaataatatttttattaataatatctgggatattactaatatcccaaatttaatttatttaataacttaatacatgatgatgtgataatttatttatttatttaat

SEQ ID NO: 203494 - DNA, 542 bp, Homo sapiens
ccctcccccctccccccaccccacaacaggccacggtgtgtgatgttccrcttcctgtgtccaagtgttctcattgttcaattcccacctatgagtgagaacatgaggtgtttggttttttgtccttgcgatagtttggcactactcacaatagcaaagacttggaaccaacccaaatgtccaacaatgatagactggattaagaaaatgtggcacatatacaccatggaatactatgcagccataaaaaatgatgagtttatgtcctttgtagggacatggatgaagctcttttttttttctttaatatggaacttgcatcagtgaaggaataaagagtgtattggtttgttattgctgctgtaacaaattgtcacacatttagtgggttaaaacaacacaaacttattatctttcaattctggaagccagaagtctgaaataggtttcctcgggctaaaatcaacgtgtctgcagggctgtacttcttctggaggccctaagggagaatctgtttccttgccttccccagcttctagaag

SEQ ID NO: 203495 - DNA, 542 bp, Homo sapiens
ccctcccccctccccccaccccacaacaggccacggtgtgtgatgttccacttcctgtgtccargtgttctcattgttcaattcccacctatgagtgagaacatgaggtgtttggttttttgtccttgcgatagtttggcactactcacaatagcaaagacttggaaccaacccaaatgtccaacaatgatagactggattaagaaaatgtggcacatatacaccatggaatactatgcagccataaaaaatgatgagtttatgtcctttgtagggacatggatgaagctcttttttttttctttaatatggaacttgcatcagtgaaggaataaagagtgtattggtttgttattgctgctgtaacaaattgtcacacatttagtgggttaaaacaacacaaacttattatctttcaattctggaagccagaagtctgaaataggtttcctcgggctaaaatcaacgtgtctgcagggctgtacttcttctggaggccctaagggagaatctgtttccttgccttccccagcttctagaag

SEQ ID NO: 203496 - DNA, 542 bp, Homo sapiens
ccctcccccctccccccaccccacaacaggccacggtgtgtgatgttccacttcctgtgtccaagtgttctcattgttcaattcccacctatgagtgagaacatgaggtgtttggttttttgtccttgcgatagtttggcactactcacaatagcaaagacttggaaccaacccaaatgtccaacaatgatagactggattaagaaaatgtggcacatatrcaccatggaatactatgcagccataaaaaatgatgagtttatgtcctttgtagggacatggatgaagctcttttttttttctttaatatggaacttgcatcagtgaaggaataaagagtgtattggtttgttattgctgctgtaacaaattgtcacacatttagtgggttaaaacaacacaaacttattatctttcaattctggaagccagaagtctgaaataggtttcctcgggctaaaatcaacgtgtctgcagggctgtacttcttctggaggccctaagggagaatctgtttccttgccttccccagcttctagaag

SEQ ID NO: 203497 - DNA, 458 bp, Homo sapiens
cagaggacagaaaacagacagtgggcaggggacatgtgtgagtggccctgaactcccatctctcytgctctgcgtctttagttccactttctggatttggttttcctgccagtggaaagggagtgtttgggaagagaagaccacgtttgagggtgagttaagtctcctttaagggcgattcctgctttgtcaggggctactactattagcaggcagagggaacaatcgcagaagagattggggtaaactccagtattaggcacagaggcagatcctggggtgggtgtgagtggagaagggatgagtagccctcctgtccttccctcaaggaaattcttccttagtaaacaggacagttaccctttggtgagcatggtcatatatgggaagattaagtctaggtgtgtatgatctggttgaatctttgtaacagtgaggttggttcatcgtgatcatcc

SEQ ID NO: 203498 - DNA, 458 bp, Homo sapiens
cagaggacagaaaacagacagtgggcaggggacatgtgtgagtggccctgaactcccatctctcttgctctgcgtctttagttccmctttctggatttggttttcctgccagtggaaagggagtgtttgggaagagaagaccacgtttgagggtgagttaagtctcctttaagggcgattcctgctttgtcaggggctactactattagcaggcagagggaacaatcgcagaagagattggggtaaactccagtattaggcacagaggcagatcctggggtgggtgtgagtggagaagggatgagtagccctcctgtccttccctcaaggaaattcttccttagtaaacaggacagttaccctttggtgagcatggtcatatatgggaagattaagtctaggtgtgtatgatctggttgaatctttgtaacagtgaggttggttcatcgtgatcatcc

SEQ ID NO: 203499 - DNA, 458 bp, Homo sapiens
cagaggacagaaaacagacagtgggcaggggacatgtgtgagtggccctgaactcccatctctcttgctctgcgtctttagttccactttctggatttggttttcctgccagtggaaagggagtgtttgggaagagaagaccacgtttgagggtgagttaagtctcctttaagggcgattcctgctttgtcaggggctactactattagcaggcagagggaacartcgcagaagagattggggtaaactccagtattaggcacagaggcagatcctggggtgggtgtgagtggagaagggatgagtagccctcctgtccttccctcaaggaaattcttccttagtaaacaggacagttaccctttggtgagcatggtcatatatgggaagattaagtctaggtgtgtatgatctggttgaatctttgtaacagtgaggttggttcatcgtgatcatcc

SEQ ID NO: 203500 - DNA, 458 bp, Homo sapiens
cagaggacagaaaacagacagtgggcaggggacatgtgtgagtggccctgaactcccatctctcttgctctgcgtctttagttccactttctggatttggttttcctgccagtggaaagggagtgtttgggaagagaagaccacgtttgagggtgagttaagtctcctttaagggcgattcctgctttgtcaggggctactactattagcaggcagagggaacaatcgcagaagagattggggtaaactccagtrttaggcacagaggcagatcctggggtgggtgtgagtggagaagggatgagtagccctcctgtccttccctcaaggaaattcttccttagtaaacaggacagttaccctttggtgagcatggtcatatatgggaagattaagtctaggtgtgtatgatctggttgaatctttgtaacagtgaggttggttcatcgtgatcatcc

SEQ ID NO: 203501 - DNA, 563 bp, Homo sapiens
atcacaccaggttgtgcttcccaggggcctgagaacttgcccacatccctgtcccccaactcccatgactcctctaagcaagccactaggaagctcaagaatcagcctcccaggactcactaataccaaagccagtagactgctctggggctcagccatactctccaagctgctgccaccaccagggcccaaagatgggctcagttggcatccamcacccagctaaatttctcctcgatctcaagtaataactgtactctaagctaccaaggaaatcaaagataccagtgaccctgggtactgcctatgaagtcatactaagatcacactaccataggcacccagaatcaaagccaaagtatcctactcaactaacaacatgcatacatttttcaggaaaaaaattttctcctacagggcaattaaaaaaacttgaacaagctactgctacacaagatttgcagatatcaatgaaaggacacaggaaacatgaaaaaggagaaaaatgtgacatcatcaaaggaccacaattgtccagcaacagatcccaatcaaaaagaatc

SEQ ID NO: 203502 - DNA, 588 bp, Homo sapiens
tttttctttcctagttagaggcatggagctttacatatgacaagtgttctctcatttgttaccctgcccactaagttcaataagtctctacatgattggattctctttacaaagcaacttaaacgaattgcagttatgatatcaaggaaagattccagtgctgaagaacagcctgttttggaatttactcccccaaatgcaggcacaaggcgaatttcatactgggatggcttaactaacctgtcttgattttagagtcactatatctgtctacatttaaaatagataattatcttttaactaggccaaagcattcaggttacaaaaagtcacagtgaaaagttaagttcttgtctctgcaggaagcaggcaagagccccaccctcctgggcgcagccrcagctgcccaaactgcagctgcagacccaggcatctctgcactctctggggccaggaagggcccccctgcccctgcagactcagaggtgtctgttcccacttcctggactctctctgctcctggcacccactccgatcttggagcaaggttggggtcaagcctgggtgctgtcacagcccagccaggtt

SEQ ID NO: 203503 - DNA, 498 bp, Homo sapiens
gtgcacggtgatgtggtttcccaggtggtgtctctgctcaccttctgggctttgctttgtcccccttgccatagggaaactgtcagggtacatttggtccaggcaaggctgtgacttggaaacaaagtaaatgaacagggctgttcttctcatcacacatacacaaccccgtaagaccacgcggttttcttgaaaaaacagagaaacacagccttggtgtgatgaagcattttgcaaaaacaatgtcaccaccaattattttacaaaatttgaagcaccaagacaaacactgggcgtgtggatgagggaaggggagacgctagttcccagaatggcatcgagaatrtataagttctttttcagaaacagggtctcgcgctgttgcccaggctggggtacagtggcacaatcatagctcactgcagcctcagacttctggactcaaggaatcctcccacctcatcctcccaagtagctagtactacaggcacatgccat

SEQ ID NO: 203504 - DNA, 498 bp, Homo sapiens
gtgcacggtgatgtggtttcccaggtggtgtctctgctcaccttctgggctttgctttgtcccccttgccatagggaaactgtcagggtacatttggtccaggcaaggctgtgacttggaaacaaagtaaatgaacagggctgttcttctcatcacacatacacaaccccgtaagaccacgcggttttcttgaaaaaacagagaaacacagccttggtgtgatgaagcattttgcaaaaacaatgtcaccaccaattattttacaaaatttgaagcaccaagacaaacactgggcgtgtggatgagggaaggggagacgctagttcccagaatggcatcgagaatgtataagttctttttcagaaacagggyctcgcgctgttgcccaggctggggtacagtggcacaatcatagctcactgcagcctcagacttctggactcaaggaatcctcccacctcatcctcccaagtagctagtactacaggcacatgccat

SEQ ID NO: 203505 - DNA, 428 bp, Homo sapiens
tgagaaacctaggttaccccaggggaggaaaactgcgtggctgacgggtgtgaccactccaggctgctcttttggacccaagcagagggaaggcagggtgctttgctctatggaacctcacctctgcctctgcccttaccagacccatttcctccatctttactggcccatttcaaccttcttcaaactactcaagaactatctgggaaatgacactcccaggaaataaactccagatcctcacacttcaggaataaatgttcttaagtatagggaagaagggagacaacgggaactacagtgaacagaaaataattcttaaaaaaaaagtcctcatcccatctcccggtacaaaatctgctgcaasctagggaaaggtggagaatttcagacgagagcattagtcggtgcaagccatccaattacca

SEQ ID NO: 203506 - DNA, 389 bp, Homo sapiens
tgaaggggtttgggggggaagacccctgtcttaagtttgagggatctgagatttcccagattcccggctgcacagaattttcttgcgtctttgctttcaagtcgcctccttgcctgcaactcttgccttactctgtctctgggtactgccctccattagcctcccacctaagatgtaggatacacccccgtttaaataaaggcaattccagtaccacctctttcyccctttcacctggagaagttcaggagagttctgaaatgtaaaaaaagaagaccaggcctgtgtagtttgaggaaaaaagatcgaacactttccagctctaagtttgttcctaaagaagaaacaggggtaaaacatcgggcagaaaaagtgtggggctttctgag

SEQ ID NO: 203507 - DNA, 509 bp, Homo sapiens
gaggaaggggttataagtgatttttatgaagtagggtctgaaaagattctgggcattatctgacgttaaaatatagagcaatcatttttgtagattagttgttaggcaactcataaaatattctgattccacgttatctacaaccaagtatggagaaactgagatactggtggaggagggaagaaaggacatttggggaagacagtggagggaacaaaagagaggcagagctgggaaattctcttccacattttcaagcctaggctttagaggtgacaattcttaaacatttaaacaactagcaaaggactacttgagtgacttccaaccaccaacatgttggaagatgttcagaaaaacaygtagaaaaaggtcaatgtgagtggagaatggagagaagaatgagaatggcaattacatggccaccatggacaaaataatttgtgctcattatcctcccctttgcaaatttaatgactcaaaaccatttgaaattaattttaaactca

SEQ ID NO: 203508 - DNA, 514 bp, Homo sapiens
cttccacattttcaagcctaggctttagaggtgacaattcttaaacatttaaacaactagcaaaggactacttgagtgacttccaaccaccaacatgttggaagatgttcagaaaaacacgtagaaaaaggtcaatgtgagtggagaatggagagaagaatgagaatggcaattacatggccaccatggacaaaataatttgtgctcattatcctcccctttgcaaatttaatgactcaaaaccatttgaaattaattttaaactcatggacatgaaagatgagtatataacattaactcagaaagtgttctctgaatgaggaccctccaacaatacttgggcatgaccagtgcttgtttctttatcatttgataagtcacctagttatcccaytgtcatgatcttatcgttttctgtgttcatcccccaccccatgtgtagtattttccatggtaggccactttcatctttggattctcaacccctagaataccactagtgataatatatata

SEQ ID NO: 203509 - DNA, 514 bp, Homo sapiens
cttccacattttcaagcctaggctttagaggtgacaattcttaaacatttaaacaactagcaaaggactacttgagtgacttccaaccaccaacatgttggaagatgttcagaaaaacacgtagaaaaaggtcaatgtgagtggagaatggagagaagaatgagaatggcaattacatggccaccatggacaaaataatttgtgctcattatcctcccctttgcaaatttaatgactcaaaaccatttgaaattaattttaaactcatggacatgaaagatgagtatataacattaactcagaaagtgttctctgaatgaggaccctccaacaatacttgggcatgaccagtgcttgtttctttatcatttgataagtcacctagttatcccactgtcatgatcttatcgttttctgtgttyatcccccaccccatgtgtagtattttccatggtaggccactttcatctttggattctcaacccctagaataccactagtgataatatatata

SEQ ID NO: 203510 - DNA, 573 bp, Homo sapiens
aaagtaagttttatctgttctttttataatgtgttaaaatatacacagttgtaattacataaattgcttaaactggccaaagtaggcaatgcatgttttgaagtattattgcatcctttattgttagtcattggtgttgggaacaggtcccccaaaatctggccataaactggccccaaaactgkccataaacaaaatctctacagcattgtgacatgtttgtgatgggcatgacgcccacgctggaaggttgtgggtttaccggaaggagggcaaggaacacctggcccacccagggtggaaaaccgcttaaaggtgttcttaaaccacaaacaatagcatgagtgatctgtgccttaaggacatgctcctgctgcagataactagccaaacccatccctttgtttcccgtaaggaatacttttacttaatctataatctatagaaacaatgcttatcactggcttgctgttaataaatacgtgggtaagtctctgttcgaggctctcagctctgaaggctgtgagacccgatttcccactccacacctctatatttctgtgtgtgtgtctt

SEQ ID NO: 203511 - DNA, 573 bp, Homo sapiens
aaagtaagttttatctgttctttttataatgtgttaaaatatacacagttgtaattacataaattgcttaaactggccaaagtaggcaatgcatgttttgaagtattattgcatcctttattgttagtcattggtgttgggaacaggtcccccaaaatctggccataaactggccccaaaactgtccataaacaaaatctctacagcattgtgacatgtttgtgatgggcrtgacgcccacgctggaaggttgtgggtttaccggaaggagggcaaggaacacctggcccacccagggtggaaaaccgcttaaaggtgttcttaaaccacaaacaatagcatgagtgatctgtgccttaaggacatgctcctgctgcagataactagccaaacccatccctttgtttcccgtaaggaatacttttacttaatctataatctatagaaacaatgcttatcactggcttgctgttaataaatacgtgggtaagtctctgttcgaggctctcagctctgaaggctgtgagacccgatttcccactccacacctctatatttctgtgtgtgtgtctt

SEQ ID NO: 203512 - DNA, 573 bp, Homo sapiens
aaagtaagttttatctgttctttttataatgtgttaaaatatacacagttgtaattacataaattgcttaaactggccaaagtaggcaatgcatgttttgaagtattattgcatcctttattgttagtcattggtgttgggaacaggtcccccaaaatctggccataaactggccccaaaactgtccataaacaaaatctctacagcattgtgacatgtttgtgatgggcatgacgcccacgctggaaggttgtgggtttaccggaaggagggcaaggaacacctgrcccacccagggtggaaaaccgcttaaaggtgttcttaaaccacaaacaatagcatgagtgatctgtgccttaaggacatgctcctgctgcagataactagccaaacccatccctttgtttcccgtaaggaatacttttacttaatctataatctatagaaacaatgcttatcactggcttgctgttaataaatacgtgggtaagtctctgttcgaggctctcagctctgaaggctgtgagacccgatttcccactccacacctctatatttctgtgtgtgtgtctt

SEQ ID NO: 203513 - DNA, 569 bp, Homo sapiens
atatataagagatcatgaagtatctatctttctatgcctggcttattgcacttagcataatgtcctccaagtttacccatgtagttgcaaatgacaggatgtcctcctttttatggctgaatattccattgtgtatgtataccacatttatttatccattcatctgttgatgggcacatggggtgattccatatcttaattattatgaataatgctgctacraatataggagtgcagatatctctttagcatatcgatttttattcctttgacttttttacccagaagtgggattgctgggccatatgatagttctatttttaggtttttcatgaatctccatatcatttgccctatgactgtactaatttacttatgtataaatttaattaaggtggtaaaaaatctgtatgctgagaaaaataaaacagtaatgaaagataatgaagaaaacatacataaatgggaagttatcctatgttcttggattagaataattaatattctttaaatgtccttaacaacccaaagcaatatatagattcaatacaatccctatcaaaatttca

SEQ ID NO: 203514 - DNA, 569 bp, Homo sapiens
atatataagagatcatgaagtatctatctttctatgcctggcttattgcacttagcataatgtcctccaagtttacccatgtagttgcaaatgacaggatgtcctcctttttatggctgaatattccattgtgtatgtataccacatttatttatccattcatctgttgatgggcacatggggtgattccatatcttaattattatgaataatgctgctacaaatataggagtgcagatatctctttagcatatcgatttttattcctttgacttttttacccagaagtgggattgctgggccatatgatagttctatttttaggtttttcatgaatctccatatcatttgccctatgactgtactaatttacttatgtataaatttaattaaggtggtaaaaaatctgtatrctgagaaaaataaaacagtaatgaaagataatgaagaaaacatacataaatgggaagttatcctatgttcttggattagaataattaatattctttaaatgtccttaacaacccaaagcaatatatagattcaatacaatccctatcaaaatttca

SEQ ID NO: 203515 - DNA, 551 bp, Homo sapiens
ttacccatgtagttgcaaatgacaggatgtcctcctttttatggctgaatattccattgtgtatgtataccacatttatttatccattcatctgttgatgggcacatggggtgattccatatcttaattattatgaataatgctgctacaaatataggagtgcagatatctctttagcatatcgatttttattcctttgacttttttacccagaagtgggattgctgggccatatgatagttctatttttaggtttttcatgaatctccatatcatttgccctatgactgtactaatttacttatgtataaatttaattaaggtggtaaaaaatctgtatgctgagaaaaataaaacagtaatgaaagataatgaagaaaacatacayaaatgggaagttatcctatgttcttggattagaataattaatattctttaaatgtccttaacaacccaaagcaatatatagattcaatacaatccctatcaaaatttcaatgccgtttttcacacatatagaaaaaaattcttaaatttgtctgaaaccacaa

SEQ ID NO: 203516 - DNA, 567 bp, Homo sapiens
acatatagaaaaaaattcttaaatttgtctgaaaccacaaaagacccccaatagccaaaacaatattgggcaaaaagaacaaagctggaggtatcatattactggatttcaaaatatattataaagctattgtagtcaagaaagtatgatactggcataaaaacagacatattagctgatggaacaggatagacagcccaaatataagcccacaaacctaggccaattgatttttgacaaaggtgccaagaacacacagtgggaaaaggacagtctcttctataaatgattctaggaaaactggatatctacaggcagaagaatgaaatttgacccttatttcacacgatawgcaaaaatcaactaaaaatgtattaaagagttacatataagacccaaaaccataaaagcattagaagaaaactataaaagcattagaagaaaagcttcacaatgtgagtctgggcaatgatttttttggctgtgtccttgaaagcacacaaaagcaaaactagacaaattggacttcatcaaactaaaaagcttctacatagcaaaggaaacaat

SEQ ID NO: 203517 - DNA, 484 bp, Homo sapiens
agatagacttttacaatggcaaaatatgatggaaaagactctgggctcatccttcagagaagccttctgtggcagagtaactgtctgtggaaggaaaaagtaaatcatttttaaaaaccccactgctccaaaatctgctctaatgccactgtcttyagggccaagtattccatctggcaagagcaagtcatggaaaagcacaaaggtaatttacccaattggcctgggcagaacattgtttcttcagttattttttgtgactctcccttcagagtgtgattcagacagttctgcaccaagatcagtggctgtgcagagttcaaataggtgaaaatacagctctggatgagtagcactgtattttttctcagttcagtctctcgttcttcattgctcagctcagagtttctctctctgtcttcattgctcaacttcgtgtccctgcttcccaacaggagaaccctatctaaaatatttattttta

SEQ ID NO: 203518 - DNA, 484 bp, Homo sapiens
agatagacttttacaatggcaaaatatgatggaaaagactctgggctcatccttcagagaagccttctgtggcagagtaactgtctgtggaaggaaaaagtaaatcatttttaaaaaccccactgctccaaaatctgctctaatgccactgtcttcagggccaagtattccatctggcaagagcaagtcatggaaaagcacaaaggtaatttacccaattggcctgggcagaacattgtttcttcagttattttttgtgactctcccttcagagtgtgattcagacagttctgcaccaagatcagtggctgtgcagagttcaaataggtgaaaatacagctctggatgagtagcactgtattttttctcagttcagtctctcgttcttcattgctcagctcagagtttctctctctgtcttcattgctcaacttcgtgtccctscttcccaacaggagaaccctatctaaaatatttattttta

SEQ ID NO: 203519 - DNA, 513 bp, Homo sapiens
tcctcatctttattattttctatgattccaggcaagagtcatttcaaaatgagtctactttagcttcagtacccttggaaaccaaccaatccaatggttttactgccttggtgagatgctgtatttcttgggaattgycatttagtagattaaaattataaaacccagcagagggaaatttcccaacagcaaatcaatttatatgtctttcagagagttttccagaaatgtacttaagaactgctgactcaatgtaatgttcttccaaagccaggacactcagggccgataaggacactaacccgtgtattttctgagcttttcctagctggatatttgtactatgtgaaattcatgttctgtactctagagacatgaatcacttgttcaattaaaaatagtatttctctggcaattgtttgatcaagaatgggaataagttgtgggtgaaattgtgaccatctgcattcctgtcttggaaacctgcctgttgttttgtaaccatatgcagac

SEQ ID NO: 203520 - DNA, 455 bp, Homo sapiens
agacaataaaaaaaatcaataaaacatcaggcagtaaaagcgctggtcagattaaacagagcaatactgtaaggagtgattcagtggcaatcacagtgattgtcaggaaatgtctctttgaagagatgaaaatgtggactccatccatgtggtgggcaggacagtgatgcttcaccccaccttaaaayggacacatcctaatctttggaagttgagaatacgttactttacatggcaaaaggatatttgcagatgccatcaaaataagcaccttgagctagggagcgtatcctgggttattcatgtgggtccaatctaatcacatgccttcttgaaatcagcagaggtttctcattccctcgctttcagagagaaatgtgactgtgggagaggatgggagagatacaactaaattggctttgaaggtggaggaaggggaccgtcagccaaggaat

SEQ ID NO: 203521 - DNA, 593 bp, Homo sapiens
caatgatgtcagtgcatgttaggcagcaagcagataaactcatatagcttctctataggggtgagctgaaataagaatttcctccgatagctcaaatttctcatgttgtaggcaaagccctccagaacacatttctaatccagagttcattccaactccttccccacacaagccttctgctttagtcagaggcctctcctcagattcttctctgtgaactttgcttggaaggaatgactatttcctcctaaaccctgttcatattccggagtccttcaaagctagctcaaatttcacttcagtagaactctttcctaaaaaktgtatccttcccatccctttcttaaatgtcaatagaataattatttttgccacacattttggtggtatattaggattctaggcagtcataacaaattaccaaaaacgtagtggcttaaaacaacgtaaaatgtaagaccttgcatttctgtggctcaagagtctgacacaacttcactcagttaagaccgaggagttacagggctggtttcctttctataggcgataggggtggagcctctttcttcctcattcagatgttggcagaattc

SEQ ID NO: 203522 - DNA, 549 bp, Homo sapiens
ggaattcaagatgagcttcttattggatgggcgcccaaggtgaaagacaacataggtgattcctcacaaaagaatgagggagcatacctattaccaactctcagaaagcacagcctgagccttaggcatgttagaagtgggaagagagatctaggcctgggttattctagtaatgcaagggaagcggctccattcttgtaactggacggggccttgagaccacttagatctttattcaaaggtcagctgccttattctgctacttcctgcctcccatttcctttttcttatggaagacaaagcttaaaactaaaggagtgatttgagactcagaaagaaacatgaaaacatatggcttaccaaggcaatgcttactcagtagctggtgatttttcctcaagtttaacaggtcttttcacacatattagaaaaagtttcacatttttccaaaaaagcagcagcaaccttccaagycttcgagtgctattgcctactcaagcctgggccgtctcaggctgaaatagttgtctcctgttcagtctgatgaat

SEQ ID NO: 203523 - DNA, 459 bp, Homo sapiens
agggaacagcaggaacacttcatagcagactttggagggtgactgtgaggtatgattgataatccctctcattctctatggggaaatgcgttgcttgttcagacctcagcaagatcttaggaaacctggtttttcactgaaggagcttgcatattgctgttgctcacatttccttgtcagagtttatgagaattttcaatacaacaaaggccagagttcctgtccacaaarcagattacaatctatcagtgtgagagggacaatgcagctggtgcggcacagactcggtccttattcataaacactttgctggccttcaagcacttgttaccgacagcagggcatgtttatacagctccttccaaaaataaaattgaaggaaaaaaataagtaaattcataatatagcactttcccaaactcaaaaacatagagatatttttgttttggatttggaaac

SEQ ID NO: 203524 - DNA, 432 bp, Homo sapiens
tgtgttcatgaaaacacatagcacatgggttagaacacaggtgtgtttgctggggctaggaaaatcaatggaaataaatgcatmtgaactgagctattaggccaccttgctaactttctcatatagaggaaaacaaatagttctaaatttccagtgcaatcctgactctattcatgtacaatcacttttagttacttttatcttgctcttacaataccctttagaatgggttatttgatattacctcttactcattagcttccatctctgcctggctgcagagtgaaataaactaaattacctgagcaagtcaagacaaaattgcataaaactcaggaatataaatgctggctctacctgttccaggacacaatgcactttccctctgacatagtatggaaccttctacttctcaattctggttctccatat

SEQ ID NO: 203525 - DNA, 432 bp, Homo sapiens
tgtgttcatgaaaacacatagcacatgggttagaacacaggtgtgtttgctggggctaggaaaatcaatggaaataaatgcatctgaactgagctattaggccaccttgctaactttctcatatagaggaaaacaaatagttctaaatttccagtgcaatcctgactctattcatgtacaatcacttttagttacttttatcttgctcttacaataccctttagaatgggttatttgatattacctcttactcattagcttccatctctgcctggctgcagagtgaaataaactaaattacctgagcaagtcaagacaaaattgcataaaactcaggaatataaatgctggctctacctgttccaggacacaatgcactttccctctgacatagtatggaamcttctacttctcaattctggttctccatat

SEQ ID NO: 203526 - DNA, 516 bp, Homo sapiens
aaccctaacaaagcttaaaagcaaatctttaaataatcacactgatgggcacataaactaactcctcctccggaacaaaattcaagaaggagtgaacaaaatccaaacactcaataacttgacatccatatgtctatcatatattaatggtaaattttttttwaaaatataaactaacaggtcccagaagctcaatacgacccaggcaggataaacaaaaagaaaaccacagcaagaaacatcataaccaaaataattaaatctacaataaagcaagtaaatgtgatgctaacaaagaaaaagaagtcagtaaatataaacagattcagaaattagacaataaaactaaaaatcaagtgctttaaaagtacaattatagatatgctaaataattttaaagtaaatataacaacaatgcaggaaaaatgagacaatcgataaaatggaaattataaaaaaagaaacatgaaacctttagaacttcaaaatatggtattggagtgaaaaattcactat

SEQ ID NO: 203527 - DNA, 488 bp, Homo sapiens
gttttgccttggtaaatagtatgctcttaataataatgtccattgtactattgctgggtgcagtgcttttctataaacctcaattaggtcaagatggttgatagcgtggtttagatcttctctttccttattaatttattatattcttgctctatcaatttctgagagaggtgtggtgargtctccaactatagttgtggatttgtctctttctccttttttagttttacctgtgtttgctttatatattttgaagttctgggattaagtacccacatatttaggaatattatctcttactcattttttcacccatttatcattatgcatggttccttcttcatgattatttttaataaactttattttttaaatcagctttaggttcacagcgaaattgaacagaaagtacagacagttcccatgtaccctttgttcccacacatacaacagtctctcctactgtcaatgtctcacaccacaatggt

SEQ ID NO: 203528 - DNA, 474 bp, Homo sapiens
ccacaaaaccttcacatacaatagagaatggaggaaggggaggaaaggaaatgaaggggaaaaatcaggtcctctgctcagatggcaccaatagcctcccaggagtgtgatgcaaattgctaagctgtttcctyttcatctccctgggcctggctgcagagccaggcagctctcctcacttttaaagatgtgctggggcttcaagtttgacattgtgcctgcttttgtttttctagtgaggacacttaagtactttgggatttttgatgtgagacaattaggagcctagaataccattagctagaagaggagcaaagctggcagaaatggaggctgcagaagatgtttattgccagccttctgcctctgtaatgaggagcttcaagcagctttgccatgcaattgagatagagtgcacaagatgcccaattaggagcaaatgactgcagtcttcagtggaagtgatgaattgga

SEQ ID NO: 203529 - DNA, 389 bp, Homo sapiens
ttactatccatctgtgttgtggttacataaacatagcttttattaattttacagaccttatctctgcttttagagtgattttttttgccttcttataaatttataaagaacctgacaaataaatacaartgtgtaaaaatatgcttttacttcttctttctgacactggacaaatggttatttcttagggtggttatgtcttctctgatatttttagtgtaatgattatctgagggaatatacttactagctttaatgaagaggcagttgttaaatcaaaggatttctactctttatttgctaatagagctttccccagtagtggtagaaaaggcattcatgttttagaaaatgctcaggattctctctcatctgctccaaagaggaag

SEQ ID NO: 203530 - DNA, 577 bp, Homo sapiens
ctgccattttttaaagggaaaagtaaacttccttgagccattgaagtcagtcatggctatatgacttgttttgaccartgaattgtgagtagatgtgttaggtctcatttttatgcagaagctttaagagccaatgcatggttcaccatgttctctttttcctctgccatgatgaccagcaattttctagaagagactactctatcagcctgggctttgaagtgaataggacatagagtaaagctatagcaacccaggatgcacatggagcatgggcatttgatatgagcattattaaaagccactaatattttcaggttgtttgtcactgcagcataatctagtataccttgactaatacaactctgcaccaatagaagggaaacataagacagatgtgcatatgaagacctaaccaatgcagattttaatgcaataaccatttcgttaattttccaggctgtatctcttcatttcatgggttattagtgtttttttttagcggtgctatgtcaagcctcacatactgttacccacagtcaacctaaggttacattctgctacctccttgcaaatc

SEQ ID NO: 203531 - DNA, 588 bp, Homo sapiens
gtggtgatacctcctcttcattactgtttcaaggaatttgtgttttctcctgtttgttcttgattacacttactaaggtttaacgatattactaatcttttcatggtacaactttttgctttttctcaattttttttttgaaatttcagtgatttctattcttgtgtttcttattaccttctacttatttggggtttaatttgctcattttttacaaacttcttgaagtgtaaactgaggttgctgattttagattcatttcaaatgtaagcatttaaatatgcaaatttccatctraacactactttagttgcctcctcctaattttgatatgttctatattcataacctccagttcaaaatattttctaacttctttgtgatttcttctttgaccgatgatttacttcaaattgtgcttttctgtttccaaaacagcacagttttttctagatatatactattcttagatattgtcagtctctcaaaatatttgttctaattacactcccagcacaatgtatgagtgatctagttgcctcacataattcatccacttgtctttgacttaatttcagatttttttgg

SEQ ID NO: 203532 - DNA, 502 bp, Homo sapiens
cgggatcctctgctcttggacagagatatttatgaggtctctgggaacaggtcttgggaaacaacctcaatgtcttctgcttcatttttctataactccatgctcccctgagaccttctcatttccagttgctgtactgtcagagaattacctctttcggcagacatggccatagttccccgggaggaaaggctgtgcgtaggccctccagtgagcatcacacacggcctggtgcagtgcagagctccatctgggtgtctagcatcagrtgggcagaactgacagcctgtttgcctgtcctgggcactggtgtgggggcaccatccaccatgagtactctgtggtggtgtttgtggttgattcacacacctggatctgcaatctcctaagtgaaatcttgccaatattttctgcttattgtaaattggctgaattttatgcccctggatcctgaaccatccataaacatgcactagagaggaaaggtctccaggaagaaggc

SEQ ID NO: 203533 - DNA, 614 bp, Homo sapiens
ttttagaaaaaaaagcaggaggggtgtttgagatctagggctaggaaagactttttaggcacaaaaagcacgatcctttaaaggaaaaaaagataaaaactggacctcatcaaaattaaaaacttttactctgcacaagaccctgtaaaaacaatgaaaatgcagactacatactgtgagaaagtatttacaaaacacatactcaaaaaagtattaccctgtagaccatgtaaagaattctcraaacacaacagtaaaaaagcaaaaatccagttagaaataagccaaatatatcaatagacatttcactgaaaagaatatacagatggcaaataagcacataaaaatgtttagtttcattgtttaccagaggaatgcaaattaaaaccacaatgagatatcactgtatagctatcagaatggctaaaacaaaaatgtgacagcataaaatgctggcaagcatgcagaaaaactgaatcagttactcattgttggaaggactgtaaattagtacagtcactctaggaaacagtttggcagcttcttatacaataactatacaattagtatacgatccagcaattgcactcttgggcatttattccagggaaacg

SEQ ID NO: 203534 - DNA, 413 bp, Homo sapiens
gaattctgtatcatattgtaatggtgaatacaagacattaagcattgtcaaaactcatagaactttataatacaaagagtaacccaaaatgaatgcaaaatacaaaacaaatacttaggagattcggtgatccagaatggaatacaaaatgtaacaaaaggattcaaatgcattacaaaagtataaaacgaccttactgacrtgactgggagaaaaaggtgctggtctaagtaactttgaaactgggtgtattctgcaaggaactgtgtatcagcattgcactctacttgatgaagttgctcctcacagagttgtaagttaccaattctgaaactactgtacatgtatattgcaatcgaacagttaagtaaatggatgccatgtgtagaaatcagttttctcactttagagtg

SEQ ID NO: 203535 - DNA, 413 bp, Homo sapiens
gaattctgtatcatattgtaatggtgaatacaagacattaagcattgtcaaaactcatagaactttataatacaaagagtaacccaaaatgaatgcaaaatacaaaacaaatacttaggagattcggtgatccagaatggaatacaaaatgtaacaaaaggattcaaatgcattacaaaagtataaaacgaccttactgacgtgactgggagaaaaaggtgctggtctaagtaactttgaaactgggtgtattctgcaaggaactgtgtatcagcattgcactctasttgatgaagttgctcctcacagagttgtaagttaccaattctgaaactactgtacatgtatattgcaatcgaacagttaagtaaatggatgccatgtgtagaaatcagttttctcactttagagtg

SEQ ID NO: 203536 - DNA, 421 bp, Homo sapiens
tgaggtttataaatgtcattgtctatatgttttcacttttattatttttaattgtttgagtccacttaatcttatttcatttccacctgttttgtttytaggttgcctctttcctggtccttagccaaaggaagcaggcttttgttgagactttttgttttgtctgtacctgttggcagtgtttggaatatgcaaggcagaaataaatcccagggagctcgctgctgagttatttttctgtcctgacatccctagttggtctccctttttctctctccccttcagcatctgatgtttgttttctgtataatgttcagggcttagctggagaaatggggagaactctgtcattccatttggttccagaactagttgcccctgctgcctatttttatgatgttattattttcattagtttttt

SEQ ID NO: 203537 - DNA, 563 bp, Homo sapiens
tgttctacctaaaataaaaataaccaggcatggtggcacacattagtggtcccaactactgaggaggctgaggcaggaggattgcctgaatccaggagtttgaggctgcagtgagctatgattgtgccactgcactacagcctggattccaaagcaagaccttatctcaaaaaaaaaaaaaaatccaacatctcttcatgattaaaatcctcagcaaactaggcatcaaaggaacatgcttcaaaataataagagtcatctatgacaaacctacagctaacatcatactaaatggggaaaagttggaagcattcaccctaagaactggaacaagacaaggatgtccaccctcatcactcctgtttaacatagcattggaagtcataccagaacgacgaggcaagataaataaaaggcatccaaattggaaaagagaaagtcatgttgatgacatgatcttatatctagaaaaccctamagacttctccaaaagactcctagacttgacaaatgatttcagtaaagtttcaggatagacaagcaaggtaaaaataattaggaag

SEQ ID NO: 203538 - DNA, 434 bp, Homo sapiens
caatccacttacctccactgcgccttcccagtggaactctcacagtcaccaggcacgtcctatgtgmtagtgcggtactatctgctcagtcctcacactaaccctgcaggcaaaccacgacacactgggatccgggagctgatcagctcacctcctgcaggcagccgaggaaccgagtgtgaaccccgagcgctgctcctaactgtcatgtgcataagcatctcaatgcacgttttgcttgtgttttctcgatttcctgttccttatgttttctcaatttttcttcacaatgatatctttttaggcccttttcctttcccttgtgatttggaaggtgatagtcttttcaccttaccagcagttgttcttacgttgctggaactcccctgcaagctcttatcaagtgcttccctgctgtcccatccagtgaattc

SEQ ID NO: 203539 - DNA, 533 bp, Homo sapiens
tctccatgtctcctcagcctcttccaactttttccttcatttctctctgcctatattttttgcacttcccctgcatccatctttcttctacatgagcccacctttcatttccctgtcgcttctcctgggttcttccatcacgctgtctcttatgtacaaattgctaccactctattggtctgtctccagattctttctgtcactgtttttyttctgcttgccctaccctctcttaaaattctgctgccttctctcaactcttgtcacttttaacttatatacttattcaaatctttttttctcatctttttttttttttttttgagatgaagtctcactctgttgcccaagctggagtgcagtggcacgatcttgtctcactgcaacctccacctcccagagtcaagcaattctcctgcctcaggctcctgagtagctgggactacaggtacacagcaccaagcttggctaatttttttgtatttttagtagagatggggtttcactacgttagccaggctggtcttgaattc

SEQ ID NO: 203540 - DNA, 566 bp, Homo sapiens
tgtgggtcttagcctactcttacgggttgtggttccaatagcaatttaacattcagaaactttgcagtgttattttcctctgcttgattcttccagtgcccataaggctcccactgtagtctgctggtggtgcctgtagggaaaaagtgatttttccaggtatggcagtcagatgtctcttgatgtgggaggggtctcactttaagctccctcctctctttctcggtgtctctgagtgagggaggagagttttgggctcacaggatcaaagaggcttccaaagcctgatcacttgatgtgaccaggtcttattcttttctgcctggccgtcyctgcgtctgcactggggagaagaatttggcaattttatataaattaagcatccacctaatctatgatccagagttctattcctctgtatctaccaaagataaataaagatttagggatgtgaatgcccttgaaatgacaaatggataaataaactatgacacattcatataatagaatactattcaacaataagaagaaacagatgatgcatgcatgtgacaataaggatgatt

SEQ ID NO: 203541 - DNA, 538 bp, Homo sapiens
accacttgccctctatcttgctccctcttttgccatatgacacacctgctccccttttgccttccacaatgattttaagcttcctgaggcttcaccagaagcagatgctggcaccatgcttcttgggcaacctgcagaaccagaaaccaaataaatctctttcctttataaattacccagtctcaggtattcctttttaccaatgcaaaagggactaatacattggtcttccttcattgttttccttcttcctgttcccattttctcccttccttcattgtcctccttcttcctgttcccattttctcccttccttctttccttccttcttattgttaaaaattgtaaatgttaatgtatatttaattttgatgtccatatgctcattgctggtgtatataaatcaagttgatttttggtatgttaattttgtatcctgcagctttgctaaactcacttattctgtttttgttttgtttttgtggattcttygggattttctatgcagacaattatgtcttctgcaaacagccagtgt

SEQ ID NO: 203542 - DNA, 558 bp, Homo sapiens
cgaagccctgtttctgtatttaaaaaaaaaaaaaaagaagaagaggaggaggaaagaaaaaagaaactaatacagagagtaaatatactgctatactttaggccaaattaaaaaattaaaatgtatgtgctgataaagagctcaaatctccctaaatgaatttattaatttaacataaactcagtaaaaacaccatttttttggccaggtgtggtggctcatgcctgtaatcacagcactttgggaggctgaggcaggtggatcgcctgaggtcaggagtttgagaccagcctggccaacatggcgaaaacctgtctgtactaaaaatacaaaaattagctgggggtggtagcatgtccctgttaatcccagctactcaggaggctgaggctggagaatcgcttgaacttaggaggcggcagttgcagtgagccaagatcttgtcactgcagtccarcctgggcaacagagcaaaacttcgtctcaaagaaaaacaacaacaacaacaacaacaaaaaacccaccatatttgttctaaataagagaatacaattgtaa

SEQ ID NO: 203543 - DNA, 628 bp, Homo sapiens
cagggcacctacacccaaaaagtaaacaggtgtgtaaatgagtgtggtgtggtctttatccaaggaggtcagggcgacctcagcatctcccccttatctgtgggcgactgcatccatttcttccccctcattcttcccagctttcattgcttctgaactgctgacagtggggacagtggggagggaagtatctgtgtctgaggagcccgcagtaccccctctcaggcttagccacactggctgcctgctccagttccaccctcggggccagcacttactcggcatatccgagttttggtttgtcctggccttttacagtcctgggaactgtgactggacctccactcacactgacctctccccagcacccttctccaccaccactacagaaacttgcatgctatttggtttggaaaattccagaaggcccgactctcctgtgggtctgtgtcacccctgaccaagtcccagctctgaggtctcaggcaggccaagctgcctctctgagctcctagagcctcagccccggaggggcagtsgtggggcattcacaaagtaatctgtggtcatacctggctccagcaagcccacaggctgtgcctgccatgccgacacgccccttcacact

SEQ ID NO: 203544 - DNA, 632 bp, Homo sapiens
ttgctctccttgcccaggcggagtgcaatggtgcgatcttggctcactgcatccttcacctcatgagttcaaatgattctcttgcctctgcctcccaagtagttgggattacatgtgctcaccaccacgcccagctaatttttgtattttcagtagagacaggatttcaccatgtgggccaggctggtctcaaactcctgaacctcaagtgatccacccacctcagcctcccaaaatgttaagattataggcatgagccaccrtgcccagccttaagttttttataataggtagaaaactagaaactgctcagtctacctctccataactacttgctgaagagacaaaaaataaaaacaaccacacgcagaggagcacacacagagacaaccctaccaacttttcttgggtcggagaacccaagaaaaagacatggttttgagattaaaatcccagaagtttaatccttaaaggaaataaagaaacaatgattgtaaaagtaataagatatgctggtaattatattttttgtttgtgtatcccattaatgaagagtttcaaaggattagacaaggaaaagtatagatggtcctttcacttcatcagaactgcataggaaatatgattattag

SEQ ID NO: 203545 - DNA, 614 bp, Homo sapiens
tatatgagcttttgcatcttagaaaatctccatgtctattgcatttcattgtatattagtgttgcttttaaagtttctttaatattcattttgccatttaaatcaaaattgtccaaaaaggaatcactagtgagcacaatatttgcagccatgaaagttggtgacactttaaagatccttttgaggacacttatgaaaaataactagtgggaaaataacattttccttgggaaaggaaatgtggaaaaccctcttctggacatttaactgtggaagatcctatcatcttttcacctataatttacgtttccttagcagctaactacagtaaacaaagtaacagctgatcaatggagtaaaggaatactcaaaccacagtttccattgcttggacaaaaactttctttagaacatgatcacgtaatttattaaattaatatgtgcgttcatattcgagatgtacatattagacatataaataaatagtagagatccatgttttaaggatgaaatcagtaaaaggatataacaggacatgatggcttttttacttgacttattttattcaattggtacatagatayatacctaagtaaaagtataggaaaaagtca

SEQ ID NO: 203546 - DNA, 620 bp, Homo sapiens
tcaaatatcatacactttgcccctgctgtttctgtttcttccttctgaactactcagaccagtaccagcgacaaggaaatgactccttttgattacaaaataaatgaaaattgaagatctgtcaaaatgtatccagtagaattgcacagagcaaaataattcttcaactctgtgatgaaaggatgagctccctctgtgatcatcacttactaggattgaagaattcatggttgtgtggtttgaaattaaactgasttcaaaagtctgaaagaatttttttttctttctggttatctccttgaaaacaaacaaacaaacaaacaaaacctgaaaagtccgtaccagtaagatatttggattactatgcagcaaaattcactattgagctattaagtaaatgaacgacggtggttgttaaaattttcttatatcattatattatccagatatccataagttatgctaattttaacctacatattttgatatttaattctctgttattaaactcatgttgctacaaatatttgaaaaattcctaactgtatagagattttgatgtatggcaattatgactagcttatgtagaatataaactaaaaataccagagaacatggac

SEQ ID NO: 203547 - DNA, 460 bp, Homo sapiens
atgctctatatgcaagaagtgggaaattacataagctaatttgaaaataagtttatgctctaaccatccctggtcacaatgccttttttctttccttaatggcaaactaggctcgcccgatttgtacaccatgctgtctcagggcagggagtggtttagagttatttctgattcagtcacttgtacccttatgttgaactaacatatattgagatcataaagataaagaatacttrgttaagtacactgttcactgagtcctcctaaggtggctcacatgggccaagtcggggaatgtaatgggtttctgtacattttatcaaaatgccctgtctcttttctacctgatcctactggacaaaaggtgtaggtatgagtagaagacgattcaacaacaacaacaacaaaaaggcaaagttacaactcttggaaatagaggcaccaattttgtggaaagcaa

SEQ ID NO: 203548 - DNA, 599 bp, Homo sapiens
ctctacatattataagacaagtgacttctagctgtgaaaatttcccatgggggctaaataacaaattaacactagtttgggtaaaggtttcctaattagctgatcgaggctgtcagrccatgagaggaagcaaaccaccatgatgttctttaacactttgcacattcctcactcatcatccttccctcctccctgctaattctctctgattagtttagaagccttgaaatcagtttagcttttataaggaagcttttgtaagttgcagtctttctttcctaaatatgtttgttgtcagcaagccaaaagtacatttacaatcttctgtaagctcatttgagggagatcgaggtttataagaaggaggctatttgcatataaattatgcccagaatataaggagtgaaggctaagaaatgctagtatttaaaaggaaaatagaggtcaatctgtgatgtaaaacattttttaaagtttagtgggatttgatggtttgtatttcttgcagcattaccagctgaaagttcagggtgggagtggggagattttggcaatccgcagaactcccagtcaagattttgtataacatttaattggaa

SEQ ID NO: 203549 - DNA, 638 bp, Homo sapiens
ggaatgtctaagcagcaaagcattcaagaggtgacttgggtgctgttaaagacattcaattttaaaagggaaacagagcataaaagtttggaaaattcacagcctggaaatgaactagaaaaaaaaatcaaatttttctgaagagaaattcaagctggctgcagaaatttgcataattaaccaggagcctaatgttaattatcaagacaatgaggaaaatatctccagggtatgycatagacctttgtgacagccccacccatcacaggcctggaggtttaggagtgaaaaatggtaccatgggctgggcccagggtcccgtactgtatgcagcctagggacctgatgtcctgcatcccagctgctctagctgggactgaaaggagccaacatggagcttgggccatggcttcagagggtgcaacccagaagccctggcagcttccacatggtgttgagcctgtgaatgtagagaagtcaaggactggattttgggaacctccacctagatttcagaggatgtatgaaaatgtctggatggccaggcagaagtttgctgcagaggcagggctctcatggagaacctctgctactgcagtagggaagggaaatgtgggtgtggagcccccacacagagt

SEQ ID NO: 203550 - DNA, 643 bp, Homo sapiens
ccctcatatagcctaagtcacttgataaaccctctagaacatgtagattttgtcttggaagtataaactgatgtttgcatttttgatagatgtatcattttggtagatgtgatggaataagtctatccacagatacaagcattgctgtgagaagtctgggtcaaaaacatccacctacttttaatgatagtaagagaaagtgatagtttcactttaataatgaaacttaaatttactccacaagatgcctgttctctcctcaagcatattttagaacatattaagatacacatgcagactgattttactcataaattcctagaataaagagcagagagggagactaagttacaggtggattctaattctaaaggagagcaactgtcggactggagcaatggcttttaggacatcaatgattcttatttttacttctctacagatagaaaatgtgtttgccagttcaataggtgggtrtaacattagaattgaccactttcacaaaatctatagtcaaaaaaaaaaaaaagtcaaaaagggagttcttttgaaaacctgtgaggagattgtatataaagaatcttcaaaatgtttatggaaaaatggatactgtgaaaaactctgcatggaatttatttttttg

SEQ ID NO: 203551 - DNA, 319 bp, Homo sapiens
gtctttatttttttcttagtctactctttcttatctttcaagaaaccaactttttgtttgattgatcttttgtttcactctcaatttcatttacttctactctgatcttcattctttctttccccttactaatttgggatttgatttgtccttgtttttctagttgcttagggtgcatcattaagttgtttattaaagtttttctaattttttgatgtaggtgtttattrctataaactttttaatatggtttggctctgtgtccacacccaaatctcaccatgaattgtaacaatccccacttgtcaagcataggacc

SEQ ID NO: 203552 - DNA, 624 bp, Homo sapiens
ggattaataaccacaatatataaggagctcaaacaactcaattagaaaacatctaataattcaattaaaaatgggcaaaatatctgaaaagacatttctcaaaagaagacatacaaatggcgaacaggaatttgaaaaaatcatcagagaaatgtaaattaaaactacaatgaggtgctatctyatcagcattaaaatggcttttatccataagagcaacaatgctagtgaggaagtggagaaaaggaaatcctcatacactgttggtgggaatataaatgagtatagctactatggagagtttggaggttcctcaagaaactatataaaaatagaaccaccatatgatcgagtaatcccagtgctgggtatatgcccaaaagaaaggaaatcagcatatcaaagtgatatctgtgctcccatgtttattgtagcactattcacaacagccaagatttggaaccaatctacatgtccattgacaaaaaaaacagattaaaaaatatggtaaatatacacaaaatggagtcctatgcaaccataaaaaaaatgaaatcctgtcatttgcaacaacatcgatagaactggaggacattatgttaagtgaaataaaccaggcacaga

SEQ ID NO: 203553 - DNA, 516 bp, Homo sapiens
agccatttgtgcatacttctcaggttaaatgtctgttcaaatcctttacccatttttttcatcttttttgtgtgtgtttgtttttgttgttgttgttgagctttaggtgttcttttacattctggattttactattttgtcagatacatgatttacaaataatttctctcattttgcgcaatgtctttacactgtttataggatcttttgaggccctaaatatttmaattgttattaaatccagtttgtcaatactttcctttgtgcttaagcctttggtgtcatattgaagaagtcactgctaaatcaaatgtcgtgaagtttatgccctatgtttgcttctaatagttttagatattacattaatgcctttgatccattttgagttttttaaaaattatttgcatatggtatctacctctttcttgtgcatgtggatattcaggtttgccttcaccatgtgttgcaaagactgccttgtgcccattgaatggttgtggcgcttttgtcaaaata

SEQ ID NO: 203554 - DNA, 624 bp, Homo sapiens
tggaaagttggaattttactgtacatgaaatctatatgtgcaccaaaagatacattgagttcagagaagaactctcttccataattacttttatagttacaccagatktcaagactgagaaaaacaccagatgccaagcctgagaaaacctccctgacttccctctccaaaatttgcaaatgcacctaaaataattatttaacccttgcttaatcaagctttattgtttattttaaatgttctaacattctttctgttactagtgataaaaaaggaactgtcaaacattaccacgtgcatacaaatgctgagaacaaattatacctggcagaaaactactgttttgattccattccaaagcttattcattatcatcaacacaattcagcaggtaacttattttagtttttcttttatgggcccttgttgtaaaacagcaattttcctggatactactgatcctcctaatattcttaattatatagggaaccatgaaagtaggaaaaaatcctctcaagtcttttgcctatcataatttttagcttacattcccaggaatataacatgattctctccttaatgccagaaagaatgaaattgagtaaactgggtgacttagaaaga

SEQ ID NO: 203555 - DNA, 474 bp, Homo sapiens
ctgggtgacttagaaagagaaattctctttataaaaatattcgtagggtttttctgtgtatagaagcaagaggattatraatttaaaatattatagaaatatatacatatcgttggatcatggaccagttgtctattatgacagggttttttgcatgctgccactagcacttactaatcattacatatataaatagaaattatatattatgtatatacattacatttttacagagatgagatcattctacacatattgctcagcttgctttctttactcaacatgtcttagaagtctttccacgcaaacacaaagagcttactttggtctatttaacagctgtgtagaattctatcatagttaccccataatttattcacctagccctctgttgattagcagttggatcatgtccagtattttcacattataatggatgtttcagtgcacaattctgcatgcatagctctgtcc

SEQ ID NO: 203556 - DNA, 558 bp, Homo sapiens
  misc_feature (1)...(558): n = A,T,C or G
atctatacaactggtacttacagacattaaaaataatcaggcaatttgcacaacaatgtaaaygtacttaacactactgaactgtatgctcaaaaataattaagatggtaaactttatgttatgtatatttcaccaaaattaaatgaaaatgaaattttaaaagtcaggtgtatcctcatgtattcaaataggaaaaatgctgaagatgtcaagtgaaaagaacaaatgacaaagactgtatcgtgagaacttacttgcttttgtatgcacatggccacatgtgcatagaaaacatttntaggggaatgtaaatggaatattctgtaatatttgaatgatttaatgggggcatagattatcttactaaacagaaagtagattaaaaagaagctcagggaagattgtaagaatgacagaaagttgataaaaagtattatcccatatatgagataagaatcatggctgcactttaaaaagtcaagctccatgaagaccttttagcaattattataatttacttgcagatgcaatgctgctcatgctaagaggtgatcaat

SEQ ID NO: 203557 - DNA, 573 bp, Homo sapiens
cttacagttaactttttgaagaatataattagaaggagtacactctaaaataatgataaaaggtattatatagtaaatacataaagcatgaacggttatcaagtattatgtrctatacataattatatgtgctttacttttatataactggcagcgcagatttgtttacactagcatcactgcaaacacaggactaatgtgtgcaccaaaatgttacaatgaacaaaagacgtcaccgggcaatatgaatttttcagcttcattataattttatggaaccactgtagtatgtgcaacctgtcattgacaaacatcgttatgcagtgcatgactatttgcacatacacaaatgaactatcttggggatgggacccaagtctaaacaccaaattcacttatgtttcatatacattttatacatataccccaaaggtaattttatataatattttaaagaattttgtgcatgaaacaatgtttgcgcacactgaaccatcagaaagcaaaggtgtcactatcttggccacccatgtggaccaaaatacgacaatacgtggtatcacattggcaatc

SEQ ID NO: 203558 - DNA, 404 bp, Homo sapiens
gatatagaaatcaacacatgagcaaggctggaataaaaattrcaggtgtacggtcaagggatccaactatgagtagttgagaaaactaggataaaggaaccaaaccaaagctgacaatgtaagatttacaaacagggtagagaacacgctagaatttagaatgatcatcacagaagaatcagaatatactgctgtaagggatacgctacaagccaaagggaaaacacagagtggaaatcaggaacacaagaaactctttgaagatgttatttctgaagaaaagacagaaaaatttgaagccagggaaataattctaagttccccaaagagagtaatctgtccagtccattcatttgttaattcctttgttcattcattcattcagcagacagtatataggtatt

SEQ ID NO: 203559 - DNA, 582 bp, Homo sapiens
tactgtctggcagctaggaactagaggcaaaaatcttagaactctacctggtattttattgtattgcagctgagtattgtgccactcaaaccacaaaattcagtccttctcctttcttccttcccctttccaaaggcagaggagcctcactcgtggccactgccacaacaggctcataaggagcctctaaaactaccactgatattcccttaaggcccaaaggttcttcagtccacttgtagtgaatgctgcctgacctgggactcacccttcagggcagtgggctcacctctggcccagggcaggtccagcaatgccgtctaagagccaagtcctgaaattggggctccaagagcctctttggtgtcctatctctgtagccaagcttctacctaatgtgcaagacaatgtcccctttgcatttctctctgcttttctcaagtggaaggagtcttkctccacaaccaccacagctgggaatgtgctgagtctcacctgaagccagtaagcctcagaacctcacccaaggccctcaatgtagtacacgtgggtattgctgctggttatgcagggcacaaggga

SEQ ID NO: 203560 - DNA, 644 bp, Homo sapiens
agagcaatttcattcctaatattatctttaaaatctgtattagtaatagtttatatttattggacacttaacattgggctaggtgcagttctaagtcctttacaagtattaactaatctagtcattatgacaatctattatccccatttcacagaggagtcaactaggcaaagcaagtaaagaaaatgggcagaattacatctgtaagcrgcagatctggaattttaaacaaagcagtgaagttccatgctccatgctttacgtcattaaactgcattaagaatgaatggtaaaaatatctcatttcagtcctattttaacattttatattatcttaccaataagattttataaaaaataatgataaactatattaaactaaaaattctatgaaaaacattttttcttattaaaggttcatttataaataaaccttgatttgagtccttatcccttttgctttattatctagtgttttaccttaaaatgcatgaatataatagaccacaaagactttaactttgactctcttgctttccctctcacacacgacacacacattcatatatgcacacatgtgctcaagaacttggcatttgccattgtaaatgcctgacatactgctttacttctgtattagcaat

SEQ ID NO: 203561 - DNA, 358 bp, Homo sapiens
taattaaggttacttttgccattggttttctgtttagtaagaggtgaacttagtcaattatgcaaattattccattttcatattattactaagtaaaaactgaaaacaatcacacattattctcagaataaatagctatattacataataatatatayacatatgaatacctacatggttgtactatgtatatacattttaagaactgcatgaattgggaaaatcattagaaaatacaaaactgccaatgtcacttaaaaaaaagttggaaactgggctcagaaactgttacaagaagcatagccctgagaggaagaaaattatcaaacatcaagacaaggaatgaactgctaaaggg

SEQ ID NO: 203562 - DNA, 592 bp, Homo sapiens
acaatgtaattggagaacattgaggaaaaaaaaaaaaaagatcttacaagaagctagaaataatagattattccaaacaaacacttcccaactgcaacaatggaaggcaaaacatgttgacaaaaagactgtcaacctagcattgttataaatttagcaaaattattttttgagaaaatataaaatatgagtttttttgagacaaaactgagagtgcactatcaatagagcytcactatttaaaccatggacattagctagaagaaaatcatccaaaaaaaagtctaataagtaaaaaggaatggtaagcaaagaaaatgtttaagaaatttataaatctattgaagtatgatcccaatataaaacagaaataaaacactaaaaaacaatcatatttaagttgggataaagtgaccagagttacagcattttaaatcaccgtattgtatggaaggatggcacattaaaatttagtataaccattgagggaaaaaataagtatagaataaattttccaaaacagaaaaaaacccagaatttttttaaaaaagggaaaaatgaatttaaaagaatgcaaacaagggtagagtag

SEQ ID NO: 203563 - DNA, 592 bp, Homo sapiens
acaatgtaattggagaacattgaggaaaaaaaaaaaaaagatcttacaagaagctagaaataatagattattccaaacaaacacttcccaactgcaacaatggaaggcaaaacatgttgacaaaaagactgtcaacctagcattgttataaatttagcaaaattattttttgagaaaatataaaatatgagtttttttgagacaaaactgagagtgcactatcaatagagcttcactatttaaaccatggacattagctagaagaaaatcatccaaaaaaaagtctaataagtaaaaaggaatggtaagcaaagaaaatgtttaagaaatttataaatctattgaagtatgatcccaatatamaacagaaataaaacactaaaaaacaatcatatttaagttgggataaagtgaccagagttacagcattttaaatcaccgtattgtatggaaggatggcacattaaaatttagtataaccattgagggaaaaaataagtatagaataaattttccaaaacagaaaaaaacccagaatttttttaaaaaagggaaaaatgaatttaaaagaatgcaaacaagggtagagtag

SEQ ID NO: 203564 - DNA, 592 bp, Homo sapiens
acaatgtaattggagaacattgaggaaaaaaaaaaaaaagatcttacaagaagctagaaataatagattattccaaacaaacacttcccaactgcaacaatggaaggcaaaacatgttgacaaaaagactgtcaacctagcattgttataaatttagcaaaattattttttgagaaaatataaaatatgagtttttttgagacaaaactgagagtgcactatcaatagagcttcactatttaaaccatggacattagctagaagaaaatcatccaaaaaaaagtctaataagtaaaaaggaatggtaagcaaagaaaatgtttaagaaatttataaatctattgaagtatgatcccaatataaaacagaaataaaacactaaaaaacaatcatatttaagttgggataaagtgaccagagttacagcattytaaatcaccgtattgtatggaaggatggcacattaaaatttagtataaccattgagggaaaaaataagtatagaataaattttccaaaacagaaaaaaacccagaatttttttaaaaaagggaaaaatgaatttaaaagaatgcaaacaagggtagagtag

SEQ ID NO: 203565 - DNA, 592 bp, Homo sapiens
acaatgtaattggagaacattgaggaaaaaaaaaaaaaagatcttacaagaagctagaaataatagattattccaaacaaacacttcccaactgcaacaatggaaggcaaaacatgttgacaaaaagactgtcaacctagcattgttataaatttagcaaaattattttttgagaaaatataaaatatgagtttttttgagacaaaactgagagtgcactatcaatagagcttcactatttaaaccatggacattagctagaagaaaatcatccaaaaaaaagtctaataagtaaaaaggaatggtaagcaaagaaaatgtttaagaaatttataaatctattgaagtatgatcccaatataaaacagaaataaaacactaaaaaacaatcatatttaagttgggataaagtgaccagagttacagcattttaaatcaccgtattgtatggaaggatggcacattaaaatttagtataaccattgagggaaaaaataagtatagaataaattttccaaaacagaaaaaaacccagaatttttttaaaaargggaaaaatgaatttaaaagaatgcaaacaagggtagagtag

SEQ ID NO: 203566 - DNA, 323 bp, Homo sapiens
aaaaagttgctagtgagcctgaaggagacaaaattaaacttgatttagtactgtagaccccacaagctttatttaaacattttattttcacaacacattccagttttactttaaatatattttttaaaatatttgattttctgattttttttctttttaaacttttattttagactcaggggaaatgtgcagatttgttacayaggtaaattgtgtgtcgtaagggtttggtgtacagattattttatcacgtaggtaataagtatagtgcccaacaggtaatttttcgatcctccctctcctctcaccctccaccctcaagt

SEQ ID NO: 203567 - DNA, 589 bp, Homo sapiens
tggtcttatcaaccagaatattatgaacccttgagactaaggacaacacacatgcagaaattaaaatgagagtctaaaagcaacaagagaggaagagagagacaaagacacaaagaaaaagggagaaacagagagataggagtaggggggcagagaaacacagagacaaactgcaagattgagacaaagacagagtttcctgatattgtctgagtcawgatgttgtctaagtccagttaacccaaaggccagccctatctcttctttcctgagtactgaatacttaaactaataaattccctttattcatttaagcgagtttaatatgggtatctgtcacctgcaaccaaaagaaaggtggataattactctgccaaacatgagtaaaagttatctggtacataaacattctatcagaggtgaataaatagtgacatttcctccccctgcataagtaagcaaaagcacagaacatatccagacttatttccatatactcatcattaaccaaccaggtgaccagtctaaaaagtgactcaaaatatttgtgtgcatatgggtgaggcagaagataggcattatgtgaaaa

SEQ ID NO: 203568 - DNA, 403 bp, Homo sapiens
tatgtgctttttatattttggtgctyttctgttgggtgcatctatatttacagttgctacctcctctttttgaatttactcctttagcgttaatataatgagctccatagtcttttaaaattatttgtgactaaaaatctgttctattttatataatatgtttattcctgttcacttttggtttttatttataaggaatatctttttccatctcttttcagtccatttgtctttaatgagtaggcaacatatagtagggtcttgtttatcgattcagccacactatatcttttaattggagaatgatatggtttgaccatgtccccacacaaatctcatcttgaattgtaatccccataatcgccgtgtgtcatgggagggacccagtgagaggtgattgaat

SEQ ID NO: 203569 - DNA, 403 bp, Homo sapiens
tatgtgctttttatattttggtgctcttctgttgggtgcatctatatttacagttgctacmtcctctttttgaatttactcctttagcgttaatataatgagctccatagtcttttaaaattatttgtgactaaaaatctgttctattttatataatatgtttattcctgttcacttttggtttttatttataaggaatatctttttccatctcttttcagtccatttgtctttaatgagtaggcaacatatagtagggtcttgtttatcgattcagccacactatatcttttaattggagaatgatatggtttgaccatgtccccacacaaatctcatcttgaattgtaatccccataatcgccgtgtgtcatgggagggacccagtgagaggtgattgaat

SEQ ID NO: 203570 - DNA, 627 bp, Homo sapiens
gacttttcacaaaatctgaagtcagatggaaaacttatgtagtagtttcaaacaaaagataaattattatagtaaaaaaaaacatagcaaatatctgatttacaaaataactattctctatataaaagatttgtaatggtccttttttaaaatgtaggctaaccttgtacccttaaatgataaaatattttgcaaaaccacttatgtaatctgagaatggtaatctgaaatagataatarttggaaattattacccacaaattcagttgccaccaactattcttcaaatcaatctggattttgttttgttttttgtttttaagagagggggatcttgctatgttgcctagggtggttttgaatttctaggctcaaggtatcctcccacttcagcctcccaagtaggactataaatcattcttttcacacatttacattcccacaatggattgaatacattctgattaaaaaataatatatatttattgtaaaaaatgtaacatggaaaactacaagaaaaaaaaatcattcataattttacttccagatataatcatttttaagatttggtgcgtgtccatccaatcaatttcccaatttttacatagcaacaaaaaactgaatata

SEQ ID NO: 203571 - DNA, 627 bp, Homo sapiens
gacttttcacaaaatctgaagtcagatggaaaacttatgtagtagtttcaaacaaaagataaattattatagtaaaaaaaaacatagcaaatatctgatttacaaaataactattctctatataaaagatttgtaatggtccttttttaaaatgtaggctaaccttgtacccttaaatgataaaatattttgcaaaaccacttatgtaatctgagaatggtaatctgaaatagataataattggaaattattacccacaaattcagttgccaccaactattcttcaaatcaatctggattttgttttgttttttgtttttaagagagggggatcttgctatgttgcctagggtggttttgaatttctaggctcaaggtatcctcccacttcagcctcccaagtaggactataaatcattcttttcacacatttacattcccacaatggattgaatacattctgattaaaaaataatatatatttattgtaaaaaatgtaacatggaaaactacaagaaaaaaaaatcattcataattttacttccwgatataatcatttttaagatttggtgcgtgtccatccaatcaatttcccaatttttacatagcaacaaaaaactgaatata

SEQ ID NO: 203572 - DNA, 552 bp, Homo sapiens
gtgagtaaaaaagaaagtgtgcaagggagaaattgggtgtctgcgatttcagagctgtcttctgaaacctgcaattttctgcagttggtttcccccaacccccaaagagcccctgccatataaaagaaaatattattaaacgagctgtgaaaaggatattctgctaaattcccaaagaaaattccccctgcatttgataaaattatagtccaggaataaatcccaagaagcattaactaaaaacwcattcacagcatgactttgttgtaaagccgggaggggtgctaattttaaaagcttaagaccttgctgcaacagaatttctttatatttctcatgttttaaatgtcaagtgccaaaaaatttcaaactgatgaacactttagggtttcagatccaaggcacaaacctgtccgaataaaccaggcaaaagaatatgtttaagctatagtcatcaagactgagatgattatttcggaagtagtggaatatttttagaataacctgctcagtattacaatgaaaaactactttatctgaattacaaataac

SEQ ID NO: 203573 - DNA, 645 bp, Homo sapiens
aattagatgctttacgaaaactaaaaactttggctctgccaaagaccattgargaaggtgtaaagacacattacagactaggaggaagtattctcaaaccacatatctgagaaaagactagtatctataatgcataaggaactcttgaaactcaatacttttaaaaatccagttaggaaataggtaaaagacatttcaccataggggatatgcagatggctaataagcacatgataagatgttcaacatcattagctagtagtgaaatgctaattaaaactataataagataattctatatgcccaccaaaatcactaaaatataaaatagtgacaacaccaaacactatcaaggaacaatagaaactggatcactcctacattcctggtgggaatgaaagtggtacagccattctggaagacagtttggcagtttctcataaactaaacatgcaaccacattcaaaccagcaattgtactcttgggcatttatcttagagaaatgacaacttatgttcactgaaaaatttttacattcatgtttataaatgctttgctcataatggccaaaaactggaagccacccagatgtctttcaatggacaaatgtttaaaccaacagtggtacatccataccatagaat

SEQ ID NO: 203574 - DNA, 484 bp, Homo sapiens
tttttcctttactttcttaataaacttgcgttcaatttactctatgaacttgccccgaattctttcttgggtaaggtccaagaactctcttggsgtctggattgggacccctttctggtaacaggaggtccttgaggtggtaggaggggatagcatccaaggcacagaaggagggatatgacctccctggacacctcttccctaaaactagaagaaagagccaaagaagggtgctggtgtggatggtgacttgccagtttcaggcaggaagctgaggcagtctccatgtgacagtgtttatcgtctggtaagtaggctgcaaccttgccagctgaacgtgatggaggaagtaatggggtcggaagtttgaagaaagtggagacaggaaggaagggaaacaaatatttccattagcattgagatccaacaaaaaatgtattacttttaaaatcagagaaacaatattattttaaaaagctggagt

SEQ ID NO: 203575 - DNA, 619 bp, Homo sapiens
tcataggaattttgacatttatagtacatgtaaagatatttaagtaaaaattttctgaaacaactatttaaataaacaaatatgttttaaaatagatcttattttgctttgcttctttcatgtaaaatacatagattatttactaataaagacaaatattataacttagctaccttttggtaggttaaaaatggaaacaaaactaagtgtaaatttgaattgcatgaaagatctggagagacagagaggttaattctctcccttcaatttttgaggcagtggtggaggaaacacatttttatagaacctgacaattaaagcacagaatgaaagaagacatctttgtttatctgtagacctgagcaatgaataatatttttgttttaatttttttattgtgctcttttataggttttcatgaaagtaaattaataatgtaacatctccacaaatcctgttttaaaactrtagctgataatgttcttacatgataaaatattgtccataaattattcatttgtagttaaaatacaaaataattattccacttaattttgttcttcatgctttatgcaaccacttaactgtgataagtataacactgttattatgaagtagt

SEQ ID NO: 203576 - DNA, 627 bp, Homo sapiens
ttgactctcacatagcaatgcaggaatatgtgcttacaggggtaggagaatgaactgtccacagctgtccacaatgttcccacagagagcttgaaataagcatgttgctgaggctggawgtgttgggggtaaaactaggagttctccgaatttacttccatgcagaatataatgtttattaaagaataggtaacaaaaatgtgctaatctgaagtgtacttgcatatgattaaaacttaacaatgaccacagcggttgtttagaaattaggccaacaaaagatttttccaggtaataatagtttaccactgacattgtttagaattgccagctcatggtaataacaaaaagcagaccaacttttcgtccattttattattgttttaaaagtccctacatacagtgaacccatttattggctgcttctgaaacagattggtgcactctagttttggaagatccaagctttttggggcctttgcaggggttgttgggaagttatgcccagtcaagaccatcagttggcacacctgcttgtggcctctgtagcatggaaggcttctcacatggtagtacaaggttcccagaggtaccatcctaaaagatctgggcagaagctgcaaggtt

SEQ ID NO: 203577 - DNA, 627 bp, Homo sapiens
ttgactctcacatagcaatgcaggaatatgtgcttacaggggtaggagaatgaactgtccacagctgtccacaatgttcccacagagagcttgaaataagcatgttgctgaggctggaagtgttgggggtaaaactaggagttctccgaatttacttccatgcagaatataatgtttattaaagaataggtaacaaaaatgtgctaatctgaagtgtacttgcatatgattaaaacttaacaatgaccacagcggttgtttagaaattaggccaacaaaagatttttccaggtaataatagtttaccactgacattgtttagaattgccagctcatggtaataacaaaaagcagaccaacttttygtccattttattattgttttaaaagtccctacatacagtgaacccatttattggctgcttctgaaacagattggtgcactctagttttggaagatccaagctttttggggcctttgcaggggttgttgggaagttatgcccagtcaagaccatcagttggcacacctgcttgtggcctctgtagcatggaaggcttctcacatggtagtacaaggttcccagaggtaccatcctaaaagatctgggcagaagctgcaaggtt

SEQ ID NO: 203578 - DNA, 585 bp, Homo sapiens
ggagcatatgtgactctcagaattgatcaaatgtggtaataagcactttttaaaatatttgttgttattattccatataacttattattaaagagatgtgtggagacccaggggttcagcttacaggaattggaaagaacaacaaccttagtcccagaaagcaaaacaaaacaaggagagttaacatcatggccacagtcaggtatgattaatgtaataatgtagatatgtccatgaagtagagatgctagagaaaaaaactgatcaactttggcctaggattaggcgcagggaatgagagaggcaaagataaaaaagmaaagcttcacaaagaattgattcataaacagggtcttgaagaatgaacaaagagtttaactgctaggaagggacatcctagacagaggaaaaggtaactgcaaaattacccatgttggaaacacacactatagctcagcattactggaatgtaaattgctttcatcctgtaaaagagagttcacaggaacccatatggccagcaaagataagccctcttgattccctgaagggatagcttctaagtaaaggaatttaaatccattc

SEQ ID NO: 203579 - DNA, 315 bp, Homo sapiens
tttttaatagtagaatgaatgatggctgtgaagaggcaactcagttgggattcccaaatccccagattccacgcctggctctgctgtcaatgagggtgtgtttcttatycttactgagtcagtttccctccaacttgaaaaatttaagagtctataattactgattctcatgtcttaagtgtggactaagtagcttaatccaacacagatagttggaacttcacattaatgttactttagagtagcggttaacaaactggactcatgggtcatgtttagttctttgcctgttttggtaaataaaattttattaaa

SEQ ID NO: 203580 - DNA, 493 bp, Homo sapiens
gtttagttaaatttactggctcagttagtgtgcctctctattcatcaccctccaaattaggccctcgcaaaactgtatggccccattgaaaataccccttcctgggtagaggtggtctggtgtcaggtcaggagtaacagaagagctgcattctctacaaaagagctctcaaggcccycggctgggtgggggtggaatggagggaagtccagcttccaaatgtaactggattattcttttaacaaacatgtgaaatgattgtcctatcagtagagcaggcatctcggaaaatgttccgatctcacagtggttctctttctctctatgtagacacagctaccagattatgtcaactcttccatctgagtggtgggtatgttggtgttcattgtattatactttctatgttttggatgtttaaatctctcacaattaaaattcagttttaaaatactctcatttgtgacaaagttttgcactttgttcattgtcc

SEQ ID NO: 203581 - DNA, 301 bp, Homo sapiens
gaggagcatcattcatttgttcattmattcgttcacctatttttggcaaaattctatatattagactatgggttggcaaactttttctgtaaagagccagatagtgaatattttaggctttgtgggccaatatggtctttgttataatcactcagttgtgccattatggagcaaaagcagccatagacaaatggcatagtaaatgaacggacatagctgtgttccatatgaactttatttacaaagaaacccacaacaggtggcagaccaaatttgacccatttgtcaacttctgtactga

SEQ ID NO: 203582 - DNA, 547 bp, Homo sapiens
gaattctttttcaggtaaatcagggattacttcttggtttggatccattgctgctgaactagtgtgatttttggggagagttaaagagtcttgttttctcatattaccagagttggttttctggttccttctcatttaggtaggctctatcagagggaaggtctagggctgaagtctgttgttcaggttcttgtgtcccacagggtgttcctttgatgtagtactctcctcctcttcctgtgagtgtggcttcctgagagccaagctgtagagattgttatctctcttctgggtctagccacccagcaagtctaccaggctccaggctggtactgggggttgtctgcacagagtcctgtgatgtgaaccatctatgggtctctcagctgtggataccagcacctattccagtggaggtggcagggggtgaaatggactctgtgagggttcttagttttggtgatttcatgccctgtttttgtgmtggttggcctcctgccaggaggtggcgctttccagagagcatcagctgtgctagtatggggag

SEQ ID NO: 203583 - DNA, 570 bp, Homo sapiens
ttatagctacaaacaatcgatcaagcctaaaagggcatttataaaccacctrcatctacattttgttcttactgttgatggatttaaaaagccgtttcaagatgaaatcttacaagtctttttcatgtcttctgagggctgagatataactttgaagtagagcccaaacatgaagatcatgaagacggcttcttctccaaatgatgttatcttaaaaacttgagaaaaaaaaaacaaaaaaacaaaaaaaaaaaagaaaagaaagaaaaaagagagagagcgagccaagggaacttgaatcagacaaacctgattcaaagtgattattcaacaaatgtaagctgttatcatcttgtcctccatcattcaaatatgtcctatgtagatcttccattaatttcaaatatctaatgatctacaccatcaaataatatgaaggtgatgtttagcaggtcattggctaagacaggctctacctcagtctctaatagagaaggaaagacaagtagaatttactaacacccacagtatgcttcatattgttgccaaaaatttcaaatgcatcatcta

SEQ ID NO: 203584 - DNA, 570 bp, Homo sapiens
ttatagctacaaacaatcgatcaagcctaaaagggcatttataaaccacctacatctacattttgttcttactgttgatggatttaaaaagccgtttcaagatgaaatcttayaagtctttttcatgtcttctgagggctgagatataactttgaagtagagcccaaacatgaagatcatgaagacggcttcttctccaaatgatgttatcttaaaaacttgagaaaaaaaaaacaaaaaaacaaaaaaaaaaaagaaaagaaagaaaaaagagagagagcgagccaagggaacttgaatcagacaaacctgattcaaagtgattattcaacaaatgtaagctgttatcatcttgtcctccatcattcaaatatgtcctatgtagatcttccattaatttcaaatatctaatgatctacaccatcaaataatatgaaggtgatgtttagcaggtcattggctaagacaggctctacctcagtctctaatagagaaggaaagacaagtagaatttactaacacccacagtatgcttcatattgttgccaaaaatttcaaatgcatcatcta

SEQ ID NO: 203585 - DNA, 570 bp, Homo sapiens
ttatagctacaaacaatcgatcaagcctaaaagggcatttataaaccacctacatctacattttgttcttactgttgatggatttaaaaagccgtttcaagatgaaatcttacaagtctttwtcatgtcttctgagggctgagatataactttgaagtagagcccaaacatgaagatcatgaagacggcttcttctccaaatgatgttatcttaaaaacttgagaaaaaaaaaacaaaaaaacaaaaaaaaaaaagaaaagaaagaaaaaagagagagagcgagccaagggaacttgaatcagacaaacctgattcaaagtgattattcaacaaatgtaagctgttatcatcttgtcctccatcattcaaatatgtcctatgtagatcttccattaatttcaaatatctaatgatctacaccatcaaataatatgaaggtgatgtttagcaggtcattggctaagacaggctctacctcagtctctaatagagaaggaaagacaagtagaatttactaacacccacagtatgcttcatattgttgccaaaaatttcaaatgcatcatcta

SEQ ID NO: 203586 - DNA, 570 bp, Homo sapiens
ttatagctacaaacaatcgatcaagcctaaaagggcatttataaaccacctacatctacattttgttcttactgttgatggatttaaaaagccgtttcaagatgaaatcttacaagtctttttcatgtcttctgagggctgagatataactttgaagtagagcccaaacatgaagatcatgaagayggcttcttctccaaatgatgttatcttaaaaacttgagaaaaaaaaaacaaaaaaacaaaaaaaaaaaagaaaagaaagaaaaaagagagagagcgagccaagggaacttgaatcagacaaacctgattcaaagtgattattcaacaaatgtaagctgttatcatcttgtcctccatcattcaaatatgtcctatgtagatcttccattaatttcaaatatctaatgatctacaccatcaaataatatgaaggtgatgtttagcaggtcattggctaagacaggctctacctcagtctctaatagagaaggaaagacaagtagaatttactaacacccacagtatgcttcatattgttgccaaaaatttcaaatgcatcatcta

SEQ ID NO: 203587 - DNA, 519 bp, Homo sapiens
ttctctaacatgcctggcgccttatttgggacggctcggtgtatctctcccctataacttctcttcctgactagcttgggctacctctcaccatggtggctgggttccagtaagtaatgttccaagaggacaagtccctttttgcaagcacacatcaagtctctgtttgcgtcaggtgtgctaatgtcctattgtccgaagttaggcacatagccaagcccagagtcaatgtgagactaccaaagcgtgcaactaaagaagtaaaggtcacttgagaccrtcaaaacgtcagtttgctacattccaccctaatgattcatatctcttccacctgtcacgtctcttccacctcccaggaccctcaaggtctcatcccattatgataactggcttagacttgaaatccaggatcttggcatccaaattagcttagatgaggataaggtttcttgagtatgacttatttcaacctacagccctgtaagctatacagatatatttattttctgctcacctgaa

SEQ ID NO: 203588 - DNA, 624 bp, Homo sapiens
ccttgcccatgccatactgatattcaaaccttgagtttctctcttatatgggaagtgagatgcttagaaaacaaatgtcagtgatgtaccagaacacagaggtcctcactggtctgtagcatatgagtcaacatattcatttacttcacatttactgagacttcagtaataagggcatggacatccatcctcatgattcattcattggctgtctcarcatatgaatgagctcagatggtatcagatgtacttcttttgtgaatggtggaatataatataggttaagacatagatgtagatatagatagatctgttttcccataagaatgtttcaccttgagataatcatatttctttcaggtagtcgaggatctctgtgctttaaaagtgaggcaagaaaatagcagagttcaccaccctacccttttaattagcatccctgcatttcagaaattcagcgtttcagcactggattttatgattttaaagacggagctagctctcctttgcttaaaccataatccttcccagatgatagaggtgaagtcttgtccaaaagatattatttatcacgatggatttaactacttttctcacattattccatttagagagacaagttta

SEQ ID NO: 203589 - DNA, 420 bp, Homo sapiens
tacccaaccaaaattgcggatccacagaactataagcaaataaaatgtttattgtattaagtcagtctaagtttaggttggtttgttaggcaagaatagataactgagaatggktgactagagtttattacctaggaaaactctgtgcatagttgttgaaaacacatgccttagcatgataccacccaaggatgagggagctgggtattcattcaccaactcctgagagccattgttggagatctgctcatgggtggaggatgttagtttcccagcacagctggcctcctagagttgtgggcaaaggagacttccaaggttccagaaaatgtttgcaggcacaggatgcaggtgcagcagttgtaagtcaaccaaagcatgccaaaatgcttcaagagatatgggagaacattgagaacc

SEQ ID NO: 203590 - DNA, 546 bp, Homo sapiens
tgtgtgtgtgtgtgtgtgtgtkttttcagttggggttaggttttttcagtttcaagatatttacaaagcattctttacgttgcccataaaaatgcaaaataaagtttccctgacattctgtacaagcttgtaaaagaaatgttgcagccacatgaacagcctgcaactccattctgcaattacagtttgcaataactctggaagtcctgggccaagaaaggattatgagctgatctgcaatgctctgacacttcagcagtggaaaagcagttgtccaagtgccaatttgcaaaatcccaacccagctcaagccagacaggggaaacagatttcagtggccatatgcgcaattattattcatccccatgatgactgaataaagaaacgttttggcctgactggaccccaatgtgcccaagccagggcaagctgattacacttaacccccacacagatgcttgttccacctgcccccagaatccagatccagatctacccccagggaaaggggcactattagaaggtcttaggccatgatcacaaggt

SEQ ID NO: 203591 - DNA, 474 bp, Homo sapiens
tgtcttgaaggctgagtacctgttctaagatcaaagaaatggagaggggactcaggaatggctgagagggctcatgaggcaagaggtctgagatggtaaaggacatttgggggaacagagagcagttttatggccatggccatgggtaaggcacattgggcaggtgtaggggaggcagctggtgggtttagcatataggaaggggaggaaagaaaagattctaaagccctagcaagtcctgtcaaggggttaggttcctttttttttttttttttttataagagtagggacctatccaagttatctgaraaggggaatgcttgaagtacatgatactgtgcgtttttaaaaaaatagtcacggtattagtacagagatcagcttggaaatcagtgggactatttagaggcaatagtccagatattgagttgagagaacttccaaataataacagaaccaagaatggagatgaac

SEQ ID NO: 203592 - DNA, 508 bp, Homo sapiens
agcccaaggtggggctgaccatgcacactgctgacaggaagggatgcgcagggcctgggggtggaagacgacatttgaaatgagcctagaaacctgggaggggaaggcaggggaaggagaggacttcacacaacagcaattacacacacacacacacacacacacacacacctgcatctgctacagtgcagacagcagagcatgtgtggtgacagagcctccgtcttcccggctgtraagtgggggttgatactactctgaacaatgaacctgaaatcattctgtaaactgtcaactacaagacgcctgccctgaccacaaacaccaggcatcctagctggaggagaaacccctctgcagagcatcgccagcgatcattgtaacagctttcacttgctgggtgtcctctgggcccgttccctgtgaggtctttacatgctgttatttcatcctcttgatgatcctccagtgtggatattttcattcccattttatgcatgaagaaaca

SEQ ID NO: 203593 - DNA, 455 bp, Homo sapiens
aattatgtgcttcctgtgtggtggcctaagaattaagagaagtgacctgtttgatgcctgtgtgcaccctctctttgacaaagcatggcctgatttcccaatccttatggagctctgttgagggttacacagcaaggattctgcctgcctttaccttgcaatwgctatgagaataaattcaaaatggttcccgagttcagcatgtgactcccacttctgctgctaaaaaaacaagacagctattgtattgaatgcactctactcatcaggcactctgagaatgaaggtgacctggctggtatatatgggtctgtggaaagacaaaagtatttttacatagaaccattgactaccattacaattttgaaatatgttccctataaaaaaaatactgaagtcaatacattagtttaaaaggacataaaaagagtctttattctgccaatgtgaacata

SEQ ID NO: 203594 - DNA, 625 bp, Homo sapiens
ttcttgttcgtgtgactttcactctcctaagtttgcaggaatygcctgtgcctgctgggaaacgccgtgcaagttcctccatctgtttccaagacttaacattccttggtgacagtgcaatggacgagtccagcctggtggcagggccatgctgggaacttgatttctaatgtcaatcactggaatgcccttctagtaaggaagaggtgcccaagcttctgtttgagttaacacagacctttccaggtcaggtgtagaatctggagtgatgaatggaagtgctggaaaggaaatgaagaccagtgtagatgtctctttgcagaagttgaacattagaggaaaaaacagaataagatgaaaatggaatcacaaagggtaaaatgactggtttaaggctatatgtgcaggattagagaagagatggggtcaaaggggtattttttaatgaagataaaattcacataaaacaaaattcagcattttaactgtttttaaagtgtgtaagtcagtggcttttactccatccacatgttgaacaaccatcatcactatctaattccagaagattgtcatcatcccccttatccatgaaacagtcactccctgtcccccactcctctcagcc

SEQ ID NO: 203595 - DNA, 625 bp, Homo sapiens
ttcttgttcgtgtgactttcactctcctaagtttgcaggaatcgcctgtgcctgctgggaaacgccgtgcaagttcctccatctgtttccaagacttaacattccttggtgacrgtgcaatggacgagtccagcctggtggcagggccatgctgggaacttgatttctaatgtcaatcactggaatgcccttctagtaaggaagaggtgcccaagcttctgtttgagttaacacagacctttccaggtcaggtgtagaatctggagtgatgaatggaagtgctggaaaggaaatgaagaccagtgtagatgtctctttgcagaagttgaacattagaggaaaaaacagaataagatgaaaatggaatcacaaagggtaaaatgactggtttaaggctatatgtgcaggattagagaagagatggggtcaaaggggtattttttaatgaagataaaattcacataaaacaaaattcagcattttaactgtttttaaagtgtgtaagtcagtggcttttactccatccacatgttgaacaaccatcatcactatctaattccagaagattgtcatcatcccccttatccatgaaacagtcactccctgtcccccactcctctcagcc

SEQ ID NO: 203596 - DNA, 576 bp, Homo sapiens
ggaattcagtaaatacttaaaagcagtaatgtaacaggggtctatcttattcagtaaatacttaaaacagtaatatctactacataagctttattgttttcaaagtgaatagcttgcagtcaacatcactacattatatatacggttytaaaaatagtatttcttaaacacctagaacagccaaaggttggcaaactttttctataaaggaccagggagcaaatgctttaggctgtgtgggccagacatctccattgcaactactcaatctgtcattgtcgtgcaaaagcagcaattgaagatactcatacaaacaggcatgtcggtgttccaataaaacttaatttacagaaacaggctggggtgatatttggcccatggtccagtttgtcaatacctggtctagaatattattacactgaaaaattataagatggactctcaacttccttcctttcctctaaagagattatttttcttagtgaaaagttagatgacaatgtcacacagtagccaaaagcagtcggtggtatattctgcagcatccaccactgaacctcgtccatgataagcaga

SEQ ID NO: 203597 - DNA, 569 bp, Homo sapiens
ctttttcctctctactggaaatttctcacactccaagcatactcagtcactgctattcctaaaagaatttatccataccctaatacagtcccaaatggctgtcctctctcttctgtttaccaacaaacagttgtactatacattcaatgccagtatttcaccgcctacatcttaaaactctggagcttgatttccaccacttttctctgtgttagtaaccttccttctcctccaaaggtcaagaatggtttcctgccttctaaatgcagtgacctttgctgagtcctcctcttaacttctctaacaatgtctgatasagttcactagtaatagttccttccattttcttttccttttatttagtagactagcatttttgcctgaacagcatcttttctggaatgatctctccccttggctgttatctgggctgggatgacttcacacattggcctggaagatggacatatgacccaggtctgggcaatcgtaatacaacaaccctccagccacagtgactggcctaggggtaggcatgtacccaaggcaagccaatcaaaggcctctct

SEQ ID NO: 203598 - DNA, 490 bp, Homo sapiens
aatattttcttccatttgtcttagtccatttagagttgctttaaagaaatatccaaggctgggtaattttggggaaaaaaaaggttcgtttagttcatggttctactagaaagttcaggattggatttctggcaagggcctcaggctactttcatcatggtggaaggcaaaggtgaacatgtgtgtgcagagattacatagtgagaggggaaacaagagagagggaagggaggtgctaagctgtttttatcaaccrgccttcacataaacgaataagaatgagaactcacaactgggcgcggtcgtcacgcctgtaatcccagcagtttgggaggctgaggtgggcagattacctgatgtcaggagttcaagaccagcctggctaacatggtgaaacccagtctctactaaaaatacaaaagatagccaggcatggtggcacactcctgtaatcgcagctactcggggggctgaggcaggagaattgctt

SEQ ID NO: 203599 - DNA, 407 bp, Homo sapiens
cactttggggaagtgccaccacatcccaggctgcaaggcatctctctctgctgcttgtgcagactggctggggtgagctttggagctggtctcatctcgaaggcaggcgctgctgaggcctctgtgccttttgcctgggttagatttggcttcaaaattaatttgaaatcatttaatcttgctactctcagcaggtcagtgattaacaggaaattcagtgcccatgttggtcctgtttatragcccaagtctatgtcataagtaaaaacaggcttaaacacatcaggaaactactcagtatagagtggaaaaagcctgggctgggcttccactcaagggccctgcacacactgcatccacaggccctgagcgagcccctgggattcagcgtctgcgtgcactcttgt

SEQ ID NO: 203600 - DNA, 578 bp, Homo sapiens
ctttgtaacttctgccactgtagtaagtgtaagtgaagtttcctgtatacactatgatacattcatgtaaatgttaaacacrtaagtcacatattatattctttttttttttttttttgagatggagtcttactctatcacccaggctggagtgcagtggcgcaatctcagctcagtgcaacctctgacttcctggttcaagcaattctcctgcctcagcctcccaagtagctgggattacaggcacgtgccaccacattcatctaatttttgtctttttagtagagatggggtttcacaatgttggccgggatgctcttgatctcctgacctcatgatctgcctgcctcggcttcccaaagtgctgggattacaggcatgagccactgcacccggcccacacattatattcttataaatacatgtgtagtaaaatccaaaacaaacaaacaaaaaaaaaaaaaacaaaattggattggaaagctaccattggggataagctcaaaggatatttcgacttcatataaaattttatgtatataaaatgtttaaagaagtatggcaaaatatcaacattt

SEQ ID NO: 203601 - DNA, 433 bp, Homo sapiens
tatgtgtgaatctttcttaagagtcttaagaaagagtcacgcatacttcataggtctttatgttatttgaggttgtagattaaaataaatgaaatcatccttttctctattaagttaygcttgatgaagtcacaccagaaaaacctgcctgctgaggactaaaatctaatggctaaatgtgtaggaagcatttttctactctcttcccttccccttacccagaagtcttttcaaatgatcctaggaattaattttcagatcatgtaaaaaatattagaaatgcccaattgaaagaaaaattgtttaatttcaatttttccttatgaatgagttcagatatccacctactaaatacataaaataggcatgtattgataatatttacaaataaactactgaatctaagccatttttaaactatagaacagggagc

SEQ ID NO: 203602 - DNA, 417 bp, Homo sapiens
tgaagagccactacttgagagtggggttttaaaattattgtttatatttgaatatgtgtaggcctgatattctaggaattaatacttcatacagttctgtgcacctaaagataggcttttctaaaagtgagacatttgctgaacttccccatcttaacctgttgctagaactctctaagtctgatgaagcacagccattctgtgaccgccttcatttgcatgtacatgtaaaacgggtctcactcagcctgctccaggtaactgamcctaaccgttactgcctgcaagggtgccttgctcccaccctgcggacacagtgtgcctgctctgtactctgcatatttatgtcaggaagagtacaaaagtaagattgggtaagggcttctctacatcatgggctttaaaaattatagatct

SEQ ID NO: 203603 - DNA, 398 bp, Homo sapiens
tttataatgcataaaccagactggtagaggagaagaatgtattaggggctttttattacagacagtataaaaagaagtcaggaaagagtacaaacttcaccccyaaaaggaaggtatataacttacaaaataaaaagttcacataaatcacaaattagcaacatttaacattttaagcttcccaaaagttctgtgcagctcacccttgatgaacatacccagatggaaccaggaagaattaatttgtgaaactgtgaccatctcatcagagactgcagccacccatgagtgttcaagtaaagcaaaatacatctgccaaagaagtgtaattaaaatattcacagcataactcctgagatcttatctttgatataagttagctccatttacacttagca

SEQ ID NO: 203604 - DNA, 590 bp, Homo sapiens
aattcacaatttcttgccctttctttactcaaaggataaactttattactgtgttatcaccaccaactaaagttgatttaagagatatgatgcttcttttaaagacatgattttcataataagtgaagcaagggagacctctagcagcatctgctcatgatgaaatcttaaatcaatgatttggcttcattcccaactaacaggtatatctgcatggattattattattattattagctaccaagaaaagaaagtattacacaaggggcactcaccctgacatttccaaatattcataaaatgatacaatattttcaaaaatacaggagtaatgtttcacttattcaccctgcgatgcccagtcaattcmatgaatgaagtcacaggtggtgataaagcacaatgtgagtgttagtcaggataaaataatacttggctgagaaccacaatcccaaaagccaaaatccctgaccacttgctttcttctgacacagacttgcaaaagagacttttagaaaggttatataaaacaaaaatctccctatttttagagtaaggcctagcaccttgatttagtcaacaatcattaa

SEQ ID NO: 203605 - DNA, 626 bp, Homo sapiens
  misc_feature (1)...(626): n = A,T,C or G
agttattagaagattactgtattcatttattggtgtgaattttccttatttttcataaccttgtaactttgtataaaggtctccatattagataaagcacacaccttttgcatactttaaatactagctttggtggaaagaaatcttttcatatgggtgagtgcaagggtgctatctgctttggtgtggttgctctacktctgtgagagacaggcacagtaatgcctcgaccctgatgaggcaatggtggtccaatagtgtagattttaagctgctctgtctgctgaggtcagtatcggtgaagattgtgggaggtctttggtcaccaaggctgtaagtatctgctgtggcattacaagacactggggacctttgatgccatgctactgaaggggacgaatgtcctttcattctcttttttttcccaaaaaggttaaatggcagtccagaggatcactcttgtcaccagtgtgtgggtgcacacacagtggcagtagcaccaatgcccagaatatggtcatatgcggaacagtacagcttgaaatttgaagctggaatcaggcaggagtgattctgattctgagtcnnnnnnnnnnnnnnnnnnnnnnnnnnnnnnnnnnnnnnnn

SEQ ID NO: 203606 - DNA, 615 bp, Homo sapiens
aagtatactcagttgagcagcccatgccactgctctgcctatagagtagccattatttattcttttactttcttaataaacttgttttcaatttattctatggactcaccctgaattttttcttgcgaggggtccaggaaccctctcttggggtctggattggaacaccttccactaaaaacacaactttagtattgaaagagaaaaataattaatgcacattagttagcacacataatctacaaaggactgagaaagccaggtttaaagaatagtctatcttcattattcatggattctatgtttgtgaatgaatttgcattcctatcatcctttgttgctttgatagatcaacctttctttcaggtatcatttttcttttagctgaaaaatgttgtttggaacgtcttatagcgcagatttgttggtgattaattttctctgcttctgtttttttcagaagtcattttataccttagtttttgaaataaattttaattggctatataattctagattgacattaaaaaattaatagtttaaaartgttctagttgatatagttctggtgagtagtctattgtaagttttatctttgttcctctgtgatgtgtc

SEQ ID NO: 203607 - DNA, 519 bp, Homo sapiens
tgctcataggagccaataataatcttttgaatttttgcagtggctgttgtaatatctccattttcatctcgaatgttatttatttggattttctctgtctttttgttagtccagttaaaggtttgtcaattttgtttaacttttcaaataacctactttctgtttcattgatcttttttattgttttgttcatttgcattttattgaaaatgaaatttatttctgctctgatcttttttattttttctactaaattaaagttkgttttgctgttgattttccagttctttaagatgtgttagactgcttacttgaaaattttcatcttttttgatgtaggcacttccagctgtaaacatccctcttagtactgcttttgctgtatcccataggttttgatatgttatgtttccattatctttggtttcaagaaatttttctattatcttcttaatttcttcattaacccagtagatattcaggtacatattgtttaattttttgtatttgtatggttta

SEQ ID NO: 203608 - DNA, 565 bp, Homo sapiens
tattgaatcataacaattataccatcttagcaggagagctgtagaagatagttgtgtacgaaaatttatatcaagaaagatggacctaaaatgagtagacttgtagccttaaagttatgatttgataaacataaaaactcaacacatccaattcattcgtgggatttcctgccactacctttgacctatatctagaatctgagcatgttttaccatttccatcattgccactcagcagatacctgtggccatgtcttaaattattgcaatcccctctggactggtccttctgctctctctcrtatgccgttatagattgttcacccattaatatgtaagtctaagtacaacatgtggccacttatgccactcagggtagaagccaaagtcttcagagtgacctggtcctttgtcatgtccctagcctcctcctttcccactctctttgttgttctgttctctctagcaacaagcttgtaaaagatgaagcaaactccttcctcaggacttttgaggcatgctgtttcccttacctgaggtattctactcccagatacttgtttgt

SEQ ID NO: 203609 - DNA, 584 bp, Homo sapiens
agatacttgtttgtatgcttctttaccaccttaaggcctttactttaatatactgttggttcctggttgttaatgcagtttaataattttgcttaatgtttaatgttttattactttcattaaactacagttacatattatgatagaaaatcaaatgatatcatctcactagatctaatcaattaagttcaggttttaggatgactcaaatggtaaaaaaagattgataaccttaaacacccattctatgttctactccatttatgtattaattcctgagttcctgtatatagaatcaagacataagtagaattcaggatgtcatcatacaaatatgtacaataatttttaaaaggttatattatcaatgtcaataattagtcataygtataattttaaaacaaatgagccataattttaaaatatataatcccttataatttgaaatcagtacaaagtgattatgcatttatacatgttattaagtttttaatcttattatacatttatttatgaatatctcaaacttcctaaggtttcaagctgtatagaaaatagatttttaagccaaactatgcagttca

SEQ ID NO: 203610 - DNA, 460 bp, Homo sapiens
ggtagccttggcaacaggaaaatgaggaagatctctacaatgtgatttatgtaaactttataccatgaaaaaaaaaaaaggaaagtaggaaaaaaagaagaaaaatgtcactgatggtctgttaaagcatctgattactttcttaatttatttactctctacctaaagggattctttgggttctttacaatctggtcaacatttctaaaggtcaggaaagaagtactttgggttgcagtggttatcctgatactggcatgtttctaytgattactgcattttacaacacattttccaatcacttacctagaatatattcacaacaacttccaaacacattttgtgaggccaacatcaccctgataccaaaactaaagacactacaaaaaactacagggaaataattttgatggacaaaatgtaagaatcttcaataaaatgccagcaaagcacattaaaa

SEQ ID NO: 203611 - DNA, 633 bp, Homo sapiens
ttctatagaaacaggaaaaaaacacacaaaggttaatgtctggagtagttagtatatagactagcttttttagaatctctgagtcatcttcagattgcagtggcaatttgacagattcttctggattgatgttcaaatcaggtgttcaggcgaactttctgagaacttcatacattagcaggcaggcacaaagattgtttatatacataagttgctatattatttccccaagtttaaattgtctagcacggctttaagaataccacagttttaatttctactgatgtcaaataagaaaaatggaagaaaaaattgaaacgttagtttggagacttatagctggaaaaatactcaggatatagttcaaattcaggagtcagtccaagaaaataataaaaaccacaaaacaatggacaagrttagagtctaacagcaggtataatctttctgtctccaatacttcagttatattaaagacaaagtaatactgagaccaatttatttgccaaataaagtctagtcttttatacgtggactgattatttgcataaagtgcagccaaaacaattatttgccatatcctttaaaaaaccggtttggctggaacatgtcttttcataaggaatatcaaaa

SEQ ID NO: 203612 - DNA, 522 bp, Homo sapiens
tttgtctcatttataagccattgtggccctagttgtcaaacctaaattaacatgggcattctctaaagtcctggttaaaatacacattctgaggtctgaaagcaagttttttgattctgtagatatatggtttggcctaggattctatagttttaatatccacataaaaaagctggtgagaatcacactttcataaaggctgacacaactctaacagattttcttcgagcatgtgggtgttgaggtaaaaagaactgcaattctacmctcctgtaacactccaaatatgatttggaacgttttctactttctaccttgttggagtattacaggaaactactcagcctttaaagcttgcattcttaatactgtaatctgaggaagtatatcagtggccaagcacaagggaagccaatatggtggtaaaagtttcagtattcagttttactttcattgattttcctagaaaatatcttgtctcctgagataaacctagtttaaaagcaatggaaagaagacaag

SEQ ID NO: 203613 - DNA, 525 bp, Homo sapiens
ggctggggtgtaaaaacccatgtgaagattaaaagaataagttttgtcatggaataagttggaaaggtaatcacaagtgacgaagctgaaagatgagggcagttatatgacaacaaatgatctggactatgaatctgatgaattcacagaggatgcagctcaatatggaactgtatytcattttgtgaatcatagtagtgacccaaaacttcatatgttcaatgttttcattgataacttgacactggccttccctaaatagctctgtgttccatgagaactataaatgctggagaagagttgatttttgacaatcaaacaaaaagttctggggatatatcttcagagtttattgaccacagctcagccaaaaagagggtcagaactgtatgtaaatgtggagctgtgacttgcagaggttgcctcaaatgaattttcaggaaatagaaatgatgataattgtagtttgtttcttttttctaatgttatcatttaaaaaataagtatttggaactcttttttcat

SEQ ID NO: 203614 - DNA, 532 bp, Homo sapiens
aatgacaggtgaaaatggaacagaaggataaggaggacacagaactaagcaattaggtctggggacactgtgtgtgctgaggtgctgtcaaagatccaaaatcgtgatcttgaacacggcccgatgaagccaaagttcaaggtgttgtccattccagatggctgtcaggcacagctggggcaccaagtgtctctaggaggcactggctgcaggaacagtggtggcccaagagacccctaggcaaatataccagtaaaggtcttgccagggagggatataggtagggtgggtgggacagtccaggtgggtcatcctggacacagggcaggaatgttagcagtgaagacatcttcccaaaggtggaagttgatgctcagccatccagatgggtggtrggtcagtgggtgggatgactggacgacattggtattaaggagagtttgcaggaattcatgaggcttgccagacaggagccaatttggaagcacccttcagcgtatctgccagtagaggtcactctgcccttgtgaac

SEQ ID NO: 203615 - DNA, 536 bp, Homo sapiens
gcctctgttcagactgcattacagtccagcgtctccctctcgtcaatcctgtttccttttcttcccttctacatatagcgattctctgataaactcttccatgctaacctcaacctcagagtctgcttccggaagaatcaaaggtgggtttatcagatttatccttctcccttgaattgactaacattgcagtatgttttgctattgctagctcatctccaaatcaccagaaaattatgcccagatactctcttgtccaaacacctcctgtctcttatatatgagtttaatatattgttttatttcactttgatgctattcagattgaccacttatcaacatctcatactgtcttttgtcaatcaatgtcagtaggtcttggttttttagcagggattcattcttaccatagcgtaagtgtgagaaggcagacgaaaatgagtcccctgggtttcgagagtctgcttcatgcaggagatcyactatgcttatgggaattgatttttatcaagaaagctctaatgctgctatttaag

SEQ ID NO: 203616 - DNA, 404 bp, Homo sapiens
ggttgcagtgagccgagatcgtgccactgtcttctagctttgagacagcgaaactctgtctcaaaaaaaaaaaaaaagaaaaagaaaagaaaggaacatgacttatgtatatttaggtgcagccatgattgagggcttgttgtgcaagctgctatggatggtcatgagtaaaactaggtctccttactattatgctgtgctggaagcttccttatgggtataataatagttgctcctattaatgagtatatccacctcayagggttgttgaaggatttgaaaaatattttagaaagtaacaactttcagcatttagaacagtgcctagtatataataggaagtatgtgttagctattgccattttattagagttttaacaggtcagtccaacagaactggcaat

SEQ ID NO: 203617 - DNA, 565 bp, Homo sapiens
aaacaagcagctgggttaagagatgtccatgtcgcaaggaaatgagggcagcctccatcaacagccagcaaacaactgaggctctcagtctgacagcccatgagtaactgaatcctgccaacaagcatgcaagcttggaagcagatccttccccagtcaagctttygaatgcaacctcagcccctgctgacacttaatggtgccttgtgagggccctgtaggcagtggagcaagctaagctgtacctggattcatgacccacacaaactgggaggcaacaaatgtgtgttgttttacaccacaaaatttgtggtaatttgttacacagtgacagattaatacaagtactgagtggggaaggttgcatataccattcagccaaagctctcttgttaactggaaccaccctaattacaagataatttaatgaatgactgtgttacctgaacacacccttcagagaccccatcacttgcatgagtcagagctctatgggcttcaagtgacagaaatccattctaattagcttaagtaaaaaagggatttgttgatttacatacctgag

SEQ ID NO: 203618 - DNA, 491 bp, Homo sapiens
tagtctgaaatgaaagcttactagcctgcaaaatagctcgttttttctgttcttattagcctacccagctacttaggtcataagtcaaatacttgagtycctaagctaactaggattgcaatgtattgtgggctgcaacaaaatgcagcaggacaaccctaaagaaaacacctaaagccactacccaacaaccgataggcaatgtccaggaagactgtgaccccatagtactcagcctgtgaggaaccgggggaagggacctgtgcattagggaataaattgctttttgtaactgtgctgggtgtgcctgcccaccggacagccaatcttgcaagaccatcacgaaaaatctcacttttactgttctctgggtctctgagtccattctttgggcttggatggtgagtttgtttctcacaatagcaacaaatgcaacaacaacagaagctaatttttattgggcacttactatatgccaggatctgcttaaa

SEQ ID NO: 203619 - DNA, 568 bp, Homo sapiens
tctctagaattcctagagtcatgttttcaacctccagcattaaacctctaattttcttttctttccacttttatttttcatctctgggtatttttgttccactttatagaagctttcctyaattttatctcctaacccttccactaattctgctcctatattttttagtttccaagagctccttcttattctttatatgtgacattttaataggaaactcttcacatttaatgaaagcaaaattgtcctccttttttagaaaatggtaactagttttaaaatgttttcttttgcctctgcatttactgttttctcaatgtttcttttacagtttattttggactctgtctcctatgtgaaaggttttttccaagtggctagtgatccctaactgaccagttcatgtgaaggggagaggcaccatgagctaatcagaaacttatgcggaggggggacatacagattagagggtctcactttaggataaccaggtgggagccctgtctttttatagcctctaaatgccagtttttgttttgttttgttttttgtctattcttttgggctg

SEQ ID NO: 203620 - DNA, 522 bp, Homo sapiens
ggctcattaaaaagtggatattattgttaatcttccaataactactatttccaacaacaggctgaaggggctcagaaacgtttgttgagtaaaaacacaaggaaacagtagcacagatttcctgctctcctttacgatcgatgacctgtctaaggactgtgatctctgttcrctacagattgtcacctgcattaatctactgtcacccattaacctatcaaataaggcagtctaaaaactccaggcgtccctttccgtaaggacccggactgttgaactggaaagctaaaattcaaggcgtgacaattgccctttgtcccacattcctccaccggtcgcctgcttatttaaatggtgcgtcccctcgggtaccacttgaacaaaacctgcccagagcgctccctgtgtagattcgctggaagcagctggaggctccagttctcatctgctcaggtgtccccggcgccttggcgaactcggccactccagttcctcacgtggtgagcactcagggcagcgggt

SEQ ID NO: 203621 - DNA, 621 bp, Homo sapiens
gggctttttatctttttaaagtttttttgcctgtgtctgttgccatttccaggctggctggcttcttcagttctcaggctgggatacatgaagcaaaaagaaaacttagggaactcaccctgtaccattcttcaggtccagggtccctagcrggctgccttctttgcacctttcagagtcttcttatgtttattttatatggaatgtcaggatttttaattttattagtaggaggaatagagaaacatatgtttatcttctcagaagtagaaatacttcattaaaaaaaatttgtttatttacctgaagggtctttcacctcctgtggcgtttgctcttctgattagagagcatttttgtgttggaaagctccctcctgttcctgtggagctgtgggcctggagaggacagaccaatctttacaacagtgtcttcttcctgaaccctgtgggcacctcactgtcttcaacacgcaggccttggcatagacttctccctctgcctgcaacaccttcctctctacctcgtccactgcctaagccttagttattcttcagttttcattttaacacattacttatttaaagagacttttcctattacctggatacatttgcattc

SEQ ID NO: 203622 - DNA, 160 bp, Homo sapiens
taagccttgcaaatgaaactgaatttctcacttgatgcttagctatgacttgcaatcatgaaaaccaagaattgtgttatgtcactgtgtactgcttgttacctgaawtccacactaggctgggatcaagggttgaatgtttcatgattttctccataac

SEQ ID NO: 203623 - DNA, 160 bp, Homo sapiens
taagccttgcaaatgaaactgaatttctcacttgatgcttagctatgacttgcaatcatgaaaaccaagaattgtgttatgtcactgtgtactgcttgttacctgaattccacactaggctgggatcaagggttgaatstttcatgattttctccataac

SEQ ID NO: 203624 - DNA, 538 bp, Homo sapiens
gattatagactggacttctgaggaaggaggatggtgagacacccaggtgagtggtgccacacacaaacacaaaatgccaagccagggagtgggactggaagggggcggtgaggtggtgggaggcacccacagaggcccttctgcactgtggggtctggtgtgttggaggaagatctgcacttggatgaggagatttggggatcgccagcatccgcgtcattgaagtgatgagcatggacgtgtgacccaggggcttgaacggagttaagaagagcagggccaggagcrgacagacctagagagcaagaacattcaggagcaaagcctgaggcaggagggtggtcatcaacacagatgctgcagccaggtggcccagggtcgggcggcatccccaccactcctcccggggatgacttgcacctgaaacagaggtaataaaacacagcagccttgtgaggatgacatgacttaatccgtttaaagggctgagaaagtgctcacatactttagctctttgagggctagaggcccagaaggc

SEQ ID NO: 203625 - DNA, 538 bp, Homo sapiens
gattatagactggacttctgaggaaggaggatggtgagacacccaggtgagtggtgccacacacaaacacaaaatgccaagccagggagtgggactggaagggggcggtgaggtggtgggaggcacccacagaggcccttctgcactgtggggtctggtgtgttggaggaagatctgcacttggatgaggagatttggggatcgccagcatccgcgtcattgaagtgatgagcatggacgtgtgacccaggggcttgaacggagttaagaagagcagggccaggagcagacagacctagagagcaagaacattcaggagcaaagcctgaggcaggagggtggtcatcaacacagatgctgcagccaggtggcccagggtcrggcggcatccccaccactcctcccggggatgacttgcacctgaaacagaggtaataaaacacagcagccttgtgaggatgacatgacttaatccgtttaaagggctgagaaagtgctcacatactttagctctttgagggctagaggcccagaaggc

SEQ ID NO: 203626 - DNA, 587 bp, Homo sapiens
actggcccaggtcagaaatggagcaggtcagaattcctgcaccaatcggtagtgggactgtgcctgggcaatatagcaagatcttggttcttaaaagtaaaaataaagaacagctcattcccctctgggaggggctggctcaaggttacacagtgagtgtgggggcagaggtgagcccacagtacctcccttgttgggttgtctgaggacccctctggccacccccccacaggagatggaggaggaggcgcctcagcccatgccgaacatcccaggggacctggagagccgggagacggtggtgagcctgacttgccctgcccccactttgccaccttcctctgtggtccctccsagacccccttatgttcttggtttccccgctttctgatttctgtggactttcactccttccgggagccagtgatcagacaccatttcacctgtgaccaacaggtgcactctctgaggccccaagggaaggggctgcgctccacctccctgccccagttgttctgtgtatgcccctacaagaacactcacctcttgccttcaggtggcatttttcaactccgctggaaccagtg

SEQ ID NO: 203627 - DNA, 587 bp, Homo sapiens
actggcccaggtcagaaatggagcaggtcagaattcctgcaccaatcggtagtgggactgtgcctgggcaatatagcaagatcttggttcttaaaagtaaaaataaagaacagctcattcccctctgggaggggctggctcaaggttacacagtgagtgtgggggcagaggtgagcccacagtacctcccttgttgggttgtctgaggacccctctggccacccccccacaggagatggaggaggaggcgcctcagcccatgccgaacatcccaggggacctggagagccgggagacggtggtgagcctgacttgccctgcccccactttgccaccttcctctgtggtccctcccaracccccttatgttcttggtttccccgctttctgatttctgtggactttcactccttccgggagccagtgatcagacaccatttcacctgtgaccaacaggtgcactctctgaggccccaagggaaggggctgcgctccacctccctgccccagttgttctgtgtatgcccctacaagaacactcacctcttgccttcaggtggcatttttcaactccgctggaaccagtg

SEQ ID NO: 203628 - DNA, 567 bp, Homo sapiens
acacagcttaatgcctgggtaaagggagtgttttgtaagcttgttaggtagattgtgaggatctcttttctgtcatagaacttyatacatttgtcattcattctgctatgcaggcatactcatggagttttgctcttgtcacccaggctggagtacagtggcgcgatctcggctcactgcaacctcagcctcccgggttcaagcggttttcgtgcctcagcctcccgagtagctgggactacagatgtgtgccaaccatgcccagctaatttttaatatttttagtagagatgggctttcaccatgctggccaggctggtcttgaactcctgacctcacgtgatctgcccacatcagcctcccaaaatgctgggattacaggcatgagcattgctcatggccatattcattgttcttaaaggcctatgtgattataagagaagattttataaatgtgtttctgcaaaactcagtgataagcaggggtgtccctgtcttttccattgttaataactgtgatatgtacttttccaatctttttggatatacaaatgccttgaccaactc

SEQ ID NO: 203629 - DNA, 610 bp, Homo sapiens
tggctcgtgcctgcaatcccagcactttgggaggccgaggtgggcggatcacctgagttcgggagttcaagaccagcctggccaacatggtgacaccctgtttgtactaaaaatacaaaaatyagctgggcatggtgttgggtgcttgtaatcccagctattcaagaggctgaggcaggagaattgcttgaaccctagaggtggatattgcagtgcaccaagatcatgtcactgcactccaacctgggtgacaagagcaagacactgtctcaaaaaaaaaaaaaagaatatatatttacatttgattgtgtatgtgtatacacacacacacacacacacacacacgcaaacaaatggaaaaacattccatgcttatggataggaagaatcaatattgttaaaatggctatactgcccaaggcaatttacagattcaatgctatttctatcaaactaccaatgacatatttctcagaattagaaaaaactattctaaatttcatacggaaccaaaaacggagcctgaacagccaaagtaatcctatgcagaaagaacatagctggaggcatcacattgcccaacttcaaactctacaacaaggctacaata

SEQ ID NO: 203630 - DNA, 507 bp, Homo sapiens
gtctatctatatatatcagaaagaataaaaaagaataaaatcttgtcttttgcagcaacatgggtggaactggagggcattatcttaagaaaaataattcagaaagtcaaatattacatgttctaacttgtaagtgtaagctaaataatgagtacacatggatatggagagtggaatcatagacgtcggagmatcatcagcctgtacaatatggtgaaacccatctctactaacaatacaaaataatagccaggtatggtggcgttcgtgtaatcccagctacttgtaagactgaagtgggagaatcacctgagcccaggaggctgaggttgcagtgagccaagatggtgggactgcaccccaccctgcataaccagagtcagaacttgtctcaaaaaagaaaaatagtaagacgctggagattcaaaaaggtgggagggtgggatgggggtgagggatgagaaattacctaatgggaacaatgaacactattcagctgatggttat

SEQ ID NO: 203631 - DNA, 507 bp, Homo sapiens
gtctatctatatatatcagaaagaataaaaaagaataaaatcttgtcttttgcagcaacatgggtggaactggagggcattatcttaagaaaaataattcagaaagtcaaatattacatgttctaacttgtaagtgtaagctaaataatgagtacacatggatatggagagtggaatcatagacgtcggagcmtcatcagcctgtacaatatggtgaaacccatctctactaacaatacaaaataatagccaggtatggtggcgttcgtgtaatcccagctacttgtaagactgaagtgggagaatcacctgagcccaggaggctgaggttgcagtgagccaagatggtgggactgcaccccaccctgcataaccagagtcagaacttgtctcaaaaaagaaaaatagtaagacgctggagattcaaaaaggtgggagggtgggatgggggtgagggatgagaaattacctaatgggaacaatgaacactattcagctgatggttat

SEQ ID NO: 203632 - DNA, 507 bp, Homo sapiens
gtctatctatatatatcagaaagaataaaaaagaataaaatcttgtcttttgcagcaacatgggtggaactggagggcattatcttaagaaaaataattcagaaagtcaaatattacatgttctaacttgtaagtgtaagctaaataatgagtacacatggatatggagagtggaatcatagacgtcggagcatcatcagcctgtacaatatggtgaaacccatctctactaacaatacaaaataatagccaggtatggtggcgttcgtgtaatcccagctacttgtaagactgaagtgggagaatcacctgagcccaggaggctgaggttgcagtgagccaagatggtgggactgcaccccaccctgcataaccagagtcagamcttgtctcaaaaaagaaaaatagtaagacgctggagattcaaaaaggtgggagggtgggatgggggtgagggatgagaaattacctaatgggaacaatgaacactattcagctgatggttat

SEQ ID NO: 203633 - DNA, 541 bp, Homo sapiens
gtgctcttaggaaacccactcattataggatgtcagctctgtgtcaggcactgacctgggcattgggacttctgctctcaaggagtttgttttctagagaaggagctagacaatagataaataaacaataactatatagtgctagggagaaaaattagatagcagaggaggagagcaataaaaatcccagtgtgtgctgccagggtgatcagggaacagggtgtcacctgttctctgagcaggtgacatttgagcagggacctgaatccagggagggagggatcctcatgggtgtccacctgctccagggacctatggggaggaaatctgattgtgtatataacatggtgatcattcagcaaargttggtgcctcagggctcactggtgttaaggtcattgctagcctttgagcatgtgacatctccaggaacccaagatcgtgtgtcagacaaagaggtagaatggtggagtggagttggggagccatgtggctatcaggaggaagctcattcctgggtagagagaacagcaaatgcaaa

SEQ ID NO: 203634 - DNA, 549 bp, Homo sapiens
cctgacacatgtgaaactaatctgtggcagaaagacaatttgtaaatgtatcattgtatttgtctgctctcatgctgctattaaagacatacccgagaatgggtcatttataaaggtttaatgaactcacagttttacatggctggggaggcctctcagtcatggtggaagatgaaggaagagcaaagggatgtcttacatggtggcagacaagagagcctgtgcaggggaactcccatttataaaatcatcagatctcgtgagacttactatctcgagaacagcaygggaaagacccacccccatgaatcagttacctcctgccaggtccctccgatgacatatgggaattatgggagctacaattcaaggtgaagtttgactggggacacagtcaaaccatatcgatgatgtggagtggacctttccaataagtactatatttgctattctgaatgcctgtccaaatatcaatgtacatagcagagagaattagcagagtaactggtagttccataaaaaataagagagatcaaggcaaattactct

SEQ ID NO: 203635 - DNA, 453 bp, Homo sapiens
tgaaacctctgcctccccaggctcaagccatcctcccacctcagcctcctgagtagctgagaccataggcacacaccaccacaccggctaattttttgtattttttgtggagtcggggttttaccatgttggccaggctggtctcaaacccctgagctcaagcaatacctcctgcctaagcctcccagggtgctgggattacaggtgtgagtcactatgcctsgcctcattttacaattttaattccctgtaccccctccttttttctggagcattttaaagcaaattctagacactatgtaatttgaccctgaaatacttaaacaaaaattatagttttaactggctgcatagtcttgtctttggcatgccatagtcaatgaaactatcccctagacatagggacatttacttagatacatacttaagttttcactatcctaaataatacta

SEQ ID NO: 203636 - DNA, 625 bp, Homo sapiens
cttgtcatgaaagaaagaaatttcaaaagattgctatcatacaaagtatttctttgacctaagtgagttgtctagtaaccaattataaaaagaaaaccaggaaatcgctgtatgtttacatggtaagaaatatacttccagtacctcagaggtcaaaaaagaattgtaatggaaattagaaatttttctagtagtgaaaatgaaaatgctrtatctcagatcttacgtgttacaagtaaagacctattcagagggaaattttttgctctaaatgcttatattagaaaaggaaaagaactaaaatcaatgagcccagtattcatctcaggaatttaggggaaagaaaatataaacccaaaaaaccacaaggtaatttttcaaccctcaccttccaatttgtgtgaatatgctcatagtagtctctgataatcttttgtatttctgtggtagcagctataatgtcacctttattgtttctgattgtacttatttgaatcttctctctttttttttgttaatctagctagtggtctattaattttgttaatctgcacttgtactccctaaatctacaaaaaaaaattttttaagtagttaactggaataaaatacaacaatgttaaca

SEQ ID NO: 203637 - DNA, 625 bp, Homo sapiens
cttgtcatgaaagaaagaaatttcaaaagattgctatcatacaaagtatttctttgacctaagtgagttgtctagtaaccaattataaaaagaaaaccaggaaatcgctgtatgtttacatggtaagaaatatacttccagtacctcagaggtcaaaaaagaattgtaatggaaattagaaatttttctagtagtgaaaatgaaaatgctatatctcagatcttacgtgttacaagtaaagacctattcagagggaaattttttgctctaaatgcttatattagaaaaggaaaagaactaaaatcaatgagcccagtattcatctcaggaatttaggggaaagaaaatataaacccaaaaaaccacaaggtaatttttcaaccctcaccttccaatttgtgtgaatatgctcatagyagtctctgataatcttttgtatttctgtggtagcagctataatgtcacctttattgtttctgattgtacttatttgaatcttctctctttttttttgttaatctagctagtggtctattaattttgttaatctgcacttgtactccctaaatctacaaaaaaaaattttttaagtagttaactggaataaaatacaacaatgttaaca

SEQ ID NO: 203638 - DNA, 599 bp, Homo sapiens
agtgcttttgagccaagaagccaagctgtgaatgcaaaaaaaataaataaataaaaaatttaaaaaaatcttgaaggaaattacaagtgctactccagcaaacacatgaatgataagaaagtgaaacaggcttattgttgatatggagaaagtctgggtggtctgaaagatcacaccagccaccatactcccttaagtcaaagccgaatccagaacaaggcacaaactctcttcaattctaccaagacggagagaggtgaggaagcaaacctgggagctagcagaggttggttcatgaagattagggaaagattccatctcccttacataaagacacaaggagaagcagcamgtgctgatgaagaagctgcagcttctctattcagaagatcttgctaagatcattaatgaggtggctacactaaacaacaggttttatttttttcttttctagagatagggtcttactgtgtcactcaggctggactgcagtggcacaatcatagctcactgcaaccctgaactcttgggctcaagtaatcctcccaccttagcctcccaagtagttgaaactacaaggcgaacaccaaccatgccca

SEQ ID NO: 203639 - DNA, 411 bp, Homo sapiens
ttcaaagcttcaaaggacaggctgactcttttaaagggatagagctggtttcctaaattgaagccaatgctcatttatcatttagaaaatcgtagtgcccttaagaattatactaaatctactcttcctgtgctctgtggatggacaacaaagcctggatggcagtacatctaacacagcatggtttamtaatattttcagctcacttcttaggaaaaatgtttttttcaaaatattgccattcattgaaaatgtacctgagcccccaagaactctgaagcagatgtacaaagagatgaatgttgttttcatgcctgctaacacaacatccattctgcagcctatggatcaaagagtaaatttgactttcaggtttcattattaaataaatacattttgtaaggctatagc

SEQ ID NO: 203640 - DNA, 554 bp, Homo sapiens
ccttctgtctcctttaaccatgaaaccagtagctctccatcctggctttacattagaatctctggtgtttgaaaattacaracgtctgaaccctaccccagtgaatcaataccccatgaatagatgttaagtttggtcatcttctaaaatgctcaaatgtgagtttgattcttagccaggattaagaatgcttgcacaaaatataatcctcctgaaaccctagttgttttttttaacttcatgtctaatacaatctcttactttatgcaaataaaaacagcatacaaaaattaacatatgtactaagattctcattttctatgaacacatacacaaataaacagacacagacatataagtagaaggcaatgataatataaatggaagccacatggtaatgtaggtggggaagtttcagatgatttcatttgttacttgtctatgtcttgatttaccaaatatcctaaaatatatatggattattttaataaagtagcaattcttaaaggcaatacattcatagcatttcatttattatggcagaacatctaata

SEQ ID NO: 203641 - DNA, 523 bp, Homo sapiens
  misc_feature (1)...(523): n = A,T,C or G
ccctacaccagcaaaaagattatgactcagtgaagactgagataattgttagcatttttgagcaataaagtatgttttaattaagatatgtatgttgtttttctagacatactgctrttacacttaacatacaatgctgtagtgtaatcataacttttatgtacactgggaatccaagaaattcatttgacctgcctaactttgatactcattctatggtggtggtcaagaactgaacctgcagtatctctgaagtttgcctgtaatatcagtttggaaagtccctgatttatggatcttttaagctcactgttacattgttataagtaaatacattacaaagctttttaaagactatttaatttaatattttacattggggaaaatgtcaatttttaatatcattatcattttgaagtacctttgagatagtggagattctagggaaattttatcaccttttgatgtttcctatatatctatgagacaaaagaacgcagtgnaaaaaatgtagcaaagtttt

SEQ ID NO: 203642 - DNA, 593 bp, Homo sapiens
gggctctatgatccacaatgcaaataattgatatttgcctctatgaacacctggggacatatattacttatgtatatatgtcatacctcagggggctctggcaatatgactcgtgagaaaaatttaactcagtaattcaggaaacttacctaaaattggaaaaaaattaaatgttaattaagaagcttgactggctggggaatgtagcatcccagacacmagaagaaagaaaccttgtctgttttccagtatgtaggatcccctagcacagagatggcacagagaaggtactcattttatacttttaaaaataaatcacagaacttccatcaagaaaaaccttaaaatatctcaaagaccctgatggacaatctacatttattgagaaacttctcagtattgtatattattatatataataataatattatatacaataacattaacatctacatccagtctgctcaccgtcttgtttatttatttttatttatatatattttttgagacagagtctcactctgttgccaggctggagtgcagtggcctgatctcagctcactgcaacctctgccttccaggttcaagcaatt

SEQ ID NO: 203643 - DNA, 593 bp, Homo sapiens
gggctctatgatccacaatgcaaataattgatatttgcctctatgaacacctggggacatatattacttatgtatatatgtcatacctcagggggctctggcaatatgactcgtgagaaaaatttaactcagtaattcaggaaacttacctaaaattggaaaaaaattaaatgttaattaagaagcttgactggctggggaatgtagcatcccagacaccagaagaaagaaaccttgtctgttttccagtatgtaggatcccctagcacagagatggcacagagaaggtactcattttatacttttaaaaataaatcacagaacttccatcaagaaaaaccttaaaatatctcaaagaccctgakggacaatctacatttattgagaaacttctcagtattgtatattattatatataataataatattatatacaataacattaacatctacatccagtctgctcaccgtcttgtttatttatttttatttatatatattttttgagacagagtctcactctgttgccaggctggagtgcagtggcctgatctcagctcactgcaacctctgccttccaggttcaagcaatt

SEQ ID NO: 203644 - DNA, 514 bp, Homo sapiens
tttttaaattattcctaacgcatttttttgcaaatgagtccttataattttacctcccttaatggccatgtcatctgctcttttgcccaccttccctcgaatttttctctgcattgattccatggttatcaatctaaaatgcaatgcttcccatatcacatgttggcttgaagtctttcatgctgccttcagccctcataataatataaaaaatattaagcccccgctagcccttaccctcagctcttaccccgctcttacactcaacattcccattgtgctgtcatatctgtacagatttccaacactttgcatttcctcatctcctttctgtaactcctctggtattatagaacctaccatgatgtttwccaagtttgttcagtctgggtgatacgtacattttaggtgttctcataatgttttgacttttaagcatatttttattaaaatattttggataacgtatcttatataacttcatcagaaaataagctccttgaaataaggaaat

SEQ ID NO: 203645 - DNA, 427 bp, Homo sapiens
gaattcctgtcactcttctcccaagatgtagaatattcaccatagcttctgagctaatatctttaacattaggaactattcagaggaaaaaatgcacaaatttaatctggttaatttgaatgtgtacatttttggtcttaacacatataaagacttagtttaggacatatcacgtgtttactaggtggaagaattaaagtgtcttacctygctggaggagtgatgctccatattctatataaaaaacaaaaagtaattcaagtttcacttttatcgcttatttaaaatgtaaaactgtctttccattttgtttcttttgtttcttggtggcaagggaattttagtcatctgattctaggaacttttagttgcatagagtttctttgcaaaattctcttggtttcctataatgttaatgagcaaatca

SEQ ID NO: 203646 - DNA, 570 bp, Homo sapiens
attctcttggtttcctataatgttaatgagcaaatcattgtatacctcaagtgaattcttgtcatggtttaatatatttcttttaggaagtaggtrggttcttagcttttgagtattaactgtttcaccatttaaaatataattatattcataaatgtaccaccaaatcttaaagtgttaagactctggtgtaatattttattttacttcacttatactgttagaattaaaaatattgggcgagtgcttctgtcaagtggcataaaaagttgaagattaatttttaaaatatgaaaaactgtcatacaaactcaattttgtacttatgttctcaatagattgtgacaaatttagcttttaatatctgtggtctgtcacttgctagtgcagccaccatattcttagttgaataaaattgttttatttaaataaaagatcaaaggcaattattgactagagagaaagggaacaaagtcagagtagatcataagaacaatcaatcttggtgggtgtgagattgccaaagtactattattatttttttatttacctaactagaattcttatcta

SEQ ID NO: 203647 - DNA, 320 bp, Homo sapiens
ttagttataaatatggaaaaaarttaaattggatttctactcaatatcaggtcaaaattcaactctacggttgttatggacccaaatgtgaaagagaaaactaaagtctttcagaatatgacattgcagaatatcttcatgacatttaagtagaggaagagttctaacctgaagtaaactagtgatgattttgactgtgttgaaattaagaatatctgttcatcagcatattctgtaaagatagcaaaaagacaagccacaaataagcaataaaatactcacaccttgaacatatatacatctgaacattggattagaat

SEQ ID NO: 203648 - DNA, 542 bp, Homo sapiens
cctgctttgtgtagccattcaagagagaaataagccactatgtttaaatagtgccagtgtmtgatttttgaaataatacatgactttacataaatatattgcatgcattcaagactctaacattagaattctgatacctgattaaattatggtacttgttctacataaagtgccatctgaaagtcttataccttagactaggaaatcatcatcctattaggataatgcttcacagcatggtaatgcttctcttgaatatcatctaattgttgttactctgaatagacctttaatatattcctcaatccattataataaaagccctaatctaattatcatcattaaacagcatttatttagtactttcctatgttccaggcagtgtgaatgtaagcacttcacattgatttattcatgtaacacttaaacaactctacaatcatgaagaaaatgaagcaagaaaatataaaacacaggtaggtgtgaaatccaggcattctttcttcaaatgctccatgcttaactactgcaatgtttctaaa

SEQ ID NO: 203649 - DNA, 542 bp, Homo sapiens
cctgctttgtgtagccattcaagagagaaataagccactatgtttaaatagtgccagtgtctgatttttgaaataatacatgactttacataaatatattgcatgcattcaagactctaacattagaattctgatacctgattaaattatggtacttgttctacataaagtgccatctgaaagtcttatacmttagactaggaaatcatcatcctattaggataatgcttcacagcatggtaatgcttctcttgaatatcatctaattgttgttactctgaatagacctttaatatattcctcaatccattataataaaagccctaatctaattatcatcattaaacagcatttatttagtactttcctatgttccaggcagtgtgaatgtaagcacttcacattgatttattcatgtaacacttaaacaactctacaatcatgaagaaaatgaagcaagaaaatataaaacacaggtaggtgtgaaatccaggcattctttcttcaaatgctccatgcttaactactgcaatgtttctaaa

SEQ ID NO: 203650 - DNA, 542 bp, Homo sapiens
cctgctttgtgtagccattcaagagagaaataagccactatgtttaaatagtgccagtgtctgatttttgaaataatacatgactttacataaatatattgcatgcattcaagactctaacattagaattctgatacctgattaaattatggtacttgttctacataaagtgccatctgaaagtcttataccttagaytaggaaatcatcatcctattaggataatgcttcacagcatggtaatgcttctcttgaatatcatctaattgttgttactctgaatagacctttaatatattcctcaatccattataataaaagccctaatctaattatcatcattaaacagcatttatttagtactttcctatgttccaggcagtgtgaatgtaagcacttcacattgatttattcatgtaacacttaaacaactctacaatcatgaagaaaatgaagcaagaaaatataaaacacaggtaggtgtgaaatccaggcattctttcttcaaatgctccatgcttaactactgcaatgtttctaaa

SEQ ID NO: 203651 - DNA, 488 bp, Homo sapiens
aaacaaagtacttttgggagtatagtagacagccacaatctctgtttgtagagattatctaaggagatagtgctttctcctgaacacttacagaaagactattttcagattgtgaggagacatttgatgtcatctggagcctagagtgagtgtcattgtgactttagcattagcacacacattaatttattcctcagtaagttttagggtccaaagatttctgaagccattaaaatatacagatttaaacatacaagggataatcaatttatgtaaagtgttatttctccaacatgaacccaagaccccctataatcctgtcctatgtttacttcattcttgtcattcttgttaccattcaaaataaacagccagatcaacgatgatctctgtgtagccaaatccagtggtagctgttagatattcttcccactcaatgttgtagcarctcttggcttggtgattcatttttctggctggtaaaactt

SEQ ID NO: 203652 - DNA, 565 bp, Homo sapiens
tagtaacgatctaaattcctaaaaagacaggttttatttggagcattccatttttaagtgttcaaaacaggtgtttctattataaaggttttagaaagcatgtctgctctgtgttgaaataagataattgccaaatttttagatgaatttactgtgttccaagcaatttttgtataaattaaatgtatatcatctaatacaatcttgcagggttaatgcagctctccgtattttcagttaaggaaactggagcttggagaggttaagtagtaactcgtgtagctggagttggaatacaagttgcctgacaccaaaatccatgcgctttccctacacacgaagcaaacttctctaatccgcagacgatggattacatcaggagtccccaacttttkgacatcaaggactggttttgtggaagacaatttttccacggatgagggcgggggtatggtttcgggataaaactgttctacctcagatcatcaggcattagaaagattctcataaggagcacacaacccagatccctcacatgcgcagttcacaatacagttcgctctcc

SEQ ID NO: 203653 - DNA, 588 bp, Homo sapiens
tccttgacttcattattcctactgcctcgtggtggctagaactttagtaacaggatagtctcagatttaggcaacaacctcctggcttcatcagaactacctatgagccaacacaaatgggagccaaagatcaagaaagcaaaaagtgctcactagaatccagttctatacaggaaatacgtaccagcataagaaatgtatagcttatttttgttgggtttttctatcagagtacttttctgaagaaaaataatacaaaccttccacaaatccagagttgacagcttcaccttgaaaatgaaccacaaaaggcatttcaagtgtaactaataactagagactgttcaatgaaaactgtttattctcttcctaaattactcaaattcacttttaaaataatctgtaaaggcagattgtcttgaaaaactaccaatttttattttctttgaagataaacacrtggctaagagaggaatattccttcaacacagctgacaattatttactatctgcaatgttcacaacacaacatttaatattatggagtcaacatattaaactaaatattttaaatgtctttagttatac

SEQ ID NO: 203654 - DNA, 536 bp, Homo sapiens
tcaactttggttaagctttttcacaagtttcaaagaccttgatacttctgcctttaayatttgaatcattaacttttgttatattcttccccattatgtcaattgactgacccctttccagggatcaatggttataaacagcttgaaggcttgcaggcattatcttgaattatatgcaatgttttaaggctactggacttagaaaaaggttctgtttttttcttttaattttttgacttgtttttattgttgttttggctattgcctctttttattttcttgttcatctgggtattctaggcactgacaaaggaggcaagcataaataatggtatatgtcctcctcctagattgtaaaattttgaggaacactagtcctcgttctgtgaatctctgtaatatttatttattattaagtttagagttgcttttaagttaacatctattaattaattctattacctgcatgttgtgcttgtgtataacatgtccattaattctattaggtcaattcttggagtcaaaattacctttta

SEQ ID NO: 203655 - DNA, 536 bp, Homo sapiens
tcaactttggttaagctttttcacaagtttcaaagaccttgatacttctgcctttaatatttgaatcattaacttttgttatattcttccccattatgtcaattgactgacccctttccagggatcaatggttataaacagcttgaaggcttgcaggcattatcttgaattatatgcaatgttttaaggctactggacttagaaaaaggttctgtttttttctttyaattttttgacttgtttttattgttgttttggctattgcctctttttattttcttgttcatctgggtattctaggcactgacaaaggaggcaagcataaataatggtatatgtcctcctcctagattgtaaaattttgaggaacactagtcctcgttctgtgaatctctgtaatatttatttattattaagtttagagttgcttttaagttaacatctattaattaattctattacctgcatgttgtgcttgtgtataacatgtccattaattctattaggtcaattcttggagtcaaaattacctttta

SEQ ID NO: 203656 - DNA, 554 bp, Homo sapiens
gaacactatggcttggcttttctctggtcccagtgtcatcctagaggagaaattcttagtgtcagaccatgaaccactttgagaacctgatgaaactatgagcactgcctttaggtaaatttgtgtactctaactcacactaaatttgtcatagcrtttcaaagtttcagagatccctgaggtacctttgcaaactcctctcaaagaatcagttgcaatcagttggctttattgtgcaagaatcaaaatattgaatgtggcatgaatgtaaaatgtaaggagagaagagctgaatctgtgaaaatcacattttctgttgactgaaggcagacaaatggctgaaggagagtgtgaagtagtaatttggtttcagcaagtcctataaaaaataatgatagtttagaaatttattcatagtatgttaacagttctcatgatatatatttatttagcttccacaatttttctttcatgtctgtatccaataagtcaatcagattacatatttaaacttaaatatttaaaataggcatatagtaaactgaaaataatag

SEQ ID NO: 203657 - DNA, 224 bp, Homo sapiens
tttcatccttcactctaatttcagcgtctaaaatcctcgctaccgtgaacaatctgagtatttgatgagacagggctgaataktgcagtttttctcctagcaaccatttgggggcatttgctttaaatcgattggaaaaatatggcataaccatttgcacaaacttgggacaaatgatattgggataacgatctaccagaatagggaattttacccacagtttc

SEQ ID NO: 203658 - DNA, 224 bp, Homo sapiens
tttcatccttcactctaatttcagcgtctaaaatcctcgctaccgtgaacaatctgagtatttgatgagacagggctgaatagtgcagtttttctccyagcaaccatttgggggcatttgctttaaatcgattggaaaaatatggcataaccatttgcacaaacttgggacaaatgatattgggataacgatctaccagaatagggaattttacccacagtttc

SEQ ID NO: 203659 - DNA, 224 bp, Homo sapiens
tttcatccttcactctaatttcagcgtctaaaatcctcgctaccgtgaacaatctgagtatttgatgagacagggctgaatagtgcagtttttctcctagcaaccatttgggggcatttgctttaaatcgattggaaaaatatggcataaccatttgcacaaacttgggacaaatgatmttgggataacgatctaccagaatagggaattttacccacagtttc

SEQ ID NO: 203660 - DNA, 625 bp, Homo sapiens
tttcacccttggttctgagatgcaaaccaaagaatatcatgaccagctttcaggcctcctgaagtatmtctctcacattgtcctgttctcatgctgaggagcctgagatccctgtgtggggattagacagtggactgttatgggtgtaggtgaattggcttattttgtctgtccctgtctgaatgtattgcaggaactaaaaaggaccaagaagaggaagaagaccaaggcccaccatgccccaggtaactgagcaattgtgaacagctacttctgtgttgacatctggagactcctggttcagggaaaacagagcgggctgacattatcgattacatcttttccagcaagcctgaattattcctactaacattgctgttggttttcattgcagtagatatttaggtttccatttcttcctccccttatcatttactaacctactgtaggtggaccagacttcaaaaactgtattctcatggcgactgcatggaaacttgagcacattttatggaaaattattgagcacagtcttttcatgatccctgtatgctgtgtgtcctgagggcactaactcagagtgtcctgttactccctcatcagtgtgtcacctggacaattcact

SEQ ID NO: 203661 - DNA, 625 bp, Homo sapiens
tttcacccttggttctgagatgcaaaccaaagaatatcatgaccagctttcaggcctcctgaagtatctctctcacattgtcctgttctcatgctgaggagcctgagatccctgtgtggggattagacagtggactgttatgggtgtaggtgaattggcttattttgtctgtccctgtctgaatgtattgcaggaaytaaaaaggaccaagaagaggaagaagaccaaggcccaccatgccccaggtaactgagcaattgtgaacagctacttctgtgttgacatctggagactcctggttcagggaaaacagagcgggctgacattatcgattacatcttttccagcaagcctgaattattcctactaacattgctgttggttttcattgcagtagatatttaggtttccatttcttcctccccttatcatttactaacctactgtaggtggaccagacttcaaaaactgtattctcatggcgactgcatggaaacttgagcacattttatggaaaattattgagcacagtcttttcatgatccctgtatgctgtgtgtcctgagggcactaactcagagtgtcctgttactccctcatcagtgtgtcacctggacaattcact

SEQ ID NO: 203662 - DNA, 625 bp, Homo sapiens
tttcacccttggttctgagatgcaaaccaaagaatatcatgaccagctttcaggcctcctgaagtatctctctcacattgtcctgttctcatgctgaggagcctgagatccctgtgtggggattagacagtggactgttatgggtgtaggtgaattggcttattttgtctgtccctgtctgaatgtattgcaggaactaaaaaggaccaagaagaggaagaagaccaaggcccaccatgccccaggtaactgagcaattgtgaacagctacttctgtgttgacatctggagactcctggttcagggaaaacagagcgggctgacattatcgattacatcttttcmagcaagcctgaattattcctactaacattgctgttggttttcattgcagtagatatttaggtttccatttcttcctccccttatcatttactaacctactgtaggtggaccagacttcaaaaactgtattctcatggcgactgcatggaaacttgagcacattttatggaaaattattgagcacagtcttttcatgatccctgtatgctgtgtgtcctgagggcactaactcagagtgtcctgttactccctcatcagtgtgtcacctggacaattcact

SEQ ID NO: 203663 - DNA, 625 bp, Homo sapiens
tttcacccttggttctgagatgcaaaccaaagaatatcatgaccagctttcaggcctcctgaagtatctctctcacattgtcctgttctcatgctgaggagcctgagatccctgtgtggggattagacagtggactgttatgggtgtaggtgaattggcttattttgtctgtccctgtctgaatgtattgcaggaactaaaaaggaccaagaagaggaagaagaccaaggcccaccatgccccaggtaactgagcaattgtgaacagctacttctgtgttgacatctggagactcctggttcagggaaaacagagcgggctgacattatcgattacatcttttccascaagcctgaattattcctactaacattgctgttggttttcattgcagtagatatttaggtttccatttcttcctccccttatcatttactaacctactgtaggtggaccagacttcaaaaactgtattctcatggcgactgcatggaaacttgagcacattttatggaaaattattgagcacagtcttttcatgatccctgtatgctgtgtgtcctgagggcactaactcagagtgtcctgttactccctcatcagtgtgtcacctggacaattcact

SEQ ID NO: 203664 - DNA, 490 bp, Homo sapiens
aaaccccaccatgccccaggtgactttcagcaattgtggatgcttaattctgtgttaacacctggaggcaacagattcagggaaaccagagtgtgtttgatgwcatgttttcaacgaaggctgaattactcctactgtcattgctgttggttttcattgcagtagatgtttaggtttccatttcttcctccccttatcatttcctaacgtaccataggttgaccatacttcaaaagctgtactctcatggccactgcatcgaattttgagcatattttatggaaaactattgagctcactcttttcatgatcacagtttgctgtgtgtcatgagggcactaactcagagtgtccttttactcccttaccagtatgtcacctggccaattcactaggtcactttctctctgtctctgtctctgtctctctctctgtctctgtctctctctctctctctgtctttctctttcattgttttctacctggccct

SEQ ID NO: 203665 - DNA, 490 bp, Homo sapiens
aaaccccaccatgccccaggtgactttcagcaattgtggatgcttaattctgtgttaacacctggaggcaacagattcagggaaaccagagtgtgtttgatgtcatgttttcarcgaaggctgaattactcctactgtcattgctgttggttttcattgcagtagatgtttaggtttccatttcttcctccccttatcatttcctaacgtaccataggttgaccatacttcaaaagctgtactctcatggccactgcatcgaattttgagcatattttatggaaaactattgagctcactcttttcatgatcacagtttgctgtgtgtcatgagggcactaactcagagtgtccttttactcccttaccagtatgtcacctggccaattcactaggtcactttctctctgtctctgtctctgtctctctctctgtctctgtctctctctctctctctgtctttctctttcattgttttctacctggccct

SEQ ID NO: 203666 - DNA, 490 bp, Homo sapiens
aaaccccaccatgccccaggtgactttcagcaattgtggatgcttaattctgtgttaacacctggaggcaacagattcagggaaaccagagtgtgtttgatgtcatgttttcaacgaaggctgaattactcctactgtcattgctgttggttttcattgcagtagatgtttaggtttccatttcttcctccccttatcatttcctaacgtaccataggttgaccatacttcaaaagctgtactctcatggccactgcatcgaattttgagcataktttatggaaaactattgagctcactcttttcatgatcacagtttgctgtgtgtcatgagggcactaactcagagtgtccttttactcccttaccagtatgtcacctggccaattcactaggtcactttctctctgtctctgtctctgtctctctctctgtctctgtctctctctctctctctgtctttctctttcattgttttctacctggccct

SEQ ID NO: 203667 - DNA, 524 bp, Homo sapiens
gtctgctctattatttcacttgcctgtctgggttcttgggcracagcatagaatcctgcactgtgttttccctcacgctttctcactctctgcagaacaaatttttgttacatgccttattatcatggtaatattggccttcagtcctgtatagaagcattaaaaatgtgcgtaatgtatatccttttaaaatgttatcctaagaagcatcttttggagttaaggagagttagatgaataaagaaagaatacagtttctcctaaacaaacccactaagaaaatcatggaaagaattatgacaactatgaaaatgaaggaggtatactttgtcaacaaaagcaaaataaccaagctactcttagacataatctcacgttatctttctgtagtgctctagcattttctaagcctttcacacactgttatctctttttttctttctccttctagaaattaattatgacttttcctttcaaaaatgaaggactttttttttttttttactcttttcattttttcctga

SEQ ID NO: 203668 - DNA, 524 bp, Homo sapiens
gtctgctctattatttcacttgcctgtctgggttcttgggcgacagcatagaatcctgcactgtgttttccctcacgctttctcactctctgcagaacaaatttttgttacatgccttattatcatggtaatattggccttcagtcctgtatagaagcattaaaaatgtgcrtaatgtatatccttttaaaatgttatcctaagaagcatcttttggagttaaggagagttagatgaataaagaaagaatacagtttctcctaaacaaacccactaagaaaatcatggaaagaattatgacaactatgaaaatgaaggaggtatactttgtcaacaaaagcaaaataaccaagctactcttagacataatctcacgttatctttctgtagtgctctagcattttctaagcctttcacacactgttatctctttttttctttctccttctagaaattaattatgacttttcctttcaaaaatgaaggactttttttttttttttactcttttcattttttcctga

SEQ ID NO: 203669 - DNA, 524 bp, Homo sapiens
gtctgctctattatttcacttgcctgtctgggttcttgggcgacagcatagaatcctgcactgtgttttccctcacgctttctcactctctgcagaacaaatttttgttacatgccttattatcatggtaatattggccttcagtcctgtatagaagcattaaaaatgtgcgtaatgtatatccttttaaaatgttatcctaagaagcatcttttggagttaaggagagttagatgaataaagaaagaatacagtttctcctaaacaaacccactaagaaaatcatggaaagaattatgacaactatgaaaatgaaggaggtatactttgtcaacaaaagcaaaataaccaagctactcttagacataatctcacrttatctttctgtagtgctctagcattttctaagcctttcacacactgttatctctttttttctttctccttctagaaattaattatgacttttcctttcaaaaatgaaggactttttttttttttttactcttttcattttttcctga

SEQ ID NO: 203670 - DNA, 430 bp, Homo sapiens
atatataggttcagcccacggtgatggcaaatctcagcccaacaaggggcacaaggcccaaagattatggggtctacctgggccatgaactggagctttatcaccttcacartgtagtactcactgcctatgtcaacagccatgcagacttgctgttcctctaatgagtgaaatgtgctgctgtaagactggtacgaggccaacatttcaggaggaattgagagagtcgaataaccttcatcccaggactcctgggggacttcctcctcttcagactcctgcagattcctgatgagccaggcaggacagggatgatagaagatttaaccaacagacattagacaacaaaacctcccagatgatctgatgggagacagaatggagtggtcacagaaaccaaaggcatttttccttcaagagaaataaaact

SEQ ID NO: 203671 - DNA, 430 bp, Homo sapiens
atatataggttcagcccacggtgatggcaaatctcagcccaacaaggggcacaaggcccaaagattatggggtctacctgggccatgaactggagctttatcaccttcacagtgkagtactcactgcctatgtcaacagccatgcagacttgctgttcctctaatgagtgaaatgtgctgctgtaagactggtacgaggccaacatttcaggaggaattgagagagtcgaataaccttcatcccaggactcctgggggacttcctcctcttcagactcctgcagattcctgatgagccaggcaggacagggatgatagaagatttaaccaacagacattagacaacaaaacctcccagatgatctgatgggagacagaatggagtggtcacagaaaccaaaggcatttttccttcaagagaaataaaact

SEQ ID NO: 203672 - DNA, 430 bp, Homo sapiens
atatataggttcagcccacggtgatggcaaatctcagcccaacaaggggcacaaggcccaaagattatggggtctacctgggccatgaactggagctttatcaccttcacagtgtagtactcactgcctatgtcaacagccatgcagacttgctgttcctctaatgagtgaaatgtgcygctgtaagactggtacgaggccaacatttcaggaggaattgagagagtcgaataaccttcatcccaggactcctgggggacttcctcctcttcagactcctgcagattcctgatgagccaggcaggacagggatgatagaagatttaaccaacagacattagacaacaaaacctcccagatgatctgatgggagacagaatggagtggtcacagaaaccaaaggcatttttccttcaagagaaataaaact

SEQ ID NO: 203673 - DNA, 588 bp, Homo sapiens
atctgcctgggtccaatgtgctgagagcgggctcagsttgccacaggcatggctggagactaggaatagagccttgctcactgacccatttcatgtctaggcttccaactgagactacagtttcattacaacttatatgcgcccataggtcctgcctgcggcaatgacatctctcgggtcagtaagggccacttggaacaggaatatcacccctatctggaagaccaggtggaggcttatcaccttcacagtaaggtactcactgtccacgtcaagagccaagccaaggtactgttcctccaatgagtaaacagcactgctgtagggctggcctaagtcaggcagttcaagataacctgaaggagtcgaataacatctatccagtgagtcctgcaagacttcaggctctttctcatccagcagctccctgctgagcctggaaaagtaggaaaaagtaaagaataagccagggggaatcagaaaccacacagccccagctagatttcatggctaacataaggaactgtttaaaaagaaaaaggacagatccattaatgaggtaatgaattattgcctttatgttgggat

SEQ ID NO: 203674 - DNA, 588 bp, Homo sapiens
atctgcctgggtccaatgtgctgagagcgggctcagcttgccacrggcatggctggagactaggaatagagccttgctcactgacccatttcatgtctaggcttccaactgagactacagtttcattacaacttatatgcgcccataggtcctgcctgcggcaatgacatctctcgggtcagtaagggccacttggaacaggaatatcacccctatctggaagaccaggtggaggcttatcaccttcacagtaaggtactcactgtccacgtcaagagccaagccaaggtactgttcctccaatgagtaaacagcactgctgtagggctggcctaagtcaggcagttcaagataacctgaaggagtcgaataacatctatccagtgagtcctgcaagacttcaggctctttctcatccagcagctccctgctgagcctggaaaagtaggaaaaagtaaagaataagccagggggaatcagaaaccacacagccccagctagatttcatggctaacataaggaactgtttaaaaagaaaaaggacagatccattaatgaggtaatgaattattgcctttatgttgggat

SEQ ID NO: 203675 - DNA, 588 bp, Homo sapiens
atctgcctgggtccaatgtgctgagagcgggctcagcttgccacaggcatggctggagactaggaatagagccttgctcactgacccatttcatgtctaggcttccaactgagactacagtttcattacaacytatatgcgcccataggtcctgcctgcggcaatgacatctctcgggtcagtaagggccacttggaacaggaatatcacccctatctggaagaccaggtggaggcttatcaccttcacagtaaggtactcactgtccacgtcaagagccaagccaaggtactgttcctccaatgagtaaacagcactgctgtagggctggcctaagtcaggcagttcaagataacctgaaggagtcgaataacatctatccagtgagtcctgcaagacttcaggctctttctcatccagcagctccctgctgagcctggaaaagtaggaaaaagtaaagaataagccagggggaatcagaaaccacacagccccagctagatttcatggctaacataaggaactgtttaaaaagaaaaaggacagatccattaatgaggtaatgaattattgcctttatgttgggat

SEQ ID NO: 203676 - DNA, 588 bp, Homo sapiens
atctgcctgggtccaatgtgctgagagcgggctcagcttgccacaggcatggctggagactaggaatagagccttgctcactgacccatttcatgtctaggcttccaactgagactacagtttcattacaacttatatgcgcccataggtcctgcctgcggcaatgacatctctcgggtcagtaagggccacttggaacaggaatatcacccctatctggaagaccaggtggaggcttatcaccttcayagtaaggtactcactgtccacgtcaagagccaagccaaggtactgttcctccaatgagtaaacagcactgctgtagggctggcctaagtcaggcagttcaagataacctgaaggagtcgaataacatctatccagtgagtcctgcaagacttcaggctctttctcatccagcagctccctgctgagcctggaaaagtaggaaaaagtaaagaataagccagggggaatcagaaaccacacagccccagctagatttcatggctaacataaggaactgtttaaaaagaaaaaggacagatccattaatgaggtaatgaattattgcctttatgttgggat

SEQ ID NO: 203677 - DNA, 469 bp, Homo sapiens
aataagccagggggaatcagaaaccacacagccccagctagatttcatggctaacataaggaactgtttaaaaagaaaaaggacagatccattaatgaggtaatgaattattgcctttatgttgggatagaccagggccaggtagaaaagaatgaaagagaaagacagggagagggagggagagagagagagagagagagaggagaaagtaagctcagcgagttggccgggtgacacactgatgaaggggtcaaaggacactctgagttagtgccctcgggacacacagcgaacagtgatcatgaaaagagtgggctcaataattttccataaacttgctcaagattccatgcagttgccatacagcctttgaggtatggtcaacctatagtaagttagtaaatgataaggggaggaagaaatggaaacctaarcatctactgcaatgaaaaccaacagcaatatcagg

SEQ ID NO: 203678 - DNA, 272 bp, Homo sapiens
cttcaggaggcctgaaggctgatcaycatagagattccttggtttttgtcccagaaactgtgggtaaaattccctattctggtagatcgttatcccaatatcatttgtcccaagtttgtgcaaatggttatgccatatttttccaatcgatttaaagcaaatgcccccaaatggttgctaggagaaaaactgcactattcagccctgtctcatcaaatactcagattgttcacggtagcgaggattttagacgctgaaattagagtgaagga

SEQ ID NO: 203679 - DNA, 272 bp, Homo sapiens
cttcaggaggcctgaaggctgatcacsatagagattccttggtttttgtcccagaaactgtgggtaaaattccctattctggtagatcgttatcccaatatcatttgtcccaagtttgtgcaaatggttatgccatatttttccaatcgatttaaagcaaatgcccccaaatggttgctaggagaaaaactgcactattcagccctgtctcatcaaatactcagattgttcacggtagcgaggattttagacgctgaaattagagtgaagga

SEQ ID NO: 203680 - DNA, 272 bp, Homo sapiens
cttcaggaggcctgaaggctgatcaccatagagattccttggtttttgtcccagaaactgtgggtaaaattccctattctggtagatcgttatcccaatatcatttgtcccaagtttgtgcaaatggttatgccatatttttccaatcgatttaaagcaaatgcccccaaatggttgctrggagaaaaactgcactattcagccctgtctcatcaaatactcagattgttcacggtagcgaggattttagacgctgaaattagagtgaagga

SEQ ID NO: 203681 - DNA, 272 bp, Homo sapiens
cttcaggaggcctgaaggctgatcaccatagagattccttggtttttgtcccagaaactgtgggtaaaattccctattctggtagatcgttatcccaatatcatttgtcccaagtttgtgcaaatggttatgccatatttttccaatcgatttaaagcaaatgcccccaaatggttgctaggagaaaaactgcactattcagccctgtctcatcaaatactcagattgttcayggtagcgaggattttagacgctgaaattagagtgaagga

SEQ ID NO: 203682 - DNA, 459 bp, Homo sapiens
gtcactttttaaacttaaaaattattaagaaaacagtgaaaacttaatgtttaaaagagtagaagatagggaaaattattacacagaaaaagataaacaacagagaaagataaataaattgccagtgaatatgtaaaaagttgctcagcascagtggtagttcaaatccaaatagcactgagttagcatttgttaactaataaattggcaaaaattatattttgataaaacccagtgttgttgacatcccaagaaaaagggctatgctcacacagccttggagcatgtgcacattgatgatttttttggcataaaaattagtggtttctattaaaatcagcagtgtaattcacaatcgctaagacatggaatcaacctaggtgcccatcaactgtggattggataaagaaaatatggtacatatatgtcatggaatactttgcagccataaaaaagaat

SEQ ID NO: 203683 - DNA, 459 bp, Homo sapiens
gtcactttttaaacttaaaaattattaagaaaacagtgaaaacttaatgtttaaaagagtagaagatagggaaaattattacacagaaaaagataaacaacagagaaagataaataaattgccagtgaatatgtaaaaagttgctcagcaccagtggtagttcaaatccaartagcactgagttagcatttgttaactaataaattggcaaaaattatattttgataaaacccagtgttgttgacatcccaagaaaaagggctatgctcacacagccttggagcatgtgcacattgatgatttttttggcataaaaattagtggtttctattaaaatcagcagtgtaattcacaatcgctaagacatggaatcaacctaggtgcccatcaactgtggattggataaagaaaatatggtacatatatgtcatggaatactttgcagccataaaaaagaat

SEQ ID NO: 203684 - DNA, 465 bp, Homo sapiens
tttttaaaatgtatttcataggatttttgttctctctctccctctttttgtgcatatgtgtgtgtgtctgattagtctttaytatcttaaaatggttagtcctgatagacctgtttcttcaaaatttctctcagttctttggcagtttgctcttagcttataattaaagatcaatttctgacttgtcttgttctagaaaacctcaatggaaattacagcaagctgaataggatattaattaaaaacataaacctggtgaaacccgaacatagaggctccagttcaaagatgcttccaatagttgacatggcccttcattccttaaaaccagctatttttcttttgaattacattacctttaattctgtaaattggatgttatatagtaccatgaaaactgctgtgagtaattataatactcattgctgagtgatgtgacttctttctcaaggctatttctgaggg

SEQ ID NO: 203685 - DNA, 465 bp, Homo sapiens
tttttaaaatgtatttcataggatttttgttctctctctccctctttttgtgcatatgtgtgtgtgtctgattagtctttactatcttaaaatggttagtcctgatagacctgtttcttcaaaatttctctcagttctttggcagtttgctcttagcttataattaaagatcaatttctgacttgtcttgttctagaaaacctcaatggaaattacagcaagctgaataggataytaattaaaaacataaacctggtgaaacccgaacatagaggctccagttcaaagatgcttccaatagttgacatggcccttcattccttaaaaccagctatttttcttttgaattacattacctttaattctgtaaattggatgttatatagtaccatgaaaactgctgtgagtaattataatactcattgctgagtgatgtgacttctttctcaaggctatttctgaggg

SEQ ID NO: 203686 - DNA, 511 bp, Homo sapiens
cagctcatgttgtcatatttttttgcattgataggacttcagtttctacaatggtccaggatcaatcaagagttctttaaagaaaacatttattttgtcaaagaaatgcattttgttccaaatcctaagaacaatagtagtggtgtgtcagaggctctattgcatctggatataaaaacaaaggggcacaatattcctgaccagttgggaattattatcttcatctcaatcccatcaaaawgtggcagcatgacaagtcatgaagtaaaaggaccaggtgataaaatgaggtctccaaaatccaaagcatcaaagttctcagttagtggtcagggctgcaaagtgccataattttgcactttggaaggtatatcttgagaatattgagtgtatgagacaagttaaaaggtcatgcagccagacgcggtggctcacgcctgtaatcccagcacttagggaagctgaggtgggcggatcatgagatcaggagttcaagaccagcctggccaat

SEQ ID NO: 203687 - DNA, 487 bp, Homo sapiens
attgttgtattcatctgttttcatgctgctgataaagacatacctgagaccaggcaatttacaaaagaaagaggtttaatggacttacagttccacatgggtggggaggcctcacaatcatggtggaggacaaagaggagcaagtcacatcttacatggatggcagcaggcaaagagmcagcttgtgcagggaaactcccattttaaaaatgatcagatctcatgagacttactcactaacacaagaacagcacaggaaagacccatcctcatgattcagttatctcccactgggcccctcccacaacatgtgggaattatgggagctacaagatgagattgggtgtggacacagccaaaccatatcaattgtcatcactcaaggcagatgagtatatagaaagctatcagttgtaaggaattggactaagtttaagagaataataattaagatagaacaaatgtttggtcctgcttaagggctagg

SEQ ID NO: 203688 - DNA, 448 bp, Homo sapiens
aatgaaatgtaccttgctgtttaaatgaataaattagttattatcataaaataaatgtcatgtaaagacatttattttatggtgtataaaattagaaaaacaagttattaacaaaacatgattttttgtaaaatgcttttattttgtttttaattgacataataattgcacatgtttatggggtacagtgtggtgctttagtgcatgtgtacattgygtaatggtcaaatttaaaaattacatgtattgacagaaaaagtgtttggatatttgtatcctaaatgctaacagtgatgatatctggaatgtggaactgctggtaatttttccctttttcttttagagatttttgtacttatttttaataataaacatatactaattttataataaaaataacaatgaagtcctttccattttgaaaaattaattccaatagaaaaatact

SEQ ID NO: 203689 - DNA, 448 bp, Homo sapiens
aatgaaatgtaccttgctgtttaaatgaataaattagttattatcataaaataaatgtcatgtaaagacatttattttatggtgtataaaattagaaaaacaagttattaacaaaacatgattttttgtaaaatgcttttattttgtttttaattgacataataattgcacatgtttatggggtacagtgtggtgctttagtgcatgtgtacattgtgtaatggtcaaatttaaaaattamatgtattgacagaaaaagtgtttggatatttgtatcctaaatgctaacagtgatgatatctggaatgtggaactgctggtaatttttccctttttcttttagagatttttgtacttatttttaataataaacatatactaattttataataaaaataacaatgaagtcctttccattttgaaaaattaattccaatagaaaaatact

SEQ ID NO: 203690 - DNA, 448 bp, Homo sapiens
aatgaaatgtaccttgctgtttaaatgaataaattagttattatcataaaataaatgtcatgtaaagacatttattttatggtgtataaaattagaaaaacaagttattaacaaaacatgattttttgtaaaatgcttttattttgtttttaattgacataataattgcacatgtttatggggtacagtgtggtgctttagtgcatgtgtacattgtgtaatggtcaaatttaaaaattacatgtattgayagaaaaagtgtttggatatttgtatcctaaatgctaacagtgatgatatctggaatgtggaactgctggtaatttttccctttttcttttagagatttttgtacttatttttaataataaacatatactaattttataataaaaataacaatgaagtcctttccattttgaaaaattaattccaatagaaaaatact

SEQ ID NO: 203691 - DNA, 552 bp, Homo sapiens
cttctggctcatagatggcaacttcctgctgtatccccatactttggaaggggccaatgagctctctgggatctcttttataagggcacaaatyccattcatgagaatcttgtcctcatgacctaatcacctccccaaggctctatctcctaacacgagtagcttgggggttaggatttcaatatacaaatttggggggacataaacagtcagtctgtgacattgccatttcatcagtaagaattttcatgaactcactattaagatttatgtttaggttttttatgcggatgttctcactttataatattgtttgtctgcatagtttaaagaaaaggacaatgcccaattagaacaggaggtgtcttttgttggccagcaaaatattttaagatgccttgagtgtgaccctacatagagatcatcaaggtaacatcattttgttcttgttctagatccacatgtttcactcaagatcccagaaagaaaatgtatgaaaacacattggaagacaataatccatccttacaatgctagccaatgtttattatt

SEQ ID NO: 203692 - DNA, 552 bp, Homo sapiens
cttctggctcatagatggcaacttcctgctgtatccccatactttggaaggggccaatgagctctctgggatctcttttataagggcacaaatcccattsatgagaatcttgtcctcatgacctaatcacctccccaaggctctatctcctaacacgagtagcttgggggttaggatttcaatatacaaatttggggggacataaacagtcagtctgtgacattgccatttcatcagtaagaattttcatgaactcactattaagatttatgtttaggttttttatgcggatgttctcactttataatattgtttgtctgcatagtttaaagaaaaggacaatgcccaattagaacaggaggtgtcttttgttggccagcaaaatattttaagatgccttgagtgtgaccctacatagagatcatcaaggtaacatcattttgttcttgttctagatccacatgtttcactcaagatcccagaaagaaaatgtatgaaaacacattggaagacaataatccatccttacaatgctagccaatgtttattatt

SEQ ID NO: 203693 - DNA, 552 bp, Homo sapiens
cttctggctcatagatggcaacttcctgctgtatccccatactttggaaggggccaatgagctctctgggatctcttttataagggcacaaatcccattcatgagaatcttgtcctcatgacctaatcacctccccaaggctctatctcctaacacgagtagcttgggggttaggatttcaatatacaaatttggggggacataaacagtcagtctgtgacattgccatttcatcagtaagaattttcatgaactcactattaagatttatgtttaggttttttatgcggatgttctcactttataatattgtttgtctgcatagtttaaagaaaaggacaatgcccaattagaacaggaggtgtcttttgttggccagcaaaatattttaagatgccttgagtgtgaccctacatagagatcatcaaggtaacatcattttgttcttgttctagatccacatgtttcactcaagatcccagaaagaaaatgtawgaaaacacattggaagacaataatccatccttacaatgctagccaatgtttattatt

SEQ ID NO: 203694 - DNA, 570 bp, Homo sapiens
aagggaacatcacacactggggcctgctctgtggtggggggctgggggagggatagcattaggagatatacctaatgtaaaagatgagttaatgggtgcagcacaccaacatggcacatgtatacatatgtaacaaaccwgcacgttgtgcacatgtaccctagaacttaaagtataataaaaaaaattaaaatattctgcagtcacagtgactgtcttggcttctcttaatttatgaggacctttgtcttatagactcttttttttaaaaaaagatggggtcttgctatgttgtccatgctggagtgcagtggctattcacaggcttgatcattgcatactacagtctggaactcctggactcaagtctcccagtggctgggaatacaggtgagtgcctaccacacctagcctgatttacagatttttgacatctattatagttaaatgtattttcagcatttgcatattaaaggaataatattgatgcttaacttcattagtgatcagggaattccaaatttaaaaaaaattttttcatctcttatagtatatttaaaaattcattgc

SEQ ID NO: 203695 - DNA, 491 bp, Homo sapiens
ctctgtggtggggggctgggggagggatagcattaggagatatacctaatgtaaaagatgagttaatgggtgcagcacaccaacatggcacatgtatacatatgtaacaaacctgcacgttgtgcacatgtaccctagaacttaaagtataataaaaaaaattaaaatattctgmagtcacagtgactgtcttggcttctcttaatttatgaggacctttgtcttatagactcttttttttaaaaaaagatggggtcttgctatgttgtccatgctggagtgcagtggctattcacaggcttgatcattgcatactacagtctggaactcctggactcaagtctcccagtggctgggaatacaggtgagtgcctaccacacctagcctgatttacagatttttgacatctattatagttaaatgtattttcagcatttgcatattaaaggaataatattgatgcttaacttcattagtgatcagggaattc

SEQ ID NO: 203696 - DNA, 311 bp, Homo sapiens
aggaatttattgttttgagtttcatggttttctctatcaactgatgacatcttgaaaggtgtaagccttccagacttccatgatgttctctctattgggtttctcttttgcaatgttgacaaacctttccatagagtgccatatgtagagccttaaaggtccttatgactyccttatctagaggctgaagtagagatgtgtttgggggaaaaggagaacacttcagtgcctttggtgttgaactcatggggttctgggtggccagggggcattttccaattaaacaacaacaacaaaaaactttaaaaagc

SEQ ID NO: 203697 - DNA, 311 bp, Homo sapiens
aggaatttattgttttgagtttcatggttttctctatcaactgatgacatcttgaaaggtgtaagccttccagacttccatgatgttctctctattgggtttctcttttgcaatgttgacaaacctttccatagagtgccatatgtagagccttaaaggtccttatgactcccttatctagaggctgaagtagagatgtgtttgggggaaaaggagaacmcttcagtgcctttggtgttgaactcatggggttctgggtggccagggggcattttccaattaaacaacaacaacaaaaaactttaaaaagc

SEQ ID NO: 203698 - DNA, 553 bp, Homo sapiens
gaattcttttagggcggtttagccagaatctcccttactcctgatgtttcctcttagtgattttccattcactgacccctgcattgctcctgggctataaattcccacttccscatgctgtattcagagttaagcccatctctctccccagctccaagactgtgttgcagtggttcctatatctatggtgatggtcctgaataaagtcttctttactgtgcatttgaagtatcactgaataattttttctttaacaactatggtgttgaaactcaactaggacagattcatcactggatcctgggcctctcactcagaaccctaaatgcatgcctttgaagtctttgttgtcatttctgactgattagggatccattggtgaatcagattcctgagccattgctccagacaaaagcccgttgatggctaaggacagattttgaatctgaagggatgaatattctctctgaagctggggtagagtcccaggcttcttttgaaagcaatcctctgggcaggaaggtcttcgtgtgggcttcttgttctgagtggt

SEQ ID NO: 203699 - DNA, 553 bp, Homo sapiens
gaattcttttagggcggtttagccagaatctcccttactcctgatgtttcctcttagtgattttccattcactgacccctgcattgctcctgggctataaattcccacttccgcatgcygtattcagagttaagcccatctctctccccagctccaagactgtgttgcagtggttcctatatctatggtgatggtcctgaataaagtcttctttactgtgcatttgaagtatcactgaataattttttctttaacaactatggtgttgaaactcaactaggacagattcatcactggatcctgggcctctcactcagaaccctaaatgcatgcctttgaagtctttgttgtcatttctgactgattagggatccattggtgaatcagattcctgagccattgctccagacaaaagcccgttgatggctaaggacagattttgaatctgaagggatgaatattctctctgaagctggggtagagtcccaggcttcttttgaaagcaatcctctgggcaggaaggtcttcgtgtgggcttcttgttctgagtggt

SEQ ID NO: 203700 - DNA, 542 bp, Homo sapiens
gggcggtttagccagaatctcccttactcctgatgtttcctcttagtgattttccattcactgacccctgcattgctcctgggctataaattcccacttccgcatgctgtattcagagttaagcccatctctctccccagctccaagactgtgttgcagtggttcctatatctatggkgatggtcctgaataaagtcttctttactgtgcatttgaagtatcactgaataattttttctttaacaactatggtgttgaaactcaactaggacagattcatcactggatcctgggcctctcactcagaaccctaaatgcatgcctttgaagtctttgttgtcatttctgactgattagggatccattggtgaatcagattcctgagccattgctccagacaaaagcccgttgatggctaaggacagattttgaatctgaagggatgaatattctctctgaagctggggtagagtcccaggcttcttttgaaagcaatcctctgggcaggaaggtcttcgtgtgggcttcttgttctgagtggt

SEQ ID NO: 203701 - DNA, 542 bp, Homo sapiens
gggcggtttagccagaatctcccttactcctgatgtttcctcttagtgattttccattcactgacccctgcattgctcctgggctataaattcccacttccgcatgctgtattcagagttaagcccatctctctccccagctccaagactgtgttgcagtggttcctatatctatggtgatggtcctgaataaagtcttctttactgtgcatttgaagtatcactgaataattttttctttaacaaytatggtgttgaaactcaactaggacagattcatcactggatcctgggcctctcactcagaaccctaaatgcatgcctttgaagtctttgttgtcatttctgactgattagggatccattggtgaatcagattcctgagccattgctccagacaaaagcccgttgatggctaaggacagattttgaatctgaagggatgaatattctctctgaagctggggtagagtcccaggcttcttttgaaagcaatcctctgggcaggaaggtcttcgtgtgggcttcttgttctgagtggt

SEQ ID NO: 203702 - DNA, 552 bp, Homo sapiens
gaattcttttagggcggtttagccagaatctcccttactcctgatgtttcctcttagtgattttccattcactgacccctgcattgctcctgggctataaattcccacttccgcatgctgtattcagagttaagcccatctctctccccagctccaagactgtgttgcagtggttcctatatctatggtgatggtcctgaataaagtcttctttactgtgcatttgaagtatcactgaataattttttctttaacaactatggtgttgaaactcaactaggacagattcatcactggatcctgggcctctcactcagaaccctaaatgcatgcctttgaagtctttgttgtcatttctgactgattagggatccattggtgaatcakattcctgagccattgctccagacaaaagcccgttgatggctaaggacagattttgaatctgaagggatgaatattctctctgaagctggggtagagtcccaggcttcttttgaaagcaatcctctgggcaggaaggtcttcgtgtgggcttcttgttctgagtgg

SEQ ID NO: 203703 - DNA, 577 bp, Homo sapiens
tctgtttcatcaagataatttcttgagtttcatgttgttttattaggtttttggttacttaagaaaagtgagtcttctcaatattaaaggagctaagttcttgttcacaactatgtaatctgaatttgcctttaaaatcttttaatggagcttttattaaatagataactatggtcatatttgttttaaatgttttaaactttttgacatttttgacaatcttcccaaaatcacattctaagttaagtctttttgacctcaaattaacttaggattctccatattggaccctcaraaagccacaaagaattttttttttgtatgaaagagagattaaaccaattagatttatttaatatgctaaattatatgtgtagcattcaaataaaaagtgatgctaagccatctttaagttatatttatggatatattattgggataagtgtacaaaagttgtatgagattcctagaaatctagtatgttatcagtcataattttggttattatgttaaaatgctgtatgccatgctaaccaaattttcttataaattgcatcattgtaatgaactctcatta

SEQ ID NO: 203704 - DNA, 545 bp, Homo sapiens
ttccatgcagtcgccatgagaatacagtttttgaagtctggtccacstacagtaggttagtaaatgataaggggaggaagaaatggaaacctaaatatctactgcaatgaaaaccaacagcaatgttagtaggaataattcaggcttgctggaaaagatgtaatcgataatgtcagcccgctctgttttccctgaaccaggagtctccagatgtcaacacagaagtagctgttcacaattgctcagttacctggggcatggtgggccttggtcttcttcctcttcttggtcctttttagttcctgcaatacattcagacagggacagacaaaataagccaattcacctacacccataacagtccactgtctaatccccacacagggatctcaggctcctcagcatgagaacaggacaatgtgagagagatacttcaggaggcctgaaagctggtcatgatattctttggtttgcatctcagaaccaagggtgaaatatccccattctggtagatcgttatcccaaaatcatttatcccaagtttg

SEQ ID NO: 203705 - DNA, 545 bp, Homo sapiens
ttccatgcagtcgccatgagaatacagtttttgaagtctggtccacctacagtaggttagtaaatgataaggggaggaagaaatggaaacctaaatatctactgcaatgaaaaccaacagcaatgttagtaggaataattcaggcttgctkgaaaagatgtaatcgataatgtcagcccgctctgttttccctgaaccaggagtctccagatgtcaacacagaagtagctgttcacaattgctcagttacctggggcatggtgggccttggtcttcttcctcttcttggtcctttttagttcctgcaatacattcagacagggacagacaaaataagccaattcacctacacccataacagtccactgtctaatccccacacagggatctcaggctcctcagcatgagaacaggacaatgtgagagagatacttcaggaggcctgaaagctggtcatgatattctttggtttgcatctcagaaccaagggtgaaatatccccattctggtagatcgttatcccaaaatcatttatcccaagtttg

SEQ ID NO: 203706 - DNA, 545 bp, Homo sapiens
ttccatgcagtcgccatgagaatacagtttttgaagtctggtccacctacagtaggttagtaaatgataaggggaggaagaaatggaaacctaaatatctactgcaatgaaaaccaacagcaatgttagtaggaataattcaggcttgctggaaaagatgtaatcgataatgtcagcccgctctgttttccctgaaccaggagtctccagatgtcaacacagaagtagctgttcacaattgctcagttacctggggcatggtgggccttggtcttcttcctcttcttggtcctttttarttcctgcaatacattcagacagggacagacaaaataagccaattcacctacacccataacagtccactgtctaatccccacacagggatctcaggctcctcagcatgagaacaggacaatgtgagagagatacttcaggaggcctgaaagctggtcatgatattctttggtttgcatctcagaaccaagggtgaaatatccccattctggtagatcgttatcccaaaatcatttatcccaagtttg

SEQ ID NO: 203707 - DNA, 465 bp, Homo sapiens
gtcagcccgctctgttttccctgaaccaggagtctccagatgtcaacacagaagtagctgttcacaattgctcagttacctggggcatggtgggccttggtcttcttcctcttcttggtcctttttagttcctgcaatacattcagacagggacagacaaaataagccaattcacctacacccataacagtccactgtctaatccccacacagggatctcaggctcctcagcatgagaacaggacaatgtgagagakatacttcaggaggcctgaaagctggtcatgatattctttggtttgcatctcagaaccaagggtgaaatatccccattctggtagatcgttatcccaaaatcatttatcccaagtttgtgcaaacagttatgccttattgttcccatcagttcaaagaaaatgccccagatgatttctaggaggaaaactgcagtattcagccctgtct

SEQ ID NO: 203708 - DNA, 465 bp, Homo sapiens
gtcagcccgctctgttttccctgaaccaggagtctccagatgtcaacacagaagtagctgttcacaattgctcagttacctggggcatggtgggccttggtcttcttcctcttcttggtcctttttagttcctgcaatacattcagacagggacagacaaaataagccaattcacctacacccataacagtccactgtctaatccccacacagggatctcaggctcctcagcatgagaacaggacaatgtgagagagatacttcaggaggcctgaaagctggtcatgatattctttggtttgcatctcagaaccaagggtgaaatatccccattctggtagatcgttatcccaaaatcatttatcccaagtttgtgcaaacagttatgcyttattgttcccatcagttcaaagaaaatgccccagatgatttctaggaggaaaactgcagtattcagccctgtct

SEQ ID NO: 203709 - DNA, 359 bp, Homo sapiens
atacagcctttgaggtatggtcaacctatagtaagttagtaaatgataaggggaggaagaaatggaaacctaaacatctactgcaatgaaaaccaacagcaatgacagtaggagtaattcagccttcgttgaaaacatgamatcaaacacactctggtttccctgaatctgttgcctccaggtgttaacacagaattaagcatccacaattgctgaaagtcacctggggcatggtgggttttgatcttcttccccttcttttcttccccttcttctttccttctttgatcttcttccccttcttttcttccccttccccttcttttcaatttctgcaataaattcagacatggacagac

SEQ ID NO: 203710 - DNA, 359 bp, Homo sapiens
atacagcctttgaggtatggtcaacctatagtaagttagtaaatgataaggggaggaagaaatggaaacctaaacatctactgcaatgaaaaccaacagcaatgacagtaggagtaattcagccttcgttgaaaacatgacatcaaacacactctggtttccctgaatctgttgcctccaggtgttaacacagaattaagcatccacaattgctgaaagtyacctggggcatggtgggttttgatcttcttccccttcttttcttccccttcttctttccttctttgatcttcttccccttcttttcttccccttccccttcttttcaatttctgcaataaattcagacatggacagac

SEQ ID NO: 203711 - DNA, 359 bp, Homo sapiens
atacagcctttgaggtatggtcaacctatagtaagttagtaaatgataaggggaggaagaaatggaaacctaaacatctactgcaatgaaaaccaacagcaatgacagtaggagtaattcagccttcgttgaaaacatgacatcaaacacactctggtttccctgaatctgttgcctccaggtgttaacacagaattaagcatccacaattgctgaaagtcacctggggcatggtgggttttgatcttcttcccyttcttttcttccccttcttctttccttctttgatcttcttccccttcttttcttccccttccccttcttttcaatttctgcaataaattcagacatggacagac

SEQ ID NO: 203712 - DNA, 559 bp, Homo sapiens
gactacagtcatgagatacagctcttggccaacagttgcatcttatgttttagtttatattatctgaatgctgagatcttttgccttgtcttaaacttagtttgcagagaaagaatgtccttaggagctgcagagaaaaggaaagaggcagcagaatgtacgtgggaaagacttggttctttttaagacatctgtcttatctttgctctgtctagcctgtctatttcaatatctacataactgggaataacaccaaattcaaactttcagtgaggactcttacaaatcaatttttaaagtatctcttttcctccacatattttttctatccatattgggactgtttaccagggcatgtaatatttgtacattctgaaaatatatgtagattggattcttttccaggaaaacaacatgtttgaatgtcttaacagggaaaccatggatataatttcatttccttcctagaaatacacatattatgggattaatatrtatagtataattttgattctaaatattcatccatactcattttatattattctttaaaaaccct

SEQ ID NO: 203713 - DNA, 461 bp, Homo sapiens
gcccccgcgcccggctaatttttagtttttttttttttgttttttktttttttagtagaaacggggtttcaccgtgttagccaggatgatctcgatttcctgacctcgtgatccgcccgcctcggcctcccaaagtgctgggattacaggcgtgagccaccgtgcccagacactaatttacatttctacagtgtgcaagcattcccttttctccccatccttgttagagtctgttattttctgtttattggggtaacagccgttctatctggggtgagatatatcattgtggttttgatatgcatttccctgaaggttagtgattctgaacactatatctgttagcaatttgcatgtcttcttttgaaaaatgtatattcagatatttcgccaatttttcaatcaaattattactaccattattattttgctgttgagttgagttcttccatattcttatt

SEQ ID NO: 203714 - DNA, 592 bp, Homo sapiens
gcaacggagttagactttgtctcaaaaataataataataatmatcatcataaattataggctaagccattaaactcacatcaaaagctttcacactattattattttgtagtaacagtacataaatcacaaacattaaaattcccagtacactgtaaatagtagtttttttctaatataatgccgctatttttctggtgaacaaaatgaaaacatatagcactataaacatttgctaactaactaattgaacactttatgtaacccaagagtatctgaatggtttggagaatcataagcattctatttcataaattgctgttaggcagtttattctatagaaacaatttcaaataagaaatatccccagtacttgagttttttgttgaaactacctaatgttgcataatatgaataatccgtttacattatactgatttataataaaagttccttgagatagcagcatttataactctattgaaatttacagtgtctttctggtttgctgtggagtgttatattaattaaaattctacttaattttatcccagtgagatcagtaaatattaacatgaggaagagtcacgcca

SEQ ID NO: 203715 - DNA, 592 bp, Homo sapiens
gcaacggagttagactttgtctcaaaaataataataataatcatmatcataaattataggctaagccattaaactcacatcaaaagctttcacactattattattttgtagtaacagtacataaatcacaaacattaaaattcccagtacactgtaaatagtagtttttttctaatataatgccgctatttttctggtgaacaaaatgaaaacatatagcactataaacatttgctaactaactaattgaacactttatgtaacccaagagtatctgaatggtttggagaatcataagcattctatttcataaattgctgttaggcagtttattctatagaaacaatttcaaataagaaatatccccagtacttgagttttttgttgaaactacctaatgttgcataatatgaataatccgtttacattatactgatttataataaaagttccttgagatagcagcatttataactctattgaaatttacagtgtctttctggtttgctgtggagtgttatattaattaaaattctacttaattttatcccagtgagatcagtaaatattaacatgaggaagagtcacgcca

SEQ ID NO: 203716 - DNA, 574 bp, Homo sapiens
tggtgaaaccccatctctactaaaaatacatatcaactttatgataacttcatacatcccttctgctgatatcttctaatcacggcacctctgctcatttaccaccaccagaaacatgatgctgatgctcctactgctcttccccactttgtcccaatgccctgtcatcagatctttccagatgttcttcatagtctttggccacggactttataagcyttcttacttggtaaaatgtgttcaggccaggcggggtggctcatgcctgcaataccagcactttgggaagccaagagaggcagattgcttgagaccagaagctcgaggccattctggtcaatgtgtcaaaacctgtccctacagaaaaattagccaggtgtggtggcctgtacctgtagtcccagctacttgggaggctgaggtgggaggattatttgaactcaggaggtcaaggctgccctgaacagggattgcactacggcactccagcctgggtgacagtgagacactgtctcagaagtaaataaataaataaataaaaattaaactaaaaaataaatgttcaaattccaat

SEQ ID NO: 203717 - DNA, 538 bp, Homo sapiens
agatctgaagaatactataaacgaactaaaaactgaatagagtggtttgagagcagactacatcaagcaagaaaaaaaagattagtgaactcaaagacattagaaaaaaatttgaggaggaaaaaataaaaaaaaaataaaggaagagaagatagctgaggagacttatggacaacatcaagtggaaaaccttatgcattattcacatgccagaaggaagagagaaaaagattgaacacatattctaagaaataatagcagacaattatccaagactagggaagaaaatagaaagtcagaatcaggaagcccaaaggacaccaaataaaataaatccaaagagattcatacaaaaacacactgacaactcaagwtgtcaaaatttaaagacaaaaatattgaaagcaacaaagaaaaagcaaattgtcacatattttaaaaacccataagactatcagcaaatttctcagcaaaaatcctgcaggccagaaaagagtgagatgatacattcaaaatcctgaaagagaaaaactggcca

SEQ ID NO: 203718 - DNA, 357 bp, Homo sapiens
gtcttgactctcactactgagcagtaggattccaggaacacaatgaaaggwaatacaaacattaagaagttttcaatatgctacacggaaagggaaagtaccttaacatgatccagtgactagggctgtcataactgcaaactctataagaaatcataagatgccaagaatggttcccagtataggaaaacagactgtcgcacagcaagagcaacatcatcttgaaggatacattcataaagagggatgtttgactcatctgtaccaaggcagtcctgcagccaggtcaagagacaatgcctgtagcataaatatcctctcatagagaaacaattcccatagcatagataacccctc

SEQ ID NO: 203719 - DNA, 634 bp, Homo sapiens
gctgaatgtgttacagaagtacatttgttatttctttttgtgtgttttctttctgttggcttaaaaaacagctgatttcacaattaaaattataggaatattagtgtaacctagcaataaaagcagagaatagaatatgttgatgtggtatgttgtttatgatattgtgcaagataatttttaactagtgagaaataaagttttctttgaaactcccaaagaaatccacaacagaaatactattagagtttagtgacattcacagtattttaattttatttaaaattaacctttctcttttctgtatataccatgtataatatattaataattctaatttataagaattatctattataaattaaattttttaaaaatatttttaaaatttataattaacatataattgtacatacttgtggagtacaatgtgaggttttaacgcatgtatatagagtagaataatcaaattaggggagttaacattctgtattttggctattgtgaatagtcctgcaataaacactggagtataactatctctycagtataccaattttctttcttttgggtatatacccaacggtggtgttgctagatcatatggtcgttctatttttagttttttgaggaa

SEQ ID NO: 203720 - DNA, 634 bp, Homo sapiens
gctgaatgtgttacagaagtacatttgttatttctttttgtgtgttttctttctgttggcttaaaaaacagctgatttcacaattaaaattataggaatattagtgtaacctagcaataaaagcagagaatagaatatgttgatgtggtatgttgtttatgatattgtgcaagataatttttaactagtgagaaataaagttttctttgaaactcccaaagaaatccacaacagaaatactattagagtttagtgacattcacagtattttaattttatttaaaattaacctttctcttttctgtatataccatgtataatatattaataattctaatttataagaattatctattataaattaaattttttaaaaatatttttaaaatttataattaacatataattgtacatacttgtggagtacaatgtgaggttttaacgcatgtatatagagtagaataatcaaattaggggagttaacattctgtattttggctattgtgaatagtcctgcaataaacactggagtataactatctcttcagtataycaattttctttcttttgggtatatacccaacggtggtgttgctagatcatatggtcgttctatttttagttttttgaggaa

SEQ ID NO: 203721 - DNA, 579 bp, Homo sapiens
ttttacataaaaaatgttagctgtgaagagacaattttaatttttcccttccagcacatacaccttttatctatattttttgtctgattgcactagctaggacctccagtatgatattgaatagaagtatttacttagtagtgagagtacatattcttaccttgttccaaactttgggaaaaaccagtcttagtgatgttaactgtagtttatttgtttattgcttttgatgctgttgactagattgaagatattcctctctattctcagtttgctttgactttttattataaatgaatgttgagtcttgttaggggactctgctacatctattatatgtgtttttatcttttgtctgttaatggtgaattctgttgtttaattttcaaatattgaaccagctttgcctttctgggagaagccaagtttggttacaatgtatcrtattatccttttcacatgtaactgaattttgtattttatgtattgctatattttatttaaaatttttgtatacatgtccatgagggacatcagtctgtaattttattgttagattttgtctaaattttgaatgaa

SEQ ID NO: 203722 - DNA, 542 bp, Homo sapiens
tcatactgctataaaaatactacctgagacttgataacttataaataaaagaggtttcattgactcacarttctgcctggctggggaggccttagaaaatttacaatcatagcggaagggagaggggaagcaaagcatgtcttacacagtggcaggtgagggagagagagagcacatgaggaagtgctgcactttaaaaccatcagctctcctgagaactcactatcacaagaacagcatggggaaaaccacccccatgatccaatcacttcccactgggtccctccctcaacccgtgattgcaatttgagatgagaattgggtggggacacaggttcttgggctttcaatgcaatagaaattgactcaagaccaaaagagttttcccagacaaagctttattggagcttatgtccaaacataaagaaggcagtacatgagacaattctctgactggctacctaaagagaagagagtaattttaaagaggctaaagcaggcaattttacagtctggtaacatacttcttcatgcatagcata

SEQ ID NO: 203723 - DNA, 625 bp, Homo sapiens
gcagtttaataaaaattaaatatgtatttactctctggacccagcaattcaaaaatttaatcatcttgtaggtatatagctaatatacactcacagatatacatacccatacatcacccttgatcttcattatttgtggatttcctattggcaaatttgcctactcactaaaatgtatttgtaaccctaaaatcaatacttgtagtactttcatggccattcatggacatgtacagagcagtgaaattttgagcagcttaacatgcatttttccagttgaggatgaataaggcagtgatttgccttctgatttcagctctcatactgcaaacaagtgtatttttcagggttcatttagtgccacattttttgtattgttattctttttgttgatgatttcactctttaaaatggttctcaaatgtagtgctgaattgctgtctagcattcctaaawgcaagaagacactgatgtgcctgatggagaaaatgcatgtatgtattagcttagcttccttcaggcttgacttattgcaccattgactgtgagtccgatgttactgaatcaacaatacatattaaataaggtgtccttaaacaataacatacataaaacaagataatat

SEQ ID NO: 203724 - DNA, 625 bp, Homo sapiens
gcagtttaataaaaattaaatatgtatttactctctggacccagcaattcaaaaatttaatcatcttgtaggtatatagctaatatacactcacagatatacatacccatacatcacccttgatcttcattatttgtggatttcctattggcaaatttgcctactcactaaaatgtatttgtaaccctaaaatcaatacttgtagtactttcatggccattcatggacatgtacagagcagtgaaattttgagcagcttaacatgcatttttccagttgaggatgaataaggcagtgatttgccttctgatttcagctctcatactgcaaacaagtgtatttttcagggttcatttagtgccacattttttgtattgttattctttttgttgatgatttcactctttaaaatggttctcaaatgtagtgctgaattgctgtctagcattcctaaatrcaagaagacactgatgtgcctgatggagaaaatgcatgtatgtattagcttagcttccttcaggcttgacttattgcaccattgactgtgagtccgatgttactgaatcaacaatacatattaaataaggtgtccttaaacaataacatacataaaacaagataatat

SEQ ID NO: 203725 - DNA, 625 bp, Homo sapiens
gcagtttaataaaaattaaatatgtatttactctctggacccagcaattcaaaaatttaatcatcttgtaggtatatagctaatatacactcacagatatacatacccatacatcacccttgatcttcattatttgtggatttcctattggcaaatttgcctactcactaaaatgtatttgtaaccctaaaatcaatacttgtagtactttcatggccattcatggacatgtacagagcagtgaaattttgagcagcttaacatgcatttttccagttgaggatgaataaggcagtgatttgccttctgatttcagctctcatactgcaaacaagtgtatttttcagggttcatttagtgccacattttttgtattgttattctttttgttgatgatttcactctttaaaatggttctcaaatgtagtgctgaattgctgtctagcattcctaaatgcaagaagrcactgatgtgcctgatggagaaaatgcatgtatgtattagcttagcttccttcaggcttgacttattgcaccattgactgtgagtccgatgttactgaatcaacaatacatattaaataaggtgtccttaaacaataacatacataaaacaagataatat

SEQ ID NO: 203726 - DNA, 412 bp, Homo sapiens
aaaattcattctatgagggcagtgttaccctgataccaaaaccagataaagacatatcaaaaaaaaaaaaactccaggccaatatctctggtgaatattgacaacacatcctcaagaaaatactagcaaaccaaattcaacaatgcattagtaagatcattcatcatgaccaagtggaatttatccctgggatgcaaggatggttcaacatacataaatcaattatgtgatacaacataccaacagaatgaaggataaaaaccatatgatcatttcaattgatgctgaaaaagaaagttgataaaattcaacawcccttcatgataaaaaccctaaaaaaactggggatagaacgaacatgccttaacataataaaagccatattatagaacagacccacatttagtatcat

SEQ ID NO: 203727 - DNA, 380 bp, Homo sapiens
attggacaaattattcctaactgtattatgctgactagcaatatatatgtttaatattagtgctgaatacattgttggatgaatgaatgaacaaattattctattatttatttttatagatactcaatattgtgtataaataagaaaatatgaatatcaacatttaatrgatgacccaaaacacaagaaggtcaatggattttaaaggacacatcatcaataactgacatacactttcaagtactctgtacagcagtttctaaatctacaaagagactatgggtagccttaataaatacaaacaaaaaaataattgttttaggaagaaaatatatggaggataataatagaaagtgtaggcaatttttataagacattga

SEQ ID NO: 203728 - DNA, 494 bp, Homo sapiens
cactgaaaaagccacgccagtgtccaggaagaggtgaatttcctggccctcaatggttaaatgtacccggggctcggtgagggagatgacatgagctgacacttgccccaggcaccctcagtcctgttgttggatcatctgattagtggcttctggcccagagaacctttgtcctcttgagcagtgtaccttccagtgattgccttggcatagtggacatggatgagggggcagtttgtttctcactggacaatcttttttaaagtgtccttgtaaaccacactgataacaagccctgctgrgtgattggcctgctccattttctgtcctctctgaatcaccaaggtttgtttgtctgggatccaggactaagtctccagcctttctctgatctcgcttttccttttgggcctgttcctcttggtccctattatagaacaccaaggttgccgggtttaataatgcctccagattttgttcaggacccagggctc

SEQ ID NO: 203729 - DNA, 494 bp, Homo sapiens
cactgaaaaagccacgccagtgtccaggaagaggtgaatttcctggccctcaatggttaaatgtacccggggctcggtgagggagatgacatgagctgacacttgccccaggcaccctcagtcctgttgttggatcatctgattagtggcttctggcccagagaacctttgtcctcttgagcagtgtaccttccagtgattgccttggcatagtggacatggatgagggggcagtttgtttctcactggacaatcttttttaaagtgtccttgtaaaccacactgataacaagccctgctgagtgattggcctgctccattttctgtcctctctgaatcaccaaggtttgtttgtctgggatccaggactaagtctccagcctttctctgatctcgctyttccttttgggcctgttcctcttggtccctattatagaacaccaaggttgccgggtttaataatgcctccagattttgttcaggacccagggctc

SEQ ID NO: 203730 - DNA, 598 bp, Homo sapiens
tgggggttaggacttcaacatatgggttttgggagggcacaattccatccataacaacattctaacatgagttaaaatgtcctctctaataacatgaagctactaatgaataacaaagtaaataaaggtagagttaaatctgtatatacattgttttcaactttagtcttgccaaaagctagattaagtttaaagatatgaatttagtattaaatgaacttttatcaaatatttgattattataatgcacactttctccaatgtgagttcctgaaactaaaaataatttcatttataaggtgagaagaaaatataggctattgtaaatcggaagtagtctttacagctttatattttwtaatgtcaagatgaatactctataattccaggagatgtcaataaattcattatacaaaagctttctagataaatgagtttggaacaaacttactgaattaagatacttatgctctactgtagattttattatatctgaatgttaactttgaatctcaaacatggaagttttgttatgactatactttagtatagtataaagcgcatttaggaagcaagaaaaggttagaatttgttctag

SEQ ID NO: 203731 - DNA, 456 bp, Homo sapiens
cccaagaattccactcctaatatttatccaacataaatgagaacatacgttcacaaaagaacttgaacatgaatgttgatagcagcttcattcataacagccccaaactggaaacaacctgaatatccattaacagggaactagataaactgtgctatatgtgtatgatgaaatacactcagcaataaaaaagaacaaaattctaatacatgtgctaatayggtaggatctcaaaactatattgacagaaactttgaagagtacattcatttatacgaatctcaataatggacaaagttaatctatagtgatagaaatcagaaagtaattgtgggggttgggggattgattggaaaatgatatataaagaaactttctggggtgataaaagtgttctgtatcttgtgtggggcagtggctacataggtgtacatttaccaaaaataatacaccaaa

SEQ ID NO: 203732 - DNA, 543 bp, Homo sapiens
gaacaagcattcccgggggagagagcgtgccaggcagaaactgtgttgccttttatgacctatccttgattggcatgcattatcacttccaccaattctgttgtttgtattctatactacccaggttcaatggaaaggaggatagatcaaacttgtcaattcaggagtgacaacccctcattgtaagaggaataggtagggtgggatatatactgttatggctatatttgggaaatataacatggkaagttcttactatagagtagaggctcagtcatgctgaatgcatcattttgttttttaaaaaatataatatgttgttattataataattcctaaacctagaggacccaactacataaaatcaagattttaattaagtcaatatctgtactgaatgcttaaccagacctgattttttgaactatttgaaaccaaaaataaagtttggaggaagttttcatcaaaattatcatagaaaaatgcattatccaggctaacaactgttccctcttctctgtttattaccccctcaaaacaatg

SEQ ID NO: 203733 - DNA, 543 bp, Homo sapiens
gaacaagcattcccgggggagagagcgtgccaggcagaaactgtgttgccttttatgacctatccttgattggcatgcattatcacttccaccaattctgttgtttgtattctatactacccaggttcaatggaaaggaggatagatcaaacttgtcaattcaggagtgacaacccctcattgtaagaggaataggtagggtgggatatatactgttatggctatatttgggaaatataacatggtaagttcttactatagagtagaggctcagtcatgctgaatgcatcattttgttttttaaaaaatataatatgttgttattataataattcctaaacctagaggacccaaytacataaaatcaagattttaattaagtcaatatctgtactgaatgcttaaccagacctgattttttgaactatttgaaaccaaaaataaagtttggaggaagttttcatcaaaattatcatagaaaaatgcattatccaggctaacaactgttccctcttctctgtttattaccccctcaaaacaatg

SEQ ID NO: 203734 - DNA, 463 bp, Homo sapiens
agttatgcagggtctcttccaccatattcttttagtcaaagtagatcaaaaggccaccccacattcaaaaggaggggaatatggctcacctttagatgagaagagtggagaaaacaaagaagttaagaccatctttaattattcacagttccccctttggccacaaattacttatgcttcttccaaaggaaaacatactcccccacaccctaaaaaaacacaaaaattgtttccaattatgacatcagatttaggcttgaaggccaggatcttttcattcattcaggtccaagagcttatgagaaactgaccctgaggtgtctttccatgggagtagatcctttagtatgttttttctttatctgttggcctttgaattaaagagacataaccgaacatacaatgatggggcaagtatatgacaacygcgacagcaactcatgttcaaagggaggcacataaa

SEQ ID NO: 203735 - DNA, 410 bp, Homo sapiens
catcagcattctgtgcttccatctttcagtatttatgttatggggatttctggcactcactattttcatagtcagtatttctggtacaytgtattttcattgtagaaaattcttctcaaaatttaaataatcaacttttctcttatttggtatttctagttctgtaactcatttcttggtaatattttttgttcttaaggtctctgcatcttagtgaagagtcagatcaaatgtttctgactcttggtgtcccccgggtcactaacttagatatatcacttttgagggaatgcatctttctcagaacccctagaaaccaaaacaaatgtgagtctccctaacatttttatatgtggtatcacaaaagtagcaatagataaaatataacctcaaatatgttgtccatgttt

SEQ ID NO: 203736 - DNA, 418 bp, Homo sapiens
gacagggtcactttctatgcttattcaaaagaaaccataaacattagttatatgggacaatcaggaaggttttaatgccgtgtcatgttatcaccttataggaaaaatactttgctgttctttatcttttactgaattatctttcgattttcactcyagattacagctttaggggatgtgctatcctattaatttagaataaaaatgataaattgtatgcattgtttagataagtagggatgagttaatttttaaaagtattggtaaatcactgcagcaattgagatgaattgtcaatttttttcctaatatgatttgaattccaaagttgtttttaaaagaaaacaattattatgatatataaaaaatagcatcctaattatgagagtgactttatttgttcctatagttgttacat

SEQ ID NO: 203737 - DNA, 235 bp, Homo sapiens
acatatatacatattatgtcaattatgtctgtatatattatgatatatatataatacccatgtatgtatgtatcatgtttattaatatttatgacatgtatatcatatgcattatgtgtgtatgcttctttattgtatgtctctcactgaaatgtgagttccaygagggcatgagctttaccttgttaactactctacccccaggtcctagagaactaggaacagtctgccgggt

SEQ ID NO: 203738 - DNA, 619 bp, Homo sapiens
gaaatccctttaaaaatatcaatgcattcttcacagaaattaaaaaaawaatcctaaaatttatatggaaccacaaaacacccagaatagccaaagctatcctaagcaaaaagaacaaaactggagcaattacattaccagacttcaagttatactacagagctataataacaaaaacagcaaggtactggcataaaacaaacacacagaccaatggaacagaatagagaacccagaaacaaatccacacacctgcagtgaactcatttttaacaaggtgtcaaaaacatacactagagaaaagacactctcttcaataaaaggtgctgggaaaactggatatccacatgcagaagaataaaactacacccttatctcttgccatatacaaaattcaaatctaaatggattaaagacttaaatctaagacctcaaactatgaaactattacaagaaaatattggggaaactctccagaatgttggcctgggcaaaatttccttgagcaataccccacaaacgtaggcaaccaaagcaaaatgaacaactgggactacatcaagttaaaaatcttctgcacagcaaacaaaggaaacaatcaacaaagtaaacagacaac

SEQ ID NO: 203739 - DNA, 619 bp, Homo sapiens
gaaatccctttaaaaatatcaatgcattcttcacagaaattaaaaaaataatcctaaaatttatatggaaccacaaaacacccagaatagccaaagctatcctaagcaaaaagaacaaaactggagcaattacattaccagacttcaagttatactacagagctataataacaaaaacagcaaggtactggcataaaacaaacacacagaccaatggaacagaatagagaacccagaaacaaatccacacacctgcagtgaactcatttttaacaaggtgtcaaaaacatacactagagaaaagacactctcttcaataaaaggtgctgggaaaactggatatccacatgcagaagaataaaactacacccttatctcttgccatatacaaaattcaaatctaaatggattaaagacttaaatctaagacctcaaactatgaaactattacaagaaaatattggggaaactctccagaatgttggcctgggcaaaatttccttgarcaataccccacaaacgtaggcaaccaaagcaaaatgaacaactgggactacatcaagttaaaaatcttctgcacagcaaacaaaggaaacaatcaacaaagtaaacagacaac

SEQ ID NO: 203740 - DNA, 315 bp, Homo sapiens
ctactcctgccactcctaagaattattattacttaggaggcaatatactcttatctcttcccagccacttccataccaccattctaccatgagctctcagcaatgcctggccttttgaaacatacttccctaggcccttgctccctccttgttgctgttttcaatccatgtctgggcccttcagtgtcttctttgatagttttgcctttggctkaaaatctcccaactcattccatggcaacatcttgttaatctcaatatccatacagatggccccttcatgctccaactcaactttcttacaccacctctgca

SEQ ID NO: 203741 - DNA, 315 bp, Homo sapiens
ctactcctgccactcctaagaattattattacttaggaggcaatatactcttatctcttcccagccacttccataccaccattctaccatgagctctcagcaatgcctggccttttgaaacatacttccctaggcccttgctccctccttgttgctgttttcaatccatgtctgggcccttcagtgtcttctttgatagttttgcctttggcttaaaatctcccaactcrttccatggcaacatcttgttaatctcaatatccatacagatggccccttcatgctccaactcaactttcttacaccacctctgca

SEQ ID NO: 203742 - DNA, 604 bp, Homo sapiens
tttttctataactcatagagttgtacagctcaaaaaacttgcaaacacatcaaggtttttggtttttggttggaagttgttgagtgtttttgcccatacacattttttcttctgtatcctgccatcagcacctaaacacttgatctacaagtaatactagtagagtctaatgcaataaaagagtcggggagggaaggaaattaagaatggagggaaggtgagagagagatgtagagagagttgtcaatctgtgtaactaagtcaatgcaaatgattgatgtaatgaattatctgcatcaactttaaacctattgtctaccacatccaaccaccacattgctttggctrcagagatcagtttaaagagcagatgattaaaagaattaaccacactttagaggtgaagaaagttgattttagggagttggtgtggtttatatattacattgaaggaaacgaggaaatccacagtaagtcaacctgaaacggattgagtcatcagaactatggtttgccacggtgattacagtattcctaaggtatctgaaaacactgaggtctatgatttttaagccacttcatcatcatccacttagaaaagtga

SEQ ID NO: 203743 - DNA, 547 bp, Homo sapiens
atgttgttttctactaatatcatactttcttttatataatagttatatttttaaaaggcagcagatgaggctgcccaaagagctgacatagatatcaagtggaaaatcaaatgtagcagcaatgtagcaatagcaagttccgtattcaatatcctctttctccttaaaagaactgatgaagaatctttgaaaaacaacttcattggttttaatgactactgaaagggaggtgtgtaataggggaattatacagagagagggtaaggsaatgccatctggatcctattggatggttcagataggacaaggtgattctttgagaaatagagccagcaaaaatccaggaattactggagtaagatttctttcaatttggcacacactcctagagtatttctagagcactgtggtgctaagaactggaaatcctgcctcttcctcatctgagcccatagtgagaaccttgtatttgggaaaagatcacaatggatatgcctagtttgggtcatgccaaacaatggttgctcttccagagtccccaagtaat

SEQ ID NO: 203744 - DNA, 609 bp, Homo sapiens
atttctacatgttctttgattacagattaattatayacttgaccccattaaaatgtcagtaagttgaattcctttaaacattaaaaaagatacgtatagaacataagtaccttgattttctcaaacacttcaaatgtctctcatggtatcatctttctgagttcttaagcaactgttgtatatctgataaaaagattcataactcaaggaaatcaggttctcaactttcaaatgcattcagaaacaaatcaaatgattttatacttttaaaattaaaacatcaaatcagatatcaatcatacatttcaaattgaaataaaaaggaatcctagaatagactgcaatgcaaattcaagactgggtcacagaatgattctttagtaatcacaggtgaacaggctgagttgaatcaggcagtatctgctgtatcaataccttaaactttttaactggcatttggttttgtaaccaattacattatgtgtggcctgtgtctatctcaagtttctttttcatctccaaactttcattgtaaattctttcaatattttaaactccttttattggaaaattttaaacaaatacaaaaggagacagaaaggcataatg

SEQ ID NO: 203745 - DNA, 609 bp, Homo sapiens
atttctacatgttctttgattacagattaattatacacttgaccccattaaaatgtcagtaagttgaattcctttaaacattaaaaaagatacgtatagaacataagtaccttgattttctcaaacacttcaaatgtctctcatggtatcatctttctgagttcttaagcaactgttgtatatctgataaaaagattcataactcaaggaaatcaggttctcaactttcaaatgcattcagaaacaaatcaaatgattttatacttttaaaattaaaacatcaaatcagatatcaatcatacatttcaaattgaaataaaaaggaatcctagaatagactgcaatgcaaattcaagactgggtcacagaatgattctttagtaatcacaggtgaacaggctgagttgaatcaggcagtatctgctgtatcaataccttaaactttttaactggcatttggttttgtaaccaattacattatgtgtggcctgtgtctatctcaagtttctttttcatctccaaactttcattgtaaattctttcaatattttaamctccttttattggaaaattttaaacaaatacaaaaggagacagaaaggcataatg

SEQ ID NO: 203746 - DNA, 532 bp, Homo sapiens
ggtttgaaattagtggagaagaaagtaggcaaaagcctgtccaggaaaaaataaaggaatgcagaaaaagatatgcaattatctttgacagggtgtatattaattggtgatgaaaccagagaatgaaattccagagaaaaacacagttttaaaattaaggctgggtgtggtggctcacgcctgtaataccagcactttgggaggcccaggtgggtagactgcatagcagacccagtctctacaaaaatttaaaaaactaaaaaattaatctgtgcacgtttccatcatggagtagcctcccagcaggctcctccgcaaatggttcctggcctagcgtccccagtcccatccccaagagttgccactgaggtcccaccagcctgcaagcaagagcatgrgccataccctccagtccctccagcctcttgcttggggccacccacgactactacctacagtaggttccacttccaacagcagctcctgcggcggcaccgagtgccatagggaagccgcccctgagcccctggct

SEQ ID NO: 203747 - DNA, 604 bp, Homo sapiens
atcctgcaattacagactgtagttcaygatgaaatgactgcaggagctagcctttttgaaaactgagtcaagaaaccaccaatgacactgatttatgtaagagttccacaggatgacgagagaatgcaaaaaggatgaaacaggagaaagataagaaatcagacaagatattctagagcagagaaatggcagatattatcagagctcctaacacttcattcacactgtacttccttgaaatccttatttttccctaactgaaacacacagttaactgtatttatgtctttcattcttctggacactccttcaaagtacctagtgtatcgatatcttgccagctgtcaggcttttagtgaataatcattgaatgcataaaaagcaaacaagggaaaaaaaagaacccctgacatagagtaaaaaactatttaataaacattccatctgacaaacaaatgaaatatctaatattacatgaattaaacttcagctttctgacaccaggagaggcaacagatgagattttcatggatatggggtaagaaggagtgacttcacagaaacgttcaccatgagctagcagaaacaggctccatgctgagga

SEQ ID NO: 203748 - DNA, 591 bp, Homo sapiens
gcacaacatttagtttaaaaatatagtgtactagtggaagctctgaggtgtagtaaggccagcagagtagaaggtgactgccactgacaatacagcttgttactcacggttcccaagaggagggggcatgccgccccaacagggccacaaaaagaagcatcagggttggttaggaggcagagggagagaggggaaaccctaaacaagcctttattgtggtttccttgggaagaaatgggcaaaacagagtaaaaagcattaggattggtagtttagatattttcaattggctctgaggcacaagagctctctgtacctggccctggggtgatcagggcaggtggataatggaccagagtgtgaaagcccactaaaggagatggttgaggtgtgcgctctgggttgattcatttgttttggaaaagtgcacttgtgggcgagttatttattatctctagaactggcaaacactaggaggggcagtccctccagggtcagcaaggccccagatgtcacagcaacaaaacrcaggaaataagaaacacagttcctccacatctgtcacctgaattattgcagtaatattctaat

SEQ ID NO: 203749 - DNA, 495 bp, Homo sapiens
ttcaaaataggtttgttgcaagaccatcccccagggcttctccctgcacattttaaggtcaaagacactgactccctatgttctagactcttttttccagaatgtttgcctggcaaacagccttkgaggataatcatgtctccctctagagcaaaggcagtgttgttaaattttcagtgtaataatgttttattctagagcgaagatcagacacactcatttcccactaatggagaattgggattcttaaacggaattcctttcttgtacacaacctaatgaatgctcagatttcatctgccccccatcacattaccccatgggaactgggcttggggaactggtgtaaatatgctaaactctggctactaccgctattccatgagacataaagtcctttgtctctgagccaagtgtctcatgttttctgccaacaccctgaaactatagcaagctcacttgttagcttgcaagtaggataaaacctcagatttt

SEQ ID NO: 203750 - DNA, 432 bp, Homo sapiens
ttcccactaatggagaattgggattcttaaacggaattcctttcttgtacacaacctaatgaatgctcagatttcatctgccccccatcacattaccccatgggaactgggcttggggaactggtgtaaatatgctaaactctggctactaccgctattccatgagacataaagtcctttgtctctgagccaagtgtctcatgttttctgccaacaccctgaaactatagcaagctcacttgttagcttgcaagtaggataaaacctcagatttttcatacctcttcttttttttttttttttttttttgagccagggtcttgctctgtcacctaggctgcaragcagaggtgcaatcatagctcactgtagcctcaacctcccaggctcaagtgatcctcccacctcagcttcctaagtagctgggagtgt

SEQ ID NO: 203751 - DNA, 521 bp, Homo sapiens
tttataaagaaaagaggtttatttggctcgtygttctgcaggctgtataagaggcatggcaccagcatctgcttctggtgaggactcaggaaacgtacaaacatggccgaaggcaaagggggagcccatgtatcacatggtgagagacagcaagagagatagcaggaagctccaggcccttttaaaaactcaaatcttgcatgaactcatggagcaagaactcactcattactgcaaggattgcaccaagccattcatgaaggatctgcccccatgatccaaacacttcccaccagaccctacctccaacttcggggattacgtgtcaacataagatttggaggggacaaacatccaaaccatatcaggaacacataaaaactccatcaaataccttgattatcaggccacggttgactcccctttgaaaaaacgctcctcattgtcagaatgcaaatggtccagaaaaccagacacatgacatggatcagtttcacaggctacagtggtctgacaggagt

SEQ ID NO: 203752 - DNA, 389 bp, Homo sapiens
ctgcaagtagaaaacctaaaagattccttctcatggccaccacaaccagctatggttaacaaaaggattccataaaatgggtaccaaaagaaatagaaagaataagacctactatttgatagcacaatagggtgactagtttcagtaatagcttaattgtatattttaaaataacttaaagaatgtaattggttatgtgcagctcaaaggataaatgcacattacatgcctgtatcaaaacatctcatgygccccataaatatgtacacttactatatacccacaaacttttttttaatgtaaaaaaaaggtaccataagaaattctactaaaggccgggcatggtgactcacacctgtaatcccagcactttgggaggccgaggcagg

SEQ ID NO: 203753 - DNA, 522 bp, Homo sapiens
ggaaccagaggaggctgagttggtcaggaagagaccctctgtcagtggaccaactcacacaagcaacttggtgcattaaaggcactcaaaaaaaaaaaaactatcgatagaaaacattgaagatttaactcaaagcctagatttgttgcatgggactccagaaaaaaaaaatctattgaaatggatttttaaaagcctacaaacaatctcagatgaagarttatcattattttagagaagtcaatctctatttcaacctctactgatctttcagactgcactgttcattctaattcttataatacaaaggcagagcagcagatactctagggaaagaatgcttgcaccgtgaaatccacaagtcctggacatggcctggagacacaatgtccaggtcccccacccagtcagggtgccagatggtgcctgctcctccctaggtagagacatggaaaaacgtagaatgccaggatcttaaatctgtaagagtaaagattcaggaaattcccttatttacagata

SEQ ID NO: 203754 - DNA, 522 bp, Homo sapiens
ggaaccagaggaggctgagttggtcaggaagagaccctctgtcagtggaccaactcacacaagcaacttggtgcattaaaggcactcaaaaaaaaaaaaactatcgatagaaaacattgaagatttaactcaaagcctagatttgttgcatgggactccagaaaaaaaaaatctattgaaatggatttttaaaagcctacaaacaatctcagatgaagagttatcattattttagagaagtcaatctctatttcaacctctactgatctttcagactgcactgttcattctaattcttataatacaaagkcagagcagcagatactctagggaaagaatgcttgcaccgtgaaatccacaagtcctggacatggcctggagacacaatgtccaggtcccccacccagtcagggtgccagatggtgcctgctcctccctaggtagagacatggaaaaacgtagaatgccaggatcttaaatctgtaagagtaaagattcaggaaattcccttatttacagata

SEQ ID NO: 203755 - DNA, 612 bp, Homo sapiens
caacacatttgttgagtaactacattttaggccataaaggcacctgtgcagaaaagggcagtttagtttcatgcttatgtgtccagagttggttccttccggtgggttcatggtttcgctgacttcaagaataaagcttgtcccctttgtggtgagtgttacagtttttttttttttttttttttttttttgagacaaggtctctctctgtctcccaggctggagtgcagtgacgcgatctcaggtcactacaagctctgcctctcaggttcacgccattcccctgcctcagcctcccaagtagcttggactacacgaccggccaattttttttttttgtatttttagtagagacgaggtctcaccgtgttaggcaggatggtctcgatcacctgacctcctgatccacccgcctcggcctcccaaagtgctgggagtrttacagctcttaaaggtcccacagacccaaagagtgagcagcagcagcaagatttattgtgaagagtgaaagaacaaactttccacagtgtggaaggggacccagggctgccactgccagctaggggatggggggcgtggccagcttttatttccttatttgtcccggcccaa

SEQ ID NO: 203756 - DNA, 563 bp, Homo sapiens
taattaaaaaatgcccacaaaaaagtccaggaccagacggattcacagctgaattctatcagccattcaaagaagaattggtaccaatcctattgactctattccataagatggagaaagaggaagttcttctaaatgattctatgaagccagtatcaccttaataccaaaaccaggaaaggaggtaacaaaaatagaaaactgcaaaccaatatccctgaagaagatagatgcaaaaaccttcaaccaaataccagtgaactgaatccaacgtcatatcaaaaagaatacaccgtgatcatgtgggtctcatactcgggatgcagggatggttcaaaatacctgtcaataaatgcaatatagcacataaacagaattaagaacaataattatatgatcctctcatagacacagaaaaagcattgaaaaaaacccagcatccttttatgattaaaaccctcagcaaaatttgcatagaagggacatacctcagagtaataaaagycatctatgacaaacccgcggccaatatcaagtactcaatgcaagactgcaatcccttt

SEQ ID NO: 203757 - DNA, 532 bp, Homo sapiens
tgagttagacaaattcttaatggtttctctgaaactgtgtttcttattaaggctrgcataatgtctgacatctactagaaattataatatttaaacacggaaacttaatttaaaaaatccacaagaactgatatatcacagctaacccattagtactaaagagagatacaccgagaaactatatcatactttagcaagattttcaccaaaatgataactctaaattttacaagaacaccttagttcattaaaaatattcaacaattgcttttgattgccatatttgattgttatgggctgacattgggagtaaagtttcttaggggatgcaaagaatctttggggtcctcagcaaaccctccacaatatcactaatgctctatatgccaataagtgctcattcaaacttcaatgttaccattacataaattctaacttgcaaaaaagatgaacaagtaataggtatagtaatgaaatggcagttaatacattagattattttttaaccagttaaaaaaattaaaagttcaaa

SEQ ID NO: 203758 - DNA, 532 bp, Homo sapiens
tgagttagacaaattcttaatggtttctctgaaactgtgtttcttattaaggctggcataatgtctgacatctactagaaattataatatttaaacacggaaacttaatttaaaaaatccacaagaactgatatatcacagctaacccattagtactaaagagagatacaccgagaaactatatcatactttagcaagattttcaccaaaatgataactctaaattttacaagaacaccttagttcattaaaaatattcaacaattgcttttgattgccatatttgattgttatgggctgayattgggagtaaagtttcttaggggatgcaaagaatctttggggtcctcagcaaaccctccacaatatcactaatgctctatatgccaataagtgctcattcaaacttcaatgttaccattacataaattctaacttgcaaaaaagatgaacaagtaataggtatagtaatgaaatggcagttaatacattagattattttttaaccagttaaaaaaattaaaagttcaaa

SEQ ID NO: 203759 - DNA, 380 bp, Homo sapiens
gacatttatgttaaattgttgaaatgttaaatactatgcattgaataaataaagagtgatttttcaaaagtatagaacaaatcaggctttggaattaatttcactattttagactgtatagaatattacatagagagcagagtagtttgatagacaaatatacatcatttttgagggtggattttttggtcagaattctgttttcatccttagaattaaatgtctactctgtaccattaattaatttatttatctaagtgctgagtaacaatgttaaattacaagacatagtttcttttctccagtatacaaaggactaaatgtaacaagwtggaaagttggtattaaggagattatgggaaaactaagaaagagtgtta

SEQ ID NO: 203760 - DNA, 346 bp, Homo sapiens
ccactaggtttatattcaaccaacaaaaaacagttgagatattgcatgtaaattactttctaggaaagacagagagagagagagagagagagagagaggaaaaagaagaaaacatatattaaagaatacatgactgagagaaaattgttctcttggagtaagtttgttgtgaggagaragagaagaaactgtttgagaactgaatgattaaaattcaagcctagataccatgaggggatttgagatagagaattgaagacacagacaaacatttcccacttcacatattttattatcctggtactatatgatagtaaaaaattagttactatataagacataaacg

SEQ ID NO: 203761 - DNA, 590 bp, Homo sapiens
ccagtctttgggagggctgatctacctctgtttcaccattactaataaactacagttcttccatgatcctatttgaaagtgtgagatatttttcatggcctctcaatatactggggataaactacaatttttaatttccttacaccaggagactgccaaaagctaatcctcctgtcagcctcttggcttcatacctagacatccacaaatgcctccagggaaaagtgacaaatatattcagctaactttaatgaataccatttctctctcgaatcatggccttttaacaactgcctgctttggtagccctgaactctacatttttatgttccttctagcttcatgaaactgctgaaaatttgattgagatttctacctgcttagccaccacattttgttcatttagttttccttggtggggagggttttgaattaaggcaatgcatcaaggtcaaaagtagaaatttctattgtgcctttttaggtggtattgggaatgttattctcrctgtgaaatataataaaattcatagttgcaaaacaatttacttgttatataaataagagggaaaaaaacgcacattaaaacc

SEQ ID NO: 203762 - DNA, 613 bp, Homo sapiens
cttggtatctgagatgttaagttctaagattgttgttcttctactgtaaaaaaaaatagtgtgtgccattctagtagcaaataatttgcatattgtttccaatcgaccctatatatacccagacactttgtccaatgtcaagtgaaggagagacaagggaatttttacaaaattyataaatacccatgtaagcatatgtagagatgcatggtgcacagtatactcaaacataaaattattatccttatgatctaggaccatgagaattcaataggaaatccaggtagtaaactggaattaagtcataattttctaggcttccctctggacagcctgccacccagatggtatttgaacaagtccaaccagggattgtcagtaggtaagaaagatatatgatgccccaaaatagtctgagcagaatctcaaattcataaaatagatgttttatgaattcctatcacttttgttgtgattattattcagaaaccagccgatataatgtgttctctttctgaggacatccacatttagtgaccaacttgccttactaaggtagagaaccagaaggaaatgatgaaggtagaatcagaactgtttttgagtcaattac

SEQ ID NO: 203763 - DNA, 556 bp, Homo sapiens
tgttggcaaggatgtggagaaaagggagtatctgcacactgttggtgggaacttaaattagtgcagccattagagaaaacaatatggcagttcctcaaaaaattaaaaatatgccaggctaagtgattcacacctgtaatcccagcactttcggargctaaggcagggagaccacttgaagccaggaatctgagaccagcctgggcaacacaacaagaccttatctctacaaaacatttttaaaaattacctgggcatggtggcatgagcctgtgttcccagctgctctgtaggctgaggcgggaggatcacttgggctcacgaggttgaggctgcagtgatctaggatgccaccactgcactctagcctgggcaacagagtgaaatctaatttctaaaaaaaattaaaaataaacatagctatcatatgatgcagcaatcctatttctgggtatatgtctgaaagatatgaaatcagtagatcaatgaagtatctacaatctcatgtttgttgtagtattattaataattgccaagatatggaattaaccaaaac

SEQ ID NO: 203764 - DNA, 527 bp, Homo sapiens
ctttcggaagctaaggcagggagaccacttgaagccaggaatctgagaccagcctgggcaacacaacaagaccttatctctacaaaacatttttaaaaattacctgggcatggtggcatgagcctgtgttcccagctgctctgtaggctgaggcgggaggatcacttgggctcacgaggttgaggctgcagtgatctaggatgccaccactgcactctagcctgggcaacagagtgaaatctaatttctaaaaaaaattaaaaataaacatagctatcatatgatgcagcaatcctatttctgggtatatgtctgaaagatatgaaatcagtagatcaatgaagtatctacaatctcatgtttgttgtagtattattaataattgccaagatrtggaattaaccaaaactgtccattgatgcatgtgtgattaaagaaagtaagacacacacacacacacacacacacacacacacgggaatactattcagacttagaaaagaagaaaattctgtcatctgcaacaa

SEQ ID NO: 203765 - DNA, 493 bp, Homo sapiens
tgcagtatctttactggagcaagttaatacagtccctggcacctggtttgcagctattgctggcttctctgctcccccacacaatttctacaagacaaggaaatgagaagcagtttgatctaagtggtggggcaagaggatagtttgccatcttgcttcatgactacctcaattcaaatgcatgctgtcatgatgtaatcaggacaactcttgattattttgctatcccatagggatgacataaygctaattggacctgatgaggaagtatatcaagtgtgccttggatacatgcctgccagagggtaggtgacaaacttcacaggttccagagcctgtcacatcagtggtgtttctggagtttggtaccttgggacaggttgaaacaacatctctaaaagaaagaataacctacgaagctccatgcttgcttggtttatctggattttggacaggctaatccattttctgccaagcagtaagactgctagag

SEQ ID NO: 203766 - DNA, 457 bp, Homo sapiens
tttccgtatataatatcatgacatctgcaaacacagatatttttattttgtcctttccaatttgggtgccttttatttctttttcttgcctaattgctctggctaagaattcagtatctcttgaatagaacccatggttcctgatttcactctcaagagggtgtcattatctttttccacttttttttttttttttttttgagatggagtctcactctgtygcccttcttccacttttaaagtggaaagtttcccttttctattattttcttcaaccacatttaaagcaggaactggggactgtaccttcctttagaactaaccagctttctcaacctactgcttgcccaaagaatgttggagtccaagggttgtgtttagtctgaaagcatcacagtttttgctttctggattttaaaaatctaggtatggctccttggcaatttaactttctcaa

SEQ ID NO: 203767 - DNA, 457 bp, Homo sapiens
tttccgtatataatatcatgacatctgcaaacacagatatttttattttgtcctttccaatttgggtgccttttatttctttttcttgcctaattgctctggctaagaattcagtatctcttgaatagaacccatggttcctgatttcactctcaagagggtgtcattatctttttccacttttttttttttttttttttgagatggagtctcactctgttgcccttcttccacttttaaagtggaaagtttcccttttctattattttcttcaaccacatttaaagcaggaactggggactgtaccttcctttagaactaaccagctttctcaacctactgcttgcccaaagaatgttggagtccaarggttgtgtttagtctgaaagcatcacagtttttgctttctggattttaaaaatctaggtatggctccttggcaatttaactttctcaa

SEQ ID NO: 203768 - DNA, 439 bp, Homo sapiens
ctgcacacattgtctaaccagtcccagtgagatgagccaggtacatcctttggaaatgcagaaaacacccgccttctgcattgaactccctgggagctgcagaccagagctgttcctgttcggccatcttgycagccacccccatgtttgtcttttttaactgctgttgctttaaagtttgttttgtctgatataagaatagctattcctgctcacttttggtgtccgttcatgtgaaatgtctttttccatctttttaccttaagtttttgtgagtccttatgtgctaggtgagtctcccaaaggcagcagatggttggttggtgagttcttatctatccttcagttctgtatcttttaaggggagcatttaggctatttacattcaatgttagcatggagatgtgaggtatcattccattcatcgtgctatttgttg

SEQ ID NO: 203769 - DNA, 631 bp, Homo sapiens
cactactgtatacatagctgacaatgctaagaacttttttgaaatgttaatatctagtctttctagatgttctgaagtgccagacatttgttaaaattagaggtagtaaaataacacattttggtactttggtgttaaaattcatatgaaatgttgttttggagaggaatggccaaaccacrtcttgcgtaatacacattgtgtttgtgtactactttggtgccgagggagaaggaggaagtgtatgaactctatgccagggtgcttatagtgaggcaagattaatcattgtctcttatgtctgtgcattttgttttatttatctatgtatataaaggacaactgactcctaacttacaacatgtagtctttctggagagtaaaagaagttgtcagggtatgaaaaacatagagttagtaaactaatatatttagtttacatttacattttacaatttacattttgtaatttacatttgcattttgttttaaaattcctaggaaagattgtcttctgaaaagttgaatattattgctcactgggttgatggagatgggaagggttttaaatccaaatgttcctgtttggaaggttctatcaaattataaagggaactgccatttataaaac

SEQ ID NO: 203770 - DNA, 467 bp, Homo sapiens
accacacttagttctccagcaagggtttgtaactaggctgaaatggcagaagtatactttagaacatgacaggaacaaagatcactgagattgaggagaccagcaaaacccaatctaatgaaaccaagaatcacaataaaacaggagctgacagatgaaatagccagtataataaagaatctaactgatctgatagagctgaaaaaacacactacaataatttcacaatgcagtggcaagtattaacagcagaatagaccaagctgaagaaacagtcttggaacttgaagactgattctctgaaataaagcagtcagacaaaaatmaagaaaaaagaataaaaagaaatgaataaacctcccagaaatatgagattatgtaaagaggccaaatctatgggtcactggaatccctgaaaggggtggggagaaagcaaacaacttggaaaacatttttgagaatattgt

SEQ ID NO: 203771 - DNA, 474 bp, Homo sapiens
cagacatttcaaccttacaggccaggagagagctggcatgacatatttaaagtgctgaaggaaaaaaacacccaccctagaatagtatatcaggtgaaaaatccttcaaacatgaaggagaaataagactttccgagacatacagaaacagggatttcataaacgccagaccwgtcctacaagagatgtgaaaggcagtacttcaatcagaaataaagacattaatgaatgagaaaaaataatctgaaggtacaaatctcattggcaatagaaagtacacagaaaaacacagaatagtatagcactgtaactgtgccgtgtaaactactcttatcttaaatagaaagattaaatgataaacaaatatagtaaaaaccaacttttcaagacatagtcagtacaataagatgaataaaaacaacaaaaagttaattttttttgagacagggtcttgctctttcacccaggctggag

SEQ ID NO: 203772 - DNA, 468 bp, Homo sapiens
atcttcctcatttttagtgagttaaatttgcttttctttactcttggctaaaataaccacacatcctgaattagaggcattgcaatcaaaacgtcgtatttgaagcttccaagtcccaagttaggtcaaagttagtatgggattcagtgtgatagataggagacatggctggatactaagaatgggctcagagttattttacctaaattaggaaaatttgttcacttcccttatattagatttcattggaaacctttgatctaatatcatctctgatagattatacctcaataattaagctggaggttatgaattagtaatttaaatgaatagtggaaacctccatttagaatatatttctctaccaagtgtaaagttagctcagatggcagaaataactgcactcagcagagcttgtcaataaggcaaagacatacacaaayacatttattgcaagggtagtgcatg

SEQ ID NO: 203773 - DNA, 523 bp, Homo sapiens
atagacatccgtaaactaatacggatattaatagattattaaataaataaataatgggaagaagaacacatctctttgcagaagtattccaaatatgttagcttgatagtcctgtaatcaagtgagtgaagcttaaacactcatgagttgattgtggcctgagattagagacatggaaaaaaaatcactattattgtattttataatggkatttcagatataatgccaaagacatgatctgtggatgaataaaattttacatttttaaaatctaaattggtataaacatgcacacatatttttctgcaatacacgctaagggtgtaaaagacagccacagacttggagaaaatacttccaagtcacgtatttgttaaatgagttattttagtttgttaaatcacttttataattaatatgcaagttaacttacaactaatcaaaagaaaacaatgcatttaaaaatgaactagatctcaggcaaggtacctcaccaaagattatttgaacatttttaagtagg

SEQ ID NO: 203774 - DNA, 492 bp, Homo sapiens
ccaacatattccccttttctctgacttcaaaaccctytgacaaccactgttttactctctccttcaatgagcttttttttttttttttcagattctacatgtaagtgagatcatatagtgtctgtctttctgtgtctggcttatttcacctaccgtaatgtctattaggtttatctatgttgctgcaaagggcaaaacttccttctttctttggctggatgataatctatcacatatatgtaccacaatttttatactcattcatcaattgatgtacacttgggttgtttccatattttggctatagtgaatgatgctgcagtgaacatagcagtatagttatcttttagagatacttatttcatttcctttgggtatatatctagaagtgagattgctggaacatatggaagttttattttttattttttgaagaacatctatattgttttccataatgcctgtgccaatttacattcccatcaatactgt

SEQ ID NO: 203775 - DNA, 492 bp, Homo sapiens
ccaacatattccccttttctctgacttcaaaaccctttgacaaccactgttytactctctccttcaatgagcttttttttttttttttcagattctacatgtaagtgagatcatatagtgtctgtctttctgtgtctggcttatttcacctaccgtaatgtctattaggtttatctatgttgctgcaaagggcaaaacttccttctttctttggctggatgataatctatcacatatatgtaccacaatttttatactcattcatcaattgatgtacacttgggttgtttccatattttggctatagtgaatgatgctgcagtgaacatagcagtatagttatcttttagagatacttatttcatttcctttgggtatatatctagaagtgagattgctggaacatatggaagttttattttttattttttgaagaacatctatattgttttccataatgcctgtgccaatttacattcccatcaatactgt

SEQ ID NO: 203776 - DNA, 506 bp, Homo sapiens
cccttgcagtcacataaaacttaacccttaaatttctcacacttactcattatacttcaaccactctggggtttcctttatattctttaaatataataagtttattctctcattatgcataactctcctccattgcctacaatggtacctggcaaatgggaggtactcagtgaaaaacaggacttgttaaatgaatgatatgaattccagccagaattcctccttctcagtttcttattataaaatccacttgacagactacatgtcgactcaataacctcttcatggaagttttcacttcctggttgcgaagggtataaatcataggattcatcaatggaaagatcactgtgtgaaagagagaaaccatcttgtcagctggtaaggccctgaaagggcacatgtagatgaagatagcaggtccaaacataagaagtataataatgacacgagtggtgcacrtggacatggccttgttcttcccttcagaagctgccctacgaaca

SEQ ID NO: 203777 - DNA, 570 bp, Homo sapiens
tcttttgaaacagtagtaaggacagcacatgaagtttcttcactccaatttttgtaagggttaaaaatacctaacccatctttcagtactaaattactttccttgaatagtatcctacttaaaatatactgtgtaaatacttttaaattatttcccattacctcaaatattttgtctgtttataactgatcttaataaaagtggcactattcacctttctgcttgaaagaaatttctcattaatccaccctaccagcaaaaacacattttagaaatgttcccaaaataagaataagaatgtgatgtctattaatatgtgctatctartttgtaacccataacctatataatcactaattttttgtgtgttctgagaaatgtggataaagttagagtatcatcaaatcattaactgataccaatgtttataatgccatgatttctaggcaaagtaatggatgtcatttaaaaagccctcgtttgggcatctatctgggtttaagttcttcattgtgcaatttttttaaccgtgagatcttgggaaggtcatcttctttagcctgagttatt

SEQ ID NO: 203778 - DNA, 561 bp, Homo sapiens
cactatgtcacttctaagttttaaaatcaacattctatcagtgacacatattacagaatagtcagcatgtttactaggtccatgtgggcagaaagccaaaagaggttattttatttcttacgttactttttttttttaaaaaagtgtataataggaaatcattgatagatcaagaaaagaagtaatgtggtcaggtaggtagtatggtaaattcaacatatttctgatgacaaagaaataggcaaagaaaaataaatgatgttcacaaagactctttgrcataatccttcttggagacgagaactgcatattgaaggactaattcctcacaaagagatgtattcttaaatacaccctattgtggtcttggcctttgttgttttcattttaggaataagtgtctcctatgttccactaaagcaaagacaactatttttttaagtaaatattactagacagaagaaaagtaattaagaatcacatagtagaacacaatataattaaatttcagtagatttatttttattttaaaaagattttttattttaaaaattaatatac

SEQ ID NO: 203779 - DNA, 455 bp, Homo sapiens
cagccacttcttttatcaggcacctatagcgctattacactccaggccactatttgccttccctaatcaccccagggccaagtgccagacacttagagacagcccctatcctccagagcccactggaattattcaatctagccaatcctaaacctgyttatcctgccccatccatttatttccagagaaaccatgataaaggctcttacccacatttttctcatttccccactcacctaaccaacctcttatttctagggatttgtgagtctaaaaacttcttccttcatgacagtcatttccatgacagtgtgtcttaccattccagattaaaataaataccgggcacctttaaaacagtgcagcagacaagaactacatcttgatggcagctacattgtttttgtcagtagttgccacaggctcccaacataaaattgtggagctcggaaagc

SEQ ID NO: 203780 - DNA, 444 bp, Homo sapiens
atagcgctattacactccaggccactatttgccttccctaatcaccccagggccaagtgccagacacttagagacagcccctatcctccagagcccactggaattattcaatctagccaatcctaaacctgcttatcctgccccatccatytatttccagagaaaccatgataaaggctcttacccacatttttctcatttccccactcacctaaccaacctcttatttctagggatttgtgagtctaaaaacttcttccttcatgacagtcatttccatgacagtgtgtcttaccattccagattaaaataaataccgggcacctttaaaacagtgcagcagacaagaactacatcttgatggcagctacattgtttttgtcagtagttgccacaggctcccaacataaaattgtggagctcggaaagctgagtcctcccagc

SEQ ID NO: 203781 - DNA, 455 bp, Homo sapiens
cagccacttcttttatcaggcacctatagcgctattacactccaggccactatttgccttccctaatcaccccagggccaagtgccagacacttagagacagcccctatcctccagagcccactggaattattcaatctagccaatcctaaacctgcttatcctgccccatccatttatttccagagaaaccatgataaaggctcttacccacatttttctcatttccccactcacctaaccaacctcttatttctagggatttgtgagtctaaaaacttcttccttcatgacagtcatttccatgacagtgtgtcttaccattccwgattaaaataaataccgggcacctttaaaacagtgcagcagacaagaactacatcttgatggcagctacattgtttttgtcagtagttgccacaggctcccaacataaaattgtggagctcggaaagc

SEQ ID NO: 203782 - DNA, 519 bp, Homo sapiens
atacttatttatgtaagcatgttgtagcttgtcttcacctggacctctatttaatggtaattatattttggaacaatgcatgataggccaactggtctgcttccaatggagttggaggggtgagactttataaactttgttaaagaaaatccctgagaaaagagattgccagtgatacttgtcttgttctttatatattcatatgtttttaacttttaatgaatatatattattttagtaattaaaaaaacagaagaactttaattttgtttgagcaataaagctctcttttaaccagatataataataaarttctggttaatattgagattagcaaaaagccagaagatgaatgggacttgggttctaaagtctcacacaagtcagtgtataattgaaagtataatcacaatactgagctaaagataatatactcaaccgagatattgctgattttaaacatagtagctcagcagcagttttgaaagaaagaggagtaggagagactgaaagaaaaaa

SEQ ID NO: 203783 - DNA, 519 bp, Homo sapiens
atacttatttatgtaagcatgttgtagcttgtcttcacctggacctctatttaatggtaattatattttggaacaatgcatgataggccaactggtctgcttccaatggagttggaggggtgagactttataaactttgttaaagaaaatccctgagaaaagagattgccagtgatacttgtcttgttctttatatattcatatgtttttaacttttaatgaatatatattattttagtaattaaaaaaacagaagaactttaattttgtttgagcaataaagctctcttttaaccagatataataataaagttctggttaatattgagattagcaaaaagccagaagatgaatgggacttgggttctaaagtytcacacaagtcagtgtataattgaaagtataatcacaatactgagctaaagataatatactcaaccgagatattgctgattttaaacatagtagctcagcagcagttttgaaagaaagaggagtaggagagactgaaagaaaaaa

SEQ ID NO: 203784 - DNA, 505 bp, Homo sapiens
atacttgggagtgaggcttttttcgggaagaaatatccactccagtgtgtccctgatgctgctctcaactaacgtaaacagtggactggaaccaagattctctgagattaatgtgaggattaatgctgctccaatgtgtttaaacaagcatgtggcaatttagatgagcctggctgtgtggtttgttatatgtaaatctgaactaaataaacagaaagggcatgtctgaactagtgtgagggtgagagatctcatagaccccaaactcatttatatttcctcctggaacctccaggttctttgggtgaaaattgacatagatcctttcctggataagtcatcaaarttcctactctctgagaaatacacagataaatatatccagatagaacatacaggagaaatacatatctagaacattatctatgttggctaaggtagtccatctccattacagaccccttcaagcagccttcctttatcacgaaagtggataaaattagcc

SEQ ID NO: 203785 - DNA, 505 bp, Homo sapiens
atacttgggagtgaggcttttttcgggaagaaatatccactccagtgtgtccctgatgctgctctcaactaacgtaaacagtggactggaaccaagattctctgagattaatgtgaggattaatgctgctccaatgtgtttaaacaagcatgtggcaatttagatgagcctggctgtgtggtttgttatatgtaaatctgaactaaataaacagaaagggcatgtctgaactagtgtgagggtgagagatctcatagaccccaaactcatttatatttcctcctggaacctccaggttctttgggtgaaaattgacatagatcctttcctggataagtcatcaaagttcctactctctgagaaatacacagataaatatatccagatagaacatacaggagaaatacatatctagaacattatctatgttggctaaggtagtccatctccattacagaccccttcaagcagccttcctttatcacraaagtggataaaattagcc

SEQ ID NO: 203786 - DNA, 577 bp, Homo sapiens
agtgccattttctacttctgttttggtggaatgggtatggagtaragcagaggaagaaggggtgatttgtgtgacgacactcagaatcattgcatcatgtccccataataataaaaaagcatatgatcttgtaatggtatttactgctttaaaatattcatctcctttcaataataaagggacaattatttacttaggaacaaataatcgcctccatctggtcaaaaactacatagcataatagcaaaatatgtaaatgagctgagtaatcataatatttcagatgcttttgttagaaatttatttgattgttggaacctcatagttgacttatcagtgaatgtaaatgagttagtatataactagctcatagccctcataactaataacacaatgttgtgttattagttatgagggctatgagctgcctcctccaggtaagtacaataagatcattgtttcttggaatgttaggaaatatttcattctggataaccttattatctttcttttgattaaaatcttcctaaaccaaattttaaatttttcaatcttattaaatatgcttcattaactc

SEQ ID NO: 203787 - DNA, 577 bp, Homo sapiens
agtgccattttctacttctgttttggtggaatgggtatggagtaaagcagaggaagaaggggtgatttgtgtgacgacactcagaatcattgcatcatgtccccataataataaaaaagcatatgatcttgtaatggtatttactgctttaaaatattcatctcctttcaataataaagggacaattatttacttaggaacaaataatcgcytccatctggtcaaaaactacatagcataatagcaaaatatgtaaatgagctgagtaatcataatatttcagatgcttttgttagaaatttatttgattgttggaacctcatagttgacttatcagtgaatgtaaatgagttagtatataactagctcatagccctcataactaataacacaatgttgtgttattagttatgagggctatgagctgcctcctccaggtaagtacaataagatcattgtttcttggaatgttaggaaatatttcattctggataaccttattatctttcttttgattaaaatcttcctaaaccaaattttaaatttttcaatcttattaaatatgcttcattaactc

SEQ ID NO: 203788 - DNA, 577 bp, Homo sapiens
agtgccattttctacttctgttttggtggaatgggtatggagtaaagcagaggaagaaggggtgatttgtgtgacgacactcagaatcattgcatcatgtccccataataataaaaaagcatatgatcttgtaatggtatttactgctttaaaatattcatctcctttcaataataaagggacaattatttacttaggaacaaataatcgcctccatcyggtcaaaaactacatagcataatagcaaaatatgtaaatgagctgagtaatcataatatttcagatgcttttgttagaaatttatttgattgttggaacctcatagttgacttatcagtgaatgtaaatgagttagtatataactagctcatagccctcataactaataacacaatgttgtgttattagttatgagggctatgagctgcctcctccaggtaagtacaataagatcattgtttcttggaatgttaggaaatatttcattctggataaccttattatctttcttttgattaaaatcttcctaaaccaaattttaaatttttcaatcttattaaatatgcttcattaactc

SEQ ID NO: 203789 - DNA, 577 bp, Homo sapiens
agtgccattttctacttctgttttggtggaatgggtatggagtaaagcagaggaagaaggggtgatttgtgtgacgacactcagaatcattgcatcatgtccccataataataaaaaagcatatgatcttgtaatggtatttactgctttaaaatattcatctcctttcaataataaagggacaattatttacttaggaacaaataatcgcctccatctggtcaaaaactacatagcataatagcaaaatatgtaaatgagctgagtaatcataatatttcagatgcttttgttagaaatttatttgattgttggaamctcatagttgacttatcagtgaatgtaaatgagttagtatataactagctcatagccctcataactaataacacaatgttgtgttattagttatgagggctatgagctgcctcctccaggtaagtacaataagatcattgtttcttggaatgttaggaaatatttcattctggataaccttattatctttcttttgattaaaatcttcctaaaccaaattttaaatttttcaatcttattaaatatgcttcattaactc

SEQ ID NO: 203790 - DNA, 443 bp, Homo sapiens
gtcagaaaaaataaatgcaaattaattttattaattttatttaaaaattagtttaatcttttgctttaaagaaaacactgagtttatgggtcactttacaagtgaaataagaacacagatttgggggtaataaacataatttakcaccaaatacatttgttttaatttatttcacagttcaaaaacaaagtgtaagagtagaaaaaggaaagaaagaagaaaggagagagagagaagtacagaaaaagttacaataatcaaaataaaaatcaagagaaaagggaaaagaaagactagcagagacataaatggaaagatagtcgtatgacttaaaaacaaatggtgaagagacagagagatactagtccatgaggagagcaagaccatccagaggcaaaactccttatccaaggaattcagaagtaattagacatccctattat

SEQ ID NO: 203791 - DNA, 443 bp, Homo sapiens
gtcagaaaaaataaatgcaaattaattttattaattttatttaaaaattagtttaatcttttgctttaaagaaaacactgagtttatgggtcactttacaagtgaaataagaacacagatttgggggtaataaacataatttatcaccaaatayatttgttttaatttatttcacagttcaaaaacaaagtgtaagagtagaaaaaggaaagaaagaagaaaggagagagagagaagtacagaaaaagttacaataatcaaaataaaaatcaagagaaaagggaaaagaaagactagcagagacataaatggaaagatagtcgtatgacttaaaaacaaatggtgaagagacagagagatactagtccatgaggagagcaagaccatccagaggcaaaactccttatccaaggaattcagaagtaattagacatccctattat

SEQ ID NO: 203792 - DNA, 443 bp, Homo sapiens
gtcagaaaaaataaatgcaaattaattttattaattttatttaaaaattagtttaatcttttgctttaaagaaaacactgagtttatgggtcactttacaagtgaaataagaacacagatttgggggtaataaacataatttatcaccaaatacatttgttytaatttatttcacagttcaaaaacaaagtgtaagagtagaaaaaggaaagaaagaagaaaggagagagagagaagtacagaaaaagttacaataatcaaaataaaaatcaagagaaaagggaaaagaaagactagcagagacataaatggaaagatagtcgtatgacttaaaaacaaatggtgaagagacagagagatactagtccatgaggagagcaagaccatccagaggcaaaactccttatccaaggaattcagaagtaattagacatccctattat

SEQ ID NO: 203793 - DNA, 443 bp, Homo sapiens
gtcagaaaaaataaatgcaaattaattttattaattttatttaaaaattagtttaatcttttgctttaaagaaaacactgagtttatgggtcactttacaagtgaaataagaacacagatttgggggtaataaacataatttatcaccaaatacatttgttttaatttatttcacagttcaaaaacaaagtgtaagagtagaaaaaggaaagaaagaagaaaggagagagagagaagtacagaaaaagttacaataatcaaaataaaaatcaagagaaaagggaaaagaaagactagcagagacataaatggaaagatagtcgtatgacttaaaaacaaatggtgaagagacagagagatactagtccatgaggagagcaagaccatccagaggcaaaactccttatcyaaggaattcagaagtaattagacatccctattat

SEQ ID NO: 203794 - DNA, 623 bp, Homo sapiens
gttccatgtgtagatgagaatgaatattctatggttgttggatggagtgttctgtagatgtttattaagtccaattagtcaagtgtcaaatttaagtccagaatttctttgttcgtcttctgccttaacgatctaaaaccatcagtggagcagtgaagtctcccagtattattgtatgattgtctaagtctttttgtaggccaagaaaaacttgttttatgagtcgggtgctccaatgttcagtgtgtatacatttaggataaagtcttcttgttgaactgaaccctttatcattatgtaatgcccttctttgtccttggtaattgttgttggtttgttttatacgctataagaaatagtgacccctactattttttgtttgttttttgtttacatgacaaatctttctgcatccctttactttgaccctgtgggtttcattacatatgagattggtctcttcaagacarcagacagtggtgtcttgcctttttatccaacttaccactctatgccttttaagtagggcatttagataacttacatttaagattaatattgatatgtcagattttgatcctgtcatcatgttgttagctggctgttttatagacttgactgtg

SEQ ID NO: 203795 - DNA, 623 bp, Homo sapiens
gttccatgtgtagatgagaatgaatattctatggttgttggatggagtgttctgtagatgtttattaagtccaattagtcaagtgtcaaatttaagtccagaatttctttgttcgtcttctgccttaacgatctaaaaccatcagtggagcagtgaagtctcccagtattattgtatgattgtctaagtctttttgtaggccaagaaaaacttgttttatgagtcgggtgctccaatgttcagtgtgtatacatttaggataaagtcttcttgttgaactgaaccctttatcattatgtaatgcccttctttgtccttggtaattgttgttggtttgttttatacgctataagaaatagtgacccctactattttttgtttgttttttgtttacatgacaaatctttctgcatccctttactttgaccctgtgggtttcattacatatgagattggtctcttcaagacagcagacagtggtgtcttgcctttttatccaacttaccactctatgccttttaagtagggcatttagataacttacatttaagattaatattgatatgtcagatwttgatcctgtcatcatgttgttagctggctgttttatagacttgactgtg

SEQ ID NO: 203796 - DNA, 623 bp, Homo sapiens
gttccatgtgtagatgagaatgaatattctatggttgttggatggagtgttctgtagatgtttattaagtccaattagtcaagtgtcaaatttaagtccagaatttctttgttcgtcttctgccttaacgatctaaaaccatcagtggagcagtgaagtctcccagtattattgtatgattgtctaagtctttttgtaggccaagaaaaacttgttttatgagtcgggtgctccaatgttcagtgtgtatacatttaggataaagtcttcttgttgaactgaaccctttatcattatgtaatgcccttctttgtccttggtaattgttgttggtttgttttatacgctataagaaatagtgacccctactattttttgtttgttttttgtttacatgacaaatctttctgcatccctttactttgaccctgtgggtttcattacatatgagattggtctcttcaagacagcagacagtggtgtcttgcctttttatccaacttaccactctatgccttttaagtagggcatttagataacttacatttaagattaatattgatatgtcagattttgatcctgtcatcatgytgttagctggctgttttatagacttgactgtg

SEQ ID NO: 203797 - DNA, 561 bp, Homo sapiens
acaattgtgcatgtgcatggttgtcctttcataaatattcaagattcctcctatagcttattgagcatatgtatttggccacctcactcagtacatattccttttgtcactgtctcgaaatatttgtttctggctcctggccagaggctatatttcccagcctgtcataatagccacccttcaggctacaactctatgagaaataaaggtcctcctttccaaatttatgaaccccatcattcttcagttgatagcactgacaccccatatctaagtatattaaaagagaaataagctgcaaatatatataatatataaatatgtaatatatgtaaatatatgatatatacatatttatatataatttatattatatataaaatatattttaatatactttaatatattcaagtaaattaaaagaatatattaatagttgtatataaaataagtattttaatatactttaatgttaatgtatatactatatattttaatatamtttaataacattaaagtgtattattaaatataataatatattaaagtatattaaaagag

SEQ ID NO: 203798 - DNA, 477 bp, Homo sapiens
attacctactgtagcatggcgagagggtacagtatttctcactgccttatggatgagatgacctagtctcaggtcaagtgacttgcctaagatcatgcagccacataggaatatggtgctatcctagaaccatggtttccaaatcccacacgtgtactcttggcagtatgctctgctgcctctgtgttgatttttccttttgaatatcttcttagagaggaayaggagacttgtaaagttttatgtgggctcacagtttaaagagaacctgtttatggggttgtaataaccatgtattcacggacacaactgcttatgtctgcaaaagatcagcaattcatcagacactttgtgagttattttcttctctgattgtcagagtgaaaggtgagtaagatcacttctctcagggagctcacagtcatatgcactgagtcacatgacatagagtggagcgtgatgagcgtaatggcaaca

SEQ ID NO: 203799 - DNA, 477 bp, Homo sapiens
attacctactgtagcatggcgagagggtacagtatttctcactgccttatggatgagatgacctagtctcaggtcaagtgacttgcctaagatcatgcagccacataggaatatggtgctatcctagaaccatggtttccaaatcccacacgtgtactcttggcagtatgctctgctgcctctgtgttgatttttccttttgaatatcttcttagagaggaataggagacttgtaaagttttatgtgggctcacagtttaaagagaacctgtttatggggttgtaataaccatgtattcayggacacaactgcttatgtctgcaaaagatcagcaattcatcagacactttgtgagttattttcttctctgattgtcagagtgaaaggtgagtaagatcacttctctcagggagctcacagtcatatgcactgagtcacatgacatagagtggagcgtgatgagcgtaatggcaaca

SEQ ID NO: 203800 - DNA, 477 bp, Homo sapiens
attacctactgtagcatggcgagagggtacagtatttctcactgccttatggatgagatgacctagtctcaggtcaagtgacttgcctaagatcatgcagccacataggaatatggtgctatcctagaaccatggtttccaaatcccacacgtgtactcttggcagtatgctctgctgcctctgtgttgatttttccttttgaatatcttcttagagaggaataggagacttgtaaagttttatgtgggctcacagtttaaagagaacctgtttatggggttgtaataaccatgtattcacggacacaactgcttatgtctgcaaaagatcagcaattcatcagacacttwgtgagttattttcttctctgattgtcagagtgaaaggtgagtaagatcacttctctcagggagctcacagtcatatgcactgagtcacatgacatagagtggagcgtgatgagcgtaatggcaaca

SEQ ID NO: 203801 - DNA, 477 bp, Homo sapiens
attacctactgtagcatggcgagagggtacagtatttctcactgccttatggatgagatgacctagtctcaggtcaagtgacttgcctaagatcatgcagccacataggaatatggtgctatcctagaaccatggtttccaaatcccacacgtgtactcttggcagtatgctctgctgcctctgtgttgatttttccttttgaatatcttcttagagaggaataggagacttgtaaagttttatgtgggctcacagtttaaagagaacctgtttatggggttgtaataaccatgtattcacggacacaactgcttatgtctgcaaaagatcagcaattcatcagacactttgtgagttaytttcttctctgattgtcagagtgaaaggtgagtaagatcacttctctcagggagctcacagtcatatgcactgagtcacatgacatagagtggagcgtgatgagcgtaatggcaaca

SEQ ID NO: 203802 - DNA, 574 bp, Homo sapiens
aatgtaaatcaacaagcaaaaataataataataatcacattttaaaaataggcaaatgacatgagcataaacttctcaaaaatacataaagtggccaggacatatgaaaaaacgtttaacgtcactaatcatcagagaaatgccaatcaatcaaaaccacaatgagatgctgtctcacaccagtcaaaatcagtattactaaaaattaaaaaaaaaacaaaacagatgctggtgaggctacggagaacaggaaacgcttgtacagtgctgggtggaatgtgaattagtccaagcactgtggaaagcagtctggagagaggctgcggagaacaggaaacacttgtacagtgttgggtggaatgtgaattagtccaagyactgtggaaagcagtctggagtgaggctgcagagaacaggagacacttgtacagtgttgggtggaatgtgtattagtccaagcacggtggcaagcagtctggagtgaggctgcggagaacaggaaacacttgtacagtgttgggtggaatgtgaattagtccaagcactgtggaaagcagtctggagatttgaaaag

SEQ ID NO: 203803 - DNA, 624 bp, Homo sapiens
tccttgtcttaatctgttagggctgctataacaaattaccataaattatgtagcttataaacagcaaaaaacaaacaacaacaacaaaaaaaaacatttctcacagttccagaggctgggaattccaagatcaaggtgccagtagattcgaggtctggcgagggactgttttatggtacagagattgcaccttatggctgtgtcctcacatggtagagggatgaacaggctcccttgggcctatttatgagggcactaatgtcattaaggagggttccaccttcctgatttaatcacctctcaaaagctgtacctcttaataccatcgccttggatatggaaatttcaacatatgaattttgaggaaacatagacattcagaccacggcactccctaacttcaaggtgcttacaatgtacaggggaaatagtaggtaacatatggtaaatgctaggaaagcaatcttgagagcagggacatcaaaggtatactstcttaacaaggtgacaattaagccaagtttgttttttttttaaactttggctcttttatttagaagttttctcatgtattcaacaacttgattaaaacatatctctttaatttgggatacattgattttt

SEQ ID NO: 203804 - DNA, 395 bp, Homo sapiens
tgataactcctctgccactgctgctgcmgctgtactggctcttgttgcccttgggctggggaaggaacaaagagccatggtgtttcactcatacctccagcacattgcactcaccatatggagaagaggccagactgtcttccccatgagacccccatccatcctggtcttcaccaggaagggtcccacagcttgggttcacagcacagccaccccacccacagctgatcattctgattggcagtggctctgcatttctctggggtggaaatggtgccccaagagataactgaaagttcctctgccattgccactgcaaaggtccctgaccctggtgccaccaagttgaagagaaaacataaaaccttaactcaccccagggatgtagtgtgaag

SEQ ID NO: 203805 - DNA, 525 bp, Homo sapiens
gggttcacagcacagccaccccacccacagctgatcattctgattggcagtggctctgcatttctctggggtggaaatggtgccccaagagataactgaaagttcctctgccattgccactgcaaaggtccctgaccctggtgccaccaagttgaagagaaaacataaaaccttaactcaccccagggatgtagtgtgaagcctgggagtgccaagtctagatctatggccagcacttgagtgggagaggagcccacaatttcagagcatttagaggtagcatggctgcaaacacaaagaaatacagaggagacataggctgagtaagagtctttctactggtcattatgctgaagcaccatccactggaccacagtccagacttcaacaccaaaaatactttgctaatatatgcatctgtgaaaccaaggacaagaactcagccacaaagaccctgcacaaagctgtggccctctgaaaacatccagaaamaaagccaactgactatactcaaatttcaccaca

SEQ ID NO: 203806 - DNA, 577 bp, Homo sapiens
tggggcttatattgaaatgggcaaaataaataatatgaggcacaacaytggttagttggagttattttagtaggttctttagaactgaaaatacagtttatgtcttgataaaatgtcagtggcctcagatcactccattatttgtttatgtcctttattactgatggctgatgtctagctttgtctgtgattcaaagacaaagatacaattatatgcagctggtcaacaggaaagctttggtctgtgataagacagactatgtgaaaaagtcttgaagagtttgcaaccttttctgctcagagactatccaaagaaatggttagcacacttcatcaatctcaggtcagttgctatacataaaatccagtgaaccccctcatctgccaactttttctcagtataagaataaaataatttttagaattaacagcatgattggtgtacccctgaagtaatatttggattttattgaccatcataaatagattatgaaatcatggcagcaacaaaagcacagatggtgtcttataaacctgcaaactacaagtgatgagccctaagacgagtcagagggca

SEQ ID NO: 203807 - DNA, 487 bp, Homo sapiens
atagcccactagaaggagtcaaatccccaagttttctttctttttctttttcttttcttttcttttctttttttttttttttttcctgcagtggtagatgctctgctgaggactgaggagctggaaagtagctatggctcacttcatgagggaagaatacatctcttaggcttttccagcttcagaggaattcctgggaccaacctatacaactcgttggtgggaaagtgcttctttctgactgtagtaaaagcctaatcaatactgaatggaagagaactctcttttggcagaaggaatcatagcctttcagagtaatggccayaaatggtagttctgttccctttcctctgtattaaagcataatgctttcctagtattcctaattttgtgtgcatttctcttttcagttggatttttctctctaatgttgtggctgatgaaatggtataaaaataattctgtgcattaaatgctggcatagtta

SEQ ID NO: 203808 - DNA, 390 bp, Homo sapiens
gaattcagagccctatctatagatattccagcttcatcccccactatctccctgacatttagtatattttagccatataaggataagctcatcctgtagttccttcacttcatttccttacttctcttctcctcctacaactaggcactgctttcccctttcagaatttttcagcatagtttaaattcctccttcactgtaaagattgtattaacctctgagttggaattaattgctcattggatctgggttacatcagattgtttgtgcatgtcgtcctctacttatttctccttacaatgacgtatgtaagccacatgtcagctgactttacccagtcctgtccttctggaaattgctacmaaatccccagagattctgttctctagg

SEQ ID NO: 203809 - DNA, 602 bp, Homo sapiens
aggctttctagctctgtgatccaagtaacaatcttctccacaatgtgtaacaggctatcatactcagctgtcaaatgccttccagaaagcaagatatgccttgctggcagcagctcttcactctattgagggatgtagaatggtttggaatttgggctttcatttcctgttgtctgggttcaaatctcagctgagccacttgttttatcatcagttaaagcacaggtatcaggaagacctacttcacagattgctctgagggttaaatgaggtaactgaagtaaagcccactgcaaggtattaatatttagtaagagttgggtgaaaattgttatccattgcctggaaacatattaaaagaggacagtatgttcatctggtatgagttattctcattgaattttcattctccctatccctattcacatacattgctttagacaaatcttgcttccagaggaacactgctacttttccttatttagatttttttraccaatgagtttagatatattctagatgaccaaattgaactttaatattcagaaattttcagaattcacattttcaccctttgataaaaatgaatttaacgtgattag

SEQ ID NO: 203810 - DNA, 602 bp, Homo sapiens
aggctttctagctctgtgatccaagtaacaatcttctccacaatgtgtaacaggctatcatactcagctgtcaaatgccttccagaaagcaagatatgccttgctggcagcagctcttcactctattgagggatgtagaatggtttggaatttgggctttcatttcctgttgtctgggttcaaatctcagctgagccacttgttttatcatcagttaaagcacaggtatcaggaagacctacttcacagattgctctgagggttaaatgaggtaactgaagtaaagcccactgcaaggtattaatatttagtaagagttgggtgaaaattgttatccattgcctggaaacatattaaaagaggacagtatgttcatctggtatgagttattctcattgaattttcattctccctatccctattcacatacattgctttagacaaatcttgcttccagaggaacactgctacttttccttatttagatttttttaaccaatgagtttagatatattytagatgaccaaattgaactttaatattcagaaattttcagaattcacattttcaccctttgataaaaatgaatttaacgtgattag

SEQ ID NO: 203811 - DNA, 487 bp, Homo sapiens
tgaggcgggaggataacttgagcctaggggtttgagaccagcctgggcaacatagagagaccccatctctatttaaaaaaaataaacaaaacccccactattctgtttttcatcctacgtcacttctaagtgtctcctttgctgggtagtacatacaccccaaatctctctacttttcaccatttccaytgatatggctctagtccaaggctcaattgcctcatccttgggctactgcaatagcctcctaaccaatctacctgctttctcttttgacttggtataacgtatcctccttatagtagcctgagaagttgtcttaaatagaaactatgacagatgattcctctgcttaaaatccttcaatgatttcattgctcttagaataaaattggaaaacatcaccatgactgtaggtttatctggcccctgcccacctcttcaatatattttaaccactgtcccctttattcactacactccagcc

SEQ ID NO: 203812 - DNA, 487 bp, Homo sapiens
tgaggcgggaggataacttgagcctaggggtttgagaccagcctgggcaacatagagagaccccatctctatttaaaaaaaataaacaaaacccccactattctgtttttcatcctacgtcacttctaagtgtctcctttgctgggtagtacatacaccccaaatctctctacttttcaccatttccattgatatggctctagtccaaggctcaattgcctcatccttgggctactgcaatagcctcctaaccaatctacctgctttctcttttgacttggtataacgtatcctccttatagtagcctgagaagttgtcttaaatagaaactatgacagatsattcctctgcttaaaatccttcaatgatttcattgctcttagaataaaattggaaaacatcaccatgactgtaggtttatctggcccctgcccacctcttcaatatattttaaccactgtcccctttattcactacactccagcc

SEQ ID NO: 203813 - DNA, 487 bp, Homo sapiens
tgaggcgggaggataacttgagcctaggggtttgagaccagcctgggcaacatagagagaccccatctctatttaaaaaaaataaacaaaacccccactattctgtttttcatcctacgtcacttctaagtgtctcctttgctgggtagtacatacaccccaaatctctctacttttcaccatttccattgatatggctctagtccaaggctcaattgcctcatccttgggctactgcaatagcctcctaaccaatctacctgctttctcttttgacttggtataacgtatcctccttatagtagcctgagaagttgtcttaaatagaaactatgacagatgattcctctgcttaaaatccttcaatgatttcattgctcttagaataaaattggaaaacatcaccatgactgtaggtttatctggcccctgcycacctcttcaatatattttaaccactgtcccctttattcactacactccagcc

SEQ ID NO: 203814 - DNA, 454 bp, Homo sapiens
gaaagagaaaagtcagtgaagcacttgtttatgaccgggctcctgctttgggaccctggagctcaatctcatggagactcttggagggaccctgtggaccgtgcctcagagctgtccctacctaagatgaggaagtggagcatcagccataacacccgtcctctgttggttggagtctcasctgggcattagttcctaggatgcgcctcatagggaccaagtgtgcccccatggccagagaatgtccttgagagggctgggtcatccataggagtgcaaaggagctgcctacagtgacttcggggtagacccagggcatacagatggagcaccaacagcgtgggctctgccctgtaaaatgtattccttaccatgcacggcagtcagaaaagttcaaatacccatgccctggcagataaaagtaggagaggcaccatccacaccactaaaatat

SEQ ID NO: 203815 - DNA, 454 bp, Homo sapiens
gaaagagaaaagtcagtgaagcacttgtttatgaccgggctcctgctttgggaccctggagctcaatctcatggagactcttggagggaccctgtggaccgtgcctcagagctgtccctacctaagatgaggaagtggagcatcagccataacacccgtcctctgttggttggagtctcagctgggcattagttcctaggatgcgcctcatagggaccaagtgtgcccccatggccagagaatgtccttgagagggctgggtcatccataggagtgcaaaggagctgccyacagtgacttcggggtagacccagggcatacagatggagcaccaacagcgtgggctctgccctgtaaaatgtattccttaccatgcacggcagtcagaaaagttcaaatacccatgccctggcagataaaagtaggagaggcaccatccacaccactaaaatat

SEQ ID NO: 203816 - DNA, 603 bp, Homo sapiens
attatctctcagattatctagcctgccataatgttagaagcaaaagttgctagttttttaaattaaaaaattgttttgaataataaaaatatttattatctaacttaagaagtctacatagacagttccagatatgcttcactagttctatgatgccttaaggacttttcctatcttttggtttgcctgacctctgtttatcaggagtaaatatctctctaacggttgccaaatggctgcagaagttccaagcatcttaaattcacacaacaaaaatcctttcttgtgttttgaaatcctattttcattctgtatttctatctagtattattttcctttagcttaaagaacttttatttagtaaacttttgtcatataatctgctggtaattaattgtatgtcttcaattttgcattaaartatttattttaccttcattttttgaagttttttcttggcgtggcataaaattccagcttgatggaattttttcctgtattttaaagatgtcattttattgtcatttggctttcatagttcttgacaaacagtcagtcatcagtcttactaatgctcctttgcagggtcctttgaaaaattat

SEQ ID NO: 203817 - DNA, 504 bp, Homo sapiens
gggtggccgtttgggcagacaccaagctcgctgcaggagtttcttttcataccctagtggyacctggaatgccagcgacacagaaccgttccctcccctggatagggggctgaagccagggagcccagtggtctagctcagtggatcccacccacatggagcccagcaagctaagatctgctggcttgaaattcttgctgccagcacagcagtctgaagtcaacctaggacactagagcttttggaggcggggggctggggggcgtccaccattactgaggcttgagtaggcggttttcccctcacagcataaacaaagccaccaggaagttcgaactgggcgaagcccaccgcagcttggcaaagccactatagccagactgcctctatagattcttcctctctgggcagggcatctctgaaagaaaagcagcagtcccagtcaggggcttacagataaaactcccatctcccagggacagagcacctgggggaagaggtggc

SEQ ID NO: 203818 - DNA, 504 bp, Homo sapiens
gggtggccgtttgggcagacaccaagctcgctgcaggagtttcttttcataccctagtggtacctggaatgccagcgacacagaaccgttccctcccctggatagggggctgaagccagggagcccagtggtctagctcagtggatcccacccacatggagcccagcaagctaagatctgctggcttgaaattcttgctgccagcacagcagtctgaagtcaacctaggacactagagcttttggaggcggggggctggggggcgtccaccattactgaggcttgagtaggcggttttcccctcacagcataaacaaagccaccaggaagttcgaactgggcgaagcccacygcagcttggcaaagccactatagccagactgcctctatagattcttcctctctgggcagggcatctctgaaagaaaagcagcagtcccagtcaggggcttacagataaaactcccatctcccagggacagagcacctgggggaagaggtggc

SEQ ID NO: 203819 - DNA, 429 bp, Homo sapiens
aattccaaaaaccacaacacctcttctcttccaaaggatcacaactccttgccagcaagggaacaaaactgaacagagaatgagtttgatgaattgacaaaagtaggcttcagaaggtgggtaataacaaactcctctgagctaaaggagcatgttctaamccaatgcaaggaacctaagaaccttgaaaaaaggttagatgaattgctaactagaataaccagtttagagaagaacacagatgacctgatggagctgaaaaacacagcatgagaacttcatgaagcatacacaagtatcaatagccaaatcgatcaagcagaagaaaggatatcagagattgaagatcaacttaattaaatagagtgtgaagacaagattagagaaaaaaagaatgaaaaggaatgaataaagcctccaagaaatatg

SEQ ID NO: 203820 - DNA, 631 bp, Homo sapiens
aaaaccagcaaagagagtgagggggagccatcatggaggtaaaaagttagcaagagagtatcccagaggtcaggtgaaaaaggtctttcaagaagggagcaatccattgcatcacatgctgcagaaagactaaataaaatgagaactgacaattcattctgacaatacagaagtcaatagtgacccaaataagagcaatttgtcagagcaggaaagacaaaagcctgacttagaggcttttggagttagagtggtctatccaggcatatattgtataagcagaggcaaggaatagtatattcttagagagaattaaagagatagtgagagaacaggaaatggagagggaagtataaccaatatttaattaatttagtttgaaagtaaaacagaagtacaggatggtattcagactaaacgtaccatcaagatagggtgttgttttccagatgaggactataatartacatttatatgatggtgggaattatctagaaatgggaggaggcatgctataaaagtcttgtctttgggtaggcaagagaggatggggtctaatgcttaaaaaagcatggacagctcttttattattattataagccagaaggaagaggatgtgggttcaaatgca

SEQ ID NO: 203821 - DNA, 631 bp, Homo sapiens
aaaaccagcaaagagagtgagggggagccatcatggaggtaaaaagttagcaagagagtatcccagaggtcaggtgaaaaaggtctttcaagaagggagcaatccattgcatcacatgctgcagaaagactaaataaaatgagaactgacaattcattctgacaatacagaagtcaatagtgacccaaataagagcaatttgtcagagcaggaaagacaaaagcctgacttagaggcttttggagttagagtggtctatccaggcatatattgtataagcagaggcaaggaatagtatattcttagagagaattaaagagatagtgagagaacaggaaatggagagggaagtataaccaatatttaattaatttagtttgaaagtaaaacagaagtacaggatggtattcagactaaacgtaccatcaagatagggtgttgttttccagatgaggactataatagtacatttatatgatggtgggaattatctagaaatgggaggagkcatgctataaaagtcttgtctttgggtaggcaagagaggatggggtctaatgcttaaaaaagcatggacagctcttttattattattataagccagaaggaagaggatgtgggttcaaatgca

SEQ ID NO: 203822 - DNA, 361 bp, Homo sapiens
cttctgcaaggattaagtacttgtcacggattgtagagattgtctcacaattttctctgctatgactcgtgttccggagatrttgcttgtatttctggatcaagccatgggtgaactctggcccacatcctaatgctacaggggtctcagtgttccagagctgactaaattctacccagtctgagctgagcaggcagcttctggtgtatacggggagctgtgttcaagctctaatgctgcatgcaggattcatagcctgatttctcagccctacatcaactttccaagtacatatccaatttgactttcctggtaagccacgcagcctcaattccttctgaatgttattggttccctcatc

SEQ ID NO: 203823 - DNA, 560 bp, Homo sapiens
ggtaaccccttgctctggagggagactctgcttctatcttcttaggctgttcaaatacaaacatccttgaaacaatggccaagaatacagagtgtcagagcttcacttgcaaaagtgcagaaatatgagatatccttgaaggattgtgtctcagcacccatccttgctatttttgtctcctttccaccttaaagtcatttataacaaattatttcctttctctttcctaaaatacctgaacctcccttaaaatatttgaaattaggrtattccattttatattattttatataaacaaatttctaatttatattcaacaccattatcccactggcaagcattcttcatatctggttgccttagtttgaagctgcatcaagccagtatttgctctccattaattgtcccaatgacagacaacctacagcccttgcatgatgtggtccctgtctacctcactggcttcatttcctatcactcctgccttcaccctccatgcttcattgcacaggtcttcttccagttttcaaatgtgtcacactccttccagcttcagggac

SEQ ID NO: 203824 - DNA, 465 bp, Homo sapiens
acagcgacattaccaagcaactgtggattttgagcagctgggtgaagtgatgaaaacaatattgargaagaagaatcaaacatttgtgagaggagaaaatagaggcagggaaaccagccagaagatttttacagtaattgaggcatacattgaattgagccttatgtgtgtgggggctgtggaaagggaaagaaagggagcttgtttgtttgtttgtttatactttgtcttattccaaagaagtctttaaggtagttggcaagagtatatgaaatacagcagaataacacaaaagagcggcatgagaaaaaaagctaaaaacaaacatggggtaataaaatggaaccaaggccaatgcattcctaatgtggaaggcatcccactcatatacaaagtagttaaatatgggaaaaaatctatacattctagggacacaattctgctcatctgatttaatgcaggggt

SEQ ID NO: 203825 - DNA, 492 bp, Homo sapiens
atgaccaatggcagcaaaaccgccagtgtcaatcccattcaatatatttcaaaataaaaataaatatctttgtaggattgactgtaaggcaaaggcaagccgggaaataaaccttggatacattttaactagagtttataaatgtgtgtgctagtgtgacttgattatgcacacaaaatttgcatatatgaaaataaaatgtctagcacatagtaggtatgtgatatagtttaagtgaatcagtacctgattcattcagaactctgcataaagtttggataaaataggatttaagaccagacacttgctactctgtgattctaagttttgggtgcaattcacaacatagtaatagccatagccacaatttcttctactggaatgcttccaggcaacaaaagtaatggatttgttaagttacccgtggcaaaccacagcaccctgaacacctgctgaaagaaaaaawtttctagttgcaaatgtagtttgaac

SEQ ID NO: 203826 - DNA, 183 bp, Homo sapiens
cagtatttgtctgttttcagtaaatcacataggtgttctttcattgtcttgtgtttatgaaattccaattccactgtgaratattcccgaactcattttatcagctccagcttttatctgatggagagaatttgacttgatactgggagttgagaggggaaattttaatgcctagatgaatat

SEQ ID NO: 203827 - DNA, 587 bp, Homo sapiens
gacaagttttgttttcttaaatgtgaggtatgtttatgctaactttataaagagacataaaaattagttccagtttcggcagttttctcacagtatatataagatttattttagacagatattttctccagaaaaagaaaaaatgacttgttgatataaagccattttgaaggacttgccaatttaaagtgwttctcaatgattttttgggcaaattggcaacttgagcaattacttagtgaatttgatcctgatatttggacttacagacatttgtttttcagagctcatgcttgcttcattcaaataatgatacaagcaattgtttctttttttgaagtaaatccaaattttatgcaataattacatttattgagcaatgaaatcttggtcaactcagttgaacaaatatttattaaaagaactgatatgtgtaaagaacagtacaattcactattgtaggttctagaattagaatatgattttattgcatcataaggtacaactatgataatattttaaaataacaaatattaacaagaatgaaaatagatttcttttacactcaagaatttttcctgttcaag

SEQ ID NO: 203828 - DNA, 609 bp, Homo sapiens
ccttttgggccaaggcaagggatcgcttgagtccaggagttggagactagcctgggcaacatagcaagaccatctctacaacaacaaaatttgcyaggggtgatggtggcacgtgtctgtaacttcacctacttaggagactgaggtgggaggatcacttgagcctgaaatgtcaaggacacagtgacttgtgattgtgctactctactccagcctgggtggcagagcaagaccctatctccaaaaaaaaaaagaaagaaaaagaaaaagaaaaaaattgcctttaagattcatgaatgttttggtttgggttatttgtagttttgaactatgcactatgaaccttcaagcacatgtatgctggtaaatataaataagcatttctatggagtttataccagtgcatgaaataggctgtactatactatgtcttccagatctatgagatatgaccaattgttttccaaagttatcttaacagtttacaatcctaccagcaaattgtaagaactctattgatctatatcctcgccaacacttagtattattacactattggatttttgccattctggtgattcatgagttgtatcttattgtgattttcag

SEQ ID NO: 203829 - DNA, 609 bp, Homo sapiens
ccttttgggccaaggcaagggatcgcttgagtccaggagttggagactagcctgggcaacatagcaagaccatctctacaacaacaaaatttgctaggggtgatggtggcacgtgtctgtaacttcacctacttaggagactgaggtgggaggatcacttgagcctgaaatgtcaaggacacagtgacttgtgattgtgctactctactccagcctgggtggcagagcaagaccctatctccaaaaaaaaaaagaaagaaaaagaaaaagaaaaaaattgcctttaagattcatgaatgttttggtttgggttatttgtagttttgaactatgcactatgaaccttcaagcacatgtatgctggtaaatataaataagcatttctatggagtttataccagtgcatgaaataggctgtactatactatgtcttccagatctatgagatatgaccaattgttttccaaagttatcttaacagtttacaatcctaccagcaaattgtaagaactctattgatctatatcctcrccaacacttagtattattacactattggatttttgccattctggtgattcatgagttgtatcttattgtgattttcag

SEQ ID NO: 203830 - DNA, 609 bp, Homo sapiens
ccttttgggccaaggcaagggatcgcttgagtccaggagttggagactagcctgggcaacatagcaagaccatctctacaacaacaaaatttgctaggggtgatggtggcacgtgtctgtaacttcacctacttaggagactgaggtgggaggatcacttgagcctgaaatgtcaaggacacagtgacttgtgattgtgctactctactccagcctgggtggcagagcaagaccctatctccaaaaaaaaaaagaaagaaaaagaaaaagaaaaaaattgcctttaagattcatgaatgttttggtttgggttatttgtagttttgaactatgcactatgaaccttcaagcacatgtatgctggtaaatataaataagcatttctatggagtttataccagtgcatgaaataggctgtactatactatgtcttccagatctatgagatatgaccaattgttttccaaagttatcttaacagtttacaatcctaccagcaaattgtaagaactctattgatctatatcctcgccaacacttagtattattacactattggatttttgccattctggtgaytcatgagttgtatcttattgtgattttcag

SEQ ID NO: 203831 - DNA, 625 bp, Homo sapiens
ggcacagttcatagctactttcaagattaaaactaattaaaaaatctgttttaaatacattcttattatttgacactttagtgggtctaaatcatataaagacagtcaattttatttttctatacttcaatactacaaatgttagtgtagtgaatattaatacgatcaattgcaaaacatctaattcaattatatatccctttaattctgtactagatacttttacaaagttggtagagatattagagtcttgagtattctttttacctcacttttcctcttctatgtacaattatgtgtttatgtttttatcactttttgcttttttcccactattccttataaaagcaarcaataattttaaaatatatagggtcctctgtgtttaactttaatcttttcttctgcatcttaatagtaataatactacatttgaaattcagggtataatatcttaagtggtatgtctatacaatttccttaaggtaattacactgtaaaattataatacatgcattggtactacaaactacaaatagcccaaactgtattctggtttgtttatgcttattttaataatcttgcaatacattatttttatgtacaaattatttttgcttggcct

SEQ ID NO: 203832 - DNA, 523 bp, Homo sapiens
gacgtccttaacatcccttgagactctcatagagaagggttagctaagtataggctggagctacagagattatccattcttctcaagaatctggttttcagatggatgactgacaccttttgtaaaagatagggacattttgtatatatttggagaactgacacatttttaagtctctagctttgatacatttctaaattgagcttgtcttcatttaatatgccactcttaaaacagtattcaagtattgagtgttgaaatasactagcattttctctcagctctaaaatttgcatttcattcataaggtatcaacaaataaaataagtgcattcatctcttcatgaatgaaccagttaacgagttagtaattttggtaatttgcaggtgtttgctgttttaagttccatctctgtttcaattttaacatcacctagatttttctttttttcagaaatcttgttagtatcatgacaatttcaaagttctttgttgttaggtttttaagaatagtgttccatac

SEQ ID NO: 203833 - DNA, 453 bp, Homo sapiens
aaaaacaagctatagtacctactatattttaagtcttttagagttagggacagtacagtattatattattcttcatatccacaacacactcacatgaatgtctcctaaacatagcaaatacttcaataaataatcaaattgactgtgtggttacaattgcaaatattctcataatgttgagaaaatatgtgatctrtctttcataaatctactgcaccttttgtgaaccctgaccttcaccttttactgttccaaagaatcagaataaggatatttgatacatgttttaaaaatgaaataagttcattaaacacatttttaaagtaaataaaaagtaaaaataatttgtaattccataattctgaagtagccattgtcaatattgtatagcttctgtcagtagtttttaaaatgtgtgctgaagtcaagtttggaatcatgtatttattatct

SEQ ID NO: 203834 - DNA, 571 bp, Homo sapiens
ccatcactgtgtttcaagatatcctgtaagacacaacttaggaaaataagaaaaagtatcaagatgagtgtctttagtttattctcacaactttggggaaacctgagttgattaaataatgatgaaatatgtaaagtttacttaatggggtacatttgtacatgggtgttttattgatttaaatattgctataagctgtgactctaaaattttttatcaatgtttagtaattttttcttattaaacttatacaaggccttagtctcataaatttagaaagcatttgagccatgtttatatattagtacatttttccagtgtttgaaggaaatgtcttctctttagtatactaggatgtttattaagcgatggcttcatgtaatacaaagattaatataatttgtaaaattaaatatcttggtcatttactcccatatttctggcacttgtaatkaaagaaaatgcatagtccttccttccccacaatacatcatttgcttgtcaagaagtatttttcactataaacaaatattactataaacaaaataccttgaatttatatttaagaaaa

SEQ ID NO: 203835 - DNA, 614 bp, Homo sapiens
ctttttaatttttcttttgtttcaagaatatttgcaactgctgttgaagcatttttatcatggctgctttaaaatttttgtcaggtaattctaatatctctgtattgttggtgttgacagctattgattgatctttttcaattagtggagacctttagggttcttgatcacaagtgacttttaaatttaaatctgaacaattaataatatgttagagacyatgaatcttacttaaatctttcattttcagcttattttctgtgacaccaatagagcttgggaaggggatgtactctttcatcacttccagaaggaggtgaaagagtagattcccaactgagcctccattgacaccccaagagattgtcatcgttactgctaggtagggataagagttttaacttctcataagatcaccactgacattgacacaggggttattaccactgggtaatggtaaaagtcatgaatccctactaggcttcttctgacaccactcctttgaggagtggaaagagtagtttgttatgttgagtgaatgttgaagtttaatctctccacatttttttctgttgacacctctggtgatgaggtcttactgctgactattgggg

SEQ ID NO: 203836 - DNA, 546 bp, Homo sapiens
ctggagattacaattaatattttaacttaaaacaatttagttcagattggtatcaattttatttcaattgtatacaaaaatattctttctgcatagctctatatgttccttctccattgtgttattatcgtatagatttgagttactatctactgccctttcatttcaatctgaagaatttcctatattttttcctagggcagatctacaagctatgaatgctcttaatttttgtttatctaggattgtcttaatatctccttcattcttaaatggtagtttagctttcagcctttttcttttggtattttggatatgttgtcctactgccttctagtctccatggtttctgcagcgaagtcaggtagtcatcttcctgaagatcccttgtatatgatgaccaggttttctcttgatattttcagaattctctttggatttggctttcagcagctttactgtaatgtgtccatgtgtatatctttacgataacactactgaagatttttgaggaygcgtaggttaatactttttctcaaattataa

SEQ ID NO: 203837 - DNA, 545 bp, Homo sapiens
aaatacaaaaactagtcaggcgtggtggcacgcacccgtattcccagctactatggaggctgaagcaggaaaatcacttgaacccaggaggcataggttgcagtgagctgaaatggcaccactgcactccagcatgggcgacagagccagaccctgtctcaaaaaaaaaggtaactttagttgttttcctcttcttatctataaaatagtgatagccatatcagtccttcttaactcatagacacttttaaaagtgataaaattactgtatgtactatcaattcaaagaggcataggcgtatttcatgagaatttgttgcttgtttcaatgattttaaaaaaacacaatcttggagatatagtttcaaattttacctgtttatattaaaggagataaaaatgatggctgtgtgtattttcacaagtgtgtgtgttttattggaaaagaatagatagattccagttccatttgatggcatactgtgtattttggaccacaacctccacataaaacaatttttmaaactagacaaaatatatcaagt

SEQ ID NO: 203838 - DNA, 501 bp, Homo sapiens
ggtctctcagggctttcaactttctacctaaaccacatttacccaaccaggctcgaccacttttttgctcaggagagattctgctctgaagrcttaaggggattaggcataaaactagagcgagtgtgctttctgagccaggcacatcacatcgagagaacaaagggcttttcaggcccaattaacaactgatcccactagcaggcaatgagatccagtgactagaagtctcctccctctctcaccaaacacctttcctggagaagtgtgacaggaacagaggagagagaacggagtaagtgttcactcccatattgctcccttgagagcatagagaggttccccatcctccagacaggatgtaggatgaggatatagaatgagtgagaaccctcatcaccctgctggggaggagtggtcaatgcagctggcctgtgaaccactcactgccttctctgctgagggtgaggtcttgtggggaagagaaagaaagcaggtggt

SEQ ID NO: 203839 - DNA, 501 bp, Homo sapiens
ggtctctcagggctttcaactttctacctaaaccacatttacccaaccaggctcgaccacttttttgctcaggagagattctgctctgaaggcttaaggggattaggcataaaactagagcgagtgtgctttctgagccaggcacatcacatcgagagaacaaagggcttttcaggcccaattaacaactgatcccactagcaggcaatgagatccagtgactagaagtctcctccctctctcaccaaacacctttcctggagaagtgtgacaggaacagaggagagagaacggagtaagtgttcactcccatattgctcccttgagagcatagagaggttccccatcctccagacaggatgtaggatgaggatatagratgagtgagaaccctcatcaccctgctggggaggagtggtcaatgcagctggcctgtgaaccactcactgccttctctgctgagggtgaggtcttgtggggaagagaaagaaagcaggtggt

SEQ ID NO: 203840 - DNA, 566 bp, Homo sapiens
tgaacagattttgggactaccagctgcaggaaggagctatccacttcaggtctccttgactgttcagaacaaccttcctgcagaaaagagcttataaaaacttctttccacctctttgaaaatacctgtacactcctgttaagccataactttacttaaggcttattggttttacctgtgaggttgcttttggtagcatttgaaagccagaaatatcagccattcagcctggctaaagtcaagtaatgagattaaaaaggatttttttttttttataagagcactagggttagaagtcagcttaattaaacgtggatattcaagttctaccaacctgggattccttgggaaaagcagaggagatgctacagaccccattttgggaaaacctctgttttcctcatgaaaccccaggagttagaaatggatagatccatctcaaaattgaaggctcttttctgttttgcattgygttatctgatttttgacttttggtgatatcagaaattactttgcattatgagagagttttgctgtgtaataactgtagaaaatatactttgggc

SEQ ID NO: 203841 - DNA, 568 bp, Homo sapiens
aatggatcaaagaaaaagtcctgaaggaaattataaaatagttagagatgaataaaagtaaaaacataccacaacttttgtaagacaacaaaagcactgctaaaggggaaatttatttctaaaaatgcttacgttaaaagaaagaaatttcaaataacaacctagctttgcaatgtaaggaactaaaaaacaaacaacaaactaaacccagtgctagcaggagggaggaaataataaatattagacagaaacaaagaaatagagaattgaaaaaggagaaaatctataaaaccwaaagttggttctttgaaaagtttaagaactctgaaaaacctttagcagtatagagtaagaaaaaagagagaagactcaaattacaaaaaaaaaaaaaaaagggaagaaactggggacagtattaatgattctacacaaataaaaaaaggtttatatgagtactataaacaatgtacagcaacaagttggataacctagatgaaatgaataaattcctagaagcacaaaaccaaacaagactaaatcatgaagaaataggaaatctaaataaaga

SEQ ID NO: 203842 - DNA, 570 bp, Homo sapiens
taagaatttaaaaagcgaataggtgatagtgtgttatcaacaccagtaaactttcatgcataaaacttcaggtattcgaattagtttctagaaatgttctattggctaaatgcatgttaaaatgatttaatacgtacacagacaagtatcaacgatgtgaccataacagctcaacattttaagctaccacaactaattctcatctttatgtgaaaaaaaagcataagagaaggatattaatcagtagcttcttacccataaactggaatgarttagctatttgaaatataaactgggttcctctattttctggttgcacctactccagagaaaagcaatgagtcattttgagggttccccaagtccaagttcaggtagctttgtctgttgggaagcatagggcagttagatagggagaaggagaagcttcaatttcagatcttttccttctggtgattatctttttgggtagatgataatgtttttctgagtgggtgcaaaactcccttttgatttgtcagcttaagtatcatttactgaagtaaaacctctaatttccacactagtttt

SEQ ID NO: 203843 - DNA, 474 bp, Homo sapiens
gttaattatatatgtataacaaaatttagataaagattacagaatagctaaatctttttatttaagaaaagaactgttaaatagaaaacacctatcttaaatgaatctccaaaagttttattttacattttagccrctccactgcaaagaatatttggattaagactatacctgtgtcctgttaatgtccagaaaaatgtgcattagctggtggctcaaatcttccctagtatgtgcacttgcttgttaacattctgcaattgaggtagttaatgctacagttagctccaagcaggtgtgtacattgttaacagtactctttcaaaacaagggcctttggcaaactaagtggtctgcccatgttaaattaggccataaagtgaaattgggctgttttacattttgagataatttcccacttagttctgattatcttgcataagcactattcaatgtttgttcatagacatgatg

SEQ ID NO: 203844 - DNA, 474 bp, Homo sapiens
gttaattatatatgtataacaaaatttagataaagattacagaatagctaaatctttttatttaagaaaagaactgttaaatagaaaacacctatcttaaatgaatctccaaaagttttattttacattttagccgctccactgcaaagaatatttggattaagactatamctgtgtcctgttaatgtccagaaaaatgtgcattagctggtggctcaaatcttccctagtatgtgcacttgcttgttaacattctgcaattgaggtagttaatgctacagttagctccaagcaggtgtgtacattgttaacagtactctttcaaaacaagggcctttggcaaactaagtggtctgcccatgttaaattaggccataaagtgaaattgggctgttttacattttgagataatttcccacttagttctgattatcttgcataagcactattcaatgtttgttcatagacatgatg

SEQ ID NO: 203845 - DNA, 489 bp, Homo sapiens
caggtgcaccactaggcccagctgatttattttttgcagagatggtgtcttgctatgttgcccaggctggtcttgaactcctggcttcaagtgctgattctcctgtcttggcttcccaaagtgctgggattacaggtgagagccaccatgcctagccatctacaagcgttaacatagtctatctagaagttctccttaatacaaccttgtttycccttctcacataaaagctgtctgaatatatattttgttcagggtttctgcagaactcaaatttatattcagggtgaagctggagagggtctgagatttgactttgtctcttttctgatacttcaatatcctgattggtataattaagaaaatattccatatagttttaagaagattaattgaaatatgtttaagggatttttagccacaaatacaaactgtaactgatagtattatctgaaagttgaatggaattgaatcattttggttgggtat

SEQ ID NO: 203846 - DNA, 574 bp, Homo sapiens
tgaacatacaaattgtagcacaaaattacaagctatacaaataatgcactgtaaaatttaaagaaacgacaaaaaaattggacatataagacttttagatattaaattgatctgaaattgaatatataataaatatattaacaggctgggtgtggtggctcatacctgtaatcccagcactttgggaagctgagccaggttgatcactggaggtcaggaatttgagaccagcctggccaacatggtgaaaccctatctcaactgaaaatacaaaaaattagctgagcatggtgctgcgtgcctgtaattccagctactcaggaggctgaggcacaagaatcacttgaaccccggaggcagatgttgcagtgagcccgygccactgcattccagcctgggtaatggagtgagactctgtctcaaaataaataaataagtaaataaaaatatataaattattgtatacatattaattaacatgtttaaataaatgaagagacttgaaaatatcaaggaatgaaatatttttaaatagccaaaaaaatttgaaaagaagcaaatataccttctatag

SEQ ID NO: 203847 - DNA, 404 bp, Homo sapiens
gctatctaatagacacagggatggaagaaaggtggatgagtggagagagagatacgcattcataaatattatacctaagcaaaaacaaataatacattaagaatatgttctgttagggagttatctgttggattctaatagcatatactctttcacttccaaatagtcctcacaaaatgtcatctcctgacaaatgcagtcatttgcatctcatgtttatttcaaatggtgacagacactaaaatatactcttcaatgccccaaattaaatgagagtattttaacctttacaamtaatcagtaatagcaaattgtttagatactttagtagtgacatagtgacaatgagaatacttattttttttcttttttttctcttttttttctctttctcctttttacta

SEQ ID NO: 203848 - DNA, 580 bp, Homo sapiens
agccaggggcagtggttcatgcctgtaatcccagcactttgagaggccacgatgggcagatcacctgaggttaggagtttgagagcagcctggccaacatggtaaaactccgtctctactaaaaatatgaaaaaaaaaaaaatagctgggcatgatggcatgcacctgtggtcccatctacttggaaggataagtcaggagaatcacttsaacccatgaggcagaggttgcaacctatgagctgagattgtgccactgcactccaacatgggcgacagagtgagactccttctcaaaatgtgtatatagacagcttaatatgtggatctgagttctttacatttggaaaagaaatgaatttatatcctctaaaacatctgaaatttaattttcataaagtttcctcctctgagtaaaataatgtgagactgtccttgcatctgttctcactcttcctggtctccttgggtgacttcagccaaatcctatcacttatataatgctgcttttctgagatatttgtctctacctttctcttgagattcaagtctgagtatcctactttatttgttggtcacta

SEQ ID NO: 203849 - DNA, 580 bp, Homo sapiens
agccaggggcagtggttcatgcctgtaatcccagcactttgagaggccacgatgggcagatcacctgaggttaggagtttgagagcagcctggccaacatggtaaaactccgtctctactaaaaatatgaaaaaaaaaaaaatagctgggcatgatggcatgcacctgtggtcccatctacttggaaggataagtcaggagaatcacttgaacccatgaggcagaggttgcaacctatgagctgagattgtgccactgcactccaacatgggcgacagagtgagactccttctcaaaatgtgtatatagacagcttaatatgtggatctgagttctttacatttggaaaagaaatgaatttatatcctctaaaacatctgaaatttaattttcataaagtttcctcctctgagtaaaataatgtgagactgtccttgcatctgttstcactcttcctggtctccttgggtgacttcagccaaatcctatcacttatataatgctgcttttctgagatatttgtctctacctttctcttgagattcaagtctgagtatcctactttatttgttggtcacta

SEQ ID NO: 203850 - DNA, 490 bp, Homo sapiens
ataaataagatactttaaatatatactactttaattcttattatcttcaataaggcaaggcaataagtatagattttctacttctctcttttttttttttttttttttttccaaacaaagtatcactcttgtcgtccagcctggaragtgcaatggcatgatctcaagagtctcactgcaacttccgcctcccgggttcaagcaattctcctgcctcagcctcccgagtagctgggattataggcacatgccaccacgcccagctaattttggtattttcagtagagacggggctttgccatgttggccaggctggtctcgaactcctgacctcaggagatccgcctgcctcagcctcccaaagtgctgggattataggagtgagccactgtgatcggctgagattttctgcttcttcaatgcaagttattaagtggaataagttttcaaatattaaacaaaaacacttttgcaatttcagaggaaacta

SEQ ID NO: 203851 - DNA, 490 bp, Homo sapiens
ggctaattataaataagatactttaaatatatactactttaattcttattatcttcaataaggcaaggcaataagtatagattttctacttctctcttttttttttttttttttttttccaaacaaagtatcactcttgtcgtccagcctggaaagtgcaatggcatgatctcaagagtctcactgcaacttccgcctcccgggttcaagcaattctcctgcctcagcctcccgagtagctgggattataggcacatgccaccacgcccagctaattttggtattttcagtagagacggggctttgccatgttggccaggctggtctcgaactcctgacctcaggagatccgcctgcctcagcctcccaaagtgctgggattataggagtgagccactgkgatcggctgagattttctgcttcttcaatgcaagttattaagtggaataagttttcaaatattaaacaaaaacacttttgcaatttcaga

SEQ ID NO: 203852 - DNA, 490 bp, Homo sapiens
ggctaattataaataagatactttaaatatatactactttaattcttattatcttcaataaggcaaggcaataagtatagattttctacttctctcttttttttttttttttttttttccaaacaaagtatcactcttgtcgtccagcctggaaagtgcaatggcatgatctcaagagtctcactgcaacttccgcctcccgggttcaagcaattctcctgcctcagcctcccgagtagctgggattataggcacatgccaccacgcccagctaattttggtattttcagtagagacggggctttgccatgttggccaggctggtctcgaactcctgacctcaggagatccgcctgcctcagcctcccaaagtgctgggattataggagtgagccactgtgatcggctgarattttctgcttcttcaatgcaagttattaagtggaataagttttcaaatattaaacaaaaacacttttgcaatttcaga

SEQ ID NO: 203853 - DNA, 439 bp, Homo sapiens
ggtgattcatacataactaatctgttagcccaaacaaatacctccacttaaaaaaaaattagtatttagcctcatgaaattcacaatacgtaagaaaccaattaaaactcattagatatgtaaaaatgtaaaatataacccacaaaacagtagaacaaataatagagtttttaaaaaatctacaattataaaataggccaacaaggactttataataaatgctgtgtcatctcacttacattggaaacctttaaaaaaatttaaaaaatttgaactcatagcaacaaagagtataatggtgattaccagggatgaggatatgggagcaaaagggagacattggacaaaggatagaaacctttagttataagatgagtaagtattggaaayctaatgcagtgcgtggtgattataagtaataataatgtattttacactt

SEQ ID NO: 203854 - DNA, 387 bp, Homo sapiens
aattcacatagacattgcaaaacagatttcctttggaaaagcaactctatagtatacctggaaacaactacactatatatgaataacacagaaatttagtctcctaaaatctattttctcacttgctttttaattacttgacaaatgtatgatatcaccaaatgttattttattttaaactattggcaatsatatgatatcacccaaaatgtttatttggtggcaaatggtaccagaaaagggttaagattatctctctgatattcaatttttagctaataggataaaaacactttatgtgaaacaatatgttaataacaaacaacggacaccaattcataacctttcactctaagtagatttagaggtaatgcatagaatatttca

SEQ ID NO: 203855 - DNA, 458 bp, Homo sapiens
catttaggaataattttgscatgaaaaattaagtcagattttgtgtatgtcataaataacaatgtaatattgtatttatatataactttcatctaaggaatgccaaagcaatttgaggtttgaatgtatacttttgaaacacaaggaaagaaagctacccaccttccttccattagcatttatattgagaacccaacagagtttggctaacacgaagattgaacaccaattacaagttcgctggtttccatagagtcgcatgagagcatatcatgttgtcttggaaacaaaagtgtctgtaaacaccatcatttccaatctagattgtgagagcagctatggacactttcttggattccaaactgtacaaactgtatgttcatattcccattaccatggtaacaaggaccagtgtccattaaacaagatgaaaaagatgaatctttgactctttgaaa

SEQ ID NO: 203856 - DNA, 391 bp, Homo sapiens
atttagtttgtttggtaaggtcatgtttccttggatgttcttttttaaaaattttattttattttattttttagagccagagtcttgttctatcacccatgctagagtacagtggcatgatcattgctcactgtaactttgaactcctaagcaaaagtgatcctgttatctcaacctcctgaatagctagaactacaagcaggcascaacatgcctgactaactttttactttgatttgttatagagatgggggtctctctgtgttgcccaggctggtcttgaacttttggcctcatgagttcccatcttggtctccaaaagtgctgggattacagttgtgagccactgtacccagcactgggtattcttaatgcttatggatgctcactg

SEQ ID NO: 203857 - DNA, 583 bp, Homo sapiens
gaattacaaggcaggttaaactcctagcctcacaaggtatctactgttaaagtgagagcagtgcttgggacataacaggatcctgtaagttgagatggaaatgtatgaaatgaccctgatgaagatgggaacaccragcccttaaattctgatgagcattgtctgacagtaacatgggcctccccaaccccagtgaaagtggcttccccacaccggcagaaataatctaaaatagaataactctatctttaaaacataatctaaatgccattttcacataaaaaatttgtaacaatttattaatatcatctattactcagtcttgaagctttcaattatctcataaaaattacagatttggtttttacagttaattgtatttctttaatcaagctccaaatatggtcacaatctttagtcttcctttgcattttttgtttgtcattcttattacatatttgttgaagaaacagggatgttttgacacggtttaccacaatctgtattttgctgattatatcttctagtgtagtgttcctctgtgttctctatttctataatttgatatttggatttagactgt

SEQ ID NO: 203858 - DNA, 572 bp, Homo sapiens
agcaaaagttcatatactttgataatctatagttaaagctcatcttataggagtgtggtatgaatgaagtacttaattagtatatagtattactatatgaattgagtcagcatgttttatagtaatgaggagctcagaaaaactgtaaatatgacatgagaggatattttcattattacatattgaaccttagagttggaccatcttgacatgtcttaacatgtaaattcaataaactgctttataacctttttcaggtatgatttgaatttaaaaatatatgtgtatatataatacatatatatataaattaagtatatatttattaataattagcatacaaagaatggtttcttgctctttaatattgtggcaaggtctatamacttttgcataggaaaaataatatatataaatgaatatgttttaaaataacagatttatgtataaactttaaagtaaagcacacttttttcttttaagtttttctagtatttaatgaatacagaaaaacatggctgtgtatttaatgcttatagttaaattgttttcaatgtgatcttaagccatca

SEQ ID NO: 203859 - DNA, 572 bp, Homo sapiens
agcaaaagttcatatactttgataatctatagttaaagctcatcttataggagtgtggtatgaatgaagtacttaattagtatatagtattactatatgaattgagtcagcatgttttatagtaatgaggagctcagaaaaactgtaaatatgacatgagaggatattttcattattacatattgaaccttagagttggaccatcttgacatgtcttaacatgtaaattcaataaactgctttataacctttttcaggtatgatttgaatttaaaaatatatgtgtatatataatacatatatatataaattaagtatatatttattaataattagcatacaaagaatggtttcttgctctttaatattgtggcaaggtctataaacttttgcataggaaaaataatatatataaatgaatatgttttaaaataacagatttatgtataaactttaaagtaaagcacacttttttcttttaagtttttctagtatttaatgaatacagaaaaacatggckgtgtatttaatgcttatagttaaattgttttcaatgtgatcttaagccatca

SEQ ID NO: 203860 - DNA, 490 bp, Homo sapiens
tttatcatggtggagcaggagagagagccaagggggaagtgtcacacactgctaaatcatcagatctcaaaaatcactcactatcaggagaacagcaagggagaaatccatccccatgatcaaatcacctcccaccaggtccttcccccaacattgggaattacaattcarcatgagatttggatgggaacacagagccaaaccatatcaatgacatattacagtgaaagactacaaattaaaatcaacaaagggaaaaatgcatagggaggaacccaaaagaaaccaggcacaagcttccctttgccctctccccagtggagttataagaacagtgcttaattctctcagcagtgatctgtgacaacatatgtgaagtgttataagacgggaaactcacccgagccttggcatctagggattttattgggagtcaattacacggggatgtaatacagcctcccaggggtaaatttggatacagagtgtc

SEQ ID NO: 203861 - DNA, 578 bp, Homo sapiens
aatttcccattgaactgaaaaaatgtgatttacacagtctgcttcttactggtggatatttgaattatttcttatttgtaatcttcttaacaaagatataatgttcattttttaaaacttgaacaagtatttctataagataaattctaggaggggaatttatagaaatacttgaggtgagaaagtatacacacacttaaaactgtagttcatattaccaagttattctccaaaatgttataccaatttatattcaaaccagaagtttatgagtatatttgtttctccacatcctcacaaaatactggtgacacaagcttcaagaatggtcaatctgagaggtgaagaattgtatctccttattgtttagtttaaatatttctaactattagtgaaattgraaaccttttcacttttagtgacattatagtgatgttacgtttcttccaagaatttctagcttatgtctcttgccatttttcaattgtggtgcttgtaccatatttattattgatttataagacccctttgtagatgaggtaaaccagtcttttgtctttaatctgtgttgcagtttt

SEQ ID NO: 203862 - DNA, 602 bp, Homo sapiens
tcagtatgatgttagctgtaggtctgtcatatatagcctttattgtgttgagatacatacctacaacacatttgttgagagyttttatcatgaagagatgttggattttgtcaaatgctttttctgcatctattaaaattatcacatagtttttgtctttctgttaatgtggtatatcacatttattgatttgcattttagactatccttgcacccacaggatgaatattacctgattagagtgaatgatctttttaatgtgctgttgaattcagtttgctaatatcttgttgggaatttttgcatctatgttcatcagggatagcaaagggaaaggcatcaagattagaaatagagaaataaaactgatatttatttgcaaattaaataattatcagtgtaaaaaatcaaaaagaatctaaagaaaacttctagaactaataaataaatttagcaaggtaaggatatgaggtcaaaatacaaaaagtcaactgtttttctgtatactagcaccagacaattgaaaagagcaatttaaaaatcaatgccatttacaagagttcaaaaatcaagacattgtagtattaaaataatgatgaaca

SEQ ID NO: 203863 - DNA, 568 bp, Homo sapiens
taatcgtaaattatattcatgatttttgctaaatgagtagattatggctggtttctggggagggctcagggcaccacagggccactataatgagatgatagatatgttaatttgcttcactacagtaaccattgccacataacattttggtcaaccatgtgtatgatggtgatcccataagattataatgccacatttttactgtaccttttctatgtttagatatgcaaataccattgtgtttcaactgtctatagtatacagcacagtaacatgctctacaggttcgcagcctatragcaataggttataccatatatcctaggtgtgtactaggctataccatctaggtttgtgtaagtacactctatgatgtccatataatgacaaaatcacctaattgatgcatttctcagtacaaatctctgtcattaagcgatgcattactgtatatgtatttcataacatcatgttgtgcaccttcaatatatacaataaaaatttgttaaatgtacagctaatcctgactttaaagaattcttagcttattatatatgaacagcaacta

SEQ ID NO: 203864 - DNA, 442 bp, Homo sapiens
tgacagatagtttgcgaagtggccacaattattcccttccctgtatccatacccatgtgtaatgcatcctcccagctggaccgaatttgtgactaagtttgatctatataatgcagctgaagtgatgtggaccaactctaagcctgagctgcaagagacctttcatgctttctatattggtttgctggggctgctgtaacaaaatatcatagactgggtagcttaaaaaacagaaacatatgtcctcatgtttctgaagcctgggagtccaagatcaagttgtcagcaggttcartttgttctgaggcttctctcttcttgtcttgcagatggctgccttcctgctgtgtcctcacatggtcttttctgtgtgtttgcatgccccgggtgtctctctgtgtgctcagatttcttcttcttatactctgacactagtcagatt

SEQ ID NO: 203865 - DNA, 572 bp, Homo sapiens
gacttgctcgatgcagggatgccacaaaasttctatttgtaaaaacaacaacaagagaaaaacaaacaaaaataccccacaatctctgcaaaacacaataaattgaagtgtaacaaagtgagggttgcctgtattttaatggtattcctcacacctctttctattgtatcttcaatgtctttttctctattaaattttttctcactagcataacatgctctcatcactttctaagaaaatcatatttttatacatttactgcctcgatcctcttattcacaaacttttgggagtgttttttcactcttgtctctcattcactcctttgcccactcttaccttcatcctctctgacctaaaactgctccaataaactgctacccttgaagaaaattttatttttgctaaatctagtgaacactttacacttgccctctcagcaccttttgttgcaaacatatttttaagtttacacatatagcacacatagtttaaaaagcacagattttaagtgctttttaagaagcagagtttatattgctcaaaaaagttttacaaactgaatacaccag

SEQ ID NO: 203866 - DNA, 544 bp, Homo sapiens
gaattctgtacacaccttgttaaaataactcatcttttaagccacttcacaatattttgttgccttttcacaacttactattcttggtctgattcagtatgtaagtgctgaatcaaactgctccttcgggtcatcatttccttatgagggctcacaggctacataaatcttgtagtaaataaatttgcttgtttttctcctgttgatctatcttatgtcaatttaattcttggactcaaccagaacccaaagggatggaaatggggttttgtctcccctcactatccacttgaacctctggtgacagttgaggcttagtggtgtcaacagttggaaagtaatgatgttgacaaagaaatgtgaggggtgaggaagtatgttaacaacgcccttcaccataccacrtctacctgaccatatttctttatcagagaaaaaaaggttccttgcccagtttcccaaccagtcagtaacaggaccggaacctaggttttctgattcctggtctcatgctgtttccattgcattgcttctgatgagtctt

SEQ ID NO: 203867 - DNA, 542 bp, Homo sapiens
aaaataactcatcttttaagccacttcacaatattttgttgccttttcacaacttactattcttggtctgattcagtatgtaagtgctgaatcaaactgctccttcgggtcatcatttccttatgagggctcacaggctacataaatcttgtagtaaataaatttgcttgtttttctcctgttgatctatcttatgtcaatttaattcttggactcaaccagaacccaaagggatggaaatggggttttgtctcccctcactatccacttgaacctctggtgacagttgaggcttagtggtgtcaacagttggaaagtaatgatgttgacaaagaaatgtgaggggtgaggaagtatgttaacaacgcccttcaccataccacatctacctgaccawatttctttatcagagaaaaaaaggttccttgcccagtttcccaaccagtcagtaacaggaccggaacctaggttttctgattcctggtctcatgctgtttccattgcattgcttctgatgagtcttctataattggattgaattc

SEQ ID NO: 203868 - DNA, 542 bp, Homo sapiens
aaaataactcatcttttaagccacttcacaatattttgttgccttttcacaacttactattcttggtctgattcagtatgtaagtgctgaatcaaactgctccttcgggtcatcatttccttatgagggctcacaggctacataaatcttgtagtaaataaatttgcttgtttttctcctgttgatctatcttatgtcaatttaattcttggactcaaccagaacccaaagggatggaaatggggttttgtctcccctcactatccacttgaacctctggtgacagttgaggcttagtggtgtcaacagttggaaagtaatgatgttgacaaagaaatgtgaggggtgaggaagtatgttaacaacgcccttcaccataccacatctacctgaccatatttctttatcagagaaaaaaaggttccttgcccagtttcccaaccagtcagtaacaggaccggaacctaggtttyctgattcctggtctcatgctgtttccattgcattgcttctgatgagtcttctataattggattgaattc

SEQ ID NO: 203869 - DNA, 527 bp, Homo sapiens
ttaagccacttcacaatattttgttgccttttcacaacttactattcttggtctgattcagtatgtaagtgctgaatcaaactgctccttcgggtcatcatttccttatgagggctcacaggctacataaatcttgtagtaaataaatttgcttgtttttctcctgttgatctatcttatgtcaatttaattcttggactcaaccagaacccaaagggatggaaatggggttttgtctcccctcactatccacttgaacctctggtgacagttgaggcttagtggtgtcaacagttggaaagtaatgatgttgacaaagaaatgtgaggggtgaggaagtatgttaacaacgcccttcaccataccacatctacctgaccatatttctttatcagagaaaaaaaggttccttgcccagtttcccaaccagtcagtaacaggaccggaacctaggttttmtgattcctggtctcatgctgtttccattgcattgcttctgatgagtcttctataattggattgaattc

SEQ ID NO: 203870 - DNA, 421 bp, Homo sapiens
tcctgtgctgtagaaaattcatgaacaaataaatatattcatgcaaatagctcccacctcaacgatgagtttgtargaaggtgttttttccttaaattaacctgcattttaaagcaagtgctccccaactgggaaatctggcagaattagtgagtaggaatgacctttattcagactgtaatccgtacatataattgatgacagcctccaaaaagatactaacattctgacctggtactattacatttcaaggtaatttgtgtcataatggttcatttgaaaacaagtacaagcaagttaatgcagcactgaatataatcacttgttcacattctcaggatctaaaagaaatggaacaggcttttaaaaaatcaatacacaaggctgaacttaatggatttttcactggaacctgctctgc

SEQ ID NO: 203871 - DNA, 611 bp, Homo sapiens
atattaggtctgtactaggttacttagtgggattactacattttttaatgatataagcaagatgcaaagaagtatgttattccggttttttaaagcaatggtacacagtccttttactcaagtttattaatgatgatatgaacagggagaaatttaagaaagaatacacccaagcagttaaacttagttatctgtgtatggtggtgtaaggaataakgttaaagaaggagaggaatgtaatgtttttttaaagacagtgcaaaaaaacataacgtctaatttggccctaaattaagattaacaactgagagaaagctccctagaccagcagagactaagtaaaaagagagtagttatttcaagggtgatgatgaattcttcattcatacattctgtgcaaaatgaaggtcaggaggcctttcctgaaattccttctaatggtcctgaaagggccaatcctcatgggaaagagatactaagctctcaagtatctgtctccccaactttttagtctaatatacctttttcccaatcacagttttctgaatgacactttttctgtgtaccattctcttctccaccctgcatgaaaaatgtacaacctagattta

SEQ ID NO: 203872 - DNA, 486 bp, Homo sapiens
tccaaattatcacatcattagcagcagcagtaccactagcagcataacaactgtcatttatttagtaataaccgtgtgtcagacccaaggctaaagactttcattttatatcatttaacagtgacatgtcctatgataggtaatattatcctcatttcacagatgggaaaactgaagctgaaagtctcagtattttgcactaggtcacacagataacaagtgacaagagtgcaacctcatgacactatgctttgcaaataagggcactgaggcgaagagagaccagaatcaatgttctggacacagtaagtgacaaatttgaaatcaggtctgtctgactagttaaagaacatgttctttctrttatatattttccatgcaattttttttcctcacaccttctgaggtttaggaaaaggaaataaaatttgtgaattaatgtgttttgaattattatggaagattcccattataggaataggcata

SEQ ID NO: 203873 - DNA, 465 bp, Homo sapiens
ttaagtgtgcctatgaatcatcccactgcctatttctgctcccaggatttatgagrtaatatgggattgagagtgcagattctagagtcaaactggatttgggctttggtcctgccacttactgtcagagtattttggggtgaattgcttagtcattcttgccccaattttcccatctgtaaaatggggataattctagtatctactttatttggatgttttggggcttaagtgagttcctatttatagagcactttgaacagcgcctagcacattataagtgctccaatattagttacatttattattactctcttttgttttttttttttggtggtggctgaggatcttgtctactcactgtcttgacagtcaattccattattacagtgaatcttttctctggtacagttctacctacaccataggttgcataaattttaaaaaaattctaatttatgagca

SEQ ID NO: 203874 - DNA, 465 bp, Homo sapiens
ttaagtgtgcctatgaatcatcccactgcctatttctgctcccaggatttatgagataatatgggwttgagagtgcagattctagagtcaaactggatttgggctttggtcctgccacttactgtcagagtattttggggtgaattgcttagtcattcttgccccaattttcccatctgtaaaatggggataattctagtatctactttatttggatgttttggggcttaagtgagttcctatttatagagcactttgaacagcgcctagcacattataagtgctccaatattagttacatttattattactctcttttgttttttttttttggtggtggctgaggatcttgtctactcactgtcttgacagtcaattccattattacagtgaatcttttctctggtacagttctacctacaccataggttgcataaattttaaaaaaattctaatttatgagca

SEQ ID NO: 203875 - DNA, 566 bp, Homo sapiens
ggactttcttatacttactttacaatttaatatgattattatttaaattacccatgagaaaggtggatacatcatattacagtgttaagacttctaaaggcattaacctggccctcatgagctaaatgccaacctgctattaagataaaagtaaatgaggtgctttgtacttatgccgaatcccaggctgtaatcagcagaaacaaatagaaaatctgctccaatgtgctcttgtcctaagctcctcagtagaaggaaactggaagatagaaaagccacactctatttatgaagtcttataataagagctgttaagttgagtagggtcagggttgctgcttacagtacaaattatgtattgcacaacctctgtggcttcgtttacctggtagtcattgttgatgtgtagagttgtaatgtagtttataggcagaatggaataacatgacttgaggaagtagtgcttytgtataattggcacaaaattgccatactggctactcattgtaggttgggtagggagaaaactcatgctaaagttgaccaggtgacattttttggctaaa

SEQ ID NO: 203876 - DNA, 563 bp, Homo sapiens
tcctcttaaattttaagaaagtttacctttgataaattccaaataactactgaaaaaaactctcccatggaccaacagaatctctgcatatatgagtgaaaaacacatacaaagcaattcttattccagagacacatgttgcaggagaacagactggccatgatttgctttatggcctttgatattatctattgatatgctacagagggagatgaaataccatgtcccttcttatcctaaacatagacctccaccaactccatytctttcatcagctcaacatagttttagcagctgtttcacataaaacagtattcagcacttacagtctttagcttatgcaaacttcattacattttctttccatatagttcacttttctaagcccaaattgttttgttccttatatgcttttttgagagaaaacaaatgaactattaatttaacacccaacattatgacagaccgtacaacgtttttcgggtataatcaaattcggtaacatttagtgtagcttatcgcaataggaagtaacctgcgagactactgtttgcttgtcggtt

SEQ ID NO: 203877 - DNA, 483 bp, Homo sapiens
ttccataatctttcttaaagacactagcgctggggagcaccctccaaattatcttattttatccactgtgacagacagatgttatcctttctgattatgccttcagacaaacagaattttcagaagtaaaaacatttcaattcttgccccttggcacaactgggcaaatggaagaccataaagtttcagtactttcccaaagttccagacaagtgacagggcataaattaaaaccttgtgcaaggactatggtatttactttataccmtgtgtcctcccatcccataaggttgtgtccataaccccaaatttttgtaaaccagccctatgttgaaaagaaactatatttcacagagatttataaaaatacagcacaatgataaaatggacagtgatgcagttggcattgccttagcagttatgaatttatctgacagcacccttaatagacaaggatttctatgacgacctttaatttttgca

SEQ ID NO: 203878 - DNA, 604 bp, Homo sapiens
agccacattctcagaaataggctaaagagcctccgagaagctgacagcagctcctagacttcccagaccctttctacaagaacctggtgattgcaatgcaaatgggtcatagatgagaaataaatgyagtgtagtgtctggtagctccactggtcatagaataataggtggttttcttttatgtctccttccgccacccaaatttactctctctgaggaaaataatcactaaacatttgaggaaatctcattagcttggagccagaggacctgcattctagccctgcctctagaaattgctatttgtatcatagggactgcccgggtgatgtttctgaacccccatcaactctcttgatgtataaaatgaagaaaaagtctactcttcaaagtaaatagtctgtatgacatcgttctgcaaattcgaccatgccaaacacgttattattataattattatacttacatgattgctattcccttcatgaggtgtgaggggaacatattttagtccccgttctcaaggagttatgaccttgaactggataaagtcacgtgatacaatggatgaagagatgaaatctaaccccattttaaatgcatc

SEQ ID NO: 203879 - DNA, 604 bp, Homo sapiens
agccacattctcagaaataggctaaagagcctccgagaagctgacagcagctcctagacttcccagaccctttctacaagaacctggtgattgcaatgcaaatgggtcatagatgagaaataaatgtagtgtagtgtctggtagctccactggtcatagaataataggtggttttcttttatgtctccttccgccacccaaatttactctctctgaggaaartaatcactaaacatttgaggaaatctcattagcttggagccagaggacctgcattctagccctgcctctagaaattgctatttgtatcatagggactgcccgggtgatgtttctgaacccccatcaactctcttgatgtataaaatgaagaaaaagtctactcttcaaagtaaatagtctgtatgacatcgttctgcaaattcgaccatgccaaacacgttattattataattattatacttacatgattgctattcccttcatgaggtgtgaggggaacatattttagtccccgttctcaaggagttatgaccttgaactggataaagtcacgtgatacaatggatgaagagatgaaatctaaccccattttaaatgcatc

SEQ ID NO: 203880 - DNA, 604 bp, Homo sapiens
agccacattctcagaaataggctaaagagcctccgagaagctgacagcagctcctagacttcccagaccctttctacaagaacctggtgattgcaatgcaaatgggtcatagatgagaaataaatgtagtgtagtgtctggtagctccactggtcatagaataataggtggttttcttttatgtctccttccgccacccaaatttactctctctgaggaaaataatcactaaacatttgaggaaatckcattagcttggagccagaggacctgcattctagccctgcctctagaaattgctatttgtatcatagggactgcccgggtgatgtttctgaacccccatcaactctcttgatgtataaaatgaagaaaaagtctactcttcaaagtaaatagtctgtatgacatcgttctgcaaattcgaccatgccaaacacgttattattataattattatacttacatgattgctattcccttcatgaggtgtgaggggaacatattttagtccccgttctcaaggagttatgaccttgaactggataaagtcacgtgatacaatggatgaagagatgaaatctaaccccattttaaatgcatc

SEQ ID NO: 203881 - DNA, 462 bp, Homo sapiens
gatttgtgaaagaaaatatgagtatgtgctgggctctgaagactgctagtatcacttttcaagtactttaccctctgtataaaagtatatttaaacagggtgctgtggctcatgcctgtaatctcagtgctttgtggggccaaggtgggtggatcacctgaggtcaggagttcgagaccagcctggccaatgtggcaaacgaaacctcatctctactaaaagtacaaaattggctgggcatggtggcaggtgcctgtgatcccagctactcaggaggctgaggcaggataattgcttgaacccaggaggcggatgttgtagtgagccaagatagcaccactgyactccagcctgggcaacagagcaagactctgtctcaaaagaaaaaaaaaaaaagtgtatttatctgctttagagggatgagtgaagtttcctatgcctggaaagtttacaaatgcctac

SEQ ID NO: 203882 - DNA, 572 bp, Homo sapiens
agtagctgagatcacaggtgcacaccatcacatctggctactttttaaaaatttttagtaaagatgaggtcttacgatgttgcccagaatggtctcaaacttttgggctcaagcgatccacccacctcagcctctcaaagtgctgggattacaggcatgagccaccacacccagctaagtaaagattttttgaatcaaataaagaagtcaagagattgtagcttattattaagaatttccmaactataaaagctcataaagcatttataactcatcttgaaagttccttgtttaaatgttcaagcaattttttccctttttttttttagcaccttaggggaaataaataagatattttctttgctttcaaacaagctgacacattgggtggatctacaagcaaagattctgccattgctttgaaagcttccagtttctctgattcatttggggaaaactgctggacaattatctgttatttggttgttttattagcaaagtactccagctacagattcccagtgggtgtgaaaccattccttctcgaaaggcagtgatgagcagaatcattt

SEQ ID NO: 203883 - DNA, 572 bp, Homo sapiens
agtagctgagatcacaggtgcacaccatcacatctggctactttttaaaaatttttagtaaagatgaggtcttacgatgttgcccagaatggtctcaaacttttgggctcaagcgatccacccacctcagcctctcaaagtgctgggattacaggcatgagccaccacacccagctaagtaaagattttttgaatcaaataaagaagtcaagagattgtagcttattattaagaatttcccaactataaaagctcataaagcatttataactcatctygaaagttccttgtttaaatgttcaagcaattttttccctttttttttttagcaccttaggggaaataaataagatattttctttgctttcaaacaagctgacacattgggtggatctacaagcaaagattctgccattgctttgaaagcttccagtttctctgattcatttggggaaaactgctggacaattatctgttatttggttgttttattagcaaagtactccagctacagattcccagtgggtgtgaaaccattccttctcgaaaggcagtgatgagcagaatcattt

SEQ ID NO: 203884 - DNA, 537 bp, Homo sapiens
ttgcacgaacctaacactttatttatttatttatttccccttgctgagatcagatctctctctttctgatcgttattgaggtatgctccatgccttgattccaggaaagctatatagagagagacttgttaggccatcctcctcctccctccaccaccaatagcactgtgcttgaatattagatcaagaaatggcctgacagcccaagaccccttctcartgaaattagcttgagacttctgacaagaacgaaagtattctgcccaatgactcccatttaaaaaaccaactcaagagtaacatactacttatgcactccagtgagactttagaaatagatattgaggccatataagacagtccagaaattttccagaaagactaatagttgtacaagcctctttttttaaacttaaatttttatttttattttaaattccagggtacatatgcaggatgctcaggtttgttacacaggtaaacgtgtgccatggtggtttgctacacctatcaacccatcacctaggtattaagccc

SEQ ID NO: 203885 - DNA, 385 bp, Homo sapiens
ccctcccttgggagctcgggacgccgtgttctccattcctttgccccagtacttttagagaggtaaagcccaacgcctgcctccggtgccgcgcaccgggagctggaagacagcgggtgacgaagctctcgcttccgcttttcctctgggactccaactcagcccatccccgaccctcccttctctcgccygggatatcctcctgccttcggtccaggagtgaatccttttctacaaccgctttcccatcccaacttccatctttccagccaccgccccccgccccccatcttctcttgaagctcctgatgggtggagctttgacacaagcccccaggtttcccagccccagagcttttccctctgtcccatcaccaggtgacaa

SEQ ID NO: 203886 - DNA, 426 bp, Homo sapiens
gatggggagattaattcaaatggtacatagaaactacaggttgtactgacatgtatttcctttrgtggtcagccttccttacccccaagaatatccctggtttattgctgtgtcttcattggttcactcttaaagttctgttatgcattgttcttgagtccacataggtgttaatcattccacaccactctgtttaaactgtccagctctaccagtacttcaaactaatttgcctcttgagtttccatccatccttctcacagacatgattctctgggccaaaaacaagaaaactgcatgttggctggaattgaataaaagtcaatttatcagccatgtggcttctgcgtgggcaacattcatcccccaaacatttatggggctcctgcagtgaccaaaggattgtgtgcaaggaggaagaggaat

SEQ ID NO: 203887 - DNA, 558 bp, Homo sapiens
ctaattcaattaaatgtattattttctactttttgacagcaatgtgcttggcaattttacatactttatttcatttttttccctcaaaaccaatgctatatgttatttcataatgcaaacattgaaactctgagaggttgttactttccccaaactacaaagctatcgagtaactgagctaaataaaagctagtctttctaattccaattcttttcactcagttttttaaaaatgtttattttattttcaggggtccatgtgctgctttgtttcataggtaaatttgtgtcttgagggtttgttgttcagattatttcatcatccagatattaagcctagtagtacccattagttatttttcctgatcctctcmctcctcccatcctctaccctccaataggccctttccccacattttttctttgtatctaagatctatttggacatgatagatccgtttgatgttccctgaagaaatgtactttctatcatgcacacatggacgcacatggacatgaacatatacatattctcattttctgaatgatttgagagta

SEQ ID NO: 203888 - DNA, 587 bp, Homo sapiens
aataaccattcctcaataaactttctctcaatgaattttagcagtcattgataatttttgaaaatcatatttttttttttamatatagtgtttcatcttctacaatatgagcctttcctttttccttccttttctttcagtgtagacttatgggtttctcctgtattcaacttcttggggaagtttcagccgtaattccttcaaatactttttcagtattctttctcttctttaactccaatgaaatgaatattagatcttttgttattgtctcttaaattcctcagaatctgttcatacttttttctctgttgattagattacataattcttactgatttataatcaagtttactggctctttttactgtcaattacattctgctatggagtacatttagtgagtttttttctttaatttcagttattggatttttcagctcttgtattttaatttttgtcttcatatgtttttagttgctgaaacattctcttttaacatttgtttcaaaaatatttgaaattgctcatttggtttttataagggctcctttaaaatcttttgatgataattgccatatttgagt

SEQ ID NO: 203889 - DNA, 598 bp, Homo sapiens
gcagtcattgataatttttgaaaatcatatttttttttttaaatayagtgtttcatcttctacaatatgagcctttcctttttccttccttttctttcagtgtagacttatgggtttctcctgtattcaacttcttggggaagtttcagccgtaattccttcaaatactttttcagtattctttctcttctttaactccaatgaaatgaatattagatcttttgttattgtctcttaaattcctcagaatctgttcatacttttttctctgttgattagattacataattcttactgatttataatcaagtttactggctctttttactgtcaattacattctgctatggagtacatttagtgagtttttttctttaatttcagttattggatttttcagctcttgtattttaatttttgtcttcatatgtttttagttgctgaaacattctcttttaacatttgtttcaaaaatatttgaaattgctcatttggtttttataagggctcctttaaaatcttttgatgataattgccatatttgagtcatcttgactttggcatctgctgagtgtcttttcccatgagagtttaacct

SEQ ID NO: 203890 - DNA, 598 bp, Homo sapiens
gcagtcattgataatttttgaaaatcatatttttttttttaaatatagtgtttcaycttctacaatatgagcctttcctttttccttccttttctttcagtgtagacttatgggtttctcctgtattcaacttcttggggaagtttcagccgtaattccttcaaatactttttcagtattctttctcttctttaactccaatgaaatgaatattagatcttttgttattgtctcttaaattcctcagaatctgttcatacttttttctctgttgattagattacataattcttactgatttataatcaagtttactggctctttttactgtcaattacattctgctatggagtacatttagtgagtttttttctttaatttcagttattggatttttcagctcttgtattttaatttttgtcttcatatgtttttagttgctgaaacattctcttttaacatttgtttcaaaaatatttgaaattgctcatttggtttttataagggctcctttaaaatcttttgatgataattgccatatttgagtcatcttgactttggcatctgctgagtgtcttttcccatgagagtttaacct

SEQ ID NO: 203891 - DNA, 587 bp, Homo sapiens
aataaccattcctcaataaactttctctcaatgaattttagcagtcattgataatttttgaaaatcatatttttttttttaaatatagtgtttcatcttctacaatatgagcctttcctttttccttccttttctttcagtgtagacttatgggtttctcctgtattcaacttcttggggaagtttcagccgtaattccttcaaatactttttcagtattctttctcttctttaactccaatgaaatgaatattagatcttttgttattgtctcttaaattcctcagaatctgttcatacttttttctctgttgattagattacataattcttactgatttataatcaagtttactggctctttttactgtcaattacattctgctatggagtacatttagtgagtttttttctttaatttcagttattggatttttcagctcttgtattttaatttttgtcttcatatgtttttagttgctgaaacattctcttttaacatttgtttcaaaaatatttgaaatygctcatttggtttttataagggctcctttaaaatcttttgatgataattgccatatttgagt

SEQ ID NO: 203892 - DNA, 441 bp, Homo sapiens
ttggtggtaggttaagaaaggctctgacttaaattccttcccccmcaaaaaaaaatggttcctaaaatgttgcaagtcaagactcataattggtaatattttgttataaatgtgtctgtgttgggaggggaacgtcacacatcggggcctgtcagggggtggggggcaaggggagggagagcattaggacagataccctatgcatgccaggcttaaaaccttgatgatgggttgataggtgcagcaaaccaccaaggctcgtgtatacctatgtaacaaacctgcatgttctgcacatgtatcccagaacttaaagtaaaattcaaaaaaaaaaaatgtgtctgtgttaagactctctccttgcaggcaacaaggagtcttgcaattctcatttaagcaaacaattgaaactagttggatttttaagcttgtttagtggtt

SEQ ID NO: 203893 - DNA, 441 bp, Homo sapiens
ttggtggtaggttaagaaaggctctgacttaaattccttcccccacaaaaaaaaatkgttcctaaaatgttgcaagtcaagactcataattggtaatattttgttataaatgtgtctgtgttgggaggggaacgtcacacatcggggcctgtcagggggtggggggcaaggggagggagagcattaggacagataccctatgcatgccaggcttaaaaccttgatgatgggttgataggtgcagcaaaccaccaaggctcgtgtatacctatgtaacaaacctgcatgttctgcacatgtatcccagaacttaaagtaaaattcaaaaaaaaaaaatgtgtctgtgttaagactctctccttgcaggcaacaaggagtcttgcaattctcatttaagcaaacaattgaaactagttggatttttaagcttgtttagtggtt

SEQ ID NO: 203894 - DNA, 441 bp, Homo sapiens
ttggtggtaggttaagaaaggctctgacttaaattccttcccccacaaaaaaaaatggttcctaaaatgttgcaagtcaagactcataattggtaatattttgttataaatgtgtctktgttgggaggggaacgtcacacatcggggcctgtcagggggtggggggcaaggggagggagagcattaggacagataccctatgcatgccaggcttaaaaccttgatgatgggttgataggtgcagcaaaccaccaaggctcgtgtatacctatgtaacaaacctgcatgttctgcacatgtatcccagaacttaaagtaaaattcaaaaaaaaaaaatgtgtctgtgttaagactctctccttgcaggcaacaaggagtcttgcaattctcatttaagcaaacaattgaaactagttggatttttaagcttgtttagtggtt

SEQ ID NO: 203895 - DNA, 441 bp, Homo sapiens
ttggtggtaggttaagaaaggctctgacttaaattccttcccccacaaaaaaaaatggttcctaaaatgttgcaagtcaagactcataattggtaatattttgttataaatgtgtctgtgttgggaggggaacgtcacacatcggggcctgtcagggggtggggggcaaggggagggagagcattaggacagataccytatgcatgccaggcttaaaaccttgatgatgggttgataggtgcagcaaaccaccaaggctcgtgtatacctatgtaacaaacctgcatgttctgcacatgtatcccagaacttaaagtaaaattcaaaaaaaaaaaatgtgtctgtgttaagactctctccttgcaggcaacaaggagtcttgcaattctcatttaagcaaacaattgaaactagttggatttttaagcttgtttagtggtt

SEQ ID NO: 203896 - DNA, 537 bp, Homo sapiens
aggcccagcaaatcacggcagcccatgtctgtcctgcctgaggctgcacaaggtggggagggggtggcaggaacagtagtgtacagggccccttcatagagacagacaatgtcatcaaaagatattcctttcttcttcagtaaaagagaaagaactacttgggacagtactagatgcttcaaggggaaaaatgtcttctcggcacaaataaatttgtcaatttaacttctaaacacaattaaacaaattttcttcgtggtggcattgcttaggagctttaagatgggaacgtacyttgtgaatctccaacagtgggaatgtatcaaggcagcaaatccaccttacttgagcctactgcctggaacaaatgtatcctggaatactatttggaaaacactgttaaaatatgctttgtaattgttgttgttacatcctgttgttgctaccattcacctaatcgccaacacagcccaggggacagtccagggtgtgaggacagtttgactctatgagaatttggtatttcattttaattca

SEQ ID NO: 203897 - DNA, 580 bp, Homo sapiens
atacaatccagggattactattctttttaaaaacgagaaaaccaagtttcagatacttttccaaggtgaccctrctgttaaatgacagaactgggcttgaactctggccctgagacttaagagtcccatgtgtatttagtgatacaatgttttctttccattctgaaaccccagcaaggagtaattttgctacattttcctttgctgcgagacaatcaccctaggaaaggcagtactcattatttttatgaagggaaaacacaatcttaactcaggcaacataataattttatggtttgagtgaaaaaaaaggtttgctcctgtcaaattcaatttatgtcaccagactaaataaaaattttatgtactgggtgaaggaaaactagaaagaaaatgtcctgagtggacaatcttaaattatctcccatttgaatgagttcatttcccagaaagagtttcatcaggctttttaattaaaagcaaattgttcatctagagtcagtaatttgccattgacctcttcttaacactctcgtctaaggcgacagaaatgacaatgggactttcaaattaaaaacat

SEQ ID NO: 203898 - DNA, 356 bp, Homo sapiens
agaaagacacaagaatggtaaaaatgcattcgtcttatgaaaaacctttgaaatataagaagcaaacatcatcagaattataaaagtatccatgatttcacagtcactattagaratattaaaaccctgtctcaacagctgatagaataattgtatcaaaatagtcagtaatccatataccaagacagactttatcatgaaccataaaacaagtttcaatacattaaaaaatattggaagcatacaaatgcccataataattaaattaccattaataacaatagtatagttagaaaaccacaaatatttagcacaataaacaatgtttttgtaaataattcatggattagagaaga

SEQ ID NO: 203899 - DNA, 596 bp, Homo sapiens
ccagtcatactcctgggttcaaacctggaaacagcctcatcccctaaagtgtttggctacagcttcatttggccttaggcctgctatcaaaattgtcttctaagggttccaggagaatctaaacacactagtgcctctgcagaaaggctgctctgcccaccaacatttgtcttagtgatggacttgagagctatctgtaacttggctccagcctccctcagctgtggtcttggcttartactgcttagcttagtactgcttgcacaaagacctatagggagatttgtccatttgtgccacctggataggcttgtcagcttctgccccatagcacactcaatgggagaacccgtcttggtatcagtctttctctgtcacagcctgaaagttatttcacacagagagagaaatgctaggaaatgtgcccatctgaaccaccaggacagatttgctggcctccatcccatagcagattctaaagtggccctgtcttagctccagcctccttccgccacagacatgaagctatcctgtctatgcagagaatagctgggagtctcccctgtttgtgtcaccatggcagacttgctagcctt

SEQ ID NO: 203900 - DNA, 596 bp, Homo sapiens
ccagtcatactcctgggttcaaacctggaaacagcctcatcccctaaagtgtttggctacagcttcatttggccttaggcctgctatcaaaattgtcttctaagggttccaggagaatctaaacacactagtgcctctgcagaaaggctgctctgcccaccaacatttgtcttagtgatggacttgagagctatctgtaacttggctccagcctccctcagctgtggtcttggcttaatactgcttagcttagtactgcttgcacaaagacctrtagggagatttgtccatttgtgccacctggataggcttgtcagcttctgccccatagcacactcaatgggagaacccgtcttggtatcagtctttctctgtcacagcctgaaagttatttcacacagagagagaaatgctaggaaatgtgcccatctgaaccaccaggacagatttgctggcctccatcccatagcagattctaaagtggccctgtcttagctccagcctccttccgccacagacatgaagctatcctgtctatgcagagaatagctgggagtctcccctgtttgtgtcaccatggcagacttgctagcctt

SEQ ID NO: 203901 - DNA, 596 bp, Homo sapiens
ccagtcatactcctgggttcaaacctggaaacagcctcatcccctaaagtgtttggctacagcttcatttggccttaggcctgctatcaaaattgtcttctaagggttccaggagaatctaaacacactagtgcctctgcagaaaggctgctctgcccaccaacatttgtcttagtgatggacttgagagctatctgtaacttggctccagcctccctcagctgtggtcttggcttaatactgcttagcttagtactgcttgcacaaagacctatagggagatttgtccatttgtgccacctggataggcttgtcagcttctgccccatagcacactcaatgggrgaacccgtcttggtatcagtctttctctgtcacagcctgaaagttatttcacacagagagagaaatgctaggaaatgtgcccatctgaaccaccaggacagatttgctggcctccatcccatagcagattctaaagtggccctgtcttagctccagcctccttccgccacagacatgaagctatcctgtctatgcagagaatagctgggagtctcccctgtttgtgtcaccatggcagacttgctagcctt

SEQ ID NO: 203902 - DNA, 596 bp, Homo sapiens
ccagtcatactcctgggttcaaacctggaaacagcctcatcccctaaagtgtttggctacagcttcatttggccttaggcctgctatcaaaattgtcttctaagggttccaggagaatctaaacacactagtgcctctgcagaaaggctgctctgcccaccaacatttgtcttagtgatggacttgagagctatctgtaacttggctccagcctccctcagctgtggtcttggcttaatactgcttagcttagtactgcttgcacaaagacctatagggagatttgtccatttgtgccacctggataggcttgtcagcttctgccccatagcacactcaatgggagaaccygtcttggtatcagtctttctctgtcacagcctgaaagttatttcacacagagagagaaatgctaggaaatgtgcccatctgaaccaccaggacagatttgctggcctccatcccatagcagattctaaagtggccctgtcttagctccagcctccttccgccacagacatgaagctatcctgtctatgcagagaatagctgggagtctcccctgtttgtgtcaccatggcagacttgctagcctt

SEQ ID NO: 203903 - DNA, 548 bp, Homo sapiens
tttttcctaccaactggaaacacaaaaataaacaccaaattgggcatttagaggtagaataaataaatcacagttaaaagcagtcaattaatcaaacttttgtttttaaatcaacgtgttctcacatttgttaccacgttaattattgtggcaaggtttttcaaagttgcttagaagattcagccacatttcagtccagatgtgtgttagccttaatatgttttatatgtaaatattgacaatgtttctttgggggcattttagctatctcatgtttctattcagcttaacagaacattcattcactttttctcacttagacagtgaaagcaagcattagcttgtaaatcatgtcattacatgaaaaaaaacaatagaatcaacagacaattgggattgtgcaaaactctttgtttaatctgtctggcaggggtgaacaccctactggtagaatatatgtataatcctgccttaatgagctctatttactaactctgttatttatgaatatatatratttattcaaaattgttatcagtatttctcag

SEQ ID NO: 203904 - DNA, 541 bp, Homo sapiens
aggcaccaaatcttcctcctgtgtgtctaaaatgccccttcctcaaacttccatactacttttataggatacttcttaaacctatttttttaattcrgtattataaatttttataaaagaagctttatataaatactaaaattatttcttataactaataggtaacaatgagccttacatatggattttgatagttagaactaagttgattatgattaagtacaatttaatttttggaatgttcccaatcctctgtgcaactcacagaaattatttatagtcaacagtgtttctgagataagttattcaacattataggcagaatggatgatacttctaactcaaccctttttcttacacccttcaaaataattgccaaattatctattgcctcttaattttaaaatgtaaaatataagcaataataatagtaccataaatttgtttaatacttcagtgtagtcatttccagtcaaaaggcaaaagatgaatgtttgcaatgaattttcaactctacaattaaatgagaaaaaaataataa

SEQ ID NO: 203905 - DNA, 564 bp, Homo sapiens
ctaaagaacaaatctgtaagactcacactacccaattttaagacttactataaagctgcagtaatcaaaatagaactacctcattgaaacaacagacacacagaccaatggaacagaacagasagcccagaagtagatccagacaaatataattaagtgatctttgtcaaaggagcaaaggcagctcaatggaggtagtcttttcaacaaattgtgctgaaacaattaaacaacaacagagaccccacaagaacagaacaaaacaaaacaaaaacaactagaacaaaatcctatagctttcacaaaaaatattttaagatagatcatagcctaaatgtaaaactcaacattataaaacttctagaagaaaacacgagaaaaatctaagtgacttggggtttagctatgagtctttacacacaacgccaaatgttgaaaaaagttaacaagttaaaatatattaaaatttaaaacttctctgcaaagtaaactgttaagaaaatatttttaaagccacaggtaagaataaagtacttgcaaaatataatatctggtttttaaaaa

SEQ ID NO: 203906 - DNA, 564 bp, Homo sapiens
ctaaagaacaaatctgtaagactcacactacccaattttaagacttactataaagctgcagtaatcaaaatagaactacctcattgaaacaacagacacacagaccaatggaacagaacagagagcccagaagtagatccagacaaatataattaagtgatctttgtcaaaggagcaaaggcagctcaatggaggtagtcttttcaacaaattgtgctgaaacaattaaacaacaacagagaccccacaagaacagaacaaaacaaaacaaaaacaactagaacaaaatcctatagctttcacaaaaaatattttaagatagatcatagcctaaatgtaaaactcaacattataaaacttctagaagaaaacacgagaaaaatctaagtgacttggggtttagctatgagtctttacacacaacgccaaatgttgaaaraagttaacaagttaaaatatattaaaatttaaaacttctctgcaaagtaaactgttaagaaaatatttttaaagccacaggtaagaataaagtacttgcaaaatataatatctggtttttaaaaa

SEQ ID NO: 203907 - DNA, 626 bp, Homo sapiens
gttaaactggtgaagcacagtgkagttttaagggtggtgaacatatcctatatgatactttaatataggatacatgacactgcatttatcaaaacccattgaattttacagcacagagagtaaaccttaatatatgaaacttctttaatcatttagaaggtcagaagtcccagaatggaatgcaaaaatgtgacaaaacaacctcactatatgtataaaatgtatgatgtatgaaaaaacgtgtgaaataacaacactgagggagttgtggaaagaaacacaggcataaataactttggaaatgaagagaatctacaagactaaagtaaaagacacttatataagtacgatagtctagttgatagctttttcccataagagtatacattaacaattctgatgccactacgcatgtataatgaattgagcaattaagtaaatgagtggcagatggtgggagccaggttcctttctgatggagtaggagttcacagataagtaaggaaagaggctaaaatgatccaagtggtaatagattagaattggagatatgaactcatgcttagtttcttatagatatatatgcttctgtatataaatatctaaaggtacatgtatataaatgg

SEQ ID NO: 203908 - DNA, 548 bp, Homo sapiens
ggacgccattatcctaagtgaattaactcagaaacagaaaatcaaatattgcatgtcctcacttataagtgaaagcttttaaaaagctgcaaatggacacaaagatggaaacaataaacactggggtctccaaaagggaggarggatagaagaaggagggtaagtgttgaaaaattacctattgagtactatgttcactattttggtgatgggttcaatggaagtccaaaccccagcattatgcaatatattcatgcaagaaacctgcacatatacccccttaaactaaattagataaaaatagtattcatttattcatttattaaatatttattgagcaatttctatgtataacattgagtttcatgtttatagaataaaagatgaatataatccaaaccctgcactgatggagaatgttaacttagcactaggacaaaatatggatagcattattataaaacaatagcacctcttcattaatcagaatgtgaatgggtcagaagtatagtatagtcatgtgctgcataatgacatgtgagctaaca

SEQ ID NO: 203909 - DNA, 548 bp, Homo sapiens
ggacgccattatcctaagtgaattaactcagaaacagaaaatcaaatattgcatgtcctcacttataagtgaaagcttttaaaaagctgcaaatggacacaaagatggaaacaataaacactggggtctccaaaagggaggagggatagaagaaggagggtaagtgttgaaaaattacctattgagtactatgttcactattttggtgatgggttcaatggaagtccaaaccccagcattatgcaatatattcatgcaagaaacctgcacatatacccccttaaactaaattagataaaaatagtattcatttattcatttattaaatatttattgagcaatttctatgtataacattgagtttcatgtttatagaataaaagatgaatayaatccaaaccctgcactgatggagaatgttaacttagcactaggacaaaatatggatagcattattataaaacaatagcacctcttcattaatcagaatgtgaatgggtcagaagtatagtatagtcatgtgctgcataatgacatgtgagctaaca

SEQ ID NO: 203910 - DNA, 506 bp, Homo sapiens
ttcttttacttagttgtacatatagctaccaaacgattattgttttgtgatttagaaacaaaagagcagttttgaaataggcctacagggcatgtctgaatggacagtggggaaggaaaaaatagttttttttccgattgcatttcctaagcccaacttgtttaaaattagtataacttctgtacacttgcctgattgcaatttattttccaaaatagattttactgctcaaaacataaaataactaacaacaaccacaatttgtatgttatcagtatgcartcatctcagtgatctgttatgaaacataccaccatatccatgtaatagatactggaccaccacaccatcaccagtgagttattcatggcctggtggatgtaaccaccttcaggtgctatccattatagcaagtaatgacttaattttttaaatgacttaatttatcagatggataattgtgaaaataagattttttaaggagaatttgtggttgaatgtttcct

SEQ ID NO: 203911 - DNA, 379 bp, Homo sapiens
ttcaaatacctggaaagtcttcccaaaaaaggaaggtataaacaagcctagactgtgaagactacaataaatatctacctctgagacttactggcttcaggtgaaactcagaacattcctagctgtggtggcccaagagcccaagggctcttcaggataacacgaagaaattcagaattctattagacaaayttaacagagagattgaaataacattaaagaatcaattagaaattctggagctgaaaaaatgcaattgatatactgaagaatacatcaaagacccttaatagcagacttgatcaaggtgaagaaagaattagtgaacttgaagacacaaaggagacagaagaaaaaagaataaaaaacaatgaaacgc

SEQ ID NO: 203912 - DNA, 609 bp, Homo sapiens
cacccattaactcgtcatttacattaggtatrtctcctttttctcaccctacagagctatgtttctttttcctcagtaccttcatacattctattttgtcttctctctttactcatctttcaagtcatatctcaaatgtcttagaatcatcctctaagaatctgtgtctgcttccacagacttcctcgtgtccccctattgttacatgtctttacaatctttaataccatttaaaactatgcatttatttgcatgctaatatgacccatggctatcgtatctattaaactgtaagcatgtgagagcagaaagtttgaatgtaattcaccataagcaacttagtacctggaattgactattgtgcacataaggaacataaacatttgtagaatcaaacgtttcttagaaaatcatcaatgttcttcctacccctattgagtgtaatttgaagttcttggcccttaccattcagcaactttctcagaaacttcatgctttcagactgcttttggttttgtccccttaagcatactttgttaatttgtttctccttttaaacccttgctctcactgtattgcctccatacttgaaatgtccctctatttttc

SEQ ID NO: 203913 - DNA, 545 bp, Homo sapiens
cccaaattcagactcaaatccagaataatttttcataaactgtgtttagatttttaaatgaacactagataacacaaattgtttttcctaaccttaataaaatagcagagggggggatatcaatatttaagagtgtttgaaatatatacaatggagtattattcagccataaaaatattgagatgctgccatttgcaamaacatggatgaatctggaggtcattatgttaagtgaaataagccagacaaagaaagaaactatccatgttccaaccttcaattaaatctaaagtattatgagagctctttcgtttgcccaatgtaagattaaaaaaagaaactaacaaatcagaatgtaagttcagaaaaagtaaactgatgtacatatcctttaatacttttcaggatgaaaaatgttaaatatactaatatgcttgtcaggatgaaatacatatacaataatttaacaatttaagaaaaaggctttgttatatacccaaacttatcaacaggtagaaacagttttgccacaacgtcatcctaag

SEQ ID NO: 203914 - DNA, 548 bp, Homo sapiens
ctaacaatacacaatcaaataagccaggattccttctttcaagactctcaaagtctagggcaggaaacagcacataaataaacattaataaaagtatgcgtatartaagaggttctgtaacaataagcatatataggtttattcgtgctcctaaaaataataatggccataatcacagtaactaacagtgatcaaaattttacatttactttagctagttttcaccttaagacaaccttgggagttgacacgcatttttatcttaatttccattttaaggtaaacagagaaatataatggaaaatctgtgggcttcagaaccaaggagatttacattcaactctagattctggttctgactggccacatagccctaaactgtcacttaatatattcaactacctctcacggttgctttcaggtttagaattgacatctgtaatgtgcctgacacgtggcaggtagtcccgaaaatgcagcttttattactgaacaaagctcagaataagtcagtgatttgtccaagttcacacaagtagtgaacagag

SEQ ID NO: 203915 - DNA, 430 bp, Homo sapiens
ccagatatttgccagtccatacaatataacaataaataaagcagaaactctagactgtagggttttctagctgattggaaagacacgaaaaagtatttaccctgtagattgatgaatttcataatagggttaaatatagatgggagcacagaagggaggaacttttgttagttcagggatcaaagaaaacttcytgaaggacagcatgccccagtgaagtgctaaaggacaaatagaccttatcagatgggtcaggatagagaatggtgtgggcaggagagcatcatgagccaagattctgaggcatgcagatctgaggcaaaccgagctttggtgttcttgggagaactccaagtaattggagatcatgggatcataaggtgaagcattaaagaagggtagcagtaggggattgcatctatttgtggct

SEQ ID NO: 203916 - DNA, 486 bp, Homo sapiens
tctgtattttataaatggagaaacttttttwattctacattcatttttggttgaggaggtacatgtgaaagtttgttacatgggtaaattgtgtgctgctgaggcttggtgtatgaatgatttcatcacccaggtggtgagcatagtatttaataggtagccttccaacccatgctcccctcccaccctccctgctcaagcagtccccagtgtctgtggttcctatctttgtgtccatgtgtagtcaacgtttagctcccatgtgagaatattcactatttgttttttttcttcctgtgttagtttccttaggattatggcctcgatctgcatccctgtttctgcaaaggacacaatctcattcttttttatgaccacgtagtattccatggtgaatatgtacatcgtttacttatacaccatggaatatgtatatgtaaatgagagagatgtagcctctctctcatcaatcccagcattgattgt

SEQ ID NO: 203917 - DNA, 408 bp, Homo sapiens
tactgtggatttgtggcatagcttccccctgtgctgtctttgctttggcataatcactttagtgcataccttctgtttgtccttgcccatcaattgacagccctctacaaagcagacatctttgagaccggttctctgtgttgattgccttctcttgcagtttcagcagggctgtatcctcatgcattattgggacctcacaacaaccycttttttttcttccgtaatttatcctccctctctcaaagcacgaaatgagtgactgcaacatttgtacttgggaatgaatcaaccggctgtactttagctcaaagcatgttttaacagaaataaattctaaaattctttcagtcatgaaaaacattaaatgtggacaggagcaatcttcagaacactgggtggcactgt

SEQ ID NO: 203918 - DNA, 655 bp, Homo sapiens
cctcttaagccaaagatcctcatgcatcaaaaaaattaataacttcttagacagaatcatgtaatcatagacctagaggaagcagacaggacctcactaggttttcaggtatgttaccttattcatctttattttctacctgcctccttcactgctgcattagaatcaattgtaagtgarcaagcagtctgtggcttccacgtggagggaagttaagtatcatctatgagttttgaatctatgtccttgtcctcaccatagagaacacacatagcatgcatcattgtctattaataatttatcagaggcttttttatgtgactacgtcataggccttgaaaacagacattaaaccaacagcccagtctatcatttgtaaattttttcttgctttgagctgtagccaggatttagtcttgaactacaaaccatacaagctatgggaatagatacatatacagagcaggtgtgggtgtgaatgggaaaacaagagagatttatgtggcttgcttttgattttattatctactcccaattaaggcagaaaatttgtgggcagtttatactccccataacatcaaaaaataataattaacaataatgttagtagttaaaccttccttcttaataacagtagaagtaacaataatatagc

SEQ ID NO: 203919 - DNA, 655 bp, Homo sapiens
cctcttaagccaaagatcctcatgcatcaaaaaaattaataacttcttagacagaatcatgtaatcatagacctagaggaagcagacaggacctcactaggttttcaggtatgttaccttattcatctttattttctacctgcctccttcactgctgcattagaatcaattgtaagtgaacaagcagtctgtggcttccacgtggagggaagttaagtatcatctatgagttttgaatctatgtccttgtcctcaccatagagaacacacatagcatgcatcattgtctattaataatttatcagaggcttttttatgtgactacgtcataggccttgaaaacagacattaaaccaacagcccagtctatcatttgtaaattttttcttgctttgagctgtagccaggatttagtcttgaactacaaaccatacaagctatgggaatagatacatatacagagcaggtgtgggtgtgaatgggaaaacaagagagatttatgtggcttgcttttgattttattatctactcccaattaaggcagaaaatttgtgggcagtttatactccccatamcatcaaaaaataataattaacaataatgttagtagttaaaccttccttcttaataacagtagaagtaacaataatatagc

SEQ ID NO: 203920 - DNA, 576 bp, Homo sapiens
tcttattttctcccaaaataatagagtctctctgtctgtgctaagctgtttggagctgagggaagggtgacataagcacccctgtggccactaccactaggactgctctacatcagaccaaaatcaagcacagcactagggtcttgcccaaggcccatagtaaccactccctggttactgcctttgtttgctcaaggtccttgggctccacaaacagcaggtgcttagctagccagagttgtgtccttcccttcagtgtggcaagtttcgctagccccagctgggtccagagatgccatccatttgggagacagagcctggagttggaaaccttagcaatctatctggtgctctattttactgtggctgagctggaacccaagccacaagacaaaatggttcccaattttctcttttatttccacaggcagaggagtctttccccatggccaccaccaccacaggtccatggggaatactgcctggctaccaccaatgtccactcaagamccaaggactcttcagacagcttgcagtgattaccgacaggcctaggactctttcttaaaagcactg

SEQ ID NO: 203921 - DNA, 493 bp, Homo sapiens
tttgttcaaatggtattatataccgaggcccagtatatgagtagataaaaaggaaaagactgaggtccgggacgggaaagctcaaacgagagtggcggagctgggaaacaaatatagatttccagaaccctagacacatatttctttaccttactgtcaggaaaaaaaaaatgtgaaaagctttcaaatgggcaaaaaagattcaagggtgtcctgtccatctgggttatctccaccatatgttgtctttgagctattcagcaactccataaaactgataataatgtaaataattcttgtgtgtagacatgcattatttgtatcgagttgattattgccctgtgaacagaccagtctctgcatctgtttatmaacctatttcaccattcttttagtgcatataaacttagggtccttggaattctcctttcaattgcttgtaacatcttaccagttctttcattagttactgggttaaaaaatatttgacatg

SEQ ID NO: 203922 - DNA, 570 bp, Homo sapiens
tctgcagtttgggacagaattccatcagtgatagtcttcacccctacgagcacgtgactcctataggtgcaagctttagaaggtaggagtcaaggccaggcackgtggctcaagcctgtaatcccagcactttgggaggtcgaggcgggcggatcacgagttcaggagttcgagaccagcctggccaacatgctgaaaccctgtctctactaaaaagacaaaaattagctgggcatggtggtgtgtgcgtgtaatcccctctactggggaggctgaggcagaagaatggcttgaaccccggagtcggagtttgcagtaagccgagattgtgccactgcactccagcctgggtgacagagcaagattccatctcaaaaaaaaaaaaaggcaggagtcaagaaggaaaggaaggctctgtcgtgttcactattgtactcccagcatccatttacatagtaattggcacatggaattattggttgaacaacagatgaatatattattcctacattccagatgaggaaactgaaattcatagaggaaataccttgtcccaaatcacagagctgt

SEQ ID NO: 203923 - DNA, 325 bp, Homo sapiens
tggtccattgttcttcccattcatccttttgaagatgctaaagtgtcttagaatcctatctttcttgttcctggaccacggtaattttagctaaattttaggaagtaatatggttgaaatatgtccccgaaagttcatgtgttggaaatttaaccaatccctaatgcagcagtgttgagagggtgcagctcttaaacaaggtaacccaggtaatgcatttataagtgtctgacccagagtaagtgttcctaagtgttgttttttatyccataattatgcattatttgttatcatatattatatgacttgccagtaattttaaatt

SEQ ID NO: 203924 - DNA, 367 bp, Homo sapiens
tattaagcagatatttttaaagggctagcctcagaaggaaattccatttgaatacattcatcctttaagatgtgtatcaactgtcatctcttttgtgccctaggcaaagatgccatcrtatcctaagtgaggtgagtatggtttaaattcttctctcggcactcaccatactgtctttatccaatctttcttatctagttgattgccaactttcctacgtcaggaccatggtttgttcatctctgtgtgacccaagaagctgtaacatgataggtaatcaataaatactgtatttgtttataagaggacagaaaactcaaggttctgagggtagggtctgtttggcatgatgagaaacagcaagaag

SEQ ID NO: 203925 - DNA, 367 bp, Homo sapiens
tattaagcagatatttttaaagggctagcctcagaaggaaattccatttgaatacattcatcctttaagatgtgtatcaactgtcatctcttttgtgccctaggcaaagatgccatcatatcctaartgaggtgagtatggtttaaattcttctctcggcactcaccatactgtctttatccaatctttcttatctagttgattgccaactttcctacgtcaggaccatggtttgttcatctctgtgtgacccaagaagctgtaacatgataggtaatcaataaatactgtatttgtttataagaggacagaaaactcaaggttctgagggtagggtctgtttggcatgatgagaaacagcaagaag

SEQ ID NO: 203926 - DNA, 367 bp, Homo sapiens
tattaagcagatatttttaaagggctagcctcagaaggaaattccatttgaatacattcatcctttaagatgtgtatcaactgtcatctcttttgtgccctaggcaaagatgccatcatatcctaagtgaggtgagtatggtttaaattcttctctcggcactcaccatactgtctttatccaatctttcttatctagttgattgccaactttcctacgtcaggaccatggtttgttcatctctgtgtgaccyaagaagctgtaacatgataggtaatcaataaatactgtatttgtttataagaggacagaaaactcaaggttctgagggtagggtctgtttggcatgatgagaaacagcaagaag

SEQ ID NO: 203927 - DNA, 568 bp, Homo sapiens
tgattaaaagtttggctgggaggataaacgtggataatgrgagaacaaactgggttctgaggatggctggatttgaaatcatatgaacatcttagttactcccaggtgctcaggaagtccataggtttccattttccagctgggcaaatttacctcctctacctagatgcccagatgtcaaagctctccaaatttgggctttatcttgcctaactgttgctattttctattgatctctgctgcaaactggcagctctcactgctcagacagaggccaacgtcttctctactatcagagccttccctccttccagcattgctccccttgtctaagagaccctcccttttacctctgctattttttccttccaaatcattcatgcccaccatttattgatttcgtctagttaccaatgctgtgcacagagttttacacacatggaattattgaatccttaaaaaagtatttctgctttaaaaatgaggtcactgaggctcataaaatttaaataatcacacactaaaagtggcattgccagattttgaactttagcactttttataacca

SEQ ID NO: 203928 - DNA, 421 bp, Homo sapiens
gaattcctgttgggacattcttagaatttcacccacagctgacaaggaactggatgggtttttttcaaaggtggtggatttgcctcagatatctttggatttacattsgtttgcttttttgtagttactgcttgaaaagggaagcacatagacctagatgagcgaaaaaattctcaccaaatgttaccagctgaagacagccttggccagaccaagggatgtggagactaaagcaggctgaggaggtctctatgacctttcaggaaattacaagtgtcttagacagcttgggccgccataataaaatttcgtatactaggtggcttaaacaatagacatttattttctcagtgttgaaggctggaaagtcaagatcaaaattctggctaattcaattcctgttgagggctctctttttgac

SEQ ID NO: 203929 - DNA, 617 bp, Homo sapiens
cagttcaccaggttctctacctggccaattttacgcatccatacacccctagagatatttggccatgtgaccttgatctatacaagcatattaaggaagaagtaagagaggccatttgagattaggagccctaagcctcttttaaattcttaataatttatagcttaaatcctttggcacatacactaccaagtttgccatakataatgtgtcatatatagcttaaatcctttgggatatattcatacatataaacagagagtttaaagtggagactgatgggatgggaagaagaatagtttttaaaaatatttctgccttcataaataaaactcaagacactcccacacttgccatatcagctgaaaacagcaggatgggattagatattttgttctccacatgttctctcctggcctgtgaggaaaagaagggatggccatgaatacatacagtctgaaaaatactagaaaaatgccttgtttgacagtcaaatcaaccgacagctttaaaacgtggagtgttttcattcagattctggcatctgacagtcaaatcattcttcctggagttggccttgtcagtaacataatgatgtgaaaattactgagagtttg

SEQ ID NO: 203930 - DNA, 560 bp, Homo sapiens
gcccacattcacggaataatacatagaatatttgggatgaagtggagaatttgtttagggaactgtgtattttaagcctggagaaggaggtttgtagaaggctctgaaagccaggctctgatgtgggagctatttacaaaatgtgggatttgcgacacctgaagtagcaatgctttagtatatgaggccttagggaataaaataaactttcgtcaccaatgatcagtggtttttaaatctagaatttgggggttagcatttgaactcttttcctcaaatgaaattttatccatataaactccaaattacaaaatatgaaaactggcttgaagactaaccaaagccccttggcctcttcttaaagcatttctccctgtcccatcccataccgtaccctagaatttctcagaacatggattgaatcctttcacctttgccccatggaacagagctttacaaacatggcacttgtcccattatagtatatgcagtaatttagtayaggtacagataaatatttatactaaattttaatattcatgtatttattttaatgtgta

SEQ ID NO: 203931 - DNA, 486 bp, Homo sapiens
aatatttatactaaattttaatattcatgtatttattttaatgtgtactaatctatcaaggccatgatttagtggatatggtggtttaaaatgaagttaaacataaaaggggatttaatttaaaattaatttgaaaaaatgctaataagtaatggtgcagataaagtttttaaaagactttaatatattagctgtttctcagttattcaaagtaatagatggttaggttagcacagaaaaaggggagtctgaagataaaatccatccatagtagctttagtttcttcactttttgccaaagctaatagcaaataataataataataataataataatgatgatgatgaggaggaggactacatttatttcactctcttttcctgtttcctttttaatggaactagaaatagttgaacagaagatgactccgcaggggaaacaataactctmgttattctgcaggtcagaaaaagcaggcctggtta

SEQ ID NO: 203932 - DNA, 512 bp, Homo sapiens
taaccaggaaactttcaggaaatatctaraagttagagaaaaacaatcagtattaaaatgtgcagattgctgctatttgtagtaagaaaagcttggaaataatttgcagaacaacaacaggggaatgacttagtcaaccgcagtatatccatataataggtgaaattaaaaaggatggtaagtgtgagctcagcctgtacctgtgcatgtaaagccatgttttttttttaaaggtccaggcttattatttatttaaagcacaggcctggcatgactgctcatgcctgtaatcccagcactttgggaggcccaggtgggcagatcacttgagtctcaggagtctgagaccagcctgggcaacatggtgaaacccctatctctaccaaaaaaaagaaaaaaaattacagcacagttcaaagtcactaaatcattaaatctagtacaaaagaaatggctcccatttcctggattggcatcagacatcctaccagctgcaattgcatcatttttac

SEQ ID NO: 203933 - DNA, 418 bp, Homo sapiens
tctttcctgcttccagaagtggttctcaaacgtgtgtgtgtgtgtgtgcatatgttttgggggcagactttttttaaaactgtggtaatatatatataacacaaaatttaccattttaacaatttataagyacacaattcagtggtgtggtattaagtacattggtattgttttgcaaccatcagcatctatttccagaacttttcatcttccccaactgaaactcagtccctattaaaacactaatcccccaacccccagcccctggcaacccccattctactttctgtcgctatgaatttgacttctctagggacctcatgtaagtggaatcatgcttttctgtgtgctaatgttttcagtgtatctgtgttgtagcatgtatcagaatttcattcctttttaagggtaaataatg

SEQ ID NO: 203934 - DNA, 517 bp, Homo sapiens
atgagcagacagcaccaacaatgagcgattatttgtggagcacgcattacatttactcagcatcaccctggttactgggggacatgcacatagagtatggagcccacaggtagtaagtgctttattagagtttgttaagtaaacatgtaattacatagaagataaactaaagtttttattatttttatatgaaagttatcaaacatacagaaaagatgaaagatttttacagttaagacccataaacccatcactagattctacaattaacacttaatttaattctctttatcagaaatttacctgctactcatccatcaatctgacacttttgattgtataaaggtagattctacttgaggaaacatgatgtatacgcatgaaacaattactcagtattttctaggacgacgctaaatagtgagacagaggcacacrtctggatggagttaagaaggtgatcatccgtgaggaataatatgttcagagactgtttcatggagggaagtgggcctgg

SEQ ID NO: 203935 - DNA, 517 bp, Homo sapiens
atgagcagacagcaccaacaatgagcgattatttgtggagcacgcattacatttactcagcatcaccctggttactgggggacatgcacatagagtatggagcccacaggtagtaagtgctttattagagtttgttaagtaaacatgtaattacatagaagataaactaaagtttttattatttttatatgaaagttatcaaacatacagaaaagatgaaagatttttacagttaagacccataaacccatcactagattctacaattaacacttaatttaattctctttatcagaaatttacctgctactcatccatcaatctgacacttttgattgtataaaggtagattctacttgaggaaacatgatgtatacgcatgaaacaattactcagtattttctaggacgacgctaaatagtgagacagaggcacacatctggatggagttaagaaggtgatcatccgtgaggaataatatgttcagagactgtktcatggagggaagtgggcctgg

SEQ ID NO: 203936 - DNA, 491 bp, Homo sapiens
agatctgaatattctagtgattttagtcatgtaataaaaacataatattaagcttccatctcaagtatgtaggataataaatttgtaattacattgtctaatttaattccctttaaaaaactagcagtgtctgaaacagagtgagtcctcrataaatacttgatgaagtgaaaagggctttttccccttttatctcggaagaattacagttattataacactgtcatttttaaaaagcaagtgtaatttttaatatatttggaaaacaaaatatattacagatacacttgttaaatttcattgattcttttttctgtctttactagtggcatcattcacaatctaaggggatagctcaagattagctctgtaggcttggtctggccttggtcttgtaccttttttgcttctagtccatttttctgccctcaagacatctgtgtagtagctaataagagctagtcagtgtgtttgcatccccctccaccatg

SEQ ID NO: 203937 - DNA, 546 bp, Homo sapiens
aaataattacaggtgcatatactttctgatgcagtgagttaactctaggaatttattttactgataattttacatactttcaaaaggacatttataccagattattcactacagagctatttgctacattagagggattggaaaccatataaatgtttattaagaaggaaatggataaagtatttaattcacatattgaatactatacagctcaatacgattgaagtttattatgcactgatatcagaatgtataacatgctactatttatatgataagcatgtatttgttttatgtgcttaaaatttatctggaagaatttttttaaaactagtaatttgggggtttcctgtggaggagagctaggtagcaaaaggacttttactgaatatmctttttaaaatttctgaatattaaactatgtgaatgttttaactatttaaaaatttaaataaataatctggttttcagactcaaaatcaatacctccttcattcactgattggggactgagactcgcctttaataaggcagaatttaaagtca

SEQ ID NO: 203938 - DNA, 440 bp, Homo sapiens
actcatggtattggaatgtaccatgccatggcctaaatgagagcctgtaagccacgatacaaaccaaaagatctttgcacaccacctcctgcgcatgaggcaacatgcacagtcatccctctctaagatgctcagaggaagaggaaaataatgtgttgaacaacagccatctctgtcgtgtgtgtttgcagggcaacgaarccatcagcaaacatcttttcatagtaggttcagtttgaatatgagcatcattttgctttcattttcaaattttcttgctacaaggaaaagtgaatcattccatagtttcaaatgccagtcacaaatttaaactgagggcatgagtaatttaagtcttttttttttttaaatgaaggaagaggtcacaagtcaaacatccacgtggacttcccttctttgaccccagcgtgaaggaattc

SEQ ID NO: 203939 - DNA, 546 bp, Homo sapiens
caaatatattacctttccaaactgcatgccagaaaatataagacaaaatgaatttaaaaataaatatgatgaattgttattcagaattctaaaaccaaaatgtttttttttttttttaagttcaggggtayctatgcaggttatatgggtaaacttgtgtcatgggggtttgctgtacatattgtttcaacacccagatatgaagccatgtacccttgagttatttttcctgatcctctccctcttctcaccctccaccttctgacaggcctcactgtgtgttgttcccctctgtgtgtccatgtgttctcattgtttagctgtcacttataagtgagaacgtgcagtatttggttttctgttcctgtgttagtttggtaaggataattgcctccagctccatccatttccctgcaaaggacatgatctcgttcctttttatggctgcatagtattccatggtgtatatgtaccacattttctttatccagtctatcattgatgggaatttaggttaattccatgtctttcctattgtgaatagtg

SEQ ID NO: 203940 - DNA, 526 bp, Homo sapiens
tgagctctcacagcatggatgaaacctctctccctcgctaagggcataagcactcagcacgttaggacagtcctgcwtcttggcagggttgcagaaatgctacacgggatctaaatgtgagagaaaatatcctgaaaactgcgagaagcaatgtacctttcaggatctttttatttcttttgtcttacctctagagctaaatgtggtgtatttttctgagcatgtctctgtatctttctatgcaaggttttgggggagcatcgttcattcttttattcattcaattattcagcaaatgtttactgatgtacacttactatacaccaattccctataaggtatgaaggtaactgggggaccaagacacagtttctgccctcaaggagctcagagtttagttagggagggaaacgtggtagggagggaaacatgtaaaggagctggtgtctctcacatcctctctcttcccaaccccaccctccccactcctcctttatctcctgcttttccttctttaaattcatta

SEQ ID NO: 203941 - DNA, 362 bp, Homo sapiens
gaattcatgatgacaccaaaggtctatcaaggaagtcctggtggcacagcccaggaagaagcagaaatcaagaccccactggattcatagtaggtttcattatgaataatgccctcttcctttggggcctggcttcttyttttttttttttttagtgagcgacccacacatactacacatcagccaatgacagacccagctagacagtctcacactattttcccaaacttcagaacagacactatggttttcactgctatgcacataaactgtgtgtcttaaccttccctcctgcaagcatgcttctagtttgccttgggcagctggttcctccccttcaacaaaggtggggttcagcatga

SEQ ID NO: 203942 - DNA, 242 bp, Homo sapiens
ggttctccttctagaaacatggtaggattggaatttcataccatccttgaagttagagasagccacgtgactcatttagccaatgaactgtgagcagaatgacatgtcacttccagcagaaactttaagaatctgagagacagtcatacgttttccatgtgctgtagccttatacccaaagcctgggtcccaagtgaccatgacaggcagagctccctgttgagccacagagatttagagaa

SEQ ID NO: 203943 - DNA, 543 bp, Homo sapiens
ggattggaatttcataccatccttgaagttagagacagccacgtgactcatttagccaatgaactgtgagcagaatgacatgtcacttccagcagaarctttaagaatctgagagacagtcatacgttttccatgtgctgtagccttatacccaaagcctgggtcccaagtgaccatgacaggcagagctccctgttgagccacagagatttagagaatggctgttaacacagcataatctagcccatcctgactaatctgatattaacatgtataataaagaattctatcaatgctgagggaagatgattagttaaggtcctaggttgcaagtctcaaaacctcttctaaggattgtagacaggaaattaaatgacttctagtccctagagttcccaatctcctaccatcccatcctaatatgacagaagtaattcctgagttgcttctgaaaccagagcttctctcagaacccttagcctgccagatggcttcttggagagccctcactcacttttctccttctgctattgctgctcattc

SEQ ID NO: 203944 - DNA, 543 bp, Homo sapiens
ggattggaatttcataccatccttgaagttagagacagccacgtgactcatttagccaatgaactgtgagcagaatgacatgtcacttccagcagaaactttaagaatctgagagacaktcatacgttttccatgtgctgtagccttatacccaaagcctgggtcccaagtgaccatgacaggcagagctccctgttgagccacagagatttagagaatggctgttaacacagcataatctagcccatcctgactaatctgatattaacatgtataataaagaattctatcaatgctgagggaagatgattagttaaggtcctaggttgcaagtctcaaaacctcttctaaggattgtagacaggaaattaaatgacttctagtccctagagttcccaatctcctaccatcccatcctaatatgacagaagtaattcctgagttgcttctgaaaccagagcttctctcagaacccttagcctgccagatggcttcttggagagccctcactcacttttctccttctgctattgctgctcattc

SEQ ID NO: 203945 - DNA, 535 bp, Homo sapiens
gaattctatcaatgctgagggaagatgattagttaaggtcctaggttgcaagtctcaaaacctcttctaaggattgtagacaggaaattaaatgacttctagtccctagagttcccaatctcctaccatcccatcctaatatgacagaagtaattcctgagttgcttctgaaaccagagcttctctcagaacccttagcctgccagatggcttcttggagagccctcactcacttttctccttctgctattgctgctcattcattccagcttttaaaaattcatctttatccaggaacctcrcttctagaaaagtcaaaccggtgcttccaggaggctacagctatagagcagtgaccttgcctgtcatgttcagccctacatctcaaactccaagcacatggcggtcactcagttaatatttattaaatattgaacacttctttttcaaaaagcaaatttccttttgagtattcagctactggtagattaaacatgtcctcaaaagaaactatttgtaatcacgctaattaatt

SEQ ID NO: 203946 - DNA, 534 bp, Homo sapiens
tgattagttaaggtcctaggttgcaagtctcaaaacctcttctaaggattgtagacaggaaattaaatgacttctagtccctagagttcccaatctcctaccatcccatcctaatatgacagaagtaattcctgagttgcttctgaaaccagagcttctctcagaacccttagcctgccagatggcttcttggagagccctcactcacttttctccttctgctattgctgctcattcattccagcttttaaaaattcatctttatccaggaacctcacttctagaaaagtcaaaccggtgcttccaggaggctacagctatmgagcagtgaccttgcctgtcatgttcagccctacatctcaaactccaagcacatggcggtcactcagttaatatttattaaatattgaacacttctttttcaaaaagcaaatttccttttgagtattcagctactggtagattaaacatgtcctcaaaagaaactatttgtaatcacgctaattaattagaggaaaaaaggtaagagaattc

SEQ ID NO: 203947 - DNA, 575 bp, Homo sapiens
gaattcctaagttattgtctatggctgctttcatgctacaatggcccagctgggtagttgcaaagtctatttactctctggccctttacagaaaaagtttgcagacccctgctctagaggaaagagattaatgaaagcaaatatggaaactgacttagagaacactgagagttgaaggacaaaacaggaggagacaggatcactgacagagaagccagataggaaagctctagagaaaggcagattaacagccttcttggatctttgccctgagataaatgccaccaaaaaaaatctattaaggaaaatttcaatgggtataattcattgagccatgattaggtgctataaggaaacctgagaccaatacggaagaatataaaatttgatcccaaastgataacaaaaagatgaaatccagatggcttaaatataggtggaaaaaaaagaaaagaaagaaaggcgggagggagaaagaagcaaaaggaaaaaggaagagaggaggagggagggagggaaggaagaaagaaaagaaaactaaaaagttactagactaaaatataggaacatagttt

SEQ ID NO: 203948 - DNA, 600 bp, Homo sapiens
atgggaaaatcactgagcttcttaagataaataccacatgaatacagcatattcagatgactctgggggtaacctagatttcaaagcatagactcttatgtatcatagaattgcaggaacaactttgaatttaaattgtccactccatgatctgtgaaaaataataatcttggcaaataattacatattgcttattatatgtcagacggggcacttgacatgtgttaactcatttaatcctcacaactaccttaagtggtaggtacagttatgatttgcattttacagatgaagaaactgaagcacagaaaggctragtcaattaagcaaggtcacacagctagtgtgttgcagagcaggaatcagttgtaggccatctggttccaaaagctgtacttcttaatcactgttctaaacgctactagagttacagacagagctgatggtaaaacaataacaatcatcagaagtagaactcagtaactttttaccacagattgaagttgttaactctgaactttatactcaatgcattcagctttcaaccgtaagttaattacctcctgagcacacacagatgactccaagagacataactgc

SEQ ID NO: 203949 - DNA, 590 bp, Homo sapiens
ggtgcttctctattatagatattcactggacactataaatggtttgcttatgagctggaaagagggcattaacacagctttcaaaagtttactttcacaataaaatacatacactaaggaaacaactcagtaatgctggtgaaggaatcctatcgataggaattcaacttctaccagataaattctcaaaaatttactcccataagtatcataactttaaatcctgatgctccaagcaaacattttcttcctttactaatttcaaaatagataactctccagcagtgaggcacttctttctttagctttgagacttgtcacaaagattgrtttttaattatttatgcctacggttcagattagtttaattatccaccttttcatcatagcatcagcgatcacatgaagaccctgcagctctgaagtttagcttctacgaagtgatctcagcagggccccgtgcaccctcggagctcagagccttgcagaagagatgtttggtcccggggtggtatgccagccacatcgagagatggcttgtttatttccccccatttcaggtatggagtaataaggatttacatcatgtt

SEQ ID NO: 203950 - DNA, 588 bp, Homo sapiens
tgaggtgggacacagaattttaagtgaaraagaagggagaagcttatctttatcaaaattaaatattagatactgagtactttgtaaagtctgttgctgctggggatcaggcaaattgttataaccttcctggaaggcaatttcccataattatcagcagtttacagaatatccaagccatttgaccctaagataatgtttctagggatttctcttaaggatttaatcaaggacacatacacagattatagcagttcaaaattggaacccatctaattaacaataagggattgtttaattacacatgaaatattatttaaacatgaacattatattgcctttaaatatttgacatggaaagaagcttaaaactcagtcctatttccttatcaatgttctatcaacaaggggcaggaggtgtcacctccttgggaatcagagttggcccctcaggtaggtgtttggagcttccaggtaggggctggggacaaagtgtggatggggcacctgctggacctgtggcgagatcatcagggattgctattggtctcagcaagggagtgaggctgaccagttctcagctgcatt

SEQ ID NO: 203951 - DNA, 588 bp, Homo sapiens
tgaggtgggacacagaattttaagtgaagaagaagggagaagcttatctttatcaaarttaaatattagatactgagtactttgtaaagtctgttgctgctggggatcaggcaaattgttataaccttcctggaaggcaatttcccataattatcagcagtttacagaatatccaagccatttgaccctaagataatgtttctagggatttctcttaaggatttaatcaaggacacatacacagattatagcagttcaaaattggaacccatctaattaacaataagggattgtttaattacacatgaaatattatttaaacatgaacattatattgcctttaaatatttgacatggaaagaagcttaaaactcagtcctatttccttatcaatgttctatcaacaaggggcaggaggtgtcacctccttgggaatcagagttggcccctcaggtaggtgtttggagcttccaggtaggggctggggacaaagtgtggatggggcacctgctggacctgtggcgagatcatcagggattgctattggtctcagcaagggagtgaggctgaccagttctcagctgcatt

SEQ ID NO: 203952 - DNA, 419 bp, Homo sapiens
gcctaatattcttcccacccacggagctcttgccactgcctcaccgcagagactggaaccctgtcctttaactcccagctcagagtgtagggaagtgtttctcaaagtattctctgtgttatctgcttccaaattgcctggatactggttaaaaaccaaacctctggttccccttccagacttaaggatgagaattggctgtgggaatgagtgggaatctacgctgttgtgaagttccccacggggatctcctgcatcttaaggctcaaagrccatggacctagcccctggatactgggcataggcatctcagatgctgtctgtttcttcacttccctgactggcctgggctctggggttgggcccttcccatttctggatttgtgatacttgtcttgtatccccttttatcatagtgt

SEQ ID NO: 203953 - DNA, 598 bp, Homo sapiens
aaacttcagaagccaaaaataaagtaaaagcggacaccatgtaagataattaaataccaaagattgctcttgccctaagagtttcagctgagctcaggaaatcttaagcttctacattgctagctggaaagtcatttcagtttggtttaaagccaagttgctgaagcaaaagtgagttctatttagaggaaacaaaatttctaatgtttargaagttctacgaaaatgaacagtttacaccccaaaatgacaaaacacacaaggaaataagtcactgagagtgacagacaatagaaaagagcaaagggtatctgactctcaaatattaaatatagaaattatgagacacaaatttatgtaatatgctgaaaaaaatcaaagggaaaatttacaaatatgagcgataacaaaggctctaaaattaaaaggtcaagaaaatatggaggtaagttattacacagaattttcagtcatttatagagataattttgctgagactatttctttactaattgagtaagcagactatttgtccaaactggagaatgtgatatttcttatatgagcacatagttcctttgtagaaatagttaatgat

SEQ ID NO: 203954 - DNA, 537 bp, Homo sapiens
agataaatttttggtagtgaactggattccttctttgaggggacccaggcttcctgtgattcaaggggttctgggggctgtaaactagctcaagtctggaaattgattgcagcgtyctgaatatagttttatgatttgaattagagttttgttcatttgacctagaacttttctgcttacacagacagagtaataacttaggagccgccttactctatttcacttcaagttagaccatggttatcaaggaaatgccacaggtctgcactagtcagactattctaattccttctttgattctgtcgtccattaccataactatgtccaccttgtccttggtggttgagtgccacaacttggcctctgtccccatataggtttttcaattaagtagatgcagctcccactgtaaggtctagcctacagaggagaacaatcacagagctctttaaggaagctcacaaacttatttctcaaagtggttggtgaaaggtacatctttgggactgtccctctttgggtgagtagttcttagat

SEQ ID NO: 203955 - DNA, 524 bp, Homo sapiens
aagtctggaaattgattgcagcgtcctgaatatagttttatgatttgaattagagttttgttcatttgacctagaacttttctgcttacacagacagagtaataacttaggagccgccttactctatttcacttcaagttagaccatggttatcaaggaaatgccacaggtctgcactagtcagactattctaattccttctttgattctgtcgtccattaccataactatgtccaccttgtccttggtggttgagtgccacaacttggcctctgtccccatataggtttttcaattaagtagatgcagctcccactgtaaggtctagcctacagaggagaacaatcacagagctctttaaggaagctcacaaacttatttctcaaagtggttggtgaaaggtacatctttgggacygtccctctttgggtgagtagttcttagatagcaaatcttgtctatcactgcaatctccccaagaattcaatttcttctttacattaagccaagggaggtgggatatt

SEQ ID NO: 203956 - DNA, 588 bp, Homo sapiens
atttgaatttagaattaaggacaatttgtaatctcccactatctcctgacttttaayttaaaaaaagcaaaagccgattatctttagtaatgattaaggtatggtgagccttcagaaatttttgaagtaggagaagtttttcagccacttcttctcatatctctttcatatctctttcagtgcttatcttccaggagctaaagtcttttgtatcactccctggttgtcctgaactacttattattgtcttatgcactaaatctagatcttcctttcccagcattaccgttgtctccaaagttatctctcttttgttgaaccgatcaaactttaaccgtctggtttctcattctcttggctttctgctcctaaccagtgcttaggcagttagcatggtaggattagaaagagccttgagtcaaagttctggccaacacctgtggtgtgcccttctatgctgggcactattctaaatgcctagcatgttgtaacttgttcattctcgaaaacagtcctatgaaagcaggcaccatggggttaaatcacttgtctaaagtcacacagctatcaagtgggggaaccaggatt

SEQ ID NO: 203957 - DNA, 588 bp, Homo sapiens
atttgaatttagaattaaggacaatttgtaatctcccactatctcctgacttttaatttaaaaaaagcaaaagccgattatctttagtaatgattaaggtatggtgagccttcagaaatttttgaagtaggagaagtttttcagccacttcttctcatatctctttcatatctctttcagtgcttatcttccaggagctaaagtcttytgtatcactccctggttgtcctgaactacttattattgtcttatgcactaaatctagatcttcctttcccagcattaccgttgtctccaaagttatctctcttttgttgaaccgatcaaactttaaccgtctggtttctcattctcttggctttctgctcctaaccagtgcttaggcagttagcatggtaggattagaaagagccttgagtcaaagttctggccaacacctgtggtgtgcccttctatgctgggcactattctaaatgcctagcatgttgtaacttgttcattctcgaaaacagtcctatgaaagcaggcaccatggggttaaatcacttgtctaaagtcacacagctatcaagtgggggaaccaggatt

SEQ ID NO: 203958 - DNA, 588 bp, Homo sapiens
atttgaatttagaattaaggacaatttgtaatctcccactatctcctgacttttaatttaaaaaaagcaaaagccgattatctttagtaatgattaaggtatggtgagccttcagaaatttttgaagtaggagaagtttttcagccacttcttctcatatctctttcatatctctttcagtgcttatcttccaggagctaaagtcttttgtrtcactccctggttgtcctgaactacttattattgtcttatgcactaaatctagatcttcctttcccagcattaccgttgtctccaaagttatctctcttttgttgaaccgatcaaactttaaccgtctggtttctcattctcttggctttctgctcctaaccagtgcttaggcagttagcatggtaggattagaaagagccttgagtcaaagttctggccaacacctgtggtgtgcccttctatgctgggcactattctaaatgcctagcatgttgtaacttgttcattctcgaaaacagtcctatgaaagcaggcaccatggggttaaatcacttgtctaaagtcacacagctatcaagtgggggaaccaggatt

SEQ ID NO: 203959 - DNA, 588 bp, Homo sapiens
atttgaatttagaattaaggacaatttgtaatctcccactatctcctgacttttaatttaaaaaaagcaaaagccgattatctttagtaatgattaaggtatggtgagccttcagaaatttttgaagtaggagaagtttttcagccacttcttctcatatctctttcatatctctttcagtgcttatcttccaggagctaaagtcttttgtatcactccctggttgtcctgaactacttattattgtcttatgcactaaatctagatcttcctttcccagcattaccgttgtctccaaagttatctctcttttgttgaaccgatcaaacyttaaccgtctggtttctcattctcttggctttctgctcctaaccagtgcttaggcagttagcatggtaggattagaaagagccttgagtcaaagttctggccaacacctgtggtgtgcccttctatgctgggcactattctaaatgcctagcatgttgtaacttgttcattctcgaaaacagtcctatgaaagcaggcaccatggggttaaatcacttgtctaaagtcacacagctatcaagtgggggaaccaggatt

SEQ ID NO: 203960 - DNA, 601 bp, Homo sapiens
tgcccttcttgagatcagctsatggtgtaatatgtctgttttctaaatataaggaaggagaagggagcaaggacaaaaccccccctctgtataagttagctgtcttcaaacagcatttactgaagtcccctcaagcacttccacttaacacttctactatgaatctttggccagatagcttggccagtcttaacactgaagtagcctgggacacgttctctcttagctggatgcttttcagtcctgaataaaatcatcattctatgcagaaggggacagcaaatattgggtggaaaagggagtattggtaaccagttatgagatagttatagaaatccacataagaaataataacagtggcatggggcaggaacatttgtaaggtatttaaggtagatttgataggacacagtgattgatcagatgtgaatgatgagaaagatgggggagtcaaagtcaatgactaaactgaagtgacaaattggaaggaggtgccattctcacataaacaagaacatgaggagaaactgaacacatggagaaagtgatttaacagcttccacctttgttaaaattcaggtatgtgtagaggaatcaagaa

SEQ ID NO: 203961 - DNA, 649 bp, Homo sapiens
gaagccagtggtctggaaataggatacttgtaatcaagattatggagtggttgcagttatcagtaataaaaagatttayggaattctcagcagtcccttctcatttgaggagaagagatcatggttctggaaggccagttatcataaacatcatccacgtgcatattgaaatcacctaagacttatgacaggtattgatatggtttggctgtgtccccacccaaatctcatcttgaattcccacatgttatgggagggacccagtggaaggtaattgaattatgggggcaggtctttcctgtgctgttctcctgatagtgaataagtttcattaaatctgatggtttcataagggggagttgccctgcacaagctctctcttctcttgtctgccaccatgtgagacgtgcctttcatcttccaccacgattgtgaggcctccagagccatgtggaactgtaagtccattaaatctctttcttttgtaaattgcccagtctcaggtttgtctttatcagcagcatgaaaatagataatacaagcatggtgctgaagagaatgacaggagccaggagctagatgttcagggaatgacagggttagtagacaactgcagtaagaagaaataaaggtttggcctgagaatcaa

SEQ ID NO: 203962 - DNA, 577 bp, Homo sapiens
gtactgctaactaaatggcacttttactcatttctgtcagggtccaatcagcatggttagggtgatatttagggatcataatgatatgttagcagtgaataattttaacatattaactgtttattcctctggttgtcaggccctgaaaaaacagatgacagtacccttggttgattttacatttcttttggctgagatcactagtatattgaagtgttaaaatgtcacttctcacatttttctttgcaattaaagttggttcatctcacatttgtaattttttatttgtaaagaaagtaattggaaagtaagccctcttgttcattcagtttccccattagggaactttcatattaatgttataaatattcttaattattgtagtagcaccttcagcaaaatcaattgccatatcaagttgataatatyatacaatatacatatttacataaatcctcgaagctattattctattttttttccataagttattggggtacaggtggtatttggttacatgaataagttctttagtggagatttgtgagatcctggtgcacccatcacccaagcagta

SEQ ID NO: 203963 - DNA, 579 bp, Homo sapiens
cggtggtactagcacaggggcctttgagaagcaattaggtaatgaggatggagccctcatgaatgggattagtggccttataaaaagcatcctatagagctctctcactttgttttcaccatgtgaggatacaacaaaaagtcagcaggctacagcctggaagaaggccctcaccagaacctgaccaagctgacaccctcatctcaaacttccatcctctagaactgygagaaataaatttctgttgtttataagccaccagtttatggtactttgttatggcagcctaaactgtctaagacacctgtcttgtcaatgaaacaacaatatatactcaaggactcatttatattattttaaaaagcattattgagctcatagtatttgccaattgcagtaatatgcacttgctgttctctgcatgggaccataaagatgaataaaatagttactctacaacctgagatacagaggtggaaacaaaacaccacacaataatgtaataacaacagaaacagattaataagtaaagtaatatgggaacatagaataggaagcaactaactttatttaaaggta

SEQ ID NO: 203964 - DNA, 579 bp, Homo sapiens
cggtggtactagcacaggggcctttgagaagcaattaggtaatgaggatggagccctcatgaatgggattagtggccttataaaaagcatcctatagagctctctcactttgttttcaccatgtgaggatacaacaaaaagtcagcaggctacagcctggaagaaggccctcaccagaacctgaccaagctgacaccctcatctcaaacttccatcctctagaactgtgagaaataaatttctgttgtttataagccaccagtttatggtactttgttatggcagcctaaactgtctaagacacctgtcttgtcaatgaaacmacaatatatactcaaggactcatttatattattttaaaaagcattattgagctcatagtatttgccaattgcagtaatatgcacttgctgttctctgcatgggaccataaagatgaataaaatagttactctacaacctgagatacagaggtggaaacaaaacaccacacaataatgtaataacaacagaaacagattaataagtaaagtaatatgggaacatagaataggaagcaactaactttatttaaaggta

SEQ ID NO: 203965 - DNA, 587 bp, Homo sapiens
agatttcagatttcctaaaaattttatttaaaccaccttttacaatcagccattttggggctatgataataaatgaatgcttactaaatttctttcctctcttcctttttttttctggagatgctaaattgcagtgaaataatcaaaaggacgacatttgaaaagagaagcaaatgtaaaagaggagacactctttgtaaaactgccttaaaagctaytcagctggaaattattcttaaaaattaattgttgtacaagaagttattatgaattctgaaataatttgagtccaccattgaaaattaataaaattaaaatacattcctcattcagtgggtttaatttgctctatgaaactttggcacagtaaggcccagaagttctgtgatcaagatttattgggtagcttgcccaactctaccttgcaccctccatgtctcagctcatgtatctgtaaaacagaaataacattagtatttttcttacatgtgtttgaacattagaaaatataatttaagtagaatgttaagacaatgaagcctggaatatagtaagcagtaaatatatgtaagcagtaaataaatgat

SEQ ID NO: 203966 - DNA, 587 bp, Homo sapiens
agatttcagatttcctaaaaattttatttaaaccaccttttacaatcagccattttggggctatgataataaatgaatgcttactaaatttctttcctctcttcctttttttttctggagatgctaaattgcagtgaaataatcaaaaggacgacatttgaaaagagaagcaaatgtaaaagaggagacactctttgtaaaactgccttaaaagctactcagctggaaattattcttaaaaattaattgttrtacaagaagttattatgaattctgaaataatttgagtccaccattgaaaattaataaaattaaaatacattcctcattcagtgggtttaatttgctctatgaaactttggcacagtaaggcccagaagttctgtgatcaagatttattgggtagcttgcccaactctaccttgcaccctccatgtctcagctcatgtatctgtaaaacagaaataacattagtatttttcttacatgtgtttgaacattagaaaatataatttaagtagaatgttaagacaatgaagcctggaatatagtaagcagtaaatatatgtaagcagtaaataaatgat

SEQ ID NO: 203967 - DNA, 587 bp, Homo sapiens
agatttcagatttcctaaaaattttatttaaaccaccttttacaatcagccattttggggctatgataataaatgaatgcttactaaatttctttcctctcttcctttttttttctggagatgctaaattgcagtgaaataatcaaaaggacgacatttgaaaagagaagcaaatgtaaaagaggagacactctttgtaaaactgccttaaaagctactcagctggaaattattcttaaaaattaattgttgtacaagaagttattatgaattctgaaataatttgagtccaccattgaaaattaataaaattaaaatacattcctcattcagtgggtttaatttgctctatgaaactttggcacagtaaggcccagaagttctgygatcaagatttattgggtagcttgcccaactctaccttgcaccctccatgtctcagctcatgtatctgtaaaacagaaataacattagtatttttcttacatgtgtttgaacattagaaaatataatttaagtagaatgttaagacaatgaagcctggaatatagtaagcagtaaatatatgtaagcagtaaataaatgat

SEQ ID NO: 203968 - DNA, 490 bp, Homo sapiens
aaaataactaatgggtactcagcttaatacctgggtaattaaatagtctgttcaacaaaccccgtgacacaagcttatctatataacaaactgcactgtacccctgaacttaaaataagctaaaaagactataatagcwtattgttactggtactttttctatgtttaggtatgtttagatacacaggtacttaccattgtgttaacaattgcctgtagtgttcagtacagtaacatgctgtataggtttatagcctaggagcaccaggctagaccatacagcctaggtgtgcagtacgctacacaatataggtttatgtaaggacattctatgatgtttgcacaatgatgaaatcatctaataatgcattttttaggatgtatccctgttattaggtgacacgtggctatattttgttgttgtcagcgagacacagggcatgctgagtgtagatccagacagcttactccttgaccccatcagcattac

SEQ ID NO: 203969 - DNA, 490 bp, Homo sapiens
aaaataactaatgggtactcagcttaatacctgggtaattaaatagtctgttcaacaaaccccgtgacacaagcttatctatataacaaactgcactgtacccctgaacttaaaataagctaaaaagactataatagcttattgttactggtactttttctatgtttaggtatgtttagatacacaggtacttaccattgtgttaacaattgcctgtagtgttcagtacagtaacatgctgtataggtttatagcctaggagcaccaggctagaccatacagcctaggtgtgcagtacgctacacaatataggtttatgtaaggacattctatgatgtttgcacaatgatgaaatcatctaataatgcattttttaggatgtatccctgttrttaggtgacacgtggctatattttgttgttgtcagcgagacacagggcatgctgagtgtagatccagacagcttactccttgaccccatcagcattac

SEQ ID NO: 203970 - DNA, 571 bp, Homo sapiens
gaaaatgtcacacatcggggcttttaggaaggaatcattgccgtgccttggtgaagggtgagtatggctttaacaactgctggtggaggagccttggaggaaagaacaggatagtaaatgcaattgcttgtctcctgagagttaactcacagtccagatgtcctaccacctatctacctgtagtctgaaggcactttgtgagtaataaaagcatgtaaattgtaaattcttctccttttctctttcaatatcttacaatgtatcaatgacaattgctattgttattggtaacaggttgatgtcataccraaggctttggagccaaaaaagcttgtgtttgaactccggccccaccattgtatggtcttagacaaatgacttaacctctttaagccttgatgtccatactgtaaaaaacgagacaataaaacctacttattgtaaggatataatgacattattaacatatctattctattgcctgatgcatagcataagctcaaaaatactagttttcctattctaaaatgtttaaaaaaaattataatccatacctcttctacttcagaaa

SEQ ID NO: 203971 - DNA, 622 bp, Homo sapiens
attctatgagttttttcacagagcagaggttccacactgggaaaggaaagccaagaaggccaaggggctactgccctacctagcaccctacttagagattaggcatattactctgagacaagcaggccattatgtaggtcctgcacaggaagagaagcagactgtaagcatagagagatccatagctcacatcatggtgactgggtttattttgaacagagtttggggaagttcaagcctaagaatgctgtgaattcaaaaaaaatgaagaagattttggtggtaagcaattaaggaaaggcaggtagctccatgagaacaagtgaaatagtaggttagctagaagtttaacagagaatcagggaaagagagcctagaagagtcctcctggggtctgaccaagctgtgaagattggcctcaaagaccatctttgtaaaagagatgatattccttggttcagagtgtgaagtaatttgtgcccctgaacattatcaaaaaagaacaatcagctagcaattatraaagttcaatagctagaaagttatgacaccagaggcagaccacttagaagctttgcatggacaaggaaagagaaagtcaaagagattccagctaaaacca

SEQ ID NO: 203972 - DNA, 433 bp, Homo sapiens
acagaatttgtaagcatttggattagtgttaggcacatagtaggaataataaaagtatttattaagttaaaataaagtagtgcatacaatgtaagcattactataattcagaagaaggagggacttgagaatgagaggaataatgaagccagtttggatctgattggagtgtataaggattgtgaagtttccaggttggagggggctgtttctagagagttagaaaaattgttctggagctyggaactcaggatagaggattggatttaagatgaaaatccaggaatctttagggtttaagtcatggttaaatctttgataaaatccaaaagtgaaaagaagaggatcaagggaaaagtcctggggataataacaagtcagtgcaaagagaggtcttccaaaggagagaaaaaaagactggccaaaaaggtga

SEQ ID NO: 203973 - DNA, 637 bp, Homo sapiens
ctctctagaaattgagtcccagaccccaaaattatatctcattctrtaaacaagagacaacacacttatcttaaaattattttaacaggagtatattattgtttaagcatcttcccttggggtatttctcattcttatagaggaggaaaattttctttttcttactcatcattaggttcatggctgagacacccataataaaatacagattaataagagaaaagcatacaaatttatgtaatatgtttcatgtgacaatgggtacttcatagggggatgaagacccaaacaatcagagaaacctatatatttttatgctaagtttgataaagaagttgacggttgtggagaagtatgattggacaaaaggcaatatgatctaacggtaattagctgggggggcgttggcaaggcctgtttgttcggattattctctgtgtccctgtgacttcagagataaggaagttcttttcctcgggatatggggtggacacctctcacattaaagtcttatgatttacttcagaagatggtcagagaattgtttcatgacctgcctcagaaagaaaatgtgaggggaaggagagagagaccatcccgcgtctgctgttttctccagtatcaagatgccatattt

SEQ ID NO: 203974 - DNA, 571 bp, Homo sapiens
gagacaacacacttatcttaaaattattttaacaggagtmtattattgtttaagcatcttcccttggggtatttctcattcttatagaggaggaaaattttctttttcttactcatcattaggttcatggctgagacacccataataaaatacagattaataagagaaaagcatacaaatttatgtaatatgtttcatgtgacaatgggtacttcatagggggatgaagacccaaacaatcagagaaacctatatatttttatgctaagtttgataaagaagttgacggttgtggagaagtatgattggacaaaaggcaatatgatctaacggtaattagctgggggggcgttggcaaggcctgtttgttcggattattctctgtgtccctgtgacttcagagataaggaagttcttttcctcgggatatggggtggacacctctcacattaaagtcttatgatttacttcagaagatggtcagagaattgtttcatgacctgcctcagaaagaaaatgtgaggggaaggagagagagaccatcccgcgtctgctgttttctccagtatca

SEQ ID NO: 203975 - DNA, 637 bp, Homo sapiens
ctctctagaaattgagtcccagaccccaaaattatatctcattctgtaaacaagagacaacacacttatcttaaaattattttaacaggagtatattattgtttaagcatcttcccttggggtatttctcattcttatagaggaggaaaattttctttttcttactcatcattaggttcatggctgagacacccataataaaatacagattaataagagaaaagcatacaaatttatgtaatatgtttcatgtgacaatgggtacttcatagggggatgaagacccaaacaatcagagaaacctatatatttttatgctaagtttgataaagaagttgacggttgtggagaagtatgattggacaaaaggcratatgatctaacggtaattagctgggggggcgttggcaaggcctgtttgttcggattattctctgtgtccctgtgacttcagagataaggaagttcttttcctcgggatatggggtggacacctctcacattaaagtcttatgatttacttcagaagatggtcagagaattgtttcatgacctgcctcagaaagaaaatgtgaggggaaggagagagagaccatcccgcgtctgctgttttctccagtatcaagatgccatattt

SEQ ID NO: 203976 - DNA, 525 bp, Homo sapiens
tgcttctgtgagcacaggactgcgggctggctttacttcttcttcctgtctggggtgcttctgtgagcacagactcggggctggcagctttctctcctttcaccactgctgagatgccattcaatcttcttttggctcccatggtttcactgaaagtcagctgtgaaacctttgttgtttctttgaagataagttccaaaaattatttataaatgtaatacaattccaatcagaatcccaataggatttttaaaaatagaaatgaacaggctgtcctgaattttacaaggaggtataaacgatcaakaatggccaggatgagtgtggtgaagaccacagcagatgccaggatttattatcaaccatttattaagacagcattacattggctcaggaatgggcaaacaaccttatatccttcttcaaacaaaaaatatgggttgcttgtctttttcatattgatttacagagttttgtttttctggatacaattttttgtaagttctatgactggcaaatgccttc

SEQ ID NO: 203977 - DNA, 522 bp, Homo sapiens
agtttggcaggaggtgctattaaaatattgaaagtaatcacaaaaactgcaattacttttgcaccaacctaatagttgctctccttaagtatctcctagagccagtgatgtgagagtgagcacttggaatggagccgtggtcttccacagcctgatctcagaggtgacacccacaacatctgccactgtcatttggcctggktccaacctagtgtgatgagaagtgaataccaggagccagggaggcatggtcaggttgtggcaccatggaggctgctagcaccaaagtgggcatattcaaatgcacttcctcttgtagtggtttgttctcatgctgctataaagaactgcctgagacttggtaatttatgaaggaaagaggtttaattgactcacagtttcacaaggctgaggaggcctcaggaaacttacaatcatggtggaaggggaagcaaacatgtccttcttcacatggcagcagcaagaagaagtgcagagtgaagggggaagccctttgtaaaa

SEQ ID NO: 203978 - DNA, 605 bp, Homo sapiens
tgaggacatgcccaaggcagtaggaagggcaaggcgaggcttccagtctcagagcacagaaggcgttttcccaccactcagcacactggcagctcctcttaggtgatccaggtcacacatgagacgccattcccgccttgggggctgcctgctgataatggaacaatatcacccttaattttcactatttctaagatcagacttctattttatgtttattatggagtttgtccaatggccaggtttgtaacataacctccaatgtttggtttgtgacataacatcttatagaattttagatgctggtttccagtgagacttgatggagttttttcatgggttttcatggagttgatcttattacatccaccattatgctgcattctgtagggaacacaaaatgattcctctcctcaataaaccagtcacctagttgaagataaagggtgttcagaaaagatggtcacaaaacaattagggrctagattctgtgatccatgtgagatgccaatgatgtgattctggaaagcagaaggtgaggttgtgagataccctgcagcacataatgcccaaggctagggtggcgagtagagggcccctggtct

SEQ ID NO: 203979 - DNA, 543 bp, Homo sapiens
ctgcacccatggtcagtgcccaaacctccatgttgttcaagggtcaactgctcattcaatctgtagctgcatctctctggaacaggatcttggcaggtgggttgcaagtaaaggaatccagaaaataacatctcaaactaygctgcactggtatgatgattatgtaaaaccaaagacatttagaaagcaccaaatgcacaaaaagacttttcctaaatgtcccttatctgcataatagcagattctccagaaggaaaccaattgtcaaaaaaattcttcctgagaatttttacatcagggaatattaacacaaaagaggaatctaaaatacaagagactgaagttgatgctttatccagacaggctatgacctgttcttttgaggatgcacttctgttctcatctattctttccaggttgcctacacttctcaattccctcttccttagaaaagaaatataaacaactgtatcccattgagttatctgggtaatcaccctgctatgatattctgctgcacttcaaatgaattttgtttgtctt

SEQ ID NO: 203980 - DNA, 376 bp, Homo sapiens
gcagcttaaaaaacagcaggaaggtttgtgcacagcctgcagcactgtgatttggctcccctagtcaggcatcagtaaaattttgtggagtcctaggtggcagcccactgatgctgatgtagttggatccactttccctgctactragtcaggctgggacatttttgggcacattagagatatgagatataacgagtgcaaatccctgtccagtttcatctggatccaagtgatttctccatgtacataggcaactgcttgataagagattcagtgtctctttcctaaagcagttaacagggaggctgttgcctgggtcaggatgatttccccaatcactgataaaaagtaaaagaggaaagtgtcattgatggtg

SEQ ID NO: 203981 - DNA, 376 bp, Homo sapiens
gcagcttaaaaaacagcaggaaggtttgtgcacagcctgcagcactgtgatttggctcccctagtcaggcatcagtaaaattttgtggagtcctaggtggcagcccactgatgctgatgtagttggatccactttccctgctactgagtcaggctgggacatttttgggcacattagagatatgagatataacgagtgcaaatccstgtccagtttcatctggatccaagtgatttctccatgtacataggcaactgcttgataagagattcagtgtctctttcctaaagcagttaacagggaggctgttgcctgggtcaggatgatttccccaatcactgataaaaagtaaaagaggaaagtgtcattgatggtg

SEQ ID NO: 203982 - DNA, 376 bp, Homo sapiens
gcagcttaaaaaacagcaggaaggtttgtgcacagcctgcagcactgtgatttggctcccctagtcaggcatcagtaaaattttgtggagtcctaggtggcagcccactgatgctgatgtagttggatccactttccctgctactgagtcaggctgggacatttttgggcacattagagatatgagatataacgagtgcaaatccctgtccagtttcatctggatccaagtgatttctccatgtacataggcaactgcttgataagagattcagtgtctctttcctaaagcagttaacagggaggctgktgcctgggtcaggatgatttccccaatcactgataaaaagtaaaagaggaaagtgtcattgatggtg

SEQ ID NO: 203983 - DNA, 500 bp, Homo sapiens
agtgtcccaggtcagaccagggcacctagatttgcctgcagagaatgtttcttcctaaaggatattttgttaccaagtacatttttgagcatttattggcaaatctcgaagtggttgtgagaactagatggaataatatatttcaatgcygtattgggcataagtaggagaatatccttgtttgtagagaattcttaataaagtcttagagagtggggctatcaggtcttcaacacactgtgaaattgttccagttgggagcgatactttgtgacatacatactacatttttgtaagcatgaaattgatctttttttaagtaaaaaagaacacttagtcatgagcaagtaaaatgttctcaaaagcattttgtaatggccctaaaccaatgttattaccagtctaagctgaagaggtttactgcagattgacaaagaagatgatattgggattccttaaagcatatgacatccacagttcctgcattgtccagagctata

SEQ ID NO: 203984 - DNA, 500 bp, Homo sapiens
agtgtcccaggtcagaccagggcacctagatttgcctgcagagaatgtttcttcctaaaggatattttgttaccaagtacatttttgagcatttattggcaaatctcgaagtggttgtgagaactagatggaataatatatttcaatgccgtattgggcataagtaggagaatatccttgtttgtagagaattcttaataaagtcttagagagtggggctatcaggtcttcaacacactgtgaaattgttccagttgggagcgatactttgtgacatacatactacatttttgtaagcatgaaattgatctttttttaagtaaaaaagaacacttagtcatgagcaagtaaaatgttctcaaaagcattttgtaatggccctaaaccaatgttattaccagtctaagctgaagaggtttactgcagattgacaaagargatgatattgggattccttaaagcatatgacatccacagttcctgcattgtccagagctata

SEQ ID NO: 203985 - DNA, 500 bp, Homo sapiens
agtgtcccaggtcagaccagggcacctagatttgcctgcagagaatgtttcttcctaaaggatattttgttaccaagtacatttttgagcatttattggcaaatctcgaagtggttgtgagaactagatggaataatatatttcaatgccgtattgggcataagtaggagaatatccttgtttgtagagaattcttaataaagtcttagagagtggggctatcaggtcttcaacacactgtgaaattgttccagttgggagcgatactttgtgacatacatactacatttttgtaagcatgaaattgatctttttttaagtaaaaaagaacacttagtcatgagcaagtaaaatgttctcaaaagcattttgtaatggccctaaaccaatgttattaccagtctaagctgaagaggtttactgcagattgacaaagaagatgatwttgggattccttaaagcatatgacatccacagttcctgcattgtccagagctata

SEQ ID NO: 203986 - DNA, 500 bp, Homo sapiens
agtgtcccaggtcagaccagggcacctagatttgcctgcagagaatgtttcttcctaaaggatattttgttaccaagtacatttttgagcatttattggcaaatctcgaagtggttgtgagaactagatggaataatatatttcaatgccgtattgggcataagtaggagaatatccttgtttgtagagaattcttaataaagtcttagagagtggggctatcaggtcttcaacacactgtgaaattgttccagttgggagcgatactttgtgacatacatactacatttttgtaagcatgaaattgatctttttttaagtaaaaaagaacacttagtcatgagcaagtaaaatgttctcaaaagcattttgtaatggccctaaaccaatgttattaccagtctaagctgaagaggtttactgcagattgacaaagaagatgatattgkgattccttaaagcatatgacatccacagttcctgcattgtccagagctata

SEQ ID NO: 203987 - DNA, 599 bp, Homo sapiens
cctctcttgaatttctaggatacctgaggtgtttgtccaggtacaacagaaagtgttggaaattgtatacaatcctcccagttgggattttaaaaaagtctagagcaacactgttatctaaaacatccatcccgatggagttaagggatgtctgctgggctaccaaggcagtggctatggaggaggagccatatctgccatggtcagggacacatttcttatcatttctctttttyacatgagcactgactcctatacatagtaccaaaaatatcacaaaagacataaacccatagtctgttataccttctggcaggtccctagtaagtctgaggtacagctttgggctgcaggctcaatggttcacctaattccaaggagtaatatccagagacaagcccagcatgcccaacatgcagaatctcaccatcccacagttatccagagatggcatcacacatcctgcattttgttcactcccagaccattcacagagaaatatgtagcccttgggtgcatacagccccctttctcccattttattgtttaatcacccagtcatggttatgcaggtattggtgtgttcattagccaagtct

SEQ ID NO: 203988 - DNA, 642 bp, Homo sapiens
catataattgttttagtcctggacttaatctttatatcaggtaaagtaaacattttttgtagcttctttctaacttttttcattttttgaggccttggttccttcttgtcaatttgagttgctgtctgctgtcattctctgttattctgaagaattttctcttgaatctcttacaaggcatatatgctattaatgaattaatctttgtgtatgaaggaatatttctaccttgcttttatatttaaacgattgtttttctggatatagaatttgtggctgagaatttgtggctcagtatttaaaaatatcattccactgtcttctcacctccatttgtaatgrtgaaaatttagccaatgattttaatattgcttcttagtataaagtaagtcggtattttagtgatgcatttcaaattctctgggtctttgtctttcaacactggtactataatgtgtatagttatgaattgtactgtgcttatcctaaaagggtttcactgagtttctttcatgtatagattaaggtgtctcatcactgtaaaaaatgtttttcattatttctccatttttttctttttcaatttttattttaaaatcagagcatacatgtacagatatgttacaaagttattttgcatga

SEQ ID NO: 203989 - DNA, 642 bp, Homo sapiens
catataattgttttagtcctggacttaatctttatatcaggtaaagtaaacattttttgtagcttctttctaacttttttcattttttgaggccttggttccttcttgtcaatttgagttgctgtctgctgtcattctctgttattctgaagaattttctcttgaatctcttacaaggcatatatgctattaatgaattaatctttgtgtatgaaggaatatttctaccttgcttttatatttaaacgattgtttttctggatatagaatttgtggctgagaatttgtggctcagtatttaaaaatatcattccactgtcttctcacctccatttgtaatggtgaaaatttagccaatgattttaatattgcttcttagtataaagtaagtcggtattttagtgatgcatttcaaattctctgggtctttgtctttcaacactggtactataatgtgtatagttatgaattgtactgtgcttatmctaaaagggtttcactgagtttctttcatgtatagattaaggtgtctcatcactgtaaaaaatgtttttcattatttctccatttttttctttttcaatttttattttaaaatcagagcatacatgtacagatatgttacaaagttattttgcatga

SEQ ID NO: 203990 - DNA, 642 bp, Homo sapiens
catataattgttttagtcctggacttaatctttatatcaggtaaagtaaacattttttgtagcttctttctaacttttttcattttttgaggccttggttccttcttgtcaatttgagttgctgtctgctgtcattctctgttattctgaagaattttctcttgaatctcttacaaggcatatatgctattaatgaattaatctttgtgtatgaaggaatatttctaccttgcttttatatttaaacgattgtttttctggatatagaatttgtggctgagaatttgtggctcagtatttaaaaatatcattccactgtcttctcacctccatttgtaatggtgaaaatttagccaatgattttaatattgcttcttagtataaagtaagtcggtattttagtgatgcatttcaaattctctgggtctttgtctttcaacactggtactataatgtgtatagttatgaattgtactgtgcttatcctaaaagggtttcactgagtttctttcatgtatagattaaggtgtytcatcactgtaaaaaatgtttttcattatttctccatttttttctttttcaatttttattttaaaatcagagcatacatgtacagatatgttacaaagttattttgcatga

SEQ ID NO: 203991 - DNA, 642 bp, Homo sapiens
catataattgttttagtcctggacttaatctttatatcaggtaaagtaaacattttttgtagcttctttctaacttttttcattttttgaggccttggttccttcttgtcaatttgagttgctgtctgctgtcattctctgttattctgaagaattttctcttgaatctcttacaaggcatatatgctattaatgaattaatctttgtgtatgaaggaatatttctaccttgcttttatatttaaacgattgtttttctggatatagaatttgtggctgagaatttgtggctcagtatttaaaaatatcattccactgtcttctcacctccatttgtaatggtgaaaatttagccaatgattttaatattgcttcttagtataaagtaagtcggtattttagtgatgcatttcaaattctctgggtctttgtctttcaacactggtactataatgtgtatagttatgaattgtactgtgcttatcctaaaagggtttcactgagtttctttcatgtatagattaaggtgtctcatcactgtraaaaatgtttttcattatttctccatttttttctttttcaatttttattttaaaatcagagcatacatgtacagatatgttacaaagttattttgcatga

SEQ ID NO: 203992 - DNA, 580 bp, Homo sapiens
tactgtcttacagtatataatatatatttgtatttctgcttatgaataatcatatgtaatacactgtctaacattgcatgtggtaagatagtccattgatttagaccacagagcaaacagtggctcgtggcccctttgttttctggctgttgtggcacacagatctccacaatgaccccactgcctctggaggactgtccgtgagtaattccaccctgattgcatctatttccagtagctgagaggcttcatttcttcagtagccctcccctactccatctgtattagtctgttttcatgctgctgataaagacatacctgagtctgagaagaaaaggaggtttaatggacttacgattccacgtggaggcctcacaatcatggtggaaggcaaggaggagcaggtcatgtcttacatggatggcggcaggcagaaagagagcttgtgcaggggaacttccccttataaagctgtcaaatctcgtgagacttattcactatcacgagaacatcacargaaagacctgcccccatgattcaattacctcccacctggtccctcccacaacatgtgggaatt

SEQ ID NO: 203993 - DNA, 578 bp, Homo sapiens
tccctggatgagccctgggccacttgcatctgaggcattggttaggtggagaggcttggggcccacttggctgcatacggaayccacaggatggagatgtggccagaggtaaccgtcagccctttcatcctgaagtctgtgcaacattctctgatccagatgaggagcagccaggaagcagcatttgggtgccctccacctgcccactcacacagcctgcgtgggtctggctggcttttgtctcatggcttgctcggtaggatctctgagtaaatggctggctcgcggcactcagtgccctttgactcctaacctatacccttggacccacagttccaaatctggaatttatcctaacagtcagacaaatacccacaggggtgtgtactttcaggatgtgctgcagagtggctttgcaggctagagtttcctgggaggtcatcactgagatattggttcaaggcacctgctcagcccacactctggcagaagacactgaggcaggatttgaggtacagaatgcttattagggatcaaacccatgccaggaggaggaggtagcaggatgggcagaggga

SEQ ID NO: 203994 - DNA, 373 bp, Homo sapiens
aactgagcaaaaactcccttatcaccaacgggatggggcaaatcactcaccatatatattagaaataacttcatgtacatacaaatgcgtatgacatttaacttaaaatataaaacacgtgttttatatcggctgacatgtttgtaaaaggtactatatagtcatgaactttgaggacactgagattatagctacttacaactaacacattagccagccatagttcatggatgccagccaaagacaggagactctcggcccagacacaagtgacattgtcagtcacagcagcagcagagccagagtgtaagcacctgtgcaggttccccaggactygccatggtagacaggatagcaaccctccccaaaacgc

SEQ ID NO: 203995 - DNA, 599 bp, Homo sapiens
tgtcaatctaacaaaagccaaatgtttcattttctttctttttagaaatggcacatttatttctaagaagtcttccaaactacccccttttcttgtctcttagcaggttgttaggygatgcaggcatttcaggaaagtcacaaagttacttggtcatacctcaccaaatatcagtattcttaacacacaatataaaactgaggctatcagaatatttaataaaccagatgagcacaacatcctcttaatgatcactaatgtttccattatcccttgtggcaatttaaattcactaaaataagaacaatcatgcaaccttctttttggcttacatcaaggaagattccatttctatgaaacccacatcttcaagattacactgtaaagacaaattgaactaaaactttgaagatttctacacaaatgcaaagaattcagatctgggattccatcttttattctaatgcatacttgatctggttgtattctgaatcctccttacaggaatgtgatgtggactgacacgtaatttggaaactactagaaggctcttgaatggaaccagggattcttcacacttcatagagcagctgaaaggg

SEQ ID NO: 203996 - DNA, 596 bp, Homo sapiens
gatggttgtggtgagccccacacacccgcccccagaggctccttcctccacccacaatactcagttatgtggatggctgcgttcgtataaagataaatatattaatgtgggttcaaacgttctttggcctaaatgtttattattttcttctgattttaaagcaagttaaagattttgtgaccacacttgctcctgtggccctaggcactgtggctatggtgccgcctgggtaggctggccctggggaaactggacttccacctgcctcaggggaggaattggcctttcgtccyaagaaaagtctcctcagaagaacccgagtgggagtgaaaagcaaaagtgagttgggccccagggccccctgccccaccgggcataaatatacccacaggcatgcacacactcacaggcacaggtgaccgtgaccgcccgtacacctgtgtgcacgcccttgtgcacacacacgcacacccacccacacccatacacacacgtgcacacaggcacacgcacctatacatgctcatgacacacagacccacacacacacctgcacacacctcacatgcacacagctgctccaggatccttctgct

SEQ ID NO: 203997 - DNA, 596 bp, Homo sapiens
gatggttgtggtgagccccacacacccgcccccagaggctccttcctccacccacaatactcagttatgtggatggctgcgttcgtataaagataaatatattaatgtgggttcaaacgttctttggcctaaatgtttattattttcttctgattttaaagcaagttaaagattttgtgaccacacttgctcctgtggccctaggcactgtggctatggtgccgcctgggtaggctggccctggggaaactggacttccacctgcctcaggggaggaattggcctttcgtcctaagaaaagtctcctcagaagaacccgagtgggagtgaaaagcaaaagtgagttgggccccagggccccctgccccaccgggcataaatatacccacaggcatgcacacactcacaggcacaggtgaccgtgaccrcccgtacacctgtgtgcacgcccttgtgcacacacacgcacacccacccacacccatacacacacgtgcacacaggcacacgcacctatacatgctcatgacacacagacccacacacacacctgcacacacctcacatgcacacagctgctccaggatccttctgct

SEQ ID NO: 203998 - DNA, 596 bp, Homo sapiens
gatggttgtggtgagccccacacacccgcccccagaggctccttcctccacccacaatactcagttatgtggatggctgcgttcgtataaagataaatatattaatgtgggttcaaacgttctttggcctaaatgtttattattttcttctgattttaaagcaagttaaagattttgtgaccacacttgctcctgtggccctaggcactgtggctatggtgccgcctgggtaggctggccctggggaaactggacttccacctgcctcaggggaggaattggcctttcgtcctaagaaaagtctcctcagaagaacccgagtgggagtgaaaagcaaaagtgagttgggccccagggccccctgccccaccgggcataaatatacccacaggcatgcacacactcacaggcacaggtgaccgtgaccgcccgtacacctgtgtgcacgcccttgtgcacacacaygcacacccacccacacccatacacacacgtgcacacaggcacacgcacctatacatgctcatgacacacagacccacacacacacctgcacacacctcacatgcacacagctgctccaggatccttctgct

SEQ ID NO: 203999 - DNA, 312 bp, Homo sapiens
gaattcttatgcattctgcaattctgtatcttttaggtggagcatttagaccatttacattcaatgttagtactgagatgtgaggtatcattccattcattgtgctatttgttgcctgtaccccttgggtttttgtgattttgctggtttttttmattgtatttttgttgtataggtcctgtgagatttatgctttaaagaggttgtgttttgatgtgtttccaggatttgtttcaagatttagagctccttttagcagttcttgtagtgctgccttggtaggggtgaattttctcatcatttgtttgtctg

SEQ ID NO: 204000 - DNA, 346 bp, Homo sapiens
gagaagacagtctcttcaacaaaggatgctggcaaactggatatccacatacaaaagagtgaagttatgccatatacaaagattaacccaaaatggataaaatacctaagtgtgagatccaaaaatttacaactcttagaagaaaacacagaggaaaarcttcataacattggttttggcaatgatttctcagatataacatcaaaaagtataagcaccaaaagcaaaaatagacaaatgacactatatcaaactgaaaaccttctgcacagcaaaagacaagtgaaaaggcaacctataagaataggagaaaatatatgccaatcatatttgataaggggttcat

SEQ ID NO: 204001 - DNA, 572 bp, Homo sapiens
tatcttgctttatagagtgatgtactgaaactgaacaacagaaagactggattgaagtaactcagcaggtcagagacaaagctgtctaagaccagatgtcctggtctgaaggtgaggtcttggtgggtaatgggtcttccaagggctggggagaggttaggggcttagattgaatgtaagaagggaggggacccacagggtcaagggcttagacagaagggtgctcaggaccaaggcctgagagggtctcgagggcaggaaaaggagttgcttakggctggtcagggagacctagaggtggcagggcaagagaaaaggacagggaggggatataggtggggcccagctgacccgcttctggttgtagttgacagccagtcgcagcctcaccaggttggggatgccttcctcaaaggccaggcccaggccttcagcctcgggctcagtctcgctgtcctcggccaggtcgttgagcactgcagtgacctcactctggttccagcacatgcccagcagctgaaagccatagtcctggctcagtgactccagagcaatgtactcaggctgtagag

SEQ ID NO: 204002 - DNA, 517 bp, Homo sapiens
ggcctgtaaattgctgtcaggttttcattttattttctaaagtgtcagactacgttaaggcagtagarttggattccattgtcattataggcactgattcttccaatgttttcaaatatctaatactttataccagccactgcatttccttctgctactataccatctccatttgccactggtgacagttttaagaactaggctgtgtattaatttccttgcacagtctgttcataagaaattaccacaaacttaagtggattaaaaaatatacatttaatctctcatagttctggaggcaataaatctcaaatcaaagtattggcagggtcatggtccctctaaacatgtaaggggagaatccttccttaccccttcctgactgtggtggctcgtggcatttcttggattgtgaacacatcactcaaatccctgcctccatcttcatagggtcttccccatgtctctctgtctgtgtgtcttcccctcttcttataaggataccagtcactggatt

SEQ ID NO: 204003 - DNA, 517 bp, Homo sapiens
ggcctgtaaattgctgtcaggttttcattttattttctaaagtgtcagactacgttaaggcagtagagttggattccattgtcattataggcactgattcttccaatgttttcaaatatctaatactttataccagccactgcatttccttctgctactataccatctccatttgccactggtgacagttttaagaactaggctgtgtattaatttccttgcacagtctgttcataagaaattaccacaaacttaagtggattaaaaaatatacatttaatctctcatagttctggaggcwataaatctcaaatcaaagtattggcagggtcatggtccctctaaacatgtaaggggagaatccttccttaccccttcctgactgtggtggctcgtggcatttcttggattgtgaacacatcactcaaatccctgcctccatcttcatagggtcttccccatgtctctctgtctgtgtgtcttcccctcttcttataaggataccagtcactggatt

SEQ ID NO: 204004 - DNA, 554 bp, Homo sapiens
actacgttaaggcagtagagttggattccattgtcattataggcactgattcttccaatgttttcaaatatctaatactttataccagccactgcatttccttctgctactataccatctccatttgccactggtgacagttttaagaactaggctgtgtattaatttccttgcacagtctgttcataagaaattaccacaaacttaagtggattaaaaaatatacatttaatctctcatagttctggaggcaataaatctcaaatcaaagtattggcagggycatggtccctctaaacatgtaaggggagaatccttccttaccccttcctgactgtggtggctcgtggcatttcttggattgtgaacacatcactcaaatccctgcctccatcttcatagggtcttccccatgtctctctgtctgtgtgtcttcccctcttcttataaggataccagtcactggatttaaagcgcactctaaatccaggatgattttatcccaacaaccgtaactaattacatctacaaagacaccatttccaaacaagtta

SEQ ID NO: 204005 - DNA, 605 bp, Homo sapiens
atttggcaagggcttgtaggtgggaggctacccaggggagcagcatgttataatggaaaaagcattttaatagcgtccaggaagcctggattctgccatgaattagcagtttctgtttgggtaatcaagttcccttggcttcagtgtagtcacctgtaaaagaaatctataattccaccacgggcaattgcattttatttgtttatttaaaaagtgttcattgaccaactactatgtgccaggcagaactctaagtgctaaaaattcagcaatgaaacaaaacaaactgctttcccttgtgcagctttattgatacctaatcagtaaagtaggaatcagaacaatgattaattcagatacatgacgatcataagtcttgccttattttctttttcctgcatttcctgtatacacttcctttccagagcctcctcttggggctacatgattctttagacagctctctccctctgctctatcagatagtagtttcatcatcagaaaatatttgccaaagtcttaaattggagtwcttgaagagtccccccaaaatagtgccactctttttcttccccctcaagttctgaactaattaaaaaataaga

SEQ ID NO: 204006 - DNA, 566 bp, Homo sapiens
ctactttttacctgtggaaacttcctactggcctgaagcctaaactattcaacccagtgaggaaataaatggggaaaaataaataaataagtgcacaccactgggtaatgagataagcttcatgagacctctgccatttcagcctcacaggagacagtgaagccactcacacacagagcacattgttactacaactagcacctgagaatgtgatcacacagagactctctatagccaaggaactcatacagaatcttcaccactgaaagcacccagagccaaattaggttacaataaactataaatattaaagccacayccttaaggggggaaaaaaacctgaaattttttttaaagcacagtcaaatgaaaaaaaatttcaaaatgattagaagaaatagtctatccaaatgagaagaaactagaaaaataattctggcaatatgaaaaaatacggttctataactctcctcaaaagatcagcaatgaatccaaaccaagatgaaagctttgaaatactagataaaaaattcaaaaggtcgattattaagttattaaaggagatg

SEQ ID NO: 204007 - DNA, 566 bp, Homo sapiens
ctactttttacctgtggaaacttcctactggcctgaagcctaaactattcaacccagtgaggaaataaatggggaaaaataaataaataagtgcacaccactgggtaatgagataagcttcatgagacctctgccatttcagcctcacaggagacagtgaagccactcacacacagagcacattgttactacaactagcacctgagaatgtgatcacacagagactctctatagccaaggaactcatacagaatcttcaccactgaaagcacccagagccaaattaggttacaataaactataaatattaaagccacacccttaaggggggaaaaaaacctgaaattttttttaaagcacagtcaaatgaaaaaaaatttcaaaatgattagaagaaatagtctatccaaatgagaagaaactagaaaaataattctggcaatatgaaaaaatacggttctataactctcctcaaaagatcagcaatgaatccaaaccaagatgaaagctttgaaatactagataaaaaattcaaaaggtygattattaagttattaaaggagatg

SEQ ID NO: 204008 - DNA, 542 bp, Homo sapiens
aggggtaaatatagatacagatatcattgtagatatatcctcccagtctttgttttgccttttatagtcctttgttacacaaaattgtatattttaatatactcaagttatatctcttgttaccttttttattgtattttctctctgccctaaccaatgttgtaaaaatattttcgtaagttttattctaaagttctagtttttgcttttaactttgaatctttactccaaacatacttttgtrtatggtataaagctttctacaggaataacttatttccataaagatagaaaaaagtttaaagattttttataaattttgactcaggaattacacttattagaatttatcccaaagaaaggaacggagatgtatgcaaagagttactagagtgatgatcacttcatcctatttatgtggatgaattgcagatactctagatatttaccagtgggaatatgggtgaaataaatttagttacagttatgtaatgtaacagcatgaagctataaaataatacatttgaagaaaatttaatgac

SEQ ID NO: 204009 - DNA, 574 bp, Homo sapiens
gtacaggctttggggccacgtgaagtttttccttgccacaaaaattagagactacggtttgacacggtgcgtcttcagaaacagggacattttctgccatcctgagatgctacttgtcacataaagcttcaatttgtagctaacctaatccagggtatatctgtctttggaatgcaaaatcaagtcttattcacagtgaactttcgcctttgttccttcgtcagttggttgcttttcaatgtagaaaaaaaatgttaaagatttggcttgagaggtacccaaactcaaagacacagagctccaaatttgwtcctaaaccgtcaaaagcaagcttctttacatttggctgtctctctcagtgcttgcaaaatgacctgccatctttaggctcacccaggtgaatatttatgccaagagaaatctgaccttttaatacactggagctcccattgtatgagcaagtgggctctggaaatgtttgctgtccgaagtatggatcccaggggctgaactgagtcccagatgcctgtgtgagtgaagacctgcagtgcccctactcagccttcacaagaag

SEQ ID NO: 204010 - DNA, 482 bp, Homo sapiens
attcacctcccaaaggctccatctcctaacgccctcccactgggggttaggatttcaatatatgaatttgtgtgtggragggtggatgttatagatcataaacatttgatctacagcagcttgtatgtcactttttcagaaagatattctttaatgacctcaattgctttcacatcaccttttaaaaatcattacacggtgctatggtttaaaggtattccctaaagttcatgtgttgtaaacgtaatccccaatgccacagcgttgggaagtggggctgaataagagatgatgaggtcatgaagggagagtcctcatggattaatgtcattatcacaggagtgtgttagttatcttaagagtgggcttgttatcaaagcaagtttggcttcctcttgctcacttgcactctcatactctctgatcttttcaccttctgccatgagatgatgcagcaggaaggccctcaccagatgccccta

SEQ ID NO: 204011 - DNA, 424 bp, Homo sapiens
tttatttgcctgtagcctctagaacaaagatattcatgtctttaacctcttcactttcccagtgcccaagagaacctcataaacttgacatcaacaggcttarcaataagccatattcatgaatagtcagggaaagttacagctctttctaaaggggtgggaggggtctcagtaatttaggggaggaaagtctttaccttctggtattcacatctttatgtaatcccctccccttgagtatggggaatcacttctgaattagttataaatcgactgtagctctgacttaggtacactctcttgggtcctcattctgggggaagccagctgccaggtcctgaggcagtcctgtggagaaggccacgtgactgagcttggctatagattctcccatagctttgagatgactgcagccctggccagc

SEQ ID NO: 204012 - DNA, 474 bp, Homo sapiens
ttcttgcataggagaccgaaagttctggctggccaaatttaagggacagtttatttgcctgtagcctctagaacaaagatattcatgtctttaacctcttcactttcccagtgcccaagagaacctcataaacttgacatcaacaggcttaacaataagccatattcatgaatagtcagggaaagttacagctctttctaaaggggtgggaggggtctcagtaatttaggggaggaaagtctttaccttctggtattcacatctttatgtaatcccctccccttgagtatggggaatcacttctgaattagttataaatcgactgtagctctgacttaggtacactctcttgggtcctcattctgggggaagccagctgccaggtcctgaggcagtcctgtggagaaggccmcgtgactgagcttggctatagattctcccatagctttgagatgactgcagccctggccagca

SEQ ID NO: 204013 - DNA, 636 bp, Homo sapiens
tcccataatacctattacgtactcttcaaagtacttactgaatattttataatatcaagttgtaataggcctttatgccctgttagactgtaaatgtcttttttaatggagtgattttattatgttattttaaaaattgacacataatagatttacatattttccaggtatctgtgataattcaatacattcatatgtaatttataaagatcaaatcagcataattagattattcatcaccttaagtatttgtcttttctttatgttagaaacacttgaattaagactaaatttcttatgggcaaattttgtctcattccttgttgtaatcccagaacttggtaaagtacttggcatccagtagacactttatgcatgactgacaaatcaataaaataatagattacttttacaaaccctgaagtctaattttggtacctagatgcgaatcctctcatggtcccttgtatgaaaaatggctctgtcatttaataaccttgtgtatatytaagattttcaaggctaccaaaagacatttctaatagcactttaaaaggtgtttacacagttgtatcatcagtatcagaagcctagcacagtaaagagtactccttgtttaaaattaagaagcaaccc

SEQ ID NO: 204014 - DNA, 624 bp, Homo sapiens
atgtagcattgatgtgtcacagtgatggcagtttgctggagcctcaaaggaacaaggttctatctagcctgggcaacgtagtgagaccccatccctacaaaaatttttcttaataaccaggtgaggtggatcgtgcctgtagtcccagctgcttgggaaactgacgagggaggatcacatgagcccaggagtttaaggctgcagtgagttatgattgcaccactgcactccagcatgagtgacagagcaagactctgtctcagaaaacacacaaacacacacacatacacacacaaatcaaggatctggaaggatataaatgccctcctgtgtttctcgtgatgcagcatctagatgaatttcaaaactgctttgccgtctaccgaaggtcaaatgaggtctgatccactgcccatcggctagtggtgattagtgagagctgatgcagaggagactttggagattagacacggtgatgggattcccacacctgtgcagccttcccaaatccttcctacattcccagcttgttgtccagcactctcaaaataagtgttacaaatgcatgggcacccatatggagctgatrtgtttgaattttttcaatgacaagtttctaagatc

SEQ ID NO: 204015 - DNA, 531 bp, Homo sapiens
gttgtttcccttttcttagtcctttcagggtcttctctttgtgtttgacatttgagagtttaattataaaatgtctttggttgtcttattcagattaaatatgattgggcactttgaccatcctaaacattttaatctttctccaggtttaaaaagttttctgttatttctttgaataaactatctccttttcattcttagttcccctttaacaccaatgatatgtagatttgctcttttgttggtgtcccacaaatctcataaactttctttgtttcttttcattctttttttcattctactctgaccatgtattttcaaagagcctgtctttgagctcactgtttctttcttctgcttgatcagttcttckgttgatgccttccgttggattttcaatgtgttaattgaactttcctgcttcaggatttacatgtgatttttcccattattttgatttctttgttgaatttctctggtaaatttctgaattatgtctctgctttctcagtgttcaggctcttcttaaaa

SEQ ID NO: 204016 - DNA, 360 bp, Homo sapiens
gtgctgtgggcccaagccagggttccttgtctgttgatgagcagtaaggggtgtgttgtacccgtggaagatggactgacttgttccttgtgtcaactgcagcttgttggaggtgtcaatatggcacttagggtctttgctcccttgayattctgagggtagcaagggcagttccactgcagaggcagtggcagagaggatttctgttgctcctggaagctctgtccagggagttgctgagttgctactggcttgaaggctcaagtggggggctggctggagacccaggccaggaagacctgcccatcatggcccacccctctctctgggaactctgtcccaggaaggtttcaaatctcc

SEQ ID NO: 204017 - DNA, 553 bp, Homo sapiens
cttttcaattagacaattctatttaagcaaaatgtttttattactgtttctttcatgttttatagtagacatatttgatataattattgaatttattgagccatgcttttaaggtaaaaactcgggaggcttcataagccatgggattttcttgccatttgtatgaagtaaacaaacacaagacggtgctaggtgtgtaacaaatgctttacaattatcaggaaatatttctgctcgagtgagtttgtatcttcatataagagattaaaaacacccagagtgaagaagtggcattggttttgcatggtgagagaggaaatctgtagtcaggctgcacaactaactctaaatttagacagataaattctgcttcttttattttctaattatcttcagtttttctttcactgtctttttatcttcacccccaaatacatatgcattayagcccttctctttctttgcctgtcttatggcaacagcttgctcactgttctccccaccccatgttatttcacacagtactctgcaggttctgaggacaagttagaat

SEQ ID NO: 204018 - DNA, 516 bp, Homo sapiens
tggattagatcgttggacagatagcattgttaaacattattatattataacacaaagaatggtaaatatcaaattagactaagtgaagtattaataccagtgggccatgtattattagtgctacataagaaaacaaatcaaaatttggatatctcattagagacatgtcttagaaataaaattgtattaaggagagttagtggtaagtaaaatattttaaattcaaatttctatgaaatatttatcccactgcttwtgtttccatgcagaatcttctgttgttgagtgggtataataagttttggacaaaaataaaataacctttgtgggtttaaaatttggaataatcttttttgcggattcgtattgccatcttgggaaatttctcactcatattattataacttcttttatttgaatgggcacagttacagtccacagtttttattctcagacacctaattacagccaaattctaggtcattctctttagagaaatctcaaagacaatggcag

SEQ ID NO: 204019 - DNA, 537 bp, Homo sapiens
aggtcattctctttagagaaatctcaaagacaatggcaggcttttggattaaaacattttctcagtgattttggatgcaaacttgttttcagtgtttacagaagggccagaggcgaaaccattagcagcacctgcctttttagtgtcttctataccaggaattccaggtacctggagctcaaagtaaaagctctaaagtacataggattctcccaggcactgtgctggttcttgcacatgctggtaaatatctgagtttctatgcttatgactgacaartgaaatgacaaaaacaccacaaaaactatatattttgatactactctgctaagcttatgaataagacacagactgcttatttgaaacactaccttttcatgtttctaaattttttaaattgacagataaaattatatgtattgtcatgtaaaatgtggtttaaagcatgcatacattgtgtaatattaaattctggctaattaacaagtgctttacctcatatagttatcatttttgtgatggagaacacttaacatt

SEQ ID NO: 204020 - DNA, 537 bp, Homo sapiens
aggtcattctctttagagaaatctcaaagacaatggcaggcttttggattaaaacattttctcagtgattttggatgcaaacttgttttcagtgtttacagaagggccagaggcgaaaccattagcagcacctgcctttttagtgtcttctataccaggaattccaggtacctggagctcaaagtaaaagctctaaagtacataggattctcccaggcactgtgctggttcttgcacatgctggtaaatatctgagtttctatgcttatgactgacaagtgaaatgacaaaaacaycacaaaaactatatattttgatactactctgctaagcttatgaataagacacagactgcttatttgaaacactaccttttcatgtttctaaattttttaaattgacagataaaattatatgtattgtcatgtaaaatgtggtttaaagcatgcatacattgtgtaatattaaattctggctaattaacaagtgctttacctcatatagttatcatttttgtgatggagaacacttaacatt

SEQ ID NO: 204021 - DNA, 537 bp, Homo sapiens
aggtcattctctttagagaaatctcaaagacaatggcaggcttttggattaaaacattttctcagtgattttggatgcaaacttgttttcagtgtttacagaagggccagaggcgaaaccattagcagcacctgcctttttagtgtcttctataccaggaattccaggtacctggagctcaaagtaaaagctctaaagtacataggattctcccaggcactgtgctggttcttgcacatgctggtaaatatctgagtttctatgcttatgactgacaagtgaaatgacaaaaacaccacaaaaactatatattttgatactactctgctaagcttatgaataagacacagactgmttatttgaaacactaccttttcatgtttctaaattttttaaattgacagataaaattatatgtattgtcatgtaaaatgtggtttaaagcatgcatacattgtgtaatattaaattctggctaattaacaagtgctttacctcatatagttatcatttttgtgatggagaacacttaacatt

SEQ ID NO: 204022 - DNA, 412 bp, Homo sapiens
tgattgaatttccatttccagtgtttcctagctgtgtcttacattctccagttcagaactgagcattctcagttgtcaaaatcctaagctgtccactgtacttaaatactggttttcgttaatgcttcttcattcagttgtatagyctttagaagtttttcttttacactttcaatttcctccaaaattttattttcccttagctggttctgatgttttgtttcatctagttccagtcttagcatggcaatttcttcccgcaacatgctgttttcacgcaagagatcttcttctttcttatgactaagagaaagctaagtaaacaaagggaacttttagttagcactcaatagaatgacatatcatgatttcttctaaaatcaaagaatgacatttatatttgtataatgaa

SEQ ID NO: 204023 - DNA, 412 bp, Homo sapiens
tgattgaatttccatttccagtgtttcctagctgtgtcttacattctccagttcagaactgagcattctcagttgtcaaaatcctaagctgtccactgtacttaaatactggttttcgttaatgcttcttcattcagttgtatagcctttagaagtttttcttttacactttcaatttcctccaaaattttattttcccttagctggttctgatgttttgtttcatctagttccagtcttagcwtggcaatttcttcccgcaacatgctgttttcacgcaagagatcttcttctttcttatgactaagagaaagctaagtaaacaaagggaacttttagttagcactcaatagaatgacatatcatgatttcttctaaaatcaaagaatgacatttatatttgtataatgaa

SEQ ID NO: 204024 - DNA, 578 bp, Homo sapiens
aaatatttatctaaagaccatgaaaaataaatcactagaggatttttaagaatttcagaattgggaaagcctttctctgaattacaaaaaacccagaggcataaaatagaagattaatacatttggctacattttttaaattgggtttacactctgatatctaacctacaaaccacaccatcataagagcctyagctatgcatatattaggacagaagcaattcctcaaagttctttaagttcctttttctgaggaatgttttatcaatatactgcttttctaatatttttacagtcagttataagaattacatttattcataactgttaaatctaagcgttgtacccttctacaatgtacacaccggcatctaagcattgcacttctacatacaacactcaactcatttaagatcacgattcttaaaaggagagatcaaaaaatatatgcagccaggaccagtggctcacacctgtaatcccagcacttcaggaggctgaggcaggagaatcatgtgaacctgggaggcagaggttgcagtgaactgagtttgtgccattgcactccagcgtgggtg

SEQ ID NO: 204025 - DNA, 578 bp, Homo sapiens
aaatatttatctaaagaccatgaaaaataaatcactagaggatttttaagaatttcagaattgggaaagcctttctctgaattacaaaaaacccagaggcataaaatagaagattaatacatttggctacattttttaaattgggtttacactctgatatctaacctacaaaccacaccatcataagagccttagctatgcatatattaggacagaagcaattcctcaaagttctttaagttcctttttctgaggaatgttttatcaatatactgcttttctaatatttttacagtcagttataagaattacatttattcataactgttaaatctaagcrttgtacccttctacaatgtacacaccggcatctaagcattgcacttctacatacaacactcaactcatttaagatcacgattcttaaaaggagagatcaaaaaatatatgcagccaggaccagtggctcacacctgtaatcccagcacttcaggaggctgaggcaggagaatcatgtgaacctgggaggcagaggttgcagtgaactgagtttgtgccattgcactccagcgtgggtg

SEQ ID NO: 204026 - DNA, 578 bp, Homo sapiens
aaatatttatctaaagaccatgaaaaataaatcactagaggatttttaagaatttcagaattgggaaagcctttctctgaattacaaaaaacccagaggcataaaatagaagattaatacatttggctacattttttaaattgggtttacactctgatatctaacctacaaaccacaccatcataagagccttagctatgcatatattaggacagaagcaattcctcaaagttctttaagttcctttttctgaggaatgttttatcaatatactgcttttctaatatttttacagtcagttataagaattacatttattcataactgttaaatctaagcgttgtacccttctacaatgtacacaccggcatctaagcattgcacttctacatacaacactcaactcatttaagatcacgattcttaaaaggagagrtcaaaaaatatatgcagccaggaccagtggctcacacctgtaatcccagcacttcaggaggctgaggcaggagaatcatgtgaacctgggaggcagaggttgcagtgaactgagtttgtgccattgcactccagcgtgggtg

SEQ ID NO: 204027 - DNA, 601 bp, Homo sapiens
aaatatttatctaaagaccatgaaaaataaatcactagaggatttttaagaatttcagaattgggaaagcctttctctgaattacaaaaaacccagaggcataaaatagaagattaatacatttggctacattttttaaattgggtttacactctgatatctaacctacaaaccacaccatcataagagccttagctatgcatatattaggacagaagcaattcctcaaagttctttaagttcctttttctgaggaatgttttatcaatatactgcttttctaatatttttacagtcagttataagaattacatttattcataactgttaaatctaagcgttgtacccttctacaatgtacacaccggcatctaagcattgcacttctacatacaacactcaactcatttaagatcacgattcttaaaaggagagatcaaaaaatatatgcagccaggaccagtggctcacacctgtaatcccagcacttcaggaggctgaggcaggagaatcrtgtgaacctgggaggcagaggttgcagtgaactgagtttgtgccattgcactccagcgtgggtgacagtgcaagactccatctagaa

SEQ ID NO: 204028 - DNA, 533 bp, Homo sapiens
agtaaaaagatcaggttggattttgagtttactagaccttgttctactcttaccagggaaaattttgtggtgttttcagcaaatgagtctctctcctactctttcctctttttggccaaatcctcaaatgataaagggaattgtttatgtgatgagagatgagactgaaataattgtctattgcactagcttccagctagagttgtgcattccagttacctcaggaaaatttttaaataatcttcargtctaggttttcccctgaagattttgatagagtaagtctaataaagcctggatatgtatgtttaaaaatgtttccttgaagccaggcatggtggtgcatggctgtagtcccagctgctagggaggctgaggtgggaggattgcctgagcttaggagttctactctagcctggtcaacataatgagaccctgtctctaacaacaacaacaacaaatttctcaaaatccggatacactcctgcttaaccactgaatacagaagtgtaatatgtaaattcttatatctc

SEQ ID NO: 204029 - DNA, 615 bp, Homo sapiens
tctctcaattacaccaagcctcttttatactttgtgccatttctgccatgatttcttatgttttcctttttcactacatattggtacaggtacatatgatctccacttccactcaaatgtgaggttactgcgggcagtccctatgggtatagtcatatcccaagagtcctgggcagagggtccccctcttgcacccaggttggagtgcagtggtgcaaccagagcttactgcagccttgacctcctgggttcaaatgatcctctcaccttagcytttccagtagctggtatgaaaaggcgagcaccaccatgcttggctaattttcatatttttcatagagatagggttccaccatgttgccttgcttggtctcaaagttctgagctcaagcaatccacctgcctcagcctctcaacatcctggaatgacagcatgagctaccacacctggccaaatgccgaatactttagtcatatatgcctgacacttcagggcatgcagaactgcctcgcttacttttcttttgactcagtttataaattttcttaatttaaattttaatttcaacatgtgtacatctttgaaataaataaaataatctctttgaatgtttg

SEQ ID NO: 204030 - DNA, 615 bp, Homo sapiens
tctctcaattacaccaagcctcttttatactttgtgccatttctgccatgatttcttatgttttcctttttcactacatattggtacaggtacatatgatctccacttccactcaaatgtgaggttactgcgggcagtccctatgggtatagtcatatcccaagagtcctgggcagagggtccccctcttgcacccaggttggagtgcagtggtgcaaccagagcttactgcagccttgacctcctgggttcaaatgatcctctcaccttagcctttccagtagstggtatgaaaaggcgagcaccaccatgcttggctaattttcatatttttcatagagatagggttccaccatgttgccttgcttggtctcaaagttctgagctcaagcaatccacctgcctcagcctctcaacatcctggaatgacagcatgagctaccacacctggccaaatgccgaatactttagtcatatatgcctgacacttcagggcatgcagaactgcctcgcttacttttcttttgactcagtttataaattttcttaatttaaattttaatttcaacatgtgtacatctttgaaataaataaaataatctctttgaatgtttg

SEQ ID NO: 204031 - DNA, 615 bp, Homo sapiens
tctctcaattacaccaagcctcttttatactttgtgccatttctgccatgatttcttatgttttcctttttcactacatattggtacaggtacatatgatctccacttccactcaaatgtgaggttactgcgggcagtccctatgggtatagtcatatcccaagagtcctgggcagagggtccccctcttgcacccaggttggagtgcagtggtgcaaccagagcttactgcagccttgacctcctgggttcaaatgatcctctcaccttagcctttccagtagctggtatraaaaggcgagcaccaccatgcttggctaattttcatatttttcatagagatagggttccaccatgttgccttgcttggtctcaaagttctgagctcaagcaatccacctgcctcagcctctcaacatcctggaatgacagcatgagctaccacacctggccaaatgccgaatactttagtcatatatgcctgacacttcagggcatgcagaactgcctcgcttacttttcttttgactcagtttataaattttcttaatttaaattttaatttcaacatgtgtacatctttgaaataaataaaataatctctttgaatgtttg

SEQ ID NO: 204032 - DNA, 615 bp, Homo sapiens
tctctcaattacaccaagcctcttttatactttgtgccatttctgccatgatttcttatgttttcctttttcactacatattggtacaggtacatatgatctccacttccactcaaatgtgaggttactgcgggcagtccctatgggtatagtcatatcccaagagtcctgggcagagggtccccctcttgcacccaggttggagtgcagtggtgcaaccagagcttactgcagccttgacctcctgggttcaaatgatcctctcaccttagcctttccagtagctggtatgaaaaggcgagcaccaccatgcttggctaattttcatatttttcatagagatagggttccaccatgttgccttgcttggtctcaaagttctgagctcaagcaatccacctgcctcagcctctcaacatcctggaatgacagcatgagctaccacacctggccaaatgcygaatactttagtcatatatgcctgacacttcagggcatgcagaactgcctcgcttacttttcttttgactcagtttataaattttcttaatttaaattttaatttcaacatgtgtacatctttgaaataaataaaataatctctttgaatgtttg

SEQ ID NO: 204033 - DNA, 552 bp, Homo sapiens
gctggctcagagtttgagtctgtagagaaggatcattgctccaagccaggtcttaacatccattggtttttctgcccttagcacaacaaattggtcaactccgtaatagtggacaatcacattatctactttaatgagagatttatgaaaaaatttagttacaaactatgacacagttgagatgccctgaatgataagccataaggagtaggacaactaagaagcaaaattaggacttaataacatttyctgaaaactacagcatttgcatattagaacctatgaacaaaatacacatggggttttatttgggattccaagataattttagtcataaagtttaggaacagattattccattgctttactatttctctgagcatttaaaaaatgttaccttgttaaatctttataacaacctagtgaaataaggcagcaaagtcctcactttgtagaagaagacattgagcctaagagaagaaagttgtccaagaacaaatagctgttcattatggagctaggacttatgcagagttgggacactttctatta

SEQ ID NO: 204034 - DNA, 598 bp, Homo sapiens
tacacatattatacacagatataaaaacattgcatagctatactaaaaagttatttgttgtttaccccaaatttaaatgtaacttatgttttctctattttatgtcacaaatstgccacaactaccatagaactattgtataatttgggacaacatgttacaaacatgggaaaacagaataaaagaaaaaatatcaaaggttttataaaggctgagtgctgtgacttatgcctgtaatttaagcattttaggaggcagcagtgggaggactgagcccaagagtttgagacctgcctgggcaacataatgagaacccatcttcacaaaaaaatttcaaaaattagccaggcattgtaccacctgcctgtagctctggctacttgtgaggctgaggcagcaagttcacttgagcctacacggtcaaggcttctgagacccctgatcaaaccactgcactcattcctgggtgtcagagtgtgaacttgtctcaaaaaaacatcaaaacatgagatgcagcaaactactgagagaaattcacagcagtaaacacctacattaaaaataaacaattctaaattaataacctaatgtttggcaa

SEQ ID NO: 204035 - DNA, 408 bp, Homo sapiens
ggctggagtgaagtaacatgatcatggcttactgcagattctacctcctaggctcaagtagtcttcccacctcaggctaccaagtatctgggaccacagctgcacaccaccatgcccaactaatttttaaattttgtgtatagatggggtctcattatgttgcatgggcttgtctcaaactcctgcgctcatgagattctcctgcctaggcctcccaaagkgctgggattacaggtgtgagccaccacacccagcctatttttttctaaagacagggtctcattctgtcctcagctcaagtgctgtggcgtaatcatagctgaaggcagcctcaatgtactgagctcaagtgatcctccctcactgacccaaagtgctgggattacaggcatcagccaccatgtccag

SEQ ID NO: 204036 - DNA, 535 bp, Homo sapiens
gtggattctctgatgtcgagtaaggtgtgagcccctgttaaaggctttgccacattctttatgtgtgaagtgtttctctccagtatgtattctctgatgttgagtaaggtgtgaagctctgttaaaagctttgccacattttttgacacttgaaaggtttccctccagtgtgaattctctgatgctgagtaatgtatgagcttctattaaaggctttgccacattctttacatttgaaggctttctctccagtatggattctctgatgttaagtaaggtaygagcctctgttaaaagctttgccacattccttacacttgataggtttctttccagtatggattctctgatgttgagcaaggtgtgagctcttcttaaaggctttgtcacatttttcacatttgtaaggtttctctccagtatgaattttcatgatgtccaagttgtaagcccctggtaaaagctttgccacgttctttacattttactgatttctctccagtgttaattatcttatgtctcttcagatgtgact

SEQ ID NO: 204037 - DNA, 535 bp, Homo sapiens
gtggattctctgatgtcgagtaaggtgtgagcccctgttaaaggctttgccacattctttatgtgtgaagtgtttctctccagtatgtattctctgatgttgagtaaggtgtgaagctctgttaaaagctttgccacattttttgacacttgaaaggtttccctccagtgtgaattctctgatgctgagtaatgtatgagcttctattaaaggctttgccacattctttacatttgaaggctttctctccagtatggattctctgatgttaagtaaggtatgagcctctgttaaaagctttgccacaktccttacacttgataggtttctttccagtatggattctctgatgttgagcaaggtgtgagctcttcttaaaggctttgtcacatttttcacatttgtaaggtttctctccagtatgaattttcatgatgtccaagttgtaagcccctggtaaaagctttgccacgttctttacattttactgatttctctccagtgttaattatcttatgtctcttcagatgtgact

SEQ ID NO: 204038 - DNA, 422 bp, Homo sapiens
ttctgcacttaaaaccaaaagacctatgaatcaggtgtgggatctcacacaagccagttattcacactgagttgcattttccttaactatcatctgaaaataatgttttcttcattccctggtaggtattaaatgtgaaaacttatgaaagcaagatgataaaatatgatttgttactactattatggcaatcaacatataaaacatattctttmtatatatatatatatatatatatatatatatatatatatatatatatatatatataaataatatatagaataagagaaaaggtgggtccccaaacatggcaatgtgattattagatgcatctttcctcatagtcttctatcatatctaacaagtggcctagtggtaaactctgcttctcaaccaaaaagaaagcagtctacatttca

SEQ ID NO: 204039 - DNA, 471 bp, Homo sapiens
gagcacattgccgtcactgctgaaggaaaggctatgattwactgcatcacttgtaggacaatcaaatgccttataaaaaaaaaacattaaaaaatgcaaagtcactagaattttcaacaccagagacacaccatacttatgtttgaattaaatttatacgaagtaactttgtgaagcaactgagatgacaattacaaatatggagggcttgttcccacaacgtgatttgtcattagacaaagtaaaaaggacaaggagaaagttggctttccatttctgatacctggcttcagcttctgtagttaaagaacagcaaaattgagatggatgaaactttggaaagaggctggtattttacagataaggaaatgaaggtccagacaaaagacctccccaaagatatatagcctgttaggtcaaagccagtattaaaactttgttccttttaactttctttgggccctcagtctg

SEQ ID NO: 204040 - DNA, 471 bp, Homo sapiens
gagcacattgccgtcactgctgaaggaaaggctatgattaactgcatcacttgtaggacaatcaaatgccttataaaaaaaaaacattaraaaatgcaaagtcactagaattttcaacaccagagacacaccatacttatgtttgaattaaatttatacgaagtaactttgtgaagcaactgagatgacaattacaaatatggagggcttgttcccacaacgtgatttgtcattagacaaagtaaaaaggacaaggagaaagttggctttccatttctgatacctggcttcagcttctgtagttaaagaacagcaaaattgagatggatgaaactttggaaagaggctggtattttacagataaggaaatgaaggtccagacaaaagacctccccaaagatatatagcctgttaggtcaaagccagtattaaaactttgttccttttaactttctttgggccctcagtctg

SEQ ID NO: 204041 - DNA, 471 bp, Homo sapiens
gagcacattgccgtcactgctgaaggaaaggctatgattaactgcatcacttgtaggacaatcaaatgccttataaaaaaaaaacattaaaaaatgcaaagtcactagaattttcaacaccagagacacaccatacttatgtttgaattaaatttatacgaagtaactttgtgaagcaactgagatgacaattacaaatatggagggcttgttcccacaaygtgatttgtcattagacaaagtaaaaaggacaaggagaaagttggctttccatttctgatacctggcttcagcttctgtagttaaagaacagcaaaattgagatggatgaaactttggaaagaggctggtattttacagataaggaaatgaaggtccagacaaaagacctccccaaagatatatagcctgttaggtcaaagccagtattaaaactttgttccttttaactttctttgggccctcagtctg

SEQ ID NO: 204042 - DNA, 594 bp, Homo sapiens
tgctgacattcactctctttccaacatggcttgtcattcagcaatataccttttaaactccaattttcctaaaagaataaaagtcagtaacaattacaatgatgataaactggaagagagagttgtacaaggctagcttagatgataaggatcaattagattcacactgcatgaaaagcagaattccagacataaatttacaaagcactttcttatgaattatctcattttttctctctaaaaacaactcaggcaaagagtttatccccactttacagataaaccaataactcagagaaataaagtgaaataactggttatggaaatccagcagaaaagttttctaaaatcataaagttcagttactcatgwacaaaatcttacgtgtttgcattacttggtttaaagaataacattttagtttagatacacttccaaatttaagtatcacaaatattctgatactaataaaaaccttattaaacattcttatgcattatcaataccaatttggttttagttttaaataaaaggaatcctatttcttccttatccccatattgtaccatcctcaaatcctttatttaactagac

SEQ ID NO: 204043 - DNA, 594 bp, Homo sapiens
tgctgacattcactctctttccaacatggcttgtcattcagcaatataccttttaaactccaattttcctaaaagaataaaagtcagtaacaattacaatgatgataaactggaagagagagttgtacaaggctagcttagatgataaggatcaattagattcacactgcatgaaaagcagaattccagacataaatttacaaagcactttcttatgaattatctcattttttctctctaaaaacaactcaggcaaagagtttatccccactttacagataaaccaataactcagagaaataaagtgaaataactggttatggaaatccagcagaaaagttttctaaaatcataaagttcagttactcatgaacaaaatcttacgtgtttgcattacttggtttaaagaataacattttagtttagatacacttccaaatttaagtatcacaaatattctgatacyaataaaaaccttattaaacattcttatgcattatcaataccaatttggttttagttttaaataaaaggaatcctatttcttccttatccccatattgtaccatcctcaaatcctttatttaactagac

SEQ ID NO: 204044 - DNA, 574 bp, Homo sapiens
gatcctctggtgccagagtcaatggatccaccggtcggggtcctcccatgtcttagccccgggaggggagaggcgggggtcctcctttgccctagtccaaggcattgtgaggccccgctcctgcattcttaactgtctgtgcctctgccgccgcgggggaaaactgcaccatctcaggcaagcctaacagagcagctgtccttaaaagattcccagttgagtgtggttcggagcaggcctsagaagtgtgcccttagatggcttcaagggctctgggcaatgtttaaggaatccagctgacctcagttactccgagcccttttccactcagcagaacttctggccaccgggtcctctatctgcggagcccttctatcatcccagatccccacagggtggactccgtctcatcctcacaatctcagctcaggccttattcatcacagcattcctggcaccaggcctggcccatgagaaattggtcagattaagagctaaatgtgtttccatggtcacttgttttcttcaggcctcctttctttgtgccagcatctttgggttttggttaaagttt

SEQ ID NO: 204045 - DNA, 625 bp, Homo sapiens
ctagggccacttaattgggctgtcccccacctttgtttctggttttgaaggggcggaagttgggaatcctttctaagtctctacacatggagcccttctttggtgggaaagtcttgacatataccaggattgtcattgacctttcagagccttcaagaatcctgagctgctttggcttctgttcctggaagagaggccactgaactgctctggagctggagttcaagttcaaatattcatcactgttactaagcctttacatagcatgtgatttctttccggcaggctcatggtcgcttaggtttgcttgtatgtagatggagtggtctgcatcctcattcaggtaacacccccagcctttcatgctgagattggccattttatttgtaactcactgtacaatccatttgctcttccagtgtcccttagaaggatgcagagtgtwctgtagaatgccatagagacctgggtttagggaaaatatttgacccaaagtccgccaactcacatgagtatctccccacaacttgtaccgtgctagtctctgggtatatagcaaatgaaaccgtgcctgaacagatgttacaaacaccctcccctgagagactccagggctgctttattc

SEQ ID NO: 204046 - DNA, 563 bp, Homo sapiens
aaacaaaggtctggaatatgtttttgcctctattccaaaaggaaagattagctataagctaatcaaaaaggcagataagaatattttaaataagaataccataaaataagagtattttaaattttatagtggttacgtttttaagctaaatatcaaatgtcaagttagaatttattaattcttctgttaatgagattgctgaatttattaaaataaattttaagaatctattaaaaaattcttaaaaaaagaatctattgattcttaaaacctagtctgaaaggtaatttcatttggactatctaatattattcaagcaaagaaaacaacrttaaatcaaaaatttaaacttaaaattttccatgcctctggctggctattttcactgactttaagcctttgtgactcttcctctgatgtcagctttaagtcttgttctgttgagaaatccatatattcagttaaaatgaaccacttagaacagttaaaaactattgcctttataaaaatagattgaagacaacattttattttatttcataaactgagtgtttagtctttca

SEQ ID NO: 204047 - DNA, 555 bp, Homo sapiens
ccataaattctaagtataatcctagtactcgctctcaagtttaagttaaatgctagcctatacaaaaaatactctttctcttacttcttttttgttatttatatgttgctttgtttaaaggaagaacacaaaaatgccctgctaaagggattctgtttggctgcaggctgcaagaggggaaaaacacaaagcacattttrcagaaaatgattttttagaagtcagaactatgacatgaagtcaagcagggcactctaggactgactttgctgtgcttccttaatatgctccttgctctctttcttttctggaagctgtgactcacacaggtcatggagaaaatttcgtactccttcctcatgcccagcttaaatactagtgtacaacgtggaaacctgtaaattatctgacatttctctctgtcctccaaacctttctcattcaattatcactaaatcatattgactatacctctcttctgcctctgctttatattaccacttccactgagaacataaacatttacaaaatggcttttattacaaaaaagccttc

SEQ ID NO: 204048 - DNA, 606 bp, Homo sapiens
tgcaaaatgcagtgtaaaatttcaaggaaaacaactaaaagaatagtaaagattccaaaccaatagaggtttaatttccaaaccaatcaaaggaaaaaagatggaattggtgggtgagggtagaaggatttaaattattcaaaagagactgggcagagtggttcacacctgtattcccagcaatttgggaggccaaggcaggtggatcacctggggtcaggagttcaagaccagcctggccaacatggtgaaactccttctattctaaaaatacaaagaaaaaaattagctgggcrtggtggcttacacctgttgtcccagctactcaggaggcagaggcacgagaatcacttgaatccgggaggcagaggttgcagtaagccgaaatcatgccgctgcactccagcctggggaacagagtgagactgagtctcaataaataaataaataaattcaaaagaaaagcaggaagagagagggaaaaaaactagataaaatggacaagtagaacacataaaataaagtgaaaggataaggatatagaagattcgaatagattatttcccactttgattttaatggacatatatagtgattagagaatat

SEQ ID NO: 204049 - DNA, 606 bp, Homo sapiens
tgcaaaatgcagtgtaaaatttcaaggaaaacaactaaaagaatagtaaagattccaaaccaatagaggtttaatttccaaaccaatcaaaggaaaaaagatggaattggtgggtgagggtagaaggatttaaattattcaaaagagactgggcagagtggttcacacctgtattcccagcaatttgggaggccaaggcaggtggatcacctggggtcaggagttcaagaccagcctggccaacatggtgaaactccttctattctaaaaatacaaagaaaaaaattagctgggcatggtggcttacacctgttgtcccagctactcaggaggcagaggcacgagaatcacttgaatccgggaggcagaggttgcagtaagccgaaatcatgccgctgcactccagcctggggaacagagtgagactsagtctcaataaataaataaataaattcaaaagaaaagcaggaagagagagggaaaaaaactagataaaatggacaagtagaacacataaaataaagtgaaaggataaggatatagaagattcgaatagattatttcccactttgattttaatggacatatatagtgattagagaatat

SEQ ID NO: 204050 - DNA, 626 bp, Homo sapiens
ttggactcagagttcatggctgcagtgaattatgaccaagccactccacttctgcctggatgacagacagagaccatatctcaaaaaaacacaaaataatcctataaataaggattctaatgccataagcctttccctaggctgtaaatgttttatgctaatttgaattgcatttttaaaagtaatgactcttggggtagaggccatagaatacagcacccagatataaatccacatatttgccttacaagaaataaatccacattcttgccttacaagagctcctgaaggaagcactaaacatggaaagggacaaacagtatgagccactgggaaaacataccaaattgtaacgaccatcgacactataaagaaactgcattaactaatgggaaaaaataaacagctaacaacatcatgacaggataaatttcacatgtaacaatattaaccttaaatgtaactgggctaaatgccccagtaaaaagacacagactggcaagttggaaaaagactcaagacccattggtgtgctgtattcaggagacycatctcacatgcaaagacacacacaggctcaaaataaagggacggaggaatatttaccaagcaaatgaaaagcaaaa

SEQ ID NO: 204051 - DNA, 601 bp, Homo sapiens
tttaggctttgtggactatatatatttattttttttgagacagggtctctgttgcccaggctggagtgcaattgtgtgatcacagctcactgcagccttgactttctgggctctagtgatcctcctcccacctcagcctctctattagctgggaccccaagtgtgcaacatcacacccagctaattgactctatggactgtaaagtgaataagcatggctgygttccaagattctttacttacaaaaacagtcagtggcctggatttggcccacaggtgctaatttgctgacccttgtgctaaaaggaaggtgctgctaatgcagtaacacttatttataaaagtgcccagcatgtgtgacagtatctttcctttgagaaaaggatatattttggtattcacctcaccatatttttccacagtgacttcatataattttaaaaatttcatttgtaaaataagattattttctgcatttctgccactttattcctgttaatagaattcagtattttatggtgatcaattactttgtatattcgatgagcatcaactgtcctagaattggctgatttttatcaagcaagaaatactctccttg

SEQ ID NO: 204052 - DNA, 601 bp, Homo sapiens
tttaggctttgtggactatatatatttattttttttgagacagggtctctgttgcccaggctggagtgcaattgtgtgatcacagctcactgcagccttgactttctgggctctagtgatcctcctcccacctcagcctctctattagctgggaccccaagtgtgcaacatcacacccagctaattgactctatggactgtaaagtgaataagcatggctgcgttccaagattctttacttacaaaaacagtcagtggcctggatttggcccacaggtgctaatttgctgacccttgtgctaaaaggaaggtgctgctaatgcagtaacacttatttataaaagtgcccagcatgtgtgacagtatctttcctttgagaaaargatatattttggtattcacctcaccatatttttccacagtgacttcatataattttaaaaatttcatttgtaaaataagattattttctgcatttctgccactttattcctgttaatagaattcagtattttatggtgatcaattactttgtatattcgatgagcatcaactgtcctagaattggctgatttttatcaagcaagaaatactctccttg

SEQ ID NO: 204053 - DNA, 601 bp, Homo sapiens
tttaggctttgtggactatatatatttattttttttgagacagggtctctgttgcccaggctggagtgcaattgtgtgatcacagctcactgcagccttgactttctgggctctagtgatcctcctcccacctcagcctctctattagctgggaccccaagtgtgcaacatcacacccagctaattgactctatggactgtaaagtgaataagcatggctgcgttccaagattctttacttacaaaaacagtcagtggcctggatttggcccacaggtgctaatttgctgacccttgtgctaaaaggaaggtgctgctaatgcagtaacacttatttataaaagtgcccagcatgtgtgacagtatctttcctttgagaaaaggatatattttggtattcacctcaccatatttttccacagtgacttcatatawttttaaaaatttcatttgtaaaataagattattttctgcatttctgccactttattcctgttaatagaattcagtattttatggtgatcaattactttgtatattcgatgagcatcaactgtcctagaattggctgatttttatcaagcaagaaatactctccttg

SEQ ID NO: 204054 - DNA, 490 bp, Homo sapiens
ttctgaccaccccaactttcccaccaccctccccatgaaacacataaacatttcattttcctgctttagtttttctcctctaacatactgtatattttgccttatctgtctgttgttattgtgtgtttttctcactctcatgaatgggktttttatttttcactaccatatcctcactgcctagaaaaaggcctagcatattggatgaagctacctaataaatacttattaaatgagtgaatggagtttatcctggatatattgtttgattaattctcactttaaaaatgtttgacatggttcattctaacagttttgcccggtaattacatgcattttaaaaattgttttggctctttataataagctacattctttatattatttttttatttagagagaaaagcccaatattgtggttattcactatttattcttttactagtaaacataattgtaattatggtaaactgagtcagaggaattgcaa

SEQ ID NO: 204055 - DNA, 546 bp, Homo sapiens
tacctcaggtgatccacccacttcggcctttcaaagtgctgggattacaggcatgagccactgcgcctggccactagtattttatttaaaaaaaaattagggtggcacatttaatggacttacaaattcttttcaagggattatgaacctttggtatttgaaataaagatacagagttggaattttttgcttcctatagtaagaggaatactggtcaggcactgtctattctggtggagcaggtgctgctgcgtggctgtatttcagaagyaagctgctcacattgatattggttggtgagcaagagcagtggtcattgattgattgactagatttcaaactggcttttgggtggcttgttgttaccattggtacaagtcatttctttcctaagttagagtcaactttaaccaaaaattttctgtataaaagttgccttcaattaactatgttcaaaatgaaagtattttatattccagaattgtagacttcattttaaaattttggtcaagatgaattggttaataatagctctcaggaagatct

SEQ ID NO: 204056 - DNA, 546 bp, Homo sapiens
tacctcaggtgatccacccacttcggcctttcaaagtgctgggattacaggcatgagccactgcgcctggccactagtattttatttaaaaaaaaattagggtggcacatttaatggacttacaaattcttttcaagggattatgaacctttggtatttgaaataaagatacagagttggaattttttgcttcctatagtaagaggaatactggtcaggcactgtctattctggtggagcaggtgctgctgcgtggctgtatttcagaagtaagctgctcacattgatattggttggtgagcaagagcagtggtcattgattgattgactagatttcaaactggcttttgggtggcttgttgttaccattggtacaagtcatttctttcctaagttagagtcaactttaaccaaaaattttctgtataaaagttgccttcaattaactatgttcaaaatgaaagtaytttatattccagaattgtagacttcattttaaaattttggtcaagatgaattggttaataatagctctcaggaagatct

SEQ ID NO: 204057 - DNA, 455 bp, Homo sapiens
ttgtagacttcattttaaaattttggtcaagatgaattggttaataatagctctcaggaagatctgttttccttttttaaaatacatatttctctgtataatttattccttaaaattaattattttctttctgtttttggtatttttagaagcttttgctcaagtcctaacrtaatctccagtaggagattttaatctctttgtcagttcatgtatgtatatggtagtgatactctctttttaaattccttttctcattcactttcttctcagtacaataacagtgatattcttatacatctttacctcatttaaaagtaattacagttttctgctggcaaattcagctttttatattttgactaaatactaggctaaaattgaagaaaatttaccaggtcattttattttcaaacaaaatcattactaataaaaattgctatttttgaaatata

SEQ ID NO: 204058 - DNA, 460 bp, Homo sapiens
tagctctcaggaagatctgttttccttttttaaaatacatatttctctgtataatttattccttaaaattaattattttctttctgtttttggtatttttagaagcttttgctcaagtcctaacataatctccagtaggagattttaatctctttgtcagttcatgtatgtatatggtagtgatactctctttttaaattccttttctcattcactttcttctcagtacaataacagtgatattcttatacatctktacctcatttaaaagtaattacagttttctgctggcaaattcagctttttatattttgactaaatactaggctaaaattgaagaaaatttaccaggtcattttattttcaaacaaaatcattactaataaaaattgctatttttgaaatataaataatgacattttgatattttaaaagtaaggatacacccccccccaatagt

SEQ ID NO: 204059 - DNA, 628 bp, Homo sapiens
acacagcaagaagttagtggtagatgagcaagtgaagcttcatctgtttacagccactctctgtcacattaccacctgagctcctcctcctgtcagatcagcggtgacattagattctcataagagtgtgacttgaaccctattgcaagctgctcatgcatgggatctaggttgttcactcctgatgagaatctaatgctttatgatctgtcaccatctcctgtcacccctagatgagaccatctagttgcaggaaaataagctgagggctcccactgattctacatgatggtgagttatataattatttcattatatattagtaataatagaaatgaagtgcacaatgtatgtaatgtgcttgaatcatcctggaaccatcccccacctcaggtccatggaaaaattatcttccacaaaactagtccctggtgccaacatgactgggagagcagggttaacagatgtgaggcccctttgccttgtcttggattaatgtgcagatatacattgtgtgaatgacatctgatggtgccatcttgycctgtagatcattttagggacacctccagtatttcatgaaaattaaaatttcttctagtgacgaacaaaatgatacccagaaaca

SEQ ID NO: 204060 - DNA, 378 bp, Homo sapiens
gaattcagtcacagaaaaaataagaacactgtgtagagagataaacagaaacaaacattgtaatgaactgcttgtcagtaactctacaagtcagaaaccaatgatacaaaattcttaaataactgaagaaaagtcaacccccaatcttatatccattaactgtaatacagcaaaaataacaattaaatgacatttgcagattaacactggaagagtcccttgctaacaggyatgcactaaaataaatgtcaaaatcatttcttgaggcaaaaggaatatggaagcaggtgaaagttgaaactacacaaagaaataaataatgccagagaagatataaagatatataacccaattattttacattgctctaaagataat

SEQ ID NO: 204061 - DNA, 595 bp, Homo sapiens
gaaagtttgggaaaatgtatgtttgagattactcattacagcactgattttttacagcaaaagtttgggtatactaaaaatatccatccatggaggctggttagataactctggtatatccatcttacggctataaaaaagactgaaaagctctctacatattagcatggaaaacacttcagaattctatttagtaagagcaaataaagaatgtattcatgagatatatactacatagaacatatgtaactaaaatatatactttacatacactcacatatttgttaagcagttayaggggttaatttttgtcatatactgatttgtcattcaaaattataatacatggtttttcattttaaatttatatagtgaattacatccctaaattttcaaaaattgaaaattatttcattattgaaataaactactttttgttgagatttatagtattgcgaattagggtttaattactaatataatggtgtaacactcaggtgagtaatacatatgttatttattttctttaaatctatttaatttttactccctgtcctcatcccaagttccccctatcacctcccctaagtagatt

SEQ ID NO: 204062 - DNA, 530 bp, Homo sapiens
aaccgccaccacgcctggctaattttttgtattttctttttagtagagatggggtttcactgtgttggccaggctggtcttgaactcctgacttcaaggtgatccacctgccttggcctcccaaagtgctgggataacaggtgtgagccactgcacctggcctgaatttctttatgtaattgaacacacaattctacacagttaattctcacacaatttatttgacacataggtctaccatttttttttctattttacagatgaaatgatgttcagagaagtagaagtgacttacctaaagtcagctagtggctgattcagactcagattcagtccctatggctaggctagaatcaccctaactatcctattacctttcatcaatgaccacagaaaccgctattgttttccagaagttagaactgttttcagaggtgcattggacattctaagcmttattctaagcttggaaaacaaagtgctggagatttgttaaattagcactacagagtacagagttttgagcaaag

SEQ ID NO: 204063 - DNA, 632 bp, Homo sapiens
tccaaatagttttttattccatgtcatgtgcatgggctggtttgactggaacagctaggggttagccaggtacctctctcttcagtgagcatctacacatgactagcttsaggtttctcacagcatggcaatctcaggaagctgaaattcttctatggtgtttggcatcccctagagtgagtgtttgaggagacaggaagtagaagtttccatgtcctttagacatgaagactagcccagtgtcactccttctatgatctattgattcatgcatttagcctgcatagatttaaaagaaagtggaatggatgggaagaaagccagaagatttgtggctattttttgttttccacagctactctgtagagtgacacattctgctaattgcaatcagtgaaaatgtaaaaacaaatgcctatacctgaccaataatttcaattttctgtcttgagaccaagaaattacaagaaaaaataatgcttttggttttgtctaaactgtagtggggaatttcaacttgaggaggaacttaacctaggattgatttttattagaggagcgaataccgtgtgatgtggttattttcatggttcttaagtgattgagaacattaaattctggctagaagttct

SEQ ID NO: 204064 - DNA, 581 bp, Homo sapiens
catgtgcatgggctggtttgactggaacagctaggggttagccaggtacctctctcttcagtgagcatctacacatgactagcttgaggtttctcacagcatggcaatctcaggaagctgaaattcttctatggtgtttggcatcccctagagtgagtgtttgaggagacaggaagtagaagtttccatgtcctttagacatgaagactagcccagtgtcactccttctatgatctattgattcatgcatttagcctgcatagatttaaaagaaagtggaatggatgggaagaaagccagaagatttgtggctattttttgttttccacagctactctgtagagtgacacattctgctaattgcaatcagtgaaaatgtaaaaacaaatgcctatacctgaccaataatttcaattttctstcttgagaccaagaaattacaagaaaaaataatgcttttggttttgtctaaactgtagtggggaatttcaacttgaggaggaacttaacctaggattgatttttattagaggagcgaataccgtgtgatgtggttattttcatggttcttaagtgattga

SEQ ID NO: 204065 - DNA, 555 bp, Homo sapiens
ggttgattgaaattgggaaataaattaaggggtaaaaacaatctcagaaatgaagattaaatagcaaggtacccaatggggagtagactcagatgataattcaataagaagcattttaagaagacagaaaaacagctaagagaaaatgatataaaaaagaaagtaaagggtgattaaattaaaaagacaatgaaaatccaaattaagtataattggagttgctgaaaaactaraatgaaataacaatgaaacagaactaatatttaaagctgtaatccaagaaaactttataaaaatgagggcaaacttaaatctaaatattgaaagggcctgtggtgaacctgggaaaactgatttgaaatagtaaactctagtaaagttactaaattctaaagactaattcaagagcctcaggtccaaattactaaaaaattaaattggtatcagatttatcaaaataaggtaacagttgagcagcactttggagaactcaagaagaatgagagataagtgtttttatattcagccaagttatgtcttaagtgctgtatgggt

SEQ ID NO: 204066 - DNA, 490 bp, Homo sapiens
actccagcctgggcaacaagagtaaaactccgtctaaaaaaaaaaaaaaagaaaaaaagacacgatctcattcttttgcggcatagtattccattcaacctgtacttcttatccacctttctaagtctctgatcaagttacattgtttcatagcaaattttggataggatatcagtgaattataagcatgtccaaatagatacctacgtttacytaggttttaaaatctttccaaaattttgttttgtttttaagaaatattcaaaaatgttcgatgaaacagagatgtgttgtaagtgcttttcttgcaaggaattctgtgttatagtaatgatattcgtagcttctatttgaagccaaacaattttaattcatctatatcttcttctaaacaatttcctttatatctatacttatagtcttcaaggtgacattttatctagatatgtagggatttactgtttacaacttaaaacattattttaattgc

SEQ ID NO: 204067 - DNA, 600 bp, Homo sapiens
tatattatttatatctctgtaagtgaaagaataacacacaacttaaacttctttggaggcctattgccccacagtagtrtaagtataagaatgagtgtgatgtttttgccagaaaagaagtatagaagagatgctggctatataataaatttttattttataggtggggttagaaaggaggaaaagaaataagattgaggttgattattgtcatcagaaattttaatttcagtaaagaaaacagtgcagttatttataatgaaatattatcaaaatattattttgcatatttaaatttagattattctagcaattgtttatattttgaaatgacttacatttcatgcatactgttctgtacctatagatggcattaatatcactatattaaaaaagtatacttgatatttggcctggtggtttttgacagtgtaattataggaattttagttatttgtttctcatgtcaaatctagcagattcaataaaaaatacaatgattctctgtttatctgagttatatataatcataataaagttttataataggatccctcatatcagctgctctctttaaattatcctcctggtttgatgaag

SEQ ID NO: 204068 - DNA, 600 bp, Homo sapiens
tatattatttatatctctgtaagtgaaagaataacacacaacttaaacttctttggaggcctattgccccacagtagtataagtataagaatgagtgtgatgtttttgccagaaaagaagtatagaagagatgctggctatataataaatttttattttataggtggggttagaaaggaggaaaagaaataagattgaggttgattattgtcatcagaaattttaatttcagtaaagaaaacagtgcagttatttataatgaaatattatcaaaatattattttgcatatttaaatttagattattctagcaattgtttatattttgaaatgacttacatttcatgcatactgttctgtacctatagatggcattaatatcactatattaaaaaagtatacttgatatttggcctggtggtttttgacagtgtaattataggaattttagttatttgtttctcatgtcaaatctagcagattcaataaaaaatacaatgattctctgtttatctgagttatatataatcataataaagttttataataggayccctcatatcagctgctctctttaaattatcctcctggtttgatgaag

SEQ ID NO: 204069 - DNA, 549 bp, Homo sapiens
ttatagttttcaatttattgttttcacatgtcctagtttgggtagtattgagaggatccctaaaattttgatggatgcaaaaatatagctttagtaaacatgtatgtgtgcatttactcagaatttaaatgaaaatggagaatagaaaggattaaatactcgggtccaaatagagatattgttaatcttatattatctgacaamcttaaacaatttttaaaatagtatgccctaaattcatgaaaatcaaaggtataggagagtaaaaatcctcagaatacgtgtggcaagatattctaagaggctttgcacagttataatattcttggctttttcttttactaacatgctgcttctccaagtagagaataatttaatttctttcattctcttctacccttacattgttttgatcacctcttcacttcatctttcagagaaagaaaaagatattcatttgtttgacaggttgacattaaaaatctctttttaaaagtttttaaaaattgttgttaacaattaatatttttgaaacccattggacagtct

SEQ ID NO: 204070 - DNA, 549 bp, Homo sapiens
ttatagttttcaatttattgttttcacatgtcctagtttgggtagtattgagaggatccctaaaattttgatggatgcaaaaatatagctttagtaaacatgtatgtgtgcatttactcagaatttaaatgaaaatggagaatagaaaggattaaatactcgggtccaaatagagatattgttaatcttatattatctgacaaacttaaacaatttttaaaatagtatgccctaaattcatgaaaatcaaaggtataggagagtaaaaatcctcagaatacgtrtggcaagatattctaagaggctttgcacagttataatattcttggctttttcttttactaacatgctgcttctccaagtagagaataatttaatttctttcattctcttctacccttacattgttttgatcacctcttcacttcatctttcagagaaagaaaaagatattcatttgtttgacaggttgacattaaaaatctctttttaaaagtttttaaaaattgttgttaacaattaatatttttgaaacccattggacagtct

SEQ ID NO: 204071 - DNA, 602 bp, Homo sapiens
gaaatcatgtattttgcagcaacatggatggaactagaagccattatccttaatgaaacaacttagtaacagaaagtcaaatactgcatcttaaaatttttgggaatattaatgaaaatgtgtcataacatttcaaattgatatatgatattcttcaagttatgtcttatctaatatttatatagccatataattcataaaagctgtgtaagccataaaatcatatatgccaattttgttggttctgttaaacaggaaaataagggcaacattattaygttttgatttaaatttgcaggatttatgataagaaaaattattgtttgttattgctaacctttttctaaaatagatattaaatacattttaaaatagagtcacaaagctttgaaccaaagtagaaatggtggaggaaccttgtactttacagatgggctgccagctaattgcaccttttgcgtaatggctatatatttgatggatttcgcaatcttagaatgcttccaatttttatttgcaaagtagcatattaataattgccttgcaattttgagatgaagagtaaataatataaatttttataagacacttggcacatagtg

SEQ ID NO: 204072 - DNA, 602 bp, Homo sapiens
gaaatcatgtattttgcagcaacatggatggaactagaagccattatccttaatgaaacaacttagtaacagaaagtcaaatactgcatcttaaaatttttgggaatattaatgaaaatgtgtcataacatttcaaattgatatatgatattcttcaagttatgtcttatctaatatttatatagccatataattcataaaagctgtgtaagccataaaatcatatatgccaattttgttggttctgttaaacaggaaaataagggcaacattattatgttttgatttaaatttgcaggatttatgataagaaaaattattgtttgttattgctaacctttttctaaaatagayattaaatacattttaaaatagagtcacaaagctttgaaccaaagtagaaatggtggaggaaccttgtactttacagatgggctgccagctaattgcaccttttgcgtaatggctatatatttgatggatttcgcaatcttagaatgcttccaatttttatttgcaaagtagcatattaataattgccttgcaattttgagatgaagagtaaataatataaatttttataagacacttggcacatagtg

SEQ ID NO: 204073 - DNA, 545 bp, Homo sapiens
accccagtttgaacagagattgcacatgactttattgtccttctgtgcttcaggagtgtgcagttgcttttctgaaactccaagggagaatttgtgagtgtatttatatatatgctactagaaaagtaattgaagaatagaatagaagaagcaatgtaaaggcttcttagaaaacattaaactagtagagattattcagcctgaagaatagaaggctgaagygcaatatgcagcgaaatgtttaactatagtgtgagatgatttatgttaactataaaggagaacctccctgggctgaatgatagttattagaccatggtacagattagagaaagagtttatggaataactccaaaatttcctaaaatatcagagtgtcctacttaaatcgtatgctattggtcttactgaaaactataaaaatgcagagattttatacactgtttttgttctttaaaaaaacccagtgtttagtaacatgaaattaaagaaataatggaacacaattccacaagtatcagaaaatgtgctaccttgttgagtaa

SEQ ID NO: 204074 - DNA, 607 bp, Homo sapiens
ctacttgtccactatttctggtcccagactgaaagaaaaaaaaataacttttttttttatgtttctatattttgctaaactacaagtgcttgctgttgagcaagtgtgaagcaagctttctcctaccacttttgatgtcctaaattatgtctttactctgatttggcaaacatggtgtaggtaaatcatcttggagagttcttcctagaatgagtttacaaacaaatccactttatacttataaattataataattccgcttatattgattcatcatgaattgtgctcataccctattaaaaaaaaagaaaaaaaaagacactcattagacttaaaatttattagtggcttaattagatccttttcagatcatttttaaaattttgtgtaaaatgataagaaggcactttttaccagatatagtatatcatggcctggtgaatgctttccttttccccatgtcttaatattttatagatttatttctccaaaggacctgtattagttaagttcaggtggattatgtcaataacatattaacacaaaatctcagtggtttcatataacaaaagtttacttmccttttatttttttttctaaaatatca

SEQ ID NO: 204075 - DNA, 451 bp, Homo sapiens
ttcccacactgttctcgtgatagtgagtaagtttcacaagatcgatggttattataagcggtggggcgggggtggaytcttgcacaagctgtctctttgccaggtgccatccatgttaggcgtgacttgctcctccttgccttccgccatgattgtgaggcctttccagccacatggaactgtaagtccattaatccctttttcctgtataaattacccagtctcgggtatgtctttatcagcagtgtgaaaatggactaaatatttgaaatttggacacaattccactcactaataatctactatatagcataggatgttttgatctgcaagtcacagaaaacctcaacttctagggtagtcctgagttagaatgagcttcaggcatataacaatctgtggctagtcatatcatctagaactcaggctctttccaatattctgccttctg

SEQ ID NO: 204076 - DNA, 451 bp, Homo sapiens
ttcccacactgttctcgtgatagtgagtaagtttcacaagatcgatggttattataagcggtggggcgggggtggactcttgcacaagctgkctctttgccaggtgccatccatgttaggcgtgacttgctcctccttgccttccgccatgattgtgaggcctttccagccacatggaactgtaagtccattaatccctttttcctgtataaattacccagtctcgggtatgtctttatcagcagtgtgaaaatggactaaatatttgaaatttggacacaattccactcactaataatctactatatagcataggatgttttgatctgcaagtcacagaaaacctcaacttctagggtagtcctgagttagaatgagcttcaggcatataacaatctgtggctagtcatatcatctagaactcaggctctttccaatattctgccttctg

SEQ ID NO: 204077 - DNA, 563 bp, Homo sapiens
ggtttctcttactcagtgtcttgtgtttgcttttcaagtcctacattgtcccactgaaagaattaattattgtcctgtaaaacctattaaaattctgtcttaggaaaacctattgtcctgcatgtcaaatatttctacagttttataagttccttttgrcttctgcttctcctagcctaatttcctcatcttttcttccaaagtgtatttctcttacccggtcaatgagaccatattctttcctcatgcataagtggtactcccataatcattccatcctcttccagcagcaaggagccaccttattgcctccttaattttttttatgtctctctttaagttagtatgtgtgatttaattccctagaatgaccatttgggattgaattcctgactacctgataaaattacatcacatagaccatgaacccagaatacaaagttgtatgcttttatctgggcctttctatgttctatttcaagacatctgactcaaacaatgaagtgagacatctaatttcatttctgctgcttactcaatgtcacttttaacaatatattaac

SEQ ID NO: 204078 - DNA, 533 bp, Homo sapiens
ataaatgaccagaaagagagtaatggctattgcagtatgtaaagaagactagagtaggagttggaagatttggaacaaatcccaattttgttgtatcatccttatttagtgaaaatgttaataattattaagcatctgtcatgaattaggtaccttgctaactaactactttatatattttaataatccacaattgtagtgtgccagagttggagccttcaagttttagtgattaattgaaaagcacaacttatttcttcttgtgctatggactttttaatgagtcctcatattcagaaagccgtagaagtcaagtgggtagttacttaatgttggctaggcagttgatttaytgagtctgcaatagatgctaactttccctggttgattgggagaaaaagtcaatggaaagtaacaaagaaagcttcattacatttctttgctattcatacaagctttcagtgctagtgaatgttttgtgcaattgctcaaagtattatattatttgggagcatggaaaatgttttcgtgtt

SEQ ID NO: 204079 - DNA, 535 bp, Homo sapiens
tgccttctgctgtatgaatctgccataatctgtatgtttgtatccgttcaaaattcatacattgaaatctaatcatcaatgtgatgatggtaggatgtgggacctttgaggggtgattcagttatgaggttggagccctaataaattagattagtgcccttataaataaaccctacagagctgcttatttccttccaccatgtgagcrcatagctagcaggcaccgtctatgagccagaaaatgggcccttaccagatattgaatctgccagtgcaatctgcttatgtctcaatcttttttttttttaattatactttaagttctagggtacatgtgtacgacatgcaggtttgttacatatgtatacatgtgccatgttggtgtgctgcacccattaactcgtcatttacattaggtatatctcctaatgctatccctccccactcccctcaccccacaacaggccccggtgtgtaatgttccccttcctgtgtccaagtgttctcattgctcaattcccacctatgagtgaga

SEQ ID NO: 204080 - DNA, 570 bp, Homo sapiens
aattataactaatagcaaaaattttgaagatagatataatttgaatattctgagaaactgttgatgtcagattctcagctaaggaaattatctgctttgaagctcttcagttatattattagcagtcrgtttatgtctttgtacatgaacacgtcttctttttctcacatagtttattttactttagtaaatctgatgggaagccttatgtcagaatatgtaacaaacattgattcttgtaggctaaacttattttattaaaattatgttgcatatgcttcttattaagaataaaggtttatttagactagttaggacctgcttaacaagaaagacttcggcagccacctttaagcctgaagctttaaaaatgctgagcaaaattgtcaaagcataattaagggtaggggaattaagttcacttttctcccctaagtgtctttgccagagacagaaacttcaacaatagagctaagtggaaaaatggagccatgtcagttaccacaccatgctaaagactgattagtcataatttttggtaataatgcccacaggaataaacctgacaat

SEQ ID NO: 204081 - DNA, 570 bp, Homo sapiens
aattataactaatagcaaaaattttgaagatagatataatttgaatattctgagaaactgttgatgtcagattctcagctaaggaaattatctgctttgaagctcttcagttatattattagcagtcggtttatgtctttgtacatgaacacgtcttctttttctcacatagtttattttactttagtaaatctgatgggaagccttatgtcagaatatgtaacaaacattgattcttgtaggctaaacttattttattaaaattatgttgcatatgcttcttattaagaataaaggtttatttagactagttaggacctgcttaacaagaaagacttcggcagccacctttaagcctgaagctttaaaaatgctgagcaaaattgtcaaagcataattaagggtaggggaattargttcacttttctcccctaagtgtctttgccagagacagaaacttcaacaatagagctaagtggaaaaatggagccatgtcagttaccacaccatgctaaagactgattagtcataatttttggtaataatgcccacaggaataaacctgacaat

SEQ ID NO: 204082 - DNA, 492 bp, Homo sapiens
tattgcttcctacctttatatgaaacaaagaacctttaggtctgtagtgtggtttctgagtgattctgttcaccaaaagcaaagaactttataaatagattaccaataattcttatgctaagtttagtttccattattagttaatatgttggccagtatctgacaaagtacagttcattattcagttaattttgaatcatccccacaaaacctactcgtccctatgtgaattgatgtagtttaatttctgaaccttccaaactaaggaccaatttctgatttcttctgtgagattcactctgaagggatgagctgggttattgccttgccayagcctagtaatttgggttattctagggtttggtcacagctttgatttagctttcagttagtgactaaacactaaagcaagagattagtaattggaattgtatcacaagatcagagtagagctaagagcaaagctaagtcaacactgagacaatcatctct

SEQ ID NO: 204083 - DNA, 460 bp, Homo sapiens
ttctagattgggagacattttcctcagtgataggctaaggaaaacctctacctaccaaagtggtcrtatttttaaatatctgttttacaaaagaaaatcctctgtgccaaatatccaatctcttactccacaaagaatatgaaatattagctaaaaatttataaatgtggataacaattttgaacatgatcattccataagtgaaaaatgtaccttcctatttacgattaacccattatcattattctgcattaattgtgaaatctacatatttataagtcacttctaaggaaagaagtccatacatgtggcacagtagtaatcagctttagaacagaaactgctgcatttaaaaaacatcaacttacaatgaagataaaacaaaattccccttaaagtgatcttttcttactattcacatttgtagttcaaaaatcgtctctccatgttttatatttta

SEQ ID NO: 204084 - DNA, 499 bp, Homo sapiens
attttcctggaagtactctgaatttgatctttgattgaagccatttcttaaatttagcattatttgatttctagagaggctgagaattttcaaagccatcacaagtactggctcctctttggttaacaatccttcctttaatttatctccccactctatagatgtactgctagagaaaacgagacagcaccttcaactctttgctaagacatctccttaggcaaatcgtccagtcttttaggcacattttctattttctgccttactttaatcaatgttgttgttaaactttctgatactatwtaacaaggattatctttcctccagtttccaataccatttatttaaatcttctgaaagtcctaacctacagccttattgaaaactatgagacatgtaacaatagctccgtcaaggcactttccactttcactaacattctccttgaaatctgctgaccagatccaaagttaccttcatattttagacttattacagc

SEQ ID NO: 204085 - DNA, 439 bp, Homo sapiens
gaattcagaactgtgtctggtcttatgctttagtaattgatgaacaataaaacagctttcctttccccaatttccacattaagcatatagaaataaagagatgaaaattaatctaacatttttacaaaaagcatttgttaatagagtgtaattgattcaayatttatgaagatatggaaaatggttgtatggttgtagatcaccttcatgcaaacaccttacacattatgattcttaagacacattaaagttttgcacttcatgaatcaaatagacacaataaaaaatgataaaggggatatcaccagcaatcccacagaaatacaaactaccatcagagaatactataaacatctctacgaaaataaactagaaaatctagaagaaatggataaattcctcgacacatacaccctcacaagactaaaccaggaagaag

SEQ ID NO: 204086 - DNA, 563 bp, Homo sapiens
ggcacataccaccatacccagctaatttttgcatttttagtacagatggggtttcaccatgttggtcaggctggtcttgaactcctgaactcaagagatccacctgcctcagtctcccaaagtactgggattacaggcatgagccgctgcacccagtctgcttctgtttctttataggccttgagatttttggttttgtaaagcataacattacttaatagaatatatgtgtgtttgtgtgatgggagatgtatataaaaagaatgctgttgttttaagtaactatggctgcatcacaaaccaatccaacttcgaatggcttaaaccaacaataactatttgtttttagcttgtgtgtttgcaatgtaggcagggcttatagggaaggttcatctatgctttatacagtaacagctggcgcaatttgactggaactagagcatctgcttacaagatgtccagttatgtgttcacaacttggagctcrctgtaggatagacacttagctggaattgtgggccagagcacccatctatgcacttgttgaatggcctggattttct

SEQ ID NO: 204087 - DNA, 441 bp, Homo sapiens
ctagaagttgaattggtcaaatgtcmagtccctgaatacacttcaatttataaagtacagaaataagaaaaggaaagctcattattatgctctttacatagctctaaaatttagagaagcaacctatcacccaatcaggcctgatagcacttatcccaggtgaaataatgttccccaaactgttataaatattacagtatataatgacagaaattcattgatgtctgagagaagaaaaaactttgtctcagactcattggcatgacaatcagttgatagaagtcaggaatatacaacctctgaattaaacttattttgataaatctgtcaacaacatgctgattttgtatcaggcaagcacaaatatctgtggggagatcctatctatgtagatgaatcatagctgccttttctacaaagtttagaaatttatcatgttgg

SEQ ID NO: 204088 - DNA, 562 bp, Homo sapiens
ctagatgctttccagatgaaagtgatgttctggttgtttagggaggtttgaaaaattataggtcaggcagttgttctgagcacctgaacagtttcstggaaggttaacagtatagtggagagtggttttattttttaataactattttgacgtgtggttttaactgctccactccaccaccattactctagtctggaaaggagaaaacacatacatatccactgtggtcagaggagaatacttaagctattgaagaaggcagctgcaaagttgatgagtttttttcccccctgtagtgctgttgatgtacttttctttgtgaattttcaagagttttgaaggaaacatttgttgatactcctctggaagggaatggtgataggcatcattgaacaacttgtaattgagtgtgtaatcagaaccatgacttgagataaacagtggggaggaaggataaagaataaatggcaatatgacctacgggagactatctatcactatgggttactcttagcctgatcacaaagacaaatctttattaattattttataaagttgggca

SEQ ID NO: 204089 - DNA, 605 bp, Homo sapiens
aatgcaagaatgcagaaattaatgcattaytatggaactagttatttcttgtccttcatggccaacttgataataggaggatataattaggcagctggttatgatggaattgtgagaggtcacctataggcaagctgaagggtcagaatgaacattgatagttgaggtgcaaaaaactattttagggaggatccgtaaagctgaaatcctaaagaaaaattgagtcagaaaacaaaatggataactgactagcagagacaaaagcagatgtagaatccagggttggagctaaataggtaatcagaactaagaagtcagatactgacttgtatggaagcatgagggcagctcttgttatttttgttaagctgttagtctcagagaattttcactggcccagttgcaaataatatataagttagatttttaagaaacatggttaaaccacattcttcttcctgacatcttttgaattgccataatcttactaaaatagaattcaggttaaagcagtatggtaacaaatatatacagttataggtaaagatttgctgttattaaaagaataaaatatttaggctattttcaaagatctccgataaaat

SEQ ID NO: 204090 - DNA, 489 bp, Homo sapiens
catcaggactaccagctgcaggaagaagctacccatttcaggtctcctgagagctgttccgttgctcagtgacacccctctccaccttgcttaccctctagttgtccatgtacctcattcttcctggatgtgggacgacaacccaggatctgccagatggtgggactgaaagacctgtaatgcaaacagctgaaacatgccccccactcaccacattgctgatgatgaggagaaaagagctgcagcccttaaacgagcccagacctaggakctccctgagccagggctgtgatactgtctttggggctctgtgattcctggtgtctgcaagcttctgggagccaccatgttccccagtacccacagtggaagctgtttgtggtacacctggtccatccacagcctcgcatggtgctggcacctgtggcagcacctggagctgcctaccacactgcagccagcaaatgcctgctcgtgtacagtggctgg

SEQ ID NO: 204091 - DNA, 604 bp, Homo sapiens
actatatttactgtatcagaaattaaaactgagataattgtaaaatatttattttaaaatctatttaaaataacaacaatgaactgaatatgtgttggtataaataattttctgtgtgtaaaaaaaaaaaagtcgctgtttttcaaaacaagtgagaaaaatggcattggtttttawttttgcaaatctctttaatgtcagccttaatagaagacagttggattctcataccagtttctggatttaaagtgttgaaatatgttgttctagttgaattatattaataaaaattatctcacattgatatgtagttgaaaaagtgagaaatatgttaataacctttgtagattattgtgaatattattttagtactattacaaaaattgacaagggtagtttttttaaaggttagctgcaatgtgaaatttgaaattatatcaatgaaatctttgcactctgctacattaaaatcttttcatctctcttgcactttgaacacatattttacaatgcattgttttgtaacatcatgctttgtcatttagaaaatattcattcattgagttaaatgaatgtccttgatgttgatacattttattagaca

SEQ ID NO: 204092 - DNA, 577 bp, Homo sapiens
acacatggaaattattgtatctattctttctaaatttgtatttgtttaaaattatcattaataaacagttaaaatgtaatgtcctttaccttataaaaatacatatttctgagacagaaacttcatgatttttatttcgcgggtgtgaggtaagaaccaggagtttgattttagctggggtcccaaatgtttctcatgtacattataaaaaatatatagttttatgactctccagcactttaattataacatatgattatattataaaataataattgacatattgatttttcataatattaargtgtatttttatcttcacaattagacaattgaccttatgttattttctctattattgcactagtaccagttctttaccatgatagacattcaagcatttatttctcttgaagtgagtgtatatttctcagtccagaagagtcttctctgaaatccacaaaacaaaggtgagatgctaatttttcctaaaacacacaagacaaagctaatgatatatacctctcatagatcaactgctgttttgcttcaaacacttaaatatcacaaaacacac

SEQ ID NO: 204093 - DNA, 465 bp, Homo sapiens
acaggggtcataaatttggaaaagagagctctatttctcatgcacgttgcagcctgcagggtggtcactctgacaggctgggaagtgcagcctctggtcagaagccagaaactggcccttacaatcccaagcccacccctttggtgatagtctctgggagcatgcttggatagttttagcagcacagcattggcaatgaaaagcagatagggtccagtgggatttcaaattagggagctatacaggccttaggtgaatcatctttagtcttcaggatatcatgattccagtttatctggaagaagtaaaacaagagattaagtaacattaataatttgaacactagaagagaatgtgtgtgccagaatagaaaatggaacctattttattaggtagctaagtcatgaaaatcttaacctgtttcagctttraagacttattgtagcaaatagtaagaacccaaaa

SEQ ID NO: 204094 - DNA, 537 bp, Homo sapiens
ccctcagctacctaggttaaagggaaactatctcttcaccatatcacatacctgtccttggtcaagacttagggagtgggaaacatagtccctaagaaacatgggcagctcatcacccttcctttaaaatccgtttccctttcctctcagggwaggcttctactttccctttctgtgtggtgggaatgtcccctataacacaatcccatgattccttgcctggggatgcatttattctggatggagcttatgtctcattccctacagcaataggcttcttgacttagtcttaatgacataagggaatatttaaaggaacctggcttaccagaaaggggcaatacaccagaagattttttaaaaaatattacctatagtataggaatatttcagaaatgcctaaaaaaaggagactggcaaatttcatgattcttaagcaataacaaagaggaattgtctctaccttgaaagagttattatgtaaacaaagagtaaagttaattagagtttactgagagtgcttacctgtaccagtta

SEQ ID NO: 204095 - DNA, 529 bp, Homo sapiens
gtggcttgggttggggcagaaagttccaaccctctaatcacaagtttggcttctctgcaaacatcctccaacctgaggctgcccaggagcctgcagacactagtcatctcattagtgtgcaaaaagaaacatcacctacaagatttgaagttttcttaaaattccttatgatggggagcgcagagaccaaatatttctcactatgtcagaagtatgttcaccattcgcattgttgtgtattaatcaccaccatccatctccagaactttttcatcttcccatactgaaactctgtgcccattaaatactaactcccctttctgctctccstcaggccctggcaaccaccattctactttttgtgtctatgagtttgactaccctaaggacctcacataagtggaatcatacaatgtttgtagttttgtgactagctttttcacttagcataatgtcttcaggcttcatttattgtgtagtatatatcagaatgtccttcctttataaggctgcgtaatccattatgtgc

SEQ ID NO: 204096 - DNA, 525 bp, Homo sapiens
ggcttgggttggggcagaaagttccaaccctctaatcacaagtttggcttctctgcaaacatcctccaacctgaggctgcccaggagcctgcagacactagtcatctcattagtgtgcaaaaagaaacatcacctacaagatttgaagttttcttaaaattccttatgatggggagcgcagagaccaaatatttctcactatgtcagaagtatgttcaccattcgcattgttgtgtattaatcaccaccatccatctccagaactttttcatcttcccatactgaaactctgtgcccattaaatactaactcccctttctgctctccctcaggccctggcaaccaccattctactttttgtgtctatgagtttgactaccctaaggacctcacrtaagtggaatcatacaatgtttgtagttttgtgactagctttttcacttagcataatgtcttcaggcttcatttattgtgtagtatatatcagaatgtccttcctttataaggctgcgtaatccattatgt

SEQ ID NO: 204097 - DNA, 482 bp, Homo sapiens
aaggaatatgggtggcctctacacattgaacaaagataagagaagggattatctcctggagccaccagaaaaaaaaattagttctgccaacatcttactttttgctcagtgagacccacataggacttctgacttatggaagtgtaatgtaatatgaatttgtgttgttttaaaacatgaaaattgtgataatttgttacagcaataatagacaactaatattataagtttatattgataccactaattccaatctaacacctcagaatttaatacaactttcccccatttatgactcccattctagcattaacaaaattggtcatcattatgttcaaatagttatttttttaaatctatcccagatccagtaggtcattgcctcatgtggcyacctttctcacttgggctcttcccctctgcccagatgccactgataagccatacgtatctttctcacttaactccaattaatagttctt

SEQ ID NO: 204098 - DNA, 544 bp, Homo sapiens
aagcgaccttttagttcacagaagtacaataattattaggaggaaaaacaaatgagataaggactccgtaaatcatcaaaaatcataaatcatttcgaaggaccattttggtaattcctctgcctttaagcttgctggtcttacatgccctctgagatataagatttagttattcgatcagtaaatatttatggagaattattttagcaaggcctgagctaggaactcttggagtagttctttgattgaaatcrtcatcgaatcatagttatcattgtcatcatcatctaaagtagatttcagaaaccttgtcagttctttgcacattctgatgactcttattgggaattatccatttctaggtagtaaatgttatgccccaattttagattcacacgaaattgctgtttattgcctgaaataacttttgcttaggcttgtcaaacgtgtgtgtctgtgtgtatatgtttatatacacatatatacatacacacacatattgattgcactgtttacagcatgggaaaggaacataggtaacagt

SEQ ID NO: 204099 - DNA, 544 bp, Homo sapiens
aagcgaccttttagttcacagaagtacaataattattaggaggaaaaacaaatgagataaggactccgtaaatcatcaaaaatcataaatcatttcgaaggaccattttggtaattcctctgcctttaagcttgctggtcttacatgccctctgagatataagatttagttattcgatcagtaaatatttatggagaattattttagcaaggcctgagctaggaactcttggagtagttctttgattgaaatcatcatcgaatcatagttatcatygtcatcatcatctaaagtagatttcagaaaccttgtcagttctttgcacattctgatgactcttattgggaattatccatttctaggtagtaaatgttatgccccaattttagattcacacgaaattgctgtttattgcctgaaataacttttgcttaggcttgtcaaacgtgtgtgtctgtgtgtatatgtttatatacacatatatacatacacacacatattgattgcactgtttacagcatgggaaaggaacataggtaacagt

SEQ ID NO: 204100 - DNA, 600 bp, Homo sapiens
aggtcaaatagctatctggtagattccctctcctttctattcagattcaagctatcatcgaatgcacgtaataattagattcaactttcatgaaaaaatataagttacccttctctctactgaagcactctttccttcagtcttatagtcaattaaagatgattcagagcagtggaaataattttttaaaaaacmtggtgtccccagatgcctagggttttagtttctttactctctagattctatgttgacactgaacctgaaaagttataataacttcctgtggaacccttctgagttgttgtcttaaagggatgaattaagagaagagatattgcttttaacatccacttatgttctaaattattgggtccccttcctatgacacacgatggaacagaaagcatttaaaattgtagggcatgttggtgggagtatatgtgagggtgccatttctgaagggtagcttggcaacatagatcaaacttaaaatgtacagaccctatgttgacaagctggcagcaacctaaatgtaactcagttagaaaactagttgaataaaccatggcaaaacaattcaattgatttataatattttta

SEQ ID NO: 204101 - DNA, 600 bp, Homo sapiens
aggtcaaatagctatctggtagattccctctcctttctattcagattcaagctatcatcgaatgcacgtaataattagattcaactttcatgaaaaaatataagttacccttctctctactgaagcactctttccttcagtcttatagtcaattaaagatgattcagagcagtggaaataattttttaaaaaacctggtgtccccagatgcctagggttttagtttctttactctctagattctatgttgacactgaacctgaaaagttataataacttcctgtggaaccyttctgagttgttgtcttaaagggatgaattaagagaagagatattgcttttaacatccacttatgttctaaattattgggtccccttcctatgacacacgatggaacagaaagcatttaaaattgtagggcatgttggtgggagtatatgtgagggtgccatttctgaagggtagcttggcaacatagatcaaacttaaaatgtacagaccctatgttgacaagctggcagcaacctaaatgtaactcagttagaaaactagttgaataaaccatggcaaaacaattcaattgatttataatattttta

SEQ ID NO: 204102 - DNA, 620 bp, Homo sapiens
ttaccacttcctgtaggtagttaacaatgccgttctccttgcagaagatctacaaacttttgcagaatgagcaagtgaaggagtagcagtggcatctgaaagacagtcagacaagtttgctatatcagttcaggtaaagaataccgaycacttgacttatggcaggaggaatagtttcaaaaaagctaggaggcacaactttgaggattgggtactggttctgtatgttgaaaagaagggaagcatcaaaggtgatctggactctaccatgggtctccaggaaaaattccaaagaaacaggattaatggtgaatcatatttttttttttgctggtccagtcaggtgtttctgacatatttgtgtgcaacaatgttgagggaaccaaatgagatcataggtttgcaagtgctctgcaaattgtaaagtaactgtgtaatggtaaatgatatttatccactcacagataattggatagctattgtgggccaggcacaattctaggtgctggggtagagcatcaagcaatgtcttattgttcatggagccagcattctagtgtaataagaacttctctgattttaagttagtcaagagttacacattctccttcactcactaa

SEQ ID NO: 204103 - DNA, 560 bp, Homo sapiens
ggaagaggagagatgttggcaattaagagtcaatagcgtcctggattaggatttatttatgcactttttgcaacctattttgctggtgaactgcctgactgaacctcctagaaatagtgaacaggggctgaaatgtgtgtgtttagttgatatctgcacattgacagaaaagtaacttacaagatgcattctcttmcagactggagggagatctgtagctggtaattgggcagcaggtggtagaagatggcttggaggatcagaaactccttagatcaagtcagtgtagtagcaatttatagcgaagagttaaaaaactatttcagacttcaccacctatatgaggagatgactgaattcttgctgctactaaagccaattagataaaggggaaaaaggaaaaaaaggtgaccataatgtttccctgggaacaaatcaaatagcaaaactcagactaaaactctaggtaagacgcgagaatatgaggtgctaagggcatgtgacagcctcctgaatttggatcctgcaaagcgtggcccaggtaggcacaggtaagtggt

SEQ ID NO: 204104 - DNA, 611 bp, Homo sapiens
ataaatatgtatataaaggggaatttattcagtgttaactcacacgatggatcaccaggtcccacaatatgttgtyggcaggctgaggagcaaggagagccagtctgagttccaaaactgaagaacctggagtccgatgttcgagggcaggaagcttacagcatgggagaaagatgtaggctgggaggctaggccagtctctcttttcacttttttctgcctgcttatattcaagccgatctggcagctgattagattgtacccacccagattaagggtgggtctgcctttcccagcccactgactgaaatgttaatctcctttagcaacaccctcatagacacacccactatcaatactttgtatccttcaatccaatcaagtaacactcagtattaaccatcacaaaatcctaatccccaaagtgatgatatttggaggaggggcctttgggagatgattgcattttgaaggtggagccctcatgaatgaaattagtgcccttataaaaaagaccagagagagttccctcattccttctaccatgtgaagacacagcaagaagacaccatcgatgaaccaaagcataggccctcaccagacatcaaata

SEQ ID NO: 204105 - DNA, 421 bp, Homo sapiens
caggtatgaggattaggattagaggagtgtcctgacaactcactctcaatactgggaaattaagtattttagggagctatgtatccacgttctatgtaatccttcttrttagcatttaagactcttccagagatgatgagtttactaagaaacaccataagaaatgaacactaaagcctccagaaaacattccctgaggagacaaaatctatgttgaaaaggactactgggctcaataataatctgttagttaatgtctggattgcaaaatatgtggcccactaaaggtcacttagccctggtgctgactggtttgaaccaaaaatatgaaatgattcaagcaggaagtggaggccttgagtgaacctcagctggtcaactctttaacttttccaggcgggcctagcatttagtggagcag

SEQ ID NO: 204106 - DNA, 395 bp, Homo sapiens
gtgtcctgacaactcactctcaatactgggaaattaagtattttagggagctatgtatccacgttctatgtaatccttcttgttagcatttaagactcttccagagatgatgagtttactaagaaacaccataagaaatgaacactaaagcctccagaaaacattccctgaggagacaaaatctatgttgaaaaggactactgggctcaataataatctgttagttaatgtstggattgcaaaatatgtggcccactaaaggtcacttagccctggtgctgactggtttgaaccaaaaatatgaaatgattcaagcaggaagtggaggccttgagtgaacctcagctggtcaactctttaacttttccaggcgggcctagcatttagtggagcag

SEQ ID NO: 204107 - DNA, 395 bp, Homo sapiens
gtgtcctgacaactcactctcaatactgggaaattaagtattttagggagctatgtatccacgttctatgtaatccttcttgttagcatttaagactcttccagagatgatgagtttactaagaaacaccataagaaatgaacactaaagcctccagaaaacattccctgaggagacaaaatctatgttgaaaaggactactgggctcaataataatctgttagttaatgtctggmttgcaaaatatgtggcccactaaaggtcacttagccctggtgctgactggtttgaaccaaaaatatgaaatgattcaagcaggaagtggaggccttgagtgaacctcagctggtcaactctttaacttttccaggcgggcctagcatttagtggagcag

SEQ ID NO: 204108 - DNA, 635 bp, Homo sapiens
ttaaaatacatcatttagcagatatggcattgctataaagtaacttatcatgttacattttcgacttaccttcttggccatagcacgatctcggctcactgcaacctccacctcccagactcaagcgatcctcccacctcagcctcccaagtaactgggaccacaggcawgcaccaccatgcccagctaaattttgtattttaggtagagatgaggttttgccatgttgcccaggttggtctcaaactcctgagctcaagtgatccgcccatcttggcctcccaaagtgctgggattgcaggtgtgagccactgtgcctagcctcaatttaccgactgatttgtaaatgctaaaaaatgaaatattttccttggttattttcaattataggcaagatgaaatatgcatgtacctgcaatgatgcttgtattaattaatgtatattaaatacatatgtcccaggcactgtactaaatgcttcatatggattatctcatttagcctttacaggaactctatgaaactgggtgatttgttttcttattttgcagaaaataaaacagaggcttactaaagtcaagccacttgttggtgatcaagcagggagtgggaggcagagctggtattcaaactta

SEQ ID NO: 204109 - DNA, 604 bp, Homo sapiens
tggtgccttatggaccagtggtcccagaagactaaataagaaagtcagaggaaaaaagtaagaaaatgaaatgtttaagaaagggataatcttactaatcttcattttctctaagctactgtaagacataaaggaaaaaactaatattaattaaatccattaaatcacatttaacactaataggaacayaaaaactattattttccttattactctagatgaaatcttgagatttaacaagatgaaggttatcatactggttcacagagctgttacatggtacagcttaattctaatctagttctttggacttagattggctctgctgttaaggggccaaaaagtcttgggcagtttagctttttgagacttcagttcccttaagtgtatgatggtgagatatggtaagagagttgttagtattagatgattaatgaattattataatgctttcatcatgactttcacatagtaaatgttcaaaatgtgaaataatttgcatcgtcattaaacatattccagtcaatatcttactgaaagctttttgatgctaaagacttcatcttactccatagtatttgtagtttaatgatgagtaattttc

SEQ ID NO: 204110 - DNA, 604 bp, Homo sapiens
tggtgccttatggaccagtggtcccagaagactaaataagaaagtcagaggaaaaaagtaagaaaatgaaatgtttaagaaagggataatcttactaatcttcattttctctaagctactgtaagacataaaggaaaaaactaatattaattaaatccattaaatcacatttaacactaataggaacataaaaactattattttccttattactctagatgaaatcttgagatttaacaagatgaaggttatcatactggttcacagagctgttacatggtacagcttaattctaatctagttctttggacttagattggctctgctgttaaggggccaaaaagtcttgggcagtttagctttttgagacttcagttcccttaagtgtatgatggtgagatatggtargagagttgttagtattagatgattaatgaattattataatgctttcatcatgactttcacatagtaaatgttcaaaatgtgaaataatttgcatcgtcattaaacatattccagtcaatatcttactgaaagctttttgatgctaaagacttcatcttactccatagtatttgtagtttaatgatgagtaattttc

SEQ ID NO: 204111 - DNA, 600 bp, Homo sapiens
tatatattatcgtcaagtactttcatttctcaagcctttaaaatacacttttaaaaactctgcatgtggagagtacattattgtgcctcttctcaactttagtatctctgtccatctaatgattagttcctcctccaaaaaaagaaagagacagtgatctgattgatcagagtgcagggcttttactaagctatattttactagcggatgatgtttctctgacccaaagttagcaccattgtatagcacatcatctttggtctcttcccatgaagacttgccttaataaggacattctaacgagattctctttctttctctcttttctgcaagctctgaacttctatttgatcgtatatatttgaccagagctactggcatacctaaaaatgctgacttaaatatttttattgatgatcattccattaatgatcataatggaggttctagcccayacaatgagtcaagaaaataaattagaggcgtaagtactgggaaaaaaagagagagagagctctatttgcagatgctgtgattatacacaaaattaattctacaaataaatcaatttaattatgaaaagcatttagcaaggtagat

SEQ ID NO: 204112 - DNA, 597 bp, Homo sapiens
cgatgagcctcctgtgccacaacatcctctaatctgggcgaagattaaaagaaaagagggtcaggggcaccaggcaaatgtcatgcacccttttctcatagagaaatcctgtagctccccattcttcctctccaagccttttgatccacgttgcacacacaattccaacaggacttgttatttgaagctcactgcaaattgacagcaacacttagaaagtaggaataggttggcggggaggggcatgaggggcaacatggagtgagctgcttctagaagaaggcactgagcagtgtgggcaaaaagacaaaaactcatgaaaaaccaagaagccatcatgcagccactttagaagacatttgagcagtgtcttataaagttaggtataggaccagccgtgccatgtcctcatttgcacacacagcacctctccctgggckaacagagacgatccaggtagctgccaggcctttgaggctctgttttaatgaagagagagccatccaggtgtccatcaacaggaggatgggtaagtaaatggtgtgtagccacgaaatgcgatgctgttcagtagggaaagggacgcaacaattggtg

SEQ ID NO: 204113 - DNA, 387 bp, Homo sapiens
ggggaaggtatttggggaggatcaccacggttagattccttgaattccatcctaccacctgcattcccaagggatatgggcagagacaacgctttaaatggttatgctggtgaactcactgggtttcaattcttggaaacccagtggcttaacacagttaagccatttcaatggattttagctctccctgaaacagggagctatttcaaaatggctttactatcattggctctctctcagtcccagcccttcacaatgtttcattatttgaagcaaaactgaaaatgatgatcctaaggagacaggaracaatacagtccaaccatatcataagggcaagaaggtaggtacactctcgggtgaccaagagagaccagcaccaaggtc

SEQ ID NO: 204114 - DNA, 285 bp, Homo sapiens
caggtgcattgcatatcagcattttcacccacaacatttcgtgcacgaggtaggtgccacccttacatctctgatggaaaggctgagaatccaggtggctgagtgccrtgcccaaggtcacactgacagcatgtggcagaagagagctcaaatctagatcaggagtatttgaaattgtttatgaaacattgcaggaacacaaaatttaaaaactcctagaagataacataggaaaaacatctagatggcagtgatgttttagatataacgccaaagacaagatcc

SEQ ID NO: 204115 - DNA, 521 bp, Homo sapiens
ctaatgtccttactttcttcaggtttttatttaaaaatatctttttcattgatatttttcctggtctttctatttaaacttgttaaaaagaaagaaatacccccccataacagcttatattttaaattaaatgtrtctttgttgtttttttatccctctaagatgttggctcaatgaaagtaggaattttttctgttttgtctactgctatgcctagaataatgcctgcatagtaggagctcaataaatatctgtcagctgactaaatgaatggaattatgttaacagatgaatgattttagcggaaataaatgtcaatatttgatgatataaatatatatattagattataatcatttatcagattattattttagataataaaagcatttttagcattgcttgatttatggttaggattctgtatttggaggtgctaaaatgggtaagaagtccagccattgcagatgcagaggcctttagctgaagctctagagctgttggggtccccaggaaaaagc

SEQ ID NO: 204116 - DNA, 521 bp, Homo sapiens
ctaatgtccttactttcttcaggtttttatttaaaaatatctttttcattgatatttttcctggtctttctatttaaacttgttaaaaagaaagaaatacccccccataacagcttatattttaaattaaatgtatctttgttgtttttttatccctctaagatgttggctcaatgaaagtaggaattttttctgttttgtctactgctatgcctagaataatgcctgcatagtaggagctcaataaatatytgtcagctgactaaatgaatggaattatgttaacagatgaatgattttagcggaaataaatgtcaatatttgatgatataaatatatatattagattataatcatttatcagattattattttagataataaaagcatttttagcattgcttgatttatggttaggattctgtatttggaggtgctaaaatgggtaagaagtccagccattgcagatgcagaggcctttagctgaagctctagagctgttggggtccccaggaaaaagc

SEQ ID NO: 204117 - DNA, 494 bp, Homo sapiens
ttatatgcatagctaatgtccttactttcttcaggtttttatttaaaaatatctttttcattgatatttttcctggtctttctatttaaacttgttaaaaagaaagaaatacccccccataacagcttatattttaaattaaatgtatctttgttgtttttttatccctctaagatgttggctcaatgaaagtaggaattttttctgttttgtctactgctatgcctagaataatgcctgcatagtaggagctcaataaatatctgtcagctgactaaatgartggaattatgttaacagatgaatgattttagcggaaataaatgtcaatatttgatgatataaatatatatattagattataatcatttatcagattattattttagataataaaagcatttttagcattgcttgatttatggttaggattctgtatttggaggtgctaaaatgggtaagaagtccagccattgcagatgcagaggccttta

SEQ ID NO: 204118 - DNA, 586 bp, Homo sapiens
cctattttcattattagttagaaaactattttttttttctgaattgattctcctaagaattttatactgtattgttttcaagatggacatcattctgtctttgggatgtgtcttatacttctgctggccaggccgtaattgtgatatcattgcttttgattgtggatttgtaccagaacttgcagaatgggggccagtggctcaraagaaaatctcggagataatatgtgatctctctttgaggagatgctgtagtacctccctcttgatggcagagagaatgattttgtgtggagaagcacagaaactgaaaacaccaagtcacaatttatttagtagattccaactgcaaataaagaaagtttagggataccttaaccagtttatttctttgtaatgtaggtacaagaatatatattacaaaaaacaatctgggcaagtttaaaagcacattttaataaagataaaaaaattttaagtgataaagtattctttcatagtttaattggcctttttttcattcccagtacatatggcaatggggtatcttacaatcagtggcattttcaaataaataaggtaaaat

SEQ ID NO: 204119 - DNA, 594 bp, Homo sapiens
ggcctttttttcattcccagtacatatggcaatggggtatcttacaatcagtggcattttcaaataaataaggtaaaatatccaggacccactgcttgtttgaaatttgcttgctggagttaagagaagtgaacattttaaagattttttttttcctttagacagaaccttatttcatttgtgaaggctgactggacttggatgctgcccactagttaatttagtgtggcaaaaaataagaattctgtgtctgggcttcactgtctgcaaaaatgaatgcattattgtaaaatgtgcactaatctaaaaagtgtattgccttcctagaagtctgagtaatgtcttacacacataatcacactgcccgtcttcatatggacatgagtcctatagtgcttgagaaatggaaattatttgactgcatcagctagtrcatcgtacttctggttattttgaatttttgtaatcagatgctgctgagctgtggccttttccccacctcctctctcatacatatatatgagtggtgtgttcagtgaaattttctgacatgaaaaagaagtccttaaaccaaaaataataataataataata

SEQ ID NO: 204120 - DNA, 542 bp, Homo sapiens
gatattatgatggtaaatacacttgggaaattctaatgtatccctgagataccactgtcatactactaaagcctaaaatgacatttaaaaaaatgctaccacctatttttattggctcatacaaatcttgtcatcatttgatattgtcatgacatccgccaaaattataactgacccaggtctccctactcatgtacatattcattcattcaacaagtattcattgagtacctggtacggtggataaggtagtgaataagacaaagtctatatcccacagagctcgtattctaatgggtaagaaggcarcaaataaataagcagaaacatctcttaggtagtggtaaatgctacaaagaaagatgaagctgggtgaggagatatagaataatgaatagggggttgcaagctaccaaaacagaatggtcaggaaggctgaggtggtgacatttgacagtcctaaataaagtgagggagcataggaagatccagggtgaacggtagtccaggcagagggaacagcaagtgtcaaagtcctgagg

SEQ ID NO: 204121 - DNA, 565 bp, Homo sapiens
agtgaatgggacgtgaggaagcagatggagatggtgagtgcacatagtttttcaaagaagctgtgaatgggcggaacctggaggggatatgagtcatcacagaaatattagacatttctgagatggcacctgaaagaaaagttgacctgggagaggactggctggcatatagtaattactctggggtttaaagggtaggaatggcttgaggttaaggtctctgacctctttttagcttaggacaatctctcttcctcttttgttcctcccaagaggacgttgtttgagcatccatccatgactgaaacttgcctgtccttgtacattttagtaacatgagccaataaatttgcttatatttttatagcttaagatgtttgcaatagagtctttttattgtctatatggtacatatgtctgtatctatgtgatrcatggctacataatcatataaatatattgtctacatggagtttctcagaattaagaaaaagcacaattactctgtagttcaccctaatagttatctaaactaaggaaagggggaataaatgaaaaaaagtaa

SEQ ID NO: 204122 - DNA, 370 bp, Homo sapiens
gcatatatagcatttactttaccagttcattgtaagttggcaaacatttagaacttgaaatgaaatcagagctcatctggtttagtttcattgagtagaggaaatggawgcctaaagggagtgaatgacccatggaaggaaagaacctaggacctggctttcaacctaggaaccagagctttggagtaacacagacctgggtttgagttctgcctctgccacccatacccttgaaactctgggtgaattatttagctgctctgtgtttattttctaatccataaaatgaaattataagacattgatcttgtagttatgaggcatatatgagattgcaaattaactagcaaggcgtctagcacatagaaat

SEQ ID NO: 204123 - DNA, 622 bp, Homo sapiens
attgtatgtcctgtttaagaaatatttccttactccaacttcatgaagatattttctaatataatgttctagagatttgtttttaccttcatatttattaaaaagactgtcctctacaattacttagtaatattacctttgccctaatttgaatgttttcatatgcattggtttctttttgagcttttgcttctgttctattggtctatttgtcaatcactgcacctgtaccactctctcttagttaccatagtttttaaataacttttggtatccaaaatttagcaggttcttccccatttttttcctgttcagaacctataaagtctttcatttacctttactttagaaattacagcatacttccgtgacctattaacttccaatgttgactgaagtatgcataaatgttttacgtgtatatttatcaaaggctaaargtagtatctctgtcctcttcccaaataacgcaaggatctaaataccatttaactacaatcttcccattcttacatataatattacaattgttcagtattttacttatacctgctttttgatactccccaaataaaccattattactattttgttgttgtttttgtagccagtcagtagttct

SEQ ID NO: 204124 - DNA, 622 bp, Homo sapiens
attgtatgtcctgtttaagaaatatttccttactccaacttcatgaagatattttctaatataatgttctagagatttgtttttaccttcatatttattaaaaagactgtcctctacaattacttagtaatattacctttgccctaatttgaatgttttcatatgcattggtttctttttgagcttttgcttctgttctattggtctatttgtcaatcactgcacctgtaccactctctcttagttaccatagtttttaaataacttttggtatccaaaatttagcaggttcttccccatttttttcctgttcagaacctataaagtctttcatttacctttactttagaaattacagcatacttccgtgacctattaacttccaatgttgactgaagtatgcataaatgttttacgtgtatatttatcaaaggctaaaggtagtatctctgtcctcttcccaaataacgcaaggatctaaataccatttaactacaatcttcccattcttayatataatattacaattgttcagtattttacttatacctgctttttgatactccccaaataaaccattattactattttgttgttgtttttgtagccagtcagtagttct

SEQ ID NO: 204125 - DNA, 509 bp, Homo sapiens
agggactttctgattttttctatgcgtgctctcaattgtacattcagagatttcagtttctcattttccttttgtacaccttctaaggctgtgagaagaagccaagagactcaacagtctttatagtcactgctgtaaccatagcaattaagtgcctctgccactgacctcccagcatctccccttccacctgcatttcatctcctrccactgctagagacaacttgaataactgatgtcaccacttgtcctggattatttgttttctgttttttcctggcaaagtggttctacctgtgtttctcaacaacatgatcaatctaatcctggaatcccacttcaggatctcaatagaaaacagaatgctcaaattgggatagttgaggaaaaattcatgaagggttatagaggcctaacccagtgatgatgaggagcagttactgggacttggagacaggcataactgtggaaagggttgctggaaagaagctgggatcctaagttaagca

SEQ ID NO: 204126 - DNA, 509 bp, Homo sapiens
agggactttctgattttttctatgcgtgctctcaattgtacattcagagatttcagtttctcattttccttttgtacaccttctaaggctgtgagaagaagccaagagactcaacagtctttatagtcactgctgtaaccatagcaattaagtgcctctgccactgacctcccagcatctccccttccacctgcatttcatctcctaccactgctagagacaacttgaataactgatgtcaccacttgtcctggattatttgttttctgttttttcctggcaaagtggttctacctgtgtttctcaacaacatgatcaatctaatcctggaatcccacttcaggatctcaatagaaaacagaatgctcaaattgggatagttgaggaaaaattcatgaagggttatagaggcctaacccagtgatgatgagragcagttactgggacttggagacaggcataactgtggaaagggttgctggaaagaagctgggatcctaagttaagca

SEQ ID NO: 204127 - DNA, 503 bp, Homo sapiens
tgtgcagcacctccctcttgtctttcttcctccttctttggccacataagaccatgccttgcttcccttttgccttctgccatggttttaagtttcttgaggcctccccagccatgcttcctgtacaacctgtggaattgtgagtcaattaaaccttttttctttataaagtacctagtctcagttagttctttatagcaatgtgagaatagactaatacagcaaattggtactgggagtgggcatttctgcaaagatacctgaaaatgtggaagtgcctttggaactgggtaatgggcagaagttgaaagagtatggagggctcagaggaagacaactgggggaaagtttggaatttcctagaaacttgttaagttgttgtaaccaaaatgctgatagcaatatggtcaatgaggtccaggctgrggaggtctcagatggaaatgagtaacttattgggaactggagcaaaggtcacttttgttatacactaggaaagaggt

SEQ ID NO: 204128 - DNA, 588 bp, Homo sapiens
ttttaaatgttctaatcacaaaaaaagataagtgtatgaggtgctggatatactaattagcttgatttaatcattctataatatatgatattatatatatatatcaaatcatcacattttatagcataaatatatataatttttattttccaaatataccttaatttttaagaaacagagaaagcagagtctatgggttccagaaggttggcaatttggggttggttctagaccacgtgcttttttttttttcttaatggaatatgaggtgaggtcagcagctgaggtggtgggaggagtcatgagtttggtaagagtaacttcagagaactgaaaggttaatttactagaagatggtaagattgctgggcaatcctgtgctgagttgccatttgagattttgtgaatrtccatttgctgtcaacatcgtcgagtgatgtttttttctccagcatctttcagctgctcaggtgcaagtacagagtagagggatagttgagtttagacatgattggttctgttatggctcttattttacagatgaagggactagggttcagagaagaaagtaacttgctagtaatggac

SEQ ID NO: 204129 - DNA, 584 bp, Homo sapiens
atgtcatatttcagagctgttcttaatatcatggaataaaaagtgtagattctgcaaacttctatcccttcccctagtggcgagcaggtgaataagcaatactgtaatttgtatctcaactttttttttcctactagcattatctaaaaagggtatctcagctagttaccaaatcccagccttgggaatcacaaagcaatattgtgcattgaagatatgctcatgggatagaaaaagtatcactgagtttgatcaccatctctcctgcctgctggccatgtgacttgcagcatggttgtaagaatctgttcagcattaactgagcacctatggtatgccaagcagtaaggaagatactgagaagatattgatgaaactgaattttgtcctcctaagaattatagtccagggaattcagtgagatagtatatgcacaatgttgtgtccaamacagggtgggcacttaataggtgttaattctctttgccttctctatccatttgtcctcaagtacctgatgacacctcttggtgaaaatatcaacactcactgagatactaaatgagggccccactcatgtgtaa

SEQ ID NO: 204130 - DNA, 571 bp, Homo sapiens
ctcctgagtagctaggattayaggcacccgccactgtgcctggctaagttttgtattttttagtagagacgaggtttctccatgttggccaggctggtcttgaactcctgacctcaggtgatctgtccgtcttggcctcccaaattgctgggattacaggtgtgagccaccgcacccagctggagctctgtttatgctctttgttgattccctattgtgctcctaactaccacaatcgtttatggaaaagccaagctgcgacacaagtatcttgccatgtcttataaaataaaacaagaggagataagtacaaaagtctatgaatttcaggccagtaagctctaaaatttcaaacagcaaatacagtccgtaaaacatttgagagagagtttacttcagtagctccaattatctgagcaatgttttccaaataccttagcacctattgatctaagagtgaagtaggagaacttctttaaagatcagatagtaaatattttcagccttaagggccataaggtctctgtcatgactgtttaactctgttaaagtgcaaaagcagccatagatg

SEQ ID NO: 204131 - DNA, 601 bp, Homo sapiens
ctatctcaaatccttttgctaaataagtagggggtaaattattttaaatggggaaaatggaacacaatttttaaatattttaaggcatttcaaatgggccttaaaatacaacggttgtcctctggagggattttcattaattattaaccatatcagaaatgtaattaagtcagtgctgaaattagtcaagatcagctttataactcaaatcacwtaaataacatatatgggttctatgaattaatcattgtagatttgattaaaaagttccatttcaaagttcatgcaatttaatgtcatgttgtttctgtttttcaaacatttgttaaaccaactgtctatagaggcacattatatggctaaagatctaattgcaccattgttagcatagaactgtagtcagtaaataattagtggcttgcattgtgaagttttgataaatttttaggcttctctgaattaacatttgtcttatggtcagttaaggaaattaaatatcgattaaggaaattcagacagggcagcttcacagtctccctcctccacagggccccccatgaccactgccttggaggctgtgctgactttggggaaggcctat

SEQ ID NO: 204132 - DNA, 601 bp, Homo sapiens
ctatctcaaatccttttgctaaataagtagggggtaaattattttaaatggggaaaatggaacacaatttttaaatattttaaggcatttcaaatgggccttaaaatacaacggttgtcctctggagggattttcattaattattaaccatatcagaaatgtaattaagtcagtgctgaaattagtcaagatcagctttataactcaaatcacttaaataacatatatgggttctatgaattaatcattgtagatttgattaaaaagttccatttcaaagttcatgcaatttaatgtcatgttgtttctgtttttcaaacatttgttaaaccaactgtctatagaggcacattatatggctaaagatctaattgcaccattgttagcatagaactgtagtcagtaaataattagtggcttgcattgtgaagttttgataaatttttargcttctctgaattaacatttgtcttatggtcagttaaggaaattaaatatcgattaaggaaattcagacagggcagcttcacagtctccctcctccacagggccccccatgaccactgccttggaggctgtgctgactttggggaaggcctat

SEQ ID NO: 204133 - DNA, 565 bp, Homo sapiens
ccatgcccagctatttttagtatttgtagtagaggtggggtttcaccatgttgtccaggctggtcttgaactcctgacctcaggtgatccgcccgccttggcctcccagaatactgggattacaggcatgagccaccatacccagcctcggtgccttttccagctcctagggctgccacatccctagactcatggtccctctttcatgtttgaagccagcaacataatgtctctctgatccaagccaccaaaggttctctgtttttgaggtcttatgtgattagattgccccccttccttttggatatcccaggataacccctccatttcaaagtccttaaatctgcaaagtccctgttagtcccatgtaaggtgacatattcacagrttccagagatgaagagttgggcattttagcagagccatcattctgtctaccacacaaccgacattcagtgtattggattcactgtcggcgcttcctctgtttaccagcccatcttcttatgtttcagcttcttgtgtcctgacacccatttttgtctcagtccactttaaaccttgt

SEQ ID NO: 204134 - DNA, 321 bp, Homo sapiens
tctatggagtgaagtttgataaacttttaaagacaatgaagttaatttttaaaacctcttaaactcaactcttaattattcttaattgtgttctttaatttyttaaattgtgttcccaaagcatttaaaatatataactatcgtagtactgaatgcatggcatagtattatttcattaattcattaatttatttaaaatgactgtagtgaactcgtatggtacaatctctgtccttatggagtctagagttcagtgggatagacgcatgaaacagacacatgagtaatatataattacaaattatgatcactgttatgagt

SEQ ID NO: 204135 - DNA, 394 bp, Homo sapiens
ggaaggaggaaggagggatgaacaggcagagcacaggagatttttagggcagtgaaactactctgcatgaaaccatgatggtggatgcatgtctttataaatttgtccaaacccatagratataccataccaagagtgagccctaaggtaaactatggactttgggtgataataatgtgtccatgtaagttcattggttgtaacaaatatactaaccttgtgggggatgttggtagttgggggagctatgcatatgtgggaggcagagggtgtgtgggaaatctctgtacattcatctcaactatgctgtaaacctagaaaataaagtctatttaaatacaacaaaactgaatttccctgaagactaggtagcctttttactaatttaagttgt

SEQ ID NO: 204136 - DNA, 390 bp, Homo sapiens
ggaaggaggaaggagggatgaacaggcagagcacaggagatttttagggcagtgaaactactctgcatgaaaccatgatggtggatgcatgtctttataaatttgtccaaacccatagaatataccataccaagagtgagccytaaggtaaactatggactttgggtgataataatgtgtccatgtaagttcattggttgtaacaaatatactaaccttgtgggggatgttggtagttgggggagctatgcatatgtgggaggcagagggtgtgtgggaaatctctgtacattcatctcaactatgctgtaaacctagaaaataaagtctatttaaatacaacaaaactgaatttccctgaagactaggtagcctttttactaatttaag

SEQ ID NO: 204137 - DNA, 430 bp, Homo sapiens
aactaggaaaacagtaaaaatatcaatggttgccaaggtggaaggaggaaggagggatgaacaggcagagcacaggagatttttagggcagtgaaactactctgcatgaaaccatgatggtggatgcatgtctttataaatttgtccaaacccatagaatataccataccaagagtgagccctaaggtaaactatggactttgggtgataataatgtgtccatgtaagttcattggttgtaasaaatatactaaccttgtgggggatgttggtagttgggggagctatgcatatgtgggaggcagagggtgtgtgggaaatctctgtacattcatctcaactatgctgtaaacctagaaaataaagtctatttaaatacaacaaaactgaatttccctgaagactaggtagcctttttactaatttaagt

SEQ ID NO: 204138 - DNA, 592 bp, Homo sapiens
caccattctgaagtgaagaaacgcagttgtgggctagtaatatcattgccttcccgatccaagaacagcagataaagctgcaaattcctgacctctagacttgcagatccttggcacatggttcttgtgcctgctcatctagccacccttagattttataaacctacaccccacattaaatcctttcctgattaaatacttagagtgccttctctttcctatactgaatcctgactggtataaccgataaggatttttaacaagggaaataaatgatcagatttgtgcttcaggaagtgatcttgacaacttcttagaaaacaaattggaaaggagatggattgactagagacagatttgggaaggtcttacgaatgtccagccaaaacgaggtacctggaatacttggattgaatgaaatagttatggtrggaatgaaaaagaaggatggaaacaagatatttcataaattgaaagtaagatctattgaaaatggggtgggtaggaataggagaagaaatgtaaacttggccattacctcatcccaactctgctggggatcctctgaagtgcccccactgcagtctgtcct

SEQ ID NO: 204139 - DNA, 619 bp, Homo sapiens
atttgtaacattaatgaaataaatattaattttttaatggctgggaaatacaaagtatttttggagcatgaaagccctatcaaggataccaaacaattcgcaatgacattgatcactgatataaagggacaatatctacagcctacatggcaagcacctactatgtgccaccaactgggggtacaaagatgaatgggacagcatggtggagatgacagaacagacaagcaatggcaactacatgtctgagaaaaatactttaaaggaggaaaggctagcatgtttggggagtctggcataccaacctacatatgaggggtagagaaggttctcctggagagagccacacagtgtgactggggagccacctacaacagtggctggcaatggtgtcaattgaggcaaacagattatttataaagagataaaagaggtggttttaagggctcaataatagaggtctgaaacagctgccatggtagaatcaataagaataaaaaagaaattgccaagaagcaaagctgcatctcatgcttctgaggttgtctccacmtacacagttcctttgctggctgcaagctcattgttatgccaatagcagcattcggctgaatgccca

SEQ ID NO: 204140 - DNA, 617 bp, Homo sapiens
tgggttagttactgggtcctgaaaatcccagcatttagaatcatctggaaagcctccagcaccttataaaaatgacttttgaagagtaagaaatggaagcaggatatgctcacaattaagggaactttgtaaggtttctactacttttgttacagcccctttccccctagtgattaataataaagcctctgtgtgctcagtgaaggagaggcaagtacactggagggcaggagaggtcatagcttcttccactatgagctctggaaaggaaaaacccagaagcagagaaagaagggcagctttggagccatgggtacaggtgggtggggagagattcagagaacagctgagaaacyaggacctaggtagggaaagaagactagaattgtgcagaaaagtcaacataacaggcctgagattgctttccttaggaagtcttgcttgcagggttggcacatgactggcatctaagaacttagatttcagaaggcttttctcaaatctctaactgataagagtggctcactgtgcctaaacagtttgtgcaggcaatgtggtttatgttgaacacccactttcctgggatttttgcacatgctaagcagaggtacctacac

SEQ ID NO: 204141 - DNA, 591 bp, Homo sapiens
ggtgattaccaggagcaaggaggatcagaagacgtaagtaaaaaagtaccaagttgtaattaagttatgtaatatgaataagtctagagatttaatatacagcatgagaactagagttaataacttcatcttgtgtgaactggaaatttgctaacagtagattttaggtgctcttaccacacacatkttaaaaaaggtaactgtgatatgatggtcatgtcaagttgcttgactgtagtaatcatttcactatgtataccaagacattatgttgtgcaccttaaatatatgcggttaaatatataaatatatagtatctgattcatcataaacacttaataaataaatatatgttctttttccaaaaaaataaaaagtctctaaggaactctggactctctaagatttcaggttttagcatttcttatataaaattatagctaatttatagcatatatttaattttgaaaaaatatagttcacacagctaacaagtcttttttgtttaggaaatttctacatcatttactctgaaaatggagttcattagcaaatattttaatctgcattattgatataaacgagctatga

SEQ ID NO: 204142 - DNA, 591 bp, Homo sapiens
ggtgattaccaggagcaaggaggatcagaagacgtaagtaaaaaagtaccaagttgtaattaagttatgtaatatgaataagtctagagatttaatatacagcatgagaactagagttaataacttcatcttgtgtgaactggaaatttgctaacagtagattttaggtgctcttaccacacacatgttaaaaaaggtaactgtgatatgatggtcatgtcaagttgcttgactgtagtaatcatttcactatgtataccaagacattatgttgtgcaccttaaatatatgcggttaaatatataaatatatagtatctgattcatcataaacacttaataaataaatatatgttctttttccaaaaaaataaaaagtctctaaggaactytggactctctaagatttcaggttttagcatttcttatataaaattatagctaatttatagcatatatttaattttgaaaaaatatagttcacacagctaacaagtcttttttgtttaggaaatttctacatcatttactctgaaaatggagttcattagcaaatattttaatctgcattattgatataaacgagctatga

SEQ ID NO: 204143 - DNA, 480 bp, Homo sapiens
ctctgctctctgggactccccgggtgcaccatcatggtcatctccaaataccacatttctcacatcctcagaaaggctcatatagtgactcgtcttttccttactcagaggatcatccactgcaagaagaacaaaaatcagatcaaggagttacgtgggggtcagatgttatctgcccaggtactggctttatttgtacctcctgtaagtgacagacagaatacatggagcaaaaagactttggagactgtcatctaygaagatcaagggttattatgacttctacagcacaggagaatccttaaaatcacacagaaaaacaaataaacaaacatatcattaattgtgtgaatcaatgatttaatgtctggctttgcacgattcgtttcaagagatatgtaacattctttatttatttagtagaaaatgccacttgcattgtttgtattcaatataattaacaaatagacttcactctgc

SEQ ID NO: 204144 - DNA, 514 bp, Homo sapiens
gactgtacccaggatctcacatttgcttaagcagcycccacaattgggtaagtcaagtctttgcacttaattcatatgtgaatctccctaactatacatatatcttatgggttctgcttttgtctttgaacctggacagacctgggtctgatagatttgtcttcactgttttgacagtcttgaccataagtcttctggaccattggcaaagaattcctctatcagaagatatttgagtagtcccttctgaaatctcttttttaaaaaaaataattttcatataacaacaaaaagacttggtatagaaagaaaaatatagtccatctctatcatttggattctgtatttgtgaatttgcctatatgctaaaagttatgtgtaatccccaaaataattcccgtggtgcactcctagtcattgtaggacatcatgcactatatggagaaaaacgttaaaataataactcatctttcacccatgagactggtgaagttttgtaaattcaatgagagac

SEQ ID NO: 204145 - DNA, 514 bp, Homo sapiens
gactgtacccaggatctcacatttgcttaagcagcccccacaattgggtaagtcaagtctttgcacttaattcatatgtgaatctccctaactatacatatatcttatgggttctgcttttgtctttgaacctggacagacctgggtctgatagatttgtcttcactgttttgacagtcttgaccataagtcttctggaccattggcaaagaattcctctatcagaagatatttgagtagtcccttctgaaatctcttttttaaaaaaaataattttcatataacaacaaaaagacttggyatagaaagaaaaatatagtccatctctatcatttggattctgtatttgtgaatttgcctatatgctaaaagttatgtgtaatccccaaaataattcccgtggtgcactcctagtcattgtaggacatcatgcactatatggagaaaaacgttaaaataataactcatctttcacccatgagactggtgaagttttgtaaattcaatgagagac

SEQ ID NO: 204146 - DNA, 452 bp, Homo sapiens
tctagatttgtgtggtatattctatcatattaaaacaatgaaaccgcckggctgggcactgtggcgcgtgcctataatcccagcactttgcaaagccaaggcaggcagatcacttgaggccagaagttcaagtgcagcctggccaagatggcaaaaccccatctctactaaaaaaatacaaaaattagccaggcctagtgtcacgttcctgtaatcccaggtacttgggaacctgatgcaggagaatcgctctgaacctggaggcggaggttacagtgagccgagatcacgccactgcatttcagcctgcgtgacagaaggatactctgtctcaaaaaaaaaaacaaaaaaaaaaactaaaaacacctgacatatttctcagaacatacatctgtccacaagctatacatgattctacatgggacagaattcatcaggaaaattaatttgct

SEQ ID NO: 204147 - DNA, 452 bp, Homo sapiens
tctagatttgtgtggtatattctatcatattaaaacaatgaaaccgcctggctgggcactgtggcgcgtgcctataatcccagcactttgcaaagccaaggcaggcagatcacttgaggccagaagttcaagtgcagcctggccaagatggcaaaaccccatctctactaaaaaaatacaaaaattagccaggcctagtgtcacgttcctgtaatcccaggtacttgggaacctgatgcaggagaatcgctctgaacctggaggcggaggttacagtgagccgagatcacgccactgcatttcagcctgcgtgacagaaggatactctgtctcaaaaaaaaaaacaaaaaaaaaaactaaaaacacctgacayatttctcagaacatacatctgtccacaagctatacatgattctacatgggacagaattcatcaggaaaattaatttgct

SEQ ID NO: 204148 - DNA, 573 bp, Homo sapiens
aaaaccccatctctactaaaaaaatacaaaaattagccaggcctagtgtcacgttcctgtaatcccaggtacttgggaacctgatgcaggagaatcgctctgaacctggaggcggaggttacagtgagccgagatcacgccactgcatttcagcctgcgtgacagaaggatactctgtctcaaaaaaaaaaacaaaaaaaaaaactaaaaacacctgacatatttctcagaacatacatctgtccacaagctatacatgattctacatgggacagaattcatcaggaaaattaatttgcttgattatggagtctagagagttccaatataggctgtctctaagctggtgtcctgagaataccggtatcctggctaagctcaagtctgaaagcttcagaacragtttcaggagagagacggaggaagttgccttttttctgcctttttctttatatctgaggtgtcagctgattggatggtgcccacacacattgagagatgaggctcccactcagctcaccagctcacatgtctctctcctctagaaacaccttcacagactcacccacaaac

SEQ ID NO: 204149 - DNA, 573 bp, Homo sapiens
aaaaccccatctctactaaaaaaatacaaaaattagccaggcctagtgtcacgttcctgtaatcccaggtacttgggaacctgatgcaggagaatcgctctgaacctggaggcggaggttacagtgagccgagatcacgccactgcatttcagcctgcgtgacagaaggatactctgtctcaaaaaaaaaaacaaaaaaaaaaactaaaaacacctgacatatttctcagaacatacatctgtccacaagctatacatgattctacatgggacagaattcatcaggaaaattaatttgcttgattatggagtctagagagttccaatataggctgtctctaagctggtgtcctgagaataccggtatcctggctaagctcaagtctgaaagcttcagaacaagtttcaggagagagacggaggaagttgccttttttctgcctttttctttatatctgaggtgtcagctgattggatggtgcccacacacattgagagatgaggctcccactcagctcaccarctcacatgtctctctcctctagaaacaccttcacagactcacccacaaac

SEQ ID NO: 204150 - DNA, 567 bp, Homo sapiens
gtaaagaagaaaggaagcacctttgtcctcacaaatcatacaatccaaataagagagtcaaatggtcaatacacaaatatatgcaatacatgatgtatttgagtgtggtaggtttttgttggagaataatcaagcagggaagtagaaaaggacaatagaggccagaaactggagattagtgtttgagttttaaatagggtggtcagaaaaaagactcactgaaaaattcaaattgaaacaaagttttsaagaggagggggaacacaaatgtgtgtgtggatatatatgtggaccatgagtgtgtatatgtatgtatgtgtgtgtggttgtgtgtatatatgtatgtatgtatgtatgtgtgtgtgtttgtatacatatatatgtaattctagttggagagaatagcatatgcagtaattttgagtttgtgtatatttggaggccggaggaaccacaaagaagtctatgtttcagactgggatgacttagaaaaagaatagaaggaaatgaattcagggagacaaagatggccaaatcataaatgcagccttattaggataggttttg

SEQ ID NO: 204151 - DNA, 567 bp, Homo sapiens
gtaaagaagaaaggaagcacctttgtcctcacaaatcatacaatccaaataagagagtcaaatggtcaatacacaaatatatgcaatacatgatgtatttgagtgtggtaggtttttgttggagaataatcaagcagggaagtagaaaaggacaatagaggccagaaactggagattagtgtttgagttttaaatagggtggtcagaaaaaagactcactgaaaaattcaaattgaaacaaagttttcaagaggagggggaacacaaatgtgtgtgtggatatatatgtggaccatgagtgtgtatatgtatgtatgtgtgtgtggttgtgtgtatatatgtatgtatgtatgtatgtgtgtgtgtttgtatacatatatatgtaattctagttggagagaatagcatatgcagtaattttgagtttgtgtatatttggaggccggargaaccacaaagaagtctatgtttcagactgggatgacttagaaaaagaatagaaggaaatgaattcagggagacaaagatggccaaatcataaatgcagccttattaggataggttttg

SEQ ID NO: 204152 - DNA, 566 bp, Homo sapiens
tgtggagtgttagaactgtataagtctctagggaagttctttgctaaaaggggagagaacaagtttccattctttatcttgagaaggaagcagtggatgcatcagtctccccaaaaccccgctatttcagacaaagatgtcaggggagtctgccaagaagtggaactcagaatttcgtttctaaatattctcaaggccataaagctaaggaaccttacacatttggagcaaaaaaaaaagaaggatcagattggattctggcttagattcttccatcatgctttaaaatttagaaactgtaaagaattaatttgcaaaaggaaggawtaatttttgaattatcaaatgtgtagattcaaaggattctcatgaaatgtcttttatatacaaatagtgatttttatttattttatggctgtagatgttgtaactgcaggtttttccttgcaggagtgagtccgtgctgctgcacatgccccagcctctgaatccagagctcagtgcagggcccatcactggactgagggacaggctcaaccaattccgaggtaagtctccacccacag

SEQ ID NO: 204153 - DNA, 524 bp, Homo sapiens
ctgcattgaactcttcaaaacagaaacccctgagtcacttggaaaagtaagaaaagtttaatgtctgataagaggcataggtaacattcaacataccacacaaacacataagtacacacacttacacacacaatcacattgacacattatggtgttagtaaattatgttttccctttgttggaaacaacttgatgtttttcacagcacgccttgtgctccagcttgcactgatggccattaacataccttgccaccatgtctcccaaatcctgtagagagagagagagagaaaacgactcctttagaaagttgttattcttgttgggtgaggtggctcacacctgtaatcccaccactttgggaggccaaggtggrtggatcacctgaggtcaggatttccagactagcctggacaacatggcaaatccccatccctactaaaaatacaaaaaaattagccaggtgtggtggtgcatgcttttagtcccagctactagggaggatgaggcaggagaatagcttg

SEQ ID NO: 204154 - DNA, 425 bp, Homo sapiens
gctacagattctggagaagcaaytcagacctcgtgcagacaagagttcttcgagaaccaccttggctatgcaaagactctcaggcccagcaacagtctgagctggatgagagatagagcaaaggtcccaggagcagcagaagctgtaagggagggaaaagggaaggaagaaaccctagatttcaggatatcccctttacatctgtgagaatatcagcacgcacaaggccaccattcctttgtctgactcctcttggatccaggagttttcctgggttaagccatccagggacaggacacgagatgccatttggctctaggagcacaggagagaaactcagcaggaagagtgtctctatgggaggaaaattcagttgagcacgtttgtagggtcacagggctggatatgggtagagtccagtgtac

SEQ ID NO: 204155 - DNA, 425 bp, Homo sapiens
gctacagattctggagaagcaactcagacctcgtgcagacaagagttcttcgagaaccaccttggctatgcaaagactctcaggcccagcaacagtctgagctggatgagagatagagcaaaggtcccaggagcagcagaagctgtaagggagggaaaagggaaggaagaaaccctagatttcaggatatcccctttacatctgtgagaatatcagcacgcacaaggccaccattcctttgtctgactcctcttggatccaggagttttcctgggttaagccatccagggacaggacacgagatgccatttggctctaggagcacaggagagmaactcagcaggaagagtgtctctatgggaggaaaattcagttgagcacgtttgtagggtcacagggctggatatgggtagagtccagtgtac

SEQ ID NO: 204156 - DNA, 562 bp, Homo sapiens
atagtttatatattagtcagggctctccagacagacagaatgataggatgtatatgtatacatgtagagatacattcatgagccatttcagtcaaccacaaaccacacatggtggtcacataagattataataccagtgtgtttactgtaccttttctgtatttaaatatgtttacatactaaataattaccactgtgttacaattgcctacagtataccgtacagaacatgctgtacagttttgyagcctaggagcaacaggctgtactgtataccataggtgtgtagcaggctataccatctaggtttgtgtaagtatagtctataatgtcaaaacaataaaaccgcctggctgggcacagtggctcatgcctgtaatcccagcactttgggaggctgtggcaggcacatcacttgaggccgggtgttcaggtccagcctgggcaatatgatgaaacctcgtctctactaaaaaaaggaaaaaaaaatgaaaaaatttaccaggtgtagtgaggtgttccggtaatcccaggtactcagggggctaaggcaggagactcg

SEQ ID NO: 204157 - DNA, 287 bp, Homo sapiens
agaagctatgagagctgagtatsagaagatggctgcatttcaccatgaagaagaaaaacataatttggagatgctgaaaaagaaggggaaagatatttttcatcaacttcatttaagtaaagccaaaatggctcataggagggagattttaagaggaatgtatgaggagctgaaggaaatgtgccataaaccagatgtggagctacttcaggtacaaactcacaatgtggtttcaggtttttgaatattcacatgtgtaagtatattcctcatggctgaaatccatc

SEQ ID NO: 204158 - DNA, 287 bp, Homo sapiens
agaagctatgagagctgagtatcagaagatggctgcatttcaccatgaagaagaaaaacataatttggagatgctgaaaaagaaggggaaagatatttttcatcaacttcatttaagtaaagccaaaatggctcataggagggagattttaagaggaatgtatgaggagctgaaggaaatgtgccataaaccagatgtggagctacttcaggtacaaactcacaatgtggtttcaggtttttsaatattcacatgtgtaagtatattcctcatggctgaaatccatc

SEQ ID NO: 204159 - DNA, 563 bp, Homo sapiens
tcaccagaggaagcaggagagaagtgggggaagtatttcagcagtgaaaaagttgatgatttgttgttcatacctacatacatatcagttaacagtcctgaaaaataggttgaaaaaactgtggagtattagaactgtataagtctctagggaggcttgtttctaaaaggcagatctagctgcctagaacaagtttcacattctttatcttgaaaaggaagcagcagatgcagcagtctccccagaaccccgctatttcagacaaagatgtcaggggagtctgccaagaagtggaactcagaatttcatttccaaatattctcaaggccataaggctaaggaamcttacacatgtggggcagaaaaaaaagaaggatcagactgaattctgactcagactctcccactatgctttaaaatttggaaactgtaaatagaaattaattccaaaaaggaaggaataatttttgagtaatcaaatttgtggattcaaaggattctcatgaactgtcttttaaatagaaatagtggtttttgtttattttatggctgtagatgttgta

SEQ ID NO: 204160 - DNA, 541 bp, Homo sapiens
gcagcagtcttaaaaataaccccacttttccagacagtgatttcaggaatttctggtgaggtctggaacccagaatttcatttttcaatattctcccagtcttaagactaatgatccttactaatttggagcaatacgaagaaagatccgaatgaattctcagtcagatagacttttccatcgtgcttgaaaatcaggaactgtgaataagaatggatttgaaaaataaaatgataattttggaattagcaaatgtgtgggttaaagggattctcatgaaatgtcttttaaataaaagtggtgatttttatgtattttttttggmtgtagatgtggtaactgtatctttctccttgcaggtatgagtccccgctgctgcaagtgtctgagcctgtgaatccagagctcagtgcagggcccatcactggactgctggacaggctcagtggattcagaggtgagcgtcagcccattggcagaattcccacagtgtattacttcttgttagaatcatgggggtaatattttacccttcatcaaa

SEQ ID NO: 204161 - DNA, 627 bp, Homo sapiens
tcttttttcaatccatcatggattgaaaaatacaaagtcatgcatttggatggctataamagttttttagaaaatttttgtatatttaattttattgtttgcatttatctcggtgtgaaccagtagcaaacagataaggaccacattctaaggagtgctggttagggattcctaagaaggcaagtttttgcctggatgtttctgccttaacatctttattacatttgttcacagaattatctgttacattcctcggaaataagtacacaatttattctcatattgaagatcttccataatctgggttcagccatatcgttttggcagtgtcctcctctgcactcacataggatgacttcctgtacccaaacacaccttctgtttccctgcactttgccattgctcatatgatttcctagttctgtactgtcaataaatccatctttaatatctttcaaaactccttcatgaagttatgtcttatttctgctggatgcaatctgctcctccatggaacattcataaagcagtgcacactttgtctgtgattagacttgttttaatcacatcacaatactccctgtacctttcttatttagagaccagagagagagagagattttggaa

SEQ ID NO: 204162 - DNA, 627 bp, Homo sapiens
tcttttttcaatccatcatggattgaaaaatacaaagtcatgcatttggatggctataaaagktttttagaaaatttttgtatatttaattttattgtttgcatttatctcggtgtgaaccagtagcaaacagataaggaccacattctaaggagtgctggttagggattcctaagaaggcaagtttttgcctggatgtttctgccttaacatctttattacatttgttcacagaattatctgttacattcctcggaaataagtacacaatttattctcatattgaagatcttccataatctgggttcagccatatcgttttggcagtgtcctcctctgcactcacataggatgacttcctgtacccaaacacaccttctgtttccctgcactttgccattgctcatatgatttcctagttctgtactgtcaataaatccatctttaatatctttcaaaactccttcatgaagttatgtcttatttctgctggatgcaatctgctcctccatggaacattcataaagcagtgcacactttgtctgtgattagacttgttttaatcacatcacaatactccctgtacctttcttatttagagaccagagagagagagagattttggaa

SEQ ID NO: 204163 - DNA, 608 bp, Homo sapiens
agatctgagaagtggcagagagctctgcagccggtgtgttcattcccccactcattcagggtctcagtaaacatatactgagtctcttctttgtaagaagcactgtgttagacattggatcatggtggcaaaaaaataaaaatwaaaattaaaaaaaacaggcctgatacttatctatatgtgatttgcagtctagggcagttgttttgtgaatagctgcatcatgataaggtaaagcatttgtcaaaaatgtagaaatctggacccacatttgcttactgaatcgaaatctctctagcagcacttagtgggaaagttgggttcttttattgaggaaaaaaggctaagttagaaagcaccagagttagaatcattactgaaatgcttggacagaaaagccaattcaatgagagtcgacagcagacatgggggtggtacttgaagaggagatttgaatcagccaagcatgtaaagtcatagacagctaatggatggggcagttccaaaatttcccaaaagccctttcagagatatggtctgatctcaaagtggagcaggtcttgtagactgggctgttttattccaattacacagtacctgcatcttaa

SEQ ID NO: 204164 - DNA, 566 bp, Homo sapiens
tggtgtgttgggctatgacggatacctcttgggaccaagccacccagcttccctggcttcagcaggggaaaagtgtggcctggacctagagagatggtgctgcccctccccaaccctggtagcttggtgtgttaggcagctatcagtcccagtgttgactgtcrcccctcccccaaggagctcaaagggcttagacagcaggcagccacagctgtggtactagccgcccctccacccaggagctcagtaggcttaagaagattctaaccgagtggttgtggagaatctgcgcagctccatggttgggaccctaggctctggtgacataggcttagtagtgggatcttccaatccatgggttgcacagttctgtggaaaaagcacgttttcccaaggctagatagcatgctcactcactgcctgccttggctgagggatggggactcccctgccctgtgtggctctcaggtgggccaccgtaccacactgctcttccttcctctccatgggtcacactagctgcctagtcagttctgatgacagaacctggatccctcgtttgccag

SEQ ID NO: 204165 - DNA, 540 bp, Homo sapiens
gcattctccacacccatgattgaaagcaacggggttgttctttaaaggcaagagtgataaaatgttaggtttaaaacggcaatgagtctgccattgttatcaattctttacatacttgcctgcctttttcttttctttctttctttctttctttctttctttctttctttctttctttctttctttctttctttyctttctttcttccttccttccttccttccttccttccttcctttctttcttttttctttttctttttttttcattatcaaagctgagggccctctttttctttgcctctgttctccctgctagcatgatcttgattttcctccctgggtgtaaattctgtgctccattaaccattctccaagtttacgcaataaatggcatagaaatatagatgtgtaagactttatagcatttaaaggatgagaaaccaagtcgctgagaccattattgttgtcctctaagaaagcccttatagctaatacttactaaataattgccatagccaaacactactctaaattatta

SEQ ID NO: 204166 - DNA, 540 bp, Homo sapiens
gcattctccacacccatgattgaaagcaacggggttgttctttaaaggcaagagtgataaaatgttaggtttaaaacggcaatgagtctgccattgttatcaattctttacatacttgcctgcctttttcttttctttctttctttctttctttctttctttctttctttctttctttctttctttctttctttcctttctttcttccttccttccttccttccttccttccttccttyctttcttttttctttttctttttttttcattatcaaagctgagggccctctttttctttgcctctgttctccctgctagcatgatcttgattttcctccctgggtgtaaattctgtgctccattaaccattctccaagtttacgcaataaatggcatagaaatatagatgtgtaagactttatagcatttaaaggatgagaaaccaagtcgctgagaccattattgttgtcctctaagaaagcccttatagctaatacttactaaataattgccatagccaaacactactctaaattatta

SEQ ID NO: 204167 - DNA, 519 bp, Homo sapiens
cagcgttaaattatagatatgcttatggaatccacttgttcttttatatatatatatcacaccacccagaaactgctggcctaatagagcaatagaaccaagctgttgaagacacagctgaggcaccaacttgcagacaataccctgtgaagatggggcatcatcttctaggacaccacacacaccttatatgaacatccactagatgacattgtgtctccaatgggtaaaatatataggtctggaaagcagtaggtagagccaagaaggtctgtgctttccattattttcagtgatctacttgataaatgwgcggtccacacccctcaactttgtgttctttgtggttagaagatatgattttcaaaagggaaatgtgtccatcaagatatccactgaactttagtctaagacttactcaagtgccatgggcttcttctgccaagggatcacctgggtggaatacaattcacaatcctggtaggtgtaattcacccagatctttacaagggggaagag

SEQ ID NO: 204168 - DNA, 447 bp, Homo sapiens
atgaaaccttttgattctggcttctttcatttggcataatacactttagatccacccatggtgttgagtatgtatcggtaattcattcctttttattattgcgtaatattccattgtatgtataataagcctcaagatcccccagctaaattgggaacccagtcccagagcmgctagaaaccctgccctaacatgaaatgaagggcagctgggcatgagtgtttaagtgtgctcttcatggcatcctttttttgtctgtccaattcatgactgtctggccaccgctctggtgctgagagcctgcacttgtgtcctccaggcatcgtggagaaaatccagcctcagccatcctttggttcttcagatggaaagatcacatcaatacatcgtcacaatagaaaataaggctaatttgtgagaacaatcttctgtcttcaggtcacaaaa

SEQ ID NO: 204169 - DNA, 546 bp, Homo sapiens
tgtgctgttatttttgaggggttgaaatgcttgttctcaccaccgaaggtgttcatctttacaaaaaatggttgctagggagctagccaatttgagggaatatttttgaatgtttataaaactaaagagcrgcatcattggcaatacatttattggcagaactgaaccaattagtcagtgctgctaaagtgactgcatacagctgatttcacagagagggcaaatatataatgatgcatgctactggagtacttttttttaaaactacagatttaagtctcagataaaggcaataacactccttctacttcaggaaattttgagtgttcaaatatgtggttataaaaacacataagagagcatttttaggccattctgacacattccacactcattcttaaataaaataaatcacatgatcagctctccttgaggctggagattggtttttgtaataaggaaaggcctagcaatgtctcctcatttcattcattccaactatgcaattcaactacaattctcgttttaatttcctttcatgtattt

SEQ ID NO: 204170 - DNA, 546 bp, Homo sapiens
tgtgctgttatttttgaggggttgaaatgcttgttctcaccaccgaaggtgttcatctttacaaaaaatggttgctagggagctagccaatttgagggaatatttttgaatgtttataaaactaaagagcagcatcattggcaatacatttattggcagaactgaaccaattagtcagtgctgctaaagtgactgcatacagctgatttcacagagagggcaaatatataatgatgcatgctactggagtacttttttttaaaactacagatttaagtctcagataaaggcaataacactccttctacttcaggaaattttgagtgttcaaatatgtggttataaaaacacataagagagcatttttaggccattctgacacattccacactcattcttaaataaaataaatcacatgatcagctctccttgaggctggagattggtttttgtaataaggaaaggcctagcaatgtctcctcatttcwttcattccaactatgcaattcaactacaattctcgttttaatttcctttcatgtattt

SEQ ID NO: 204171 - DNA, 287 bp, Homo sapiens
caaaagatttgatgtttcttgctgatgcaaaacatcgctagaaaaggtcatcttttttgtactgtggtaccaacaaaggaaaagggcactagcgaagctgtaataaattcattaaaaagttttattttccatgcggacttaaaatctgacctatcattacaaamtaaataaaaatttacctatcattagactgaattctctaataaataagtacttagacacttttgtagatcctttactaagagcagtgtttattaaggtgactaatatatatgctgaaggggtcc

SEQ ID NO: 204172 - DNA, 512 bp, Homo sapiens
ctgcttgctcaaataaactctataaaacgttattgtttcccagtttactttttaacacagactatcccgtccctcatcactaccaccttcattcttttgttgtgttatttctgcaacggtgatcttgattctgcttggcctccacatgaggccatctgcrtggcttttgttactccacctattgaatctccctttgagcaggagaaagaaaagatttacagagttctgaccaaagcaatttttttctctcagcactaaattacataacaataaaaggaacatgaaactatttaccaactttacttataaccaataaaagtaccatttacagggtgttgcattaagttaattgctttgctttctctaaataaggacttaaatttcagttcacagaaaaaactaataccaaaagaaacagtttgtgaaataccagcagagcctgactgaaaatgttttttttagaaaccaaacctactcttcctgcagactggagtgcagtagtgtgaccacag

SEQ ID NO: 204173 - DNA, 512 bp, Homo sapiens
ctgcttgctcaaataaactctataaaacgttattgtttcccagtttactttttaacacagactatcccgtccctcatcactaccaccttcattcttttgttgtgttatttctgcaacggtgatcttgattctgcttggcctccacatgaggccatctgcatggcttttgttactccacctattgaatctccctttgagcaggagaaagaaaagatttacagagttctgaccaaagcaatttttttctctcagcactaaattacataacaataaaaggaacatgaaactatttaccaactttacttatawccaataaaagtaccatttacagggtgttgcattaagttaattgctttgctttctctaaataaggacttaaatttcagttcacagaaaaaactaataccaaaagaaacagtttgtgaaataccagcagagcctgactgaaaatgttttttttagaaaccaaacctactcttcctgcagactggagtgcagtagtgtgaccacag

SEQ ID NO: 204174 - DNA, 637 bp, Homo sapiens
caatcatctgagaaaagcagactactgaatggtatctatattatgggtaaactatatgaaaatgtttgatggtgagattgtgggtaactacttttaaaaatatttaagactatgaatacatcattgtttcaagtgaaaagggcaataaaaattacagataaggcaacttttctaagcctaaatgcccaatttacttcttttsggatccagattttaagtaaaggaataaagaataaaatggaatgcacagctgtttgcttctaggaatacaaacaggaggaaataaacagagggaggctaatgtctttgagactgggctaactacttcattcccagctgtgttttaatctgtcttaccaaacaataacaaactctttttttatgacagaggctgagaaattccatttgtgcccagcaaaagttaaaagcacattaggaaatatttgaaatgtcagattcagtaatttgtccggtcttatgttccaagttgcataacatcagttgaatttttcaggagttaaacaattttaattttaattcagagatgatgatagagatgtctgatcacttacaagttaaaatatacatatacaaaatatgtatacttaaagtatacatatacaaagaatgaacaagt

SEQ ID NO: 204175 - DNA, 607 bp, Homo sapiens
ctcctaaatatattactttatggcaacaataaacagaaaataaaatttttaaatgatactatttattataaaccaaaaatgttaaattattaaatattaaatctaacaaaagacatataagacctctatacagaaaactatgaaacattgaaagaccttaaagactaaaacaaaaggagagacacaccatgttcatgagtttgaagactcaataatgtaatgtcaattttcttcaaactgctgtatagagtcagtacaatcccagctaaaatcttaacccatttttaaatttgttttatatrtgtgtgtttacatatattatgtgtgtgtttatatttatgtgtttgtgtatttgtcttgttgttgttttcatggaattggaaaagctggtcctaaaatgaaaatgcatcaaaatgcaattggaccagtccggtaccaaaatggaaatatatggaaatgcaatagactcagaatagtgaggatactctcgaagaagaacatgatgcgaggacttactctacaggacattgatacaccctacatgtaaaaataattaacacaatatggtattgattaaaggacagacaataaaacaatgaaatgaaaa

SEQ ID NO: 204176 - DNA, 651 bp, Homo sapiens
aagtgacatcatttgagacatttaaattatagtggataaagtactcaaacccaccacaaagaaacactctttgtagaactcatgggaaaattactgggatttataataggccttttctaygaggaggtaagcctgcctacgaggcagacctgctattgaataaatgttattttaaatggagtgtggctgtattgtaactcagttcctccttctatggagaagagcatgaatgggtaggttagccaaaaaattaataggttttttctttttaaagcagtagatttcttcacaaagcctacctaattatgtgagtttttcctcaagaatgacatgcttcaatgctcattttctttcaactatttttttaaatgttatctaccccaggacttccaaccccctttctctaacaaatcagcatgtagcagagaagttctgaactaacacagctttgaatgtcaaatgtttaaatttgaatgttctgccttttcgataaaatgaatttaacagtgaccctccaaggattttccacttccagtcttacccagaacagccctcattaagcatgtagcactccacaaagagtaaatcatttatttggaatcagcccttatgagctagaaaaactacctttcagaaagccttcatttcaaa

SEQ ID NO: 204177 - DNA, 660 bp, Homo sapiens
tggttgggcacggtggctcatgcctgtaaccctagcactttgggaggccaaggcaggtggatcacctgatgtcaggagtttgagaccagcctggccaacgtggtgaaatcccgtctgtactaaaaatacaaagattagccgggcatggtggcatgtgcctgtagcctcaggaggctgaggcaggagaatgacttgaacctgggaggcggaggttgcagtgagctgagatcacgccactgtactccagcctgggcaacagagygagactctgtcttaaaaaaaattacaaatgcttaattcatatttacactacgatatgactctatgtaattaagatcaaaagccaagttatttctatgctcagtggcttttacagttttaaatagaactcatagactcaatttgtctggaagtgtgacagtatcacaaccaactgcctttgccacgagtaccagagcatttgaagatttccttttatgtttataaactgaaggaaagtaatttccttacaccatttattcttgatctctctcattcattgcaactgacatgccaatcattcctgttgaggacattaataaatgacaataaaagaggtacaaataattgcaagataggcaatcctcaagaggttttttctttctttttttttgttttttg

SEQ ID NO: 204178 - DNA, 660 bp, Homo sapiens
tggttgggcacggtggctcatgcctgtaaccctagcactttgggaggccaaggcaggtggatcacctgatgtcaggagtttgagaccagcctggccaacgtggtgaaatcccgtctgtactaaaaatacaaagattagccgggcatggtggcatgtgcctgtagcctcaggaggctgaggcaggagaatgacttgaacctgggaggcggaggttgcagtgagctgagatcacgccactgtactccagcctgggcaacagagtgagactctgtcttaaaaaaaattacaaatgcttaattcatatttacactacgatatgactctatgtaattaagatcaaaagccaagttatttctatgctcagtggcttttacagttttaaatagaactcatagactcaatttgtctggaartgtgacagtatcacaaccaactgcctttgccacgagtaccagagcatttgaagatttccttttatgtttataaactgaaggaaagtaatttccttacaccatttattcttgatctctctcattcattgcaactgacatgccaatcattcctgttgaggacattaataaatgacaataaaagaggtacaaataattgcaagataggcaatcctcaagaggttttttctttctttttttttgttttttg

SEQ ID NO: 204179 - DNA, 375 bp, Homo sapiens
agagggatttggcaaaattcaccagcagtccttaggattacattggtactgaagtaaagcgagggaaaaaaaaagtaaaattggagatgagataaaactatactaagtccaaaaggatcatgagctctgatagctagggagagaggagaagaaagatacaatgatgctaaaaagggactttttaktgttgtttgttttgtttttgctttttgacaggcaggcagggaaaactgagggagagtaatctaacatagatacaattcctaaggcataagctcattctaactgtattgtaacaaagtcaagtagcttgttaaaacaaatactataggaattgcgtgggtttcaaagaattcccaggagaccactagtgaa

SEQ ID NO: 204180 - DNA, 540 bp, Homo sapiens
gtggggggtggggagcggacagtgtggccatttttgcttagaggagttgtggagggcccaagaaaagttgtgaactttgagcagaattgcaaagaaagagcacacattttgcaacagggagcaaagaacgtgcttttattcctggtagagataatagactgtrcagacaagtcataaatggacaggaggctcattttggttagagctcaggttttgtaaaaaatatgttagtcatggggggtgcgattaaaacagcaagtttgggccaactgtgaaggattgtgtttgttgcattaggtttggaattcatccttaaggccatgggaaggaggtgagggtttagaaagtgagtatgtgatacaatcagatttgtttctttgggaaatcggaactctggaaactgtggcaaaaaagcaagtgtctatggggttggctcccaaatcaaaatctacagttgacaattttcatccaatctacattgctagcatgcagcagcataacagctaattaaattagcacctataatcacctagaaagaca

SEQ ID NO: 204181 - DNA, 436 bp, Homo sapiens
atgcctcctgggctcaagggatcctcccacctcagcctcccaagtagctggcaccactggcatgcacaccgtgcctggctaatttaygtattttctatagagaagaggttctgctctgttgtccaggctgatctcaaactcctgggctcaagtgatctgcctgcctcaacctcccaaagtgctggtattacaagcatgagccaccatgcccggccagtaaaacatttttgaatagcccacatatatatctggttatttataagcttaatttatgggctatagtcattttgtatataaacattagttaatttaattcttttccttagataaaaataaacataaatcaacattaaattttgttctttgtgcctcaattatcttgcatattttgggggcatgtggccttctaatcttttcatttaagaagtcattaatt

SEQ ID NO: 204182 - DNA, 531 bp, Homo sapiens
tatgtatctaaaaaaataactttggaatgactttaagactaatgacaaactattaagctaggtaattattgtactctagttgataaagttatttcttaacaggtgtgtgacttcacaattatgaaaactctgtacatgtctactaaaattaaacaaataaataaatggatggtggatgatgggagctaagttttttactgttgaaatggggttaacacatgttaaataaaatasgcagaaagccattggccggacggtcctcatgtacattgagttccaaataacaaactacaacctaacttaggagtatacgttttgtaacagatacccaggtctcagccaatcacaagaagtcaagcttcggccaatcacaggcagccaactgaccagagcacatccaaataaggcaactgcaaccaatcaagctatctctgtgctttacttctgtgttcagcctataaaagctcattgccaaaactgcagagcagtgctctctgaattctcttctgaaaactccctgttcccccaaaa

SEQ ID NO: 204183 - DNA, 370 bp, Homo sapiens
ataacattaatagaagtatagtctggtcataaaaattaattaaaagcaatcaagttgatattgttaagcaagttggagggaaactaacttttacactgcagtaacatctaaaaatccccttctcagttcctttctctaccaatatctctccattcctctgactgctgagaaaccattctccgtatcctcccctctgtaaccccaaacaaaccccattccaatcccaaactccaatcccaacccaaacyttctccaaacccaataaatagcaacatagatttattgaacatctacaatccatgaacactcattttgattgatgaggatacatttgtggataaaacagagaagcagttctagttctcatgat

SEQ ID NO: 204184 - DNA, 459 bp, Homo sapiens
acttctttacctgtaaggaaagcaaacttcagaaagttgacactggttgtagagagaaatctaggtcragaagccacatcttctgactcatagtcttatactttgattagtactctgtatggcttcacctaatactgagacatctgcaagaagcctctggattctgatgtcttcccttttcaatttcctcttaccaatttatttaaaaaaaataactgtaccaggtgttttgctaggagctgggtaccagtctgcccctgcaggaccagttacataatttgagggacccactgcaaaataaagatgcaggaccccattttcaaataatattaagaatttcaagatggtgagagcagagcattaaacgatgtgtagggctcttctgagcccagtgccctgtgtgcctacataggttgcaagcccaggaagctgaccttagcacctgattgttcacatagc

SEQ ID NO: 204185 - DNA, 459 bp, Homo sapiens
acttctttacctgtaaggaaagcaaacttcagaaagttgacactggttgtagagagaaatctaggtcgagaagccacatcttctgactcatagtcttatactttgattagtactctgtatggcttcacctaatactgagacatctgcaagaagcctctggattctgatgtcttcccttttcaatttcctcttaccaatttatttaaaaaaaataactgtaccaggtgytttgctaggagctgggtaccagtctgcccctgcaggaccagttacataatttgagggacccactgcaaaataaagatgcaggaccccattttcaaataatattaagaatttcaagatggtgagagcagagcattaaacgatgtgtagggctcttctgagcccagtgccctgtgtgcctacataggttgcaagcccaggaagctgaccttagcacctgattgttcacatagc

SEQ ID NO: 204186 - DNA, 459 bp, Homo sapiens
acttctttacctgtaaggaaagcaaacttcagaaagttgacactggttgtagagagaaatctaggtcgagaagccacatcttctgactcatagtcttatactttgattagtactctgtatggcttcacctaatactgagacatctgcaagaagcctctggattctgatgtcttcccttttcaatttcctcttaccaatttatttaaaaaaaataactgtaccaggtgttttgctaggagctgggtaccagtctgcccctgcaggaccagttacataatttgagggacccactgcaaaataaagatgcaggaccccattttcaaataatattaagaatttcaagatggtgagagcagagcattaaacgatgtgtagggctcttctgagcccagtgccctgtgtgcctacataggttgcaagcccaggaagctgaccttagmacctgattgttcacatagc

SEQ ID NO: 204187 - DNA, 581 bp, Homo sapiens
attttctgcattcacctgatgttccttaaagatgwaataactatacataactgtgaaatgtaaaattaatgttatgctcacagtttttgctaatatattaatggtgtagaaacaaatttgcatatcaaaatatgcatacaaaacaaaactgactacatcttgttcgaaatcatcattggcatcatcatcatcatcgttatcatcaccatgattacttaacattttcatgagttgattttatcataacttcttgggcataaattttatctgtaagaatgttttattgaaacactttaataacaattctgggaaataattatctttcagaataatgtgaaaatctattatcgcaattagagaataaatccataagatgatatttggctcctatgaagcttttgtttttggcttgcagactctcctttggagacaaataacaagataacaattatcttgttatttctctcagttccaggtaaacaaaaggtgcctaatacaagcatattaacctgacttgacttaactcagaggaaatgaaaagttccagccaagtaaggttaactcagacaaaactcagttac

SEQ ID NO: 204188 - DNA, 581 bp, Homo sapiens
attttctgcattcacctgatgttccttaaagatgaaataactatacataactgtgaaatgtaaaattaatgttatgctcacagtttttgctaatatattaatggtgtagaaacaaatttgcatatcaaaatatgcatacaaaacaaaactgactacatcttgttcgaaatcatcattggcatcatcatcatcatcgttatcatcaccatgattacttwacattttcatgagttgattttatcataacttcttgggcataaattttatctgtaagaatgttttattgaaacactttaataacaattctgggaaataattatctttcagaataatgtgaaaatctattatcgcaattagagaataaatccataagatgatatttggctcctatgaagcttttgtttttggcttgcagactctcctttggagacaaataacaagataacaattatcttgttatttctctcagttccaggtaaacaaaaggtgcctaatacaagcatattaacctgacttgacttaactcagaggaaatgaaaagttccagccaagtaaggttaactcagacaaaactcagttac

SEQ ID NO: 204189 - DNA, 612 bp, Homo sapiens
agaattccaccccaattagccataccaagatgccacatgactacatgctataaagtaattaagtctatcgtatttacacagccacttaatgcataggaaaagaaggggacaaatgacctccaaccaaagtwtttttttttttttttgccatgaccatgtacacatttcaagtgctttgtcctcttaggcatgaactgatgacaactaaacattaaaataagtacagattacttaattcatcttcacccccatcaacaaatggataatggaaacgcattgaaatttctgcaaatatgaaaattgcatgcctattgaggccaaatgtgagaggttaatatcccaaagcaaattaagacaccctaaggaacttaatgtttctaattattatattatccatccttgacacaaattattcaaatatgctcttttaacttgtttttgatagtttttacctatggtttttatgcatatctgaaaacttaatgactccatgtcaagccaggccaacctgaaaagtttctagcaaattattaattttaatgcaggttttctggcagaccagcgcaggaatgcacaccactatttacgaatgtgagggctttgttgccctac

SEQ ID NO: 204190 - DNA, 533 bp, Homo sapiens
cagcgcaggaatgcacaccactatttacgaatgtgagggctttgttgccctacttcccaaacaagtccatacctgaaatccaagagaattcccaaataaatgccaccattatgatacagataaccagggatcatgtgttttacaagagtttgcaattgtaatcattttatcctgatgacccagtagaatcttttaaactaagaattttcatttccatttcaagcgcaagacagagaaaggaataaaattatatttcttcatggggaccagcttaggctagaagtttacccactgggtatttgaattgtaaatttttccaggctatgacagatgcctgaggattttactgtagaattggatccatgagaccaaggaaatatcagagtataaaattgcagggatcccaggtagatgcttcttgttgtggacccgtttgcaaatgtgaataagtattcactggttcttagattttacatttccataccactaccctctttctctttaagwattacacctacagttcaaaacctaga

SEQ ID NO: 204191 - DNA, 664 bp, Homo sapiens
tgttttgatgagtttttaatctttatcctcttaggagatgaaagaagtataaggcttttggaagaacaggagcatatattatgagatatcatatttgattagctttttatttgcagggcaatagcaataaaaaattatgcttgcctagctatagacagcaagcattaggaaactatttttttccatatttctccccccccttttttttagtatactctcttttccagattttgatattagagtrtgccagctttataaaataaatttatatttcttcacttctaccttaatgaggagactacagaaaagaggaacaatccagattctaggaaatacaccaactttgaactctcttatatacatttattccctgctattcaaatctattcagtttctaaattgggagagtgaggattccaatagtaattcggaaagcagggagcattctgattcagctattcagggcccaaattttagataccaagttgtcagagttttgaaattgatgtgtaacttttctccaaacagtcctatctcaccaattttatctgaatctcttctgttgctaagtttggggagtgagagttttaacagaaaatattacttgtatttttgagcctataaagttagacaattccactattgggcttcccaagaacaccag

SEQ ID NO: 204192 - DNA, 533 bp, Homo sapiens
ctcaaatcccaagcctgttctaactacttgtcctatcacatctcattctttttattgccattttatcgcctttgtgatttttttaagagctaaaaagtcctgtgtaatagctgtcccatgagatcgtgttgaatgtgagagccgtatttctggaataacttcctactagtcatgtttctgaaagggccctccacctagacctgccatggagaaagccattaggtggatactattcaggaaaggggaggcatcagcattcagagggggcacaaamtgtctcctctgtcaatctaattccattttaacatgtccttaagctcatttttataagacttaaatgagcaggtctggctcagattcaactgtggctgtacctgttctgagaaagcgctggagagggtggtacaattgtgaaatggattagcagccttaattacctgcgaaagttaattaaggtaaagacaggcaatagaacaaatgatccatgcagacaatgagaatagtcctagatacataagacaaatctgcctttc

SEQ ID NO: 204193 - DNA, 443 bp, Homo sapiens
ggacataccaagctcattccgactccatggacttttgcttgctgtttggaatatgcttgggatgctcttacctgagacctttgcatggctgattctttcacatacccaggccttctttcaattctcacttttgcagagaatctttctttggcctccctccatggagaagctacaactactgcttccaactacttcttttttgcactcatccttttctctgtcgcatcctgaattattttccttcctacccttatgcctttcttgtttgtattttattgcttgttcctgtattcagtttgatgctccatgagggttggggtttggtctgttctcagtttctagaatacgtaggcactaactacatattgattgaaygaatgggtacattttacctcaataggctgacacttcctcatttgcaagataatggtgttggaacaaat

SEQ ID NO: 204194 - DNA, 457 bp, Homo sapiens
cctttgtaatataaacacattaagtaaaatgaaatgttaatatggagtcttctttactatttaactttccacaccattattttggtaacttgagttaacattcttttctgaagttcttgctatccaattattctgacctatttttgtcagcccttataaatttctatgtcagcactgttcactgtgtctagatctggccatctaactcaccattgtcctctttgttatccatatgtgatcatactgggcaccactcatgttcaacatggatattctaacctcatttcattcatctacaaagatcgtttctgcaccccctagagtagtcctctacrtggcttccttttgtcaaccagaaacatattaattcagaagataatattaatgtaattaagagttaaaattctggattcaaacaggcctagtgtttaatctttgctctgacattttcttatta

SEQ ID NO: 204195 - DNA, 518 bp, Homo sapiens
ggcacaagcttaaaaacctaagggaaatgaatacatttctagaaacatacaatttccaaagtttgagccaggaagaaatagaaatattgaactaccaataccaagtaattagattgaatamgtaataaaaaaaattcccaacaaaagcagcccaggaccaggtgtatttacagctgaattctaccagatgtacaaagaactgctaccaattcttctgaaacggctccaaaaaaatcaaggaagagggaatcctccccaactcagtctacaaagccatattaccctgatgtctaagccaggcaatattacatacaaaaaagaatattacagactaatatttctgatgaacatagatgcaaaagtcctcaacgaaatactagcaaacttaatctaacagcacatcaaagagataatacacaatgatccagttggttttatttaagggatgcaaggatggttcaacagacacaaaacaataaatgcaattcatcactaaaacagaattaaaaacaaaagca

SEQ ID NO: 204196 - DNA, 664 bp, Homo sapiens
gctcataggtggaagggacttgccttgaatctcggatgagactttggtctttggactttatgtcataaaaagttaagaatttgggggactgttgggaagagattgttgtattttgcaatgttagaaggacgtgagatttggggagccaggagtacaataatatggtttggatatttgtaccctccaaatctcatgttgaaatgtgacctccccrgtgttgcaggtagagcctagtgagaagtgtttggtcatgagggtggatccctcatgaatggcttggtgccctccccacagtaatgagttcttactctgttagttcacacaggagctggttgtttaaaagagtctggtgtctctctcctgctcactctcttgccgtgtgatatgcctgctttccctttgtcttctgccatggctgtaagattgttgagccctcactagaagcacatgctggcagtatagcctgaagaatcatgaaatagaactttataaattacccagtctcaggtattcctttatagaaacacaaacagactaacacaaaagagagctaaaagtgagtgtgtatagtgagccttttaaggagtgcttcttttacttgcaaacagcctaatatttagttgtctaacctgtgaccaggacctccctcacataggcaaggagt

SEQ ID NO: 204197 - DNA, 664 bp, Homo sapiens
gctcataggtggaagggacttgccttgaatctcggatgagactttggtctttggactttatgtcataaaaagttaagaatttgggggactgttgggaagagattgttgtattttgcaatgttagaaggacgtgagatttggggagccaggagtacaataatatggtttggatatttgtaccctccaaatctcatgttgaaatgtgacctccccagtgttgcaggtagagcctagtgagaagtgtttggtcatgagggtggatccctcatgaatggcttggtgccctccccacagtaatgagttcttactctgttagttcacacaggagctggttgtttaaaagagtctggtgtctctctcctgctcactctcttgccrtgtgatatgcctgctttccctttgtcttctgccatggctgtaagattgttgagccctcactagaagcacatgctggcagtatagcctgaagaatcatgaaatagaactttataaattacccagtctcaggtattcctttatagaaacacaaacagactaacacaaaagagagctaaaagtgagtgtgtatagtgagccttttaaggagtgcttcttttacttgcaaacagcctaatatttagttgtctaacctgtgaccaggacctccctcacataggcaaggagt

SEQ ID NO: 204198 - DNA, 413 bp, Homo sapiens
tctactctggccctctccctctttatctttcacaggcattttccctaatagatctccaatatcttgcacatctaaaattgccttggcrttgcttcttgcagggcctgaactgacaactacaaaatggactttctaattcacaaaaataaatgataacacacaaaataaaggaaaaatgtatatgtgtcagagctcaagtaaagattaaaataaaataaaataaaatgaccttgcagattgcatattcatggaattatttttccaaaaatgtaatggggcattcttagaaaatacaatggtgctagtcaggcagaactgctatcaaatgctttctaacactttcacttacaaactgtataatttgggtcaagttactcgacaccgcttagccttagcttcctcaatttaaaaat

SEQ ID NO: 204199 - DNA, 603 bp, Homo sapiens
tttttccaaaaatgtaatggggcattcttagaaaatacaatggtgctagtcaggcagaactgctatcaaatgctttctaacactttcacttacaaactgyataatttgggtcaagttactcgacaccgcttagccttagcttcctcaatttaaaaataggcacactaatagttaatagaataaatatttgctgtaaacactagtggggccataacagtaatttaaggtcagcattaatgttcaaccaattgttattttttcataacccctttacaggactgctgagaaaatttaatgaaacaaaagttcaaagtttgaagcattgtacctgataagaatgtagtaaaagctcagtttacgttaaaaacgaaagataacagtttaaagatggccacaacttatttgacattcctcctattgagaaagagaatctcttttctattctcatgaatctggactggttttttacctgctttggttaataatgcaataatagtttgccagttcttagcctaacttcaatagcacaggcagcttataccttatacctcatctattagagactaccatgtaataagcatgaataccctgagaccacgattt

SEQ ID NO: 204200 - DNA, 609 bp, Homo sapiens
tataagtggcaaaatgtgagcacttttttttccagtacattttgtggtatacagcgtagttgatagtctccattarcaaatgtagttgcttagtattttacctcatctattttggagttttgcatttgagcctagcctcacaattcctacttcatagcctatgcaacctgtattcagagtaattccaaatcattcctgagatataaaggtggtagcaaaagtgctccgtacactatgtatcaaatagaccattgcccacgttcaaggaaaaaaatcataggctctgctgattgcccttataaataagtcgacttggagaccttggatccctagtacatagtgctggcttgtaaaactttaagacaacaatggtatcctttataaagacatgtttttttttcttcctttgaatttagtttcagtagctctaccaatgacctctgtcaataaggaatatattacttttcagattttggcatcattcagaaatacagttctgccaaatatgttttaagaaatctgtcatgcctgcctctatcagatagagtccaccaggacatagatatatacttaaaatggttcttagagaaggtttaatgaaatgatggt

SEQ ID NO: 204201 - DNA, 609 bp, Homo sapiens
tataagtggcaaaatgtgagcacttttttttccagtacattttgtggtatacagcgtagttgatagtctccattagcaaatgtagttgcttagtattttacctcatctattttggagttttgcatttgagcctagcctcacaattcctacttcatagcctatgcaacctgtattcagagtaattccaaatcattcctgagatataaaggtggtagcaaaagtgctccgtacactatgtatcaaatagaccattgcccacgttcaaggaaaaaaatcataggctctgctgattgcccttataaataagtcgacttggagaccttggatccctagtacatagtgctggcttgtaaaactttaagacaacaatggtatcctttawaaagacatgtttttttttcttcctttgaatttagtttcagtagctctaccaatgacctctgtcaataaggaatatattacttttcagattttggcatcattcagaaatacagttctgccaaatatgttttaagaaatctgtcatgcctgcctctatcagatagagtccaccaggacatagatatatacttaaaatggttcttagagaaggtttaatgaaatgatggt

SEQ ID NO: 204202 - DNA, 609 bp, Homo sapiens
tataagtggcaaaatgtgagcacttttttttccagtacattttgtggtatacagcgtagttgatagtctccattagcaaatgtagttgcttagtattttacctcatctattttggagttttgcatttgagcctagcctcacaattcctacttcatagcctatgcaacctgtattcagagtaattccaaatcattcctgagatataaaggtggtagcaaaagtgctccgtacactatgtatcaaatagaccattgcccacgttcaaggaaaaaaatcataggctctgctgattgcccttataaataagtcgacttggagaccttggatccctagtacatagtgctggcttgtaaaactttaagacaacaatggtatcctttataaagacatgtttttttttcttcctttgaatttagtttcagtagctctaccaatgacctctgtcaataaggaatatattacttttcagattttggcatcattcagaaatacagttctgccaaatatgttttaagaaatctgtcatgyctgcctctatcagatagagtccaccaggacatagatatatacttaaaatggttcttagagaaggtttaatgaaatgatggt

SEQ ID NO: 204203 - DNA, 480 bp, Homo sapiens
agtttaaaaacttctggattctatgagggttctcaccacaccagatgggatagcaaataaaaatttaaaacagttcagatcatagatctttttggtgaacaaataatgaataagagagaagacaggattttgctgcatagttaatctttatccaccccccatcccaaacttgaatagttacaagaataactatatagctttgctaaatcccaatctaaacttaatatatactttattacatggaaatcagaaatataacttagaaccttctataggttcacatttcaacgctgaaaattactcagttgcactagatctgcgtttggtttgattgctcactaattgtcgagtgtatgttgtgtttgctttttgcctttatatgctstaagcattcctcttaatatccttggttcttacggtcatgtaatgtcaaaatcattgtttccatgcttagatccctaatgctaaatttgaagagat

SEQ ID NO: 204204 - DNA, 628 bp, Homo sapiens
ttcatggcatttgcacggctctcagtttggatttgcccaccatcctaaacagaattaacaggagccactgagattatgtgtttaaatctctagtaccatgaaataatataattcatgggagacactctgcctgatcctcagttttggtattccactgacccagagcccagtaattcatgaggaattacagcctatttgtcaaatagattattgaaatgaaagttaatcaatattcatattcatttaaaaaagaaaagcaataaatcaaacagttccatgccagtcatgtacatttataatatcacttaatctcacaactgctctggacagattatatttttatgtcatcaatcataaactcaaggctcaaaatggttagtcaccttgcccatgattttatacctaaatacaactgaaaaatggggagtgaagccatgtgtgtcaaactgtaaagttcatgatttttccttgcctcactttctgtcctttgccactgagttgtgtggcatttctttacttcaaaaacaaaactatgtttgctgtctataattacaaggcattgaactacttcctgatatttctggctttcaamccagctttgaaaaatattagacaaggcagccgtttg

SEQ ID NO: 204205 - DNA, 589 bp, Homo sapiens
atgtattttagcagaaaattgacagagattgctcaaagatctgctactcaggtggcattaatatgagaaattctccactgtaatatgtttagaaaccagaatatgaatataaataacattgtaaaataaatacmcaatagtttcttgacaaactttacatttcccatgattatgaagttaatttttcattcgaatgagtcttagggttttctaggtatacaatcatatcatcagcaaagagcaacagctggactttctcttcgtcgatatgggtgccctttatttctttctcttatctgattgctctggctagaacttccagtattatgttaaatagaagtggtaaaagtaggcattcctgtcttgttccacttcccagagagaatgctttcagcttttccctgttcaatataatgttggctgtgggtttgttgtaaatggttttttttttttgagacagagtttcactcttgtcatccaggttggagtgcagtggcgtaatcttggctcactgcaacctccacctcctggattcaagctattctcctgcctcagcagcccgagtagctgggattacaggcccacatta

SEQ ID NO: 204206 - DNA, 589 bp, Homo sapiens
atgtattttagcagaaaattgacagagattgctcaaagatctgctactcaggtggcattaatatgagaaattctccactgtaatatgtttagaaaccagaatatgaatataaataacattgtaaaataaatacccaatagtttcttgacaaactttacatttcccatgattatgaagttaatttttcattcgaatgagtcttagggttttctaggtatacaatcatatcatcagcaaagagcaacagctggactttctcttcgtcgatatgggtgccctttatttctttctcttatctgattgctctggctagaacttccagtattatgttaaatagaagtggtaaaagtaggcattcctgtcttgttccacttcccagagagaatgctttcagcttttccctgttcartataatgttggctgtgggtttgttgtaaatggttttttttttttgagacagagtttcactcttgtcatccaggttggagtgcagtggcgtaatcttggctcactgcaacctccacctcctggattcaagctattctcctgcctcagcagcccgagtagctgggattacaggcccacatta

SEQ ID NO: 204207 - DNA, 554 bp, Homo sapiens
ccagctacccgggaggctgaggtgggaggattccttaagcctaggaattccagactgcagtgaactatgattacaccaccgcactccaatttggatgacagagaaagaccccacttctaaaacaacaacggcaacagaaaacaacctcatagaaatgtattactarttatagattttggtatatttatatctaaatatatgtttagatataaaaatgtttagatataaaaatattttttatatatgtacacatgcacaaccatctggcaatatctataacccattcacatttctccagaaaactatactctaatgcccagatcaaaggggtcagataatacaagggcttaaagaacagtttaagaatgttgaacttcatcttaatgacagtgaaaagccactaaaaggttaaaaagtagttgtgtaagatgactgaatatgagtttggggaatattattgtggctatatggagattgtatggaaggagcacatatatagttataaaagctgtaggaagcccagttaagaggccatcacaagatgccaggaaaga

SEQ ID NO: 204208 - DNA, 429 bp, Homo sapiens
tacactaatatgtgatagatagaccacagagtctatagaagaaaccattggagattattttataagtagttcttaaactagattcaaaaagcactaaacatatgtgaaaaaattcatcagacttcatcaatactcaaaattgtggcttagcaaaagacattgctaagtaaatgaaaaggcaggttaagtcaggctgagactgactaagaactcagatctatactatataaaggactttaacaaattaatcagcaagcacataaacaagctggtcaaatgcttgagctgacacttcatccaaatgtcacaagwgaaacgtcaattaaaaccatgagacaccattacaacccatgaattgcaaacttttttaaagttctattttgtttttaattgacatagaagtatacatttttgggggacggtgtgatg

SEQ ID NO: 204209 - DNA, 298 bp, Homo sapiens
tatctttaccttccccaataaaaggtatcagggatccttagagaactgactaattcaagggctgggacatggaatatacaagatgagcctggagcatctttgcaatgccagaaagtaaggaagtgatttttaaaaatgatgaggacatatcaaagagacacaggaraaaagcaaatgatttcccagtggtcaaatctggagtggtttgtagaagaaaatgagtattggattataatccaaagtataaaataaatatccatgactccatcctgatatcaatggatgactgaatatattt

SEQ ID NO: 204210 - DNA, 624 bp, Homo sapiens
tactgtgagtaaaatagtatcaaatatcattatctgctacagataaatctttcatgaaargaagagtcaatcaatgtggcaaattttattgcattcttattttaagaaattgccacagctaccccaacgttcagtaaccaccactttcatcagtcagcagccatcaaccttgcggcaagatactctacaagaaaaaacttatgactgagggctcagatgactgttaacattttagcaataaagtactttctaagtaaagtatatactttttagacgtaatgctattgcacttaactacagtatagtgtaaacataacttttgtatgcacagggaaaccagaaaaaatttatgtggcttgccttattgcaatattactttattatggctgtttgtaaccaaactacaatatatctaaggtatgtttgtgtaaataatgaaatattattcatccgtaaaaaggagaaaatatcgtcatttgcaacaacgtggatgaacctggaggatgttgtgcaaaatgagataagccaggcacagaaagacaaataccacatgatctcacttatatgtggaatctttaaaagttgtactcatagaagcagagagtagaatggggattgccaggg

SEQ ID NO: 204211 - DNA, 624 bp, Homo sapiens
tactgtgagtaaaatagtatcaaatatcattatctgctacagataaatctttcatgaaaggaagagtcaatcaatgtggcaaattttattgcattcttattttaagaaattgccacagctaccccaacgttcagtaaccaccactttcatcagtcagcagccatcaaccttgcggcaagataytctacaagaaaaaacttatgactgagggctcagatgactgttaacattttagcaataaagtactttctaagtaaagtatatactttttagacgtaatgctattgcacttaactacagtatagtgtaaacataacttttgtatgcacagggaaaccagaaaaaatttatgtggcttgccttattgcaatattactttattatggctgtttgtaaccaaactacaatatatctaaggtatgtttgtgtaaataatgaaatattattcatccgtaaaaaggagaaaatatcgtcatttgcaacaacgtggatgaacctggaggatgttgtgcaaaatgagataagccaggcacagaaagacaaataccacatgatctcacttatatgtggaatctttaaaagttgtactcatagaagcagagagtagaatggggattgccaggg

SEQ ID NO: 204212 - DNA, 624 bp, Homo sapiens
tactgtgagtaaaatagtatcaaatatcattatctgctacagataaatctttcatgaaaggaagagtcaatcaatgtggcaaattttattgcattcttattttaagaaattgccacagctaccccaacgttcagtaaccaccactttcatcagtcagcagccatcaaccttgcggcaagatactctacaagaaaaaacttatgactgagggctcagatgactgttaacattttagcaataaagtactttctaagtaaagtatatactttttaracgtaatgctattgcacttaactacagtatagtgtaaacataacttttgtatgcacagggaaaccagaaaaaatttatgtggcttgccttattgcaatattactttattatggctgtttgtaaccaaactacaatatatctaaggtatgtttgtgtaaataatgaaatattattcatccgtaaaaaggagaaaatatcgtcatttgcaacaacgtggatgaacctggaggatgttgtgcaaaatgagataagccaggcacagaaagacaaataccacatgatctcacttatatgtggaatctttaaaagttgtactcatagaagcagagagtagaatggggattgccaggg

SEQ ID NO: 204213 - DNA, 624 bp, Homo sapiens
tactgtgagtaaaatagtatcaaatatcattatctgctacagataaatctttcatgaaaggaagagtcaatcaatgtggcaaattttattgcattcttattttaagaaattgccacagctaccccaacgttcagtaaccaccactttcatcagtcagcagccatcaaccttgcggcaagatactctacaagaaaaaacttatgactgagggctcagatgactgttaacattttagcaataaagtactttctaagtaaagtatatactttttagacgtaatgctattgcacttaactacagtatagtgtaaacataacttttgtatgcacrgggaaaccagaaaaaatttatgtggcttgccttattgcaatattactttattatggctgtttgtaaccaaactacaatatatctaaggtatgtttgtgtaaataatgaaatattattcatccgtaaaaaggagaaaatatcgtcatttgcaacaacgtggatgaacctggaggatgttgtgcaaaatgagataagccaggcacagaaagacaaataccacatgatctcacttatatgtggaatctttaaaagttgtactcatagaagcagagagtagaatggggattgccaggg

SEQ ID NO: 204214 - DNA, 550 bp, Homo sapiens
ttcatccttgctatttctaggtctttttttctggaagaagttttctctaaccaatcagaaacctctttctcgttttgttttggttgttttgtttttgtttttgtttgaggcggagtctcgctctgtcgcccaggctggagtgcagtggtgggatctcggctcactgcaagctccacctcccgggttcaagcgattctcctgcctcagcctcccgagtagctgggactacaggcatgygccaccatgtccagctaatttttgtatttttactagagacggggtttcaccattttggccaggctggtctcgaactcctaacctcaggtgatccacctgcctcagcctcccaaaatgttggaattacaggcatgagccattgcgcctggcttcccctgtcactatcccatcactttgttttaccttcttcatagcagtggtcactctgaagttatgtatttacaagcctatgtgcttccctccagctgagggaaggtcctgagagcagccttgtctgtctcgctatcgctatatctcatgcgatatgccttat

SEQ ID NO: 204215 - DNA, 608 bp, Homo sapiens
aggcttgtctcagactcctgacctcagctgatctgcccacctcagcctcccaaagtgctgggattacaggcgtaagccaccgcgcctaggccagtttatgtctttctatccaactaaaatgaataaaggcaaccatttgttctgtaacatctgggacggtagggatgggggggtagagcatcacttgttacaacagtcacattagccaccgtttaagtaccactaaaggaaattattattattatattgttttgaggcagggtctcgctccatcaccaaggctggagtgcagtggcacaatctcggctcactgcaacctccgcctcccaggttcaagcaattctccctgcttcagcctcctgagtagctgggatttcaggcgcctgccacaatgcccagctaatttttgtatttttgtagagatggggtttcgctatgttggtctcgaactcttcrcctcaggtgatccgcctgcctcagcctcccaaggtgctgggattacaggcgtgagccactgcacgcggccagaattgttgactcactctatatgaagacaaggaactcaaaaagaaaagacagaaaggcatgtctcttttggttaaggttaa

SEQ ID NO: 204216 - DNA, 388 bp, Homo sapiens
agcttctcctggccacacacaccagtcatcctcacccttcccgtcttgccagtcctttcaggacttgatcttcaatcttaggctgctgtgagccctagcaggacagagcccagactgtgtgctccctgcagcacagtgcccctrtgccagctaggagctcagctagagtgggttgcacgagtcgtgagtttggggtcaacctattcctactaataagcactgtctacacctgagagctattcctgaatgattttgtggtttagagagggccatgatgaatatgtttagagtactgataaaatgtgcttcataagaaataaattagaatacctcctgctaatgtttttggaagctgctcccatcaagcatcagcaactctagtgaagca

SEQ ID NO: 204217 - DNA, 407 bp, Homo sapiens
agatctgtggcaacaactgggagtcagtgccgagcttctcctggccacacacaccagtcatcctcacccttcccgtcttgccagtcctttcaggacttgatcttcaatcttaggctgctgtgagccctagcaggacagagcccagactgtgtgctccctgcagcacagtgcccctatgccagctaggagctcagctagagtgggttgcacgagtcgtgagtttggggtcaacctattcctactaataagcactgtctacacctgagagctattcctgaaygattttgtggtttagagagggccatgatgaatatgtttagagtactgataaaatgtgcttcataagaaataaattagaatacctcctgctaatgtttttggaagctgctcccatcaagcatcagcaa

SEQ ID NO: 204218 - DNA, 378 bp, Homo sapiens
ggtccccacgtgatttgtgagcacaggaaaatttgaggagcactgaattaaacaaaatcatttccggttgtctcacacactccagggacagggatctatcaaggcctggggaacaaactggagccagcggatcaaatactatcagggtgctctgtcccacctttgcctctgctctttttatatttgtttccacccccacagctgtctctgattcactctccagactggatttatctacctcataggaccatatacagaaaacaaggctgctgagagctcaacattctcacattatgtatcttttawatatatatatatatatatatatatatatatatatatatatatatatatatatatatttatttatttatttat

SEQ ID NO: 204219 - DNA, 378 bp, Homo sapiens
ggtccccacgtgatttgtgagcacaggaaaatttgaggagcactgaattaaacaaaatcatttccggttgtctcacacactccagggacagggatctatcaaggcctggggaacaaactggagccagcggatcaaatactatcagggtgctctgtcccacctttgcctctgctctttttatatttgtttccacccccacagctgtctctgattcactctccagactggatttatctacctcataggaccatatacagaaaacaaggctgctgagagctcaacattctcacattatgtatcttttatatawatatatatatatatatatatatatatatatatatatatatatatatatatatttatttatttatttat

SEQ ID NO: 204220 - DNA, 562 bp, Homo sapiens
cgccatcgccatcattgcttgtcgttgacttcggacttggtttcggactccttggaggcatctgcagactaaaaggagactacataagcataccaatattaataatgccagtaacaacaatgatcctccgaagggtttgagccatttgaagggattaaaatcagataattgtttagttatgccttgaaaaatatctgagccaggaacagtggataaatgggcttgtgaagtctcaaagaattgctctttaagttgtgaaatatccaacgttatgttatcatcacaggtttttaaatgtcttgagaccttttcccagctatgttgatcttgattataagcataaggcgttatgcaataatcagaagtattccaatcacactataattgcatacagtgttccaagttcataactttatctcccagccaggttacactttggcggagatcattaatttgattagctaatttttgaacaawttgagcctgagaattccaaagtctggaggagtttttttgccatgcttcaacatagtgagcagtttgaacagaattgtggatggca

SEQ ID NO: 204221 - DNA, 596 bp, Homo sapiens
atctttcaaaaacacatctgatattcacatgtttaaaattcttgaaagctaatttagcatttaatatttattatgtgccagggactgggtatattatgtcaagtaagatattcatgcctttaaggtgttgggaggtttgttaaataataaaatttattgagggctactgcaggccaggtactgttttggatactgaagtaaacaaaatggaaactcctgccttcatgaagattacaatccagyggaggaagacagacaataaaataaataaagtgtatgttacatggtggtaaatgctatgaagaaaaataaaggaaatagggaatgtaggaaggaaggtgtgttacatttataagtaggatgagggaacatcctcactattcccctcctcactttactgagaaaggctcatttgagtaaagacctaaaggagatactgaatctaaccaagtagatgtcttggggagaagtacttcaggcataaaaaatagcaagtgcaaaggcccgaaggcacgagcacccctggtataatcaaggaacaacaaggaggcctctatgacctgagctgaatgaatggtggagagtagagattagag

SEQ ID NO: 204222 - DNA, 596 bp, Homo sapiens
atctttcaaaaacacatctgatattcacatgtttaaaattcttgaaagctaatttagcatttaatatttattatgtgccagggactgggtatattatgtcaagtaagatattcatgcctttaaggtgttgggaggtttgttaaataataaaatttattgagggctactgcaggccaggtactgttttggatactgaagtaaacaaaatggaaactcctgccttcatgaagattacaatccagcggaggaagacagacaataaaataaataaagtgtatgttacatggtggtaaatgctatgaagaaaaataaaggaaatagggaatgtaggaaggaaggtgtgttacatttataagtaggatgagggaacatcctcactattcccctcctcactttactgagaaaggctcatttgagtaaaracctaaaggagatactgaatctaaccaagtagatgtcttggggagaagtacttcaggcataaaaaatagcaagtgcaaaggcccgaaggcacgagcacccctggtataatcaaggaacaacaaggaggcctctatgacctgagctgaatgaatggtggagagtagagattagag

SEQ ID NO: 204223 - DNA, 446 bp, Homo sapiens
aagcttgttggggggtggcatgattagacttaactttatatgcaatggttgtattgaagtgggacactgtggcaggcagaacagtagctccccaaatacatccacatccaaatccacagaatctgtggatgtgtcaggtgatgtagcaagaagacaatcaggttgcaggtgcaattaaggttgccaatcagctgaccttataatggggaaattagcctcgattacccaggtgggcccaatgtagtcacagatgtccttaaatgtggaagaaggaggcacaggtcagactcatggagagaagggaagatgctatgctcatggctctcagggaggaaggggccgtgaaccaaggaattcgagcrtccacccgaaactgggaaaggcacaggaacagattcttctctggagctaccagaaagaatgcagtcctggcaacaccttgactt

SEQ ID NO: 204224 - DNA, 554 bp, Homo sapiens
ttgagtttacacttgcatatggctggaatcctaaartaacccaaagacttaatatagaagaccatgtcttttctatgtataacatttttttctttcttctctcaatacccttcatcttgccagcaacatggtgagttatcacttatggactaattaggaaggttcagtatcatagaaacaacagcttaagtttgagcttctgttccaccagttcctggatgaattggtcagaagtctttggttgttagcaacagaaacatcttaataccttaattgcttattactaagttataagagattggaagctcttgactccagagaaagctaaaggacgaggtttcctatgagcaggaagctgccaggtgctgggttcctgtagctataattgtctggcttctttagggtaccgcagttggaaaacaggaaccattttacttatttttgtctcagtgctcatgttttagattccagggtgaaagaagcctataccttggctaaacttttcacctggggaattttgaaaataccaatccccaggccttatcccaaaccaa

SEQ ID NO: 204225 - DNA, 584 bp, Homo sapiens
actacaaaacgtctcttggggttcagcttaaatcagctcagtccttttatctttagctatgctgcttaatcttccccatgctcccggggttcatgcgtcatccaaaaatgtgggcaaagttaatacaagcaattgggggtctttctttctggctctttcctttgttggatttccccctctgcattccagtagcagtgattgctacagattttgctgtctggttcttcagtttagaaagagtgagtttcggcagggcgcggaggctcacgcttgtaataccaatactttgggaggctaaggcaggtggattgcttgaggtcaggagttcaagaccagcctggccaayatggcgaaaccctgtgtctactaaaaatacaaaaattagctgggcatggtgttgcgcgcctgtaatcctagatactcaggaggctgcggcacaagaattgcttgaaactgggagacggaggttgcagtaagccaagattgcatcactgcactccagcttgggcaacagagcgagactccatctcaaaaaataaaaaataaaaaaaagaaagagtgagtttctacaggagtgtcagttg

SEQ ID NO: 204226 - DNA, 577 bp, Homo sapiens
tcttccctggcaacgacattaagctctttaatcttttaaaagctggtgataagataattttatttatttactaaaatgtctttttttttgttttcattcctatttgtaattaaaacacaataattgtacatatgcatggggtacaatatgatattctgataaatgtacaaaatgtgtaatgattaaatcagagtaattgcatatcaatcacctcaaataccatttttgttgaaaacattcaaaatctgttcttctaggtatttgaaaatatacaataaattgttgttcatcatagtcaccctgcagtgctggaacttatccctcctacctcactaaacagggtcttgytctgtctcccatgctggagtgcagtggtgcaatcttggctcacttcaacctccacctctgaaggtcaacaatcctcctacctcagtctcccaagtagctgggactaaaggcactcaccaccacgcccagctaattttttgtgtttattttttggggtagagctgggttctcaccacattgcctaggctggtcttgaactcctgggctcaagcaatccttccacctcagc

SEQ ID NO: 204227 - DNA, 358 bp, Homo sapiens
agcagggcttacactgtttactacagtgaatatttcacagtckaattgttcataatagaaggaaaagggtcctatgtccagaagctttggtgatagaatggttcacgaaagggcctgacccatcagaacaggaaagatggtgagaaaaaagagagattttattatctttaggctcaaagcacacagcccagcatggtggctttccagataaaccctcagatggctgagaggcactagacaaggcagacccagcatgagtccagtgctgacgccaggggatgaaaactcaattttcagaagccagaaaggcaagtaaatattggaaggtttaaactgggggactgtgttagattggatt

SEQ ID NO: 204228 - DNA, 630 bp, Homo sapiens
tgctctaaactgctcatggaaacaccatccccctttggctgatactcactttcccatcatcccttgaagctaggggtgaccatgtgatgcagtcctggccaaagataaatgagagtaagtctgctgggagtttttagttgtttttgtttgtattttactcaccaataaaaagtggcaaggataaaacatagctctcttcctgaatgctttcatacgagagtatgactcatagagcaaatgcagccgccttgttcccatgaggaagagtccgagaggattgcaagttgctgatccaaggccctattgtcactgtgtggcccaaacaaccctgaatccatctctggagtttttgtaatatgaggtcatttgttgtctttctcatgtaagctaccattaatcaacatgmtgtcagtggcagctagcaaccccacgtatcataatctgcttaccttcctaaagttgaaggaaaataattaagtatacaatttctttaatgtggtacctaaaaaatggaactgaaattccaaatcaagatcatcacaattcacatatgttcactgtctacagaagaggataaattagaactccagggaattcttctaaactcaggtttgccaacaagtttacctg

SEQ ID NO: 204229 - DNA, 577 bp, Homo sapiens
agtctcaaggttcttctggaatgacagaatgcactgaatatgcttgtgattgctttatgctgagaagcaggaaagagtttaatgtcagtgaaattttcaartaaatatagtttggataatatgattttgcataagtagatagggagcagaatagggtaattatttaggagttgttactcaaaagtggcccactgactcacaacatcaagatcacctggaggcttgggagaaatgcagaggagaaggccccacccctagcacctaaatcagaagttgcattttaacaagttcccttggtcacgtgtatacacaggaaagtctgagaattgtctatttagagcaaggagtctatggtgggagagttgagtttgaataccagctctgccaattagttgttccgtgacattgggtaagtctcctaaactctgtatctcaattttctcatgtgtaagtggggttaataacaaaagtaatgtcataggactgttgtgaggattaaatgagtccacacctgtcaaagtacttaagacagtgcctgggacagagtaaggaatctgcaagtgttagagatgatgat

SEQ ID NO: 204230 - DNA, 577 bp, Homo sapiens
agtctcaaggttcttctggaatgacagaatgcactgaatatgcttgtgattgctttatgctgagaagcaggaaagagtttaatgtcagtgaaattttcaaataaatatagtttggataatatgattttgcataagtagatagggagcagaatagggtaattatttaggagttgttactcaaaagtggcccactgactcacaacatcaagatcacctggaggcttgggagaaatgcagaggagaaggccccacccctagcacytaaatcagaagttgcattttaacaagttcccttggtcacgtgtatacacaggaaagtctgagaattgtctatttagagcaaggagtctatggtgggagagttgagtttgaataccagctctgccaattagttgttccgtgacattgggtaagtctcctaaactctgtatctcaattttctcatgtgtaagtggggttaataacaaaagtaatgtcataggactgttgtgaggattaaatgagtccacacctgtcaaagtacttaagacagtgcctgggacagagtaaggaatctgcaagtgttagagatgatgat

SEQ ID NO: 204231 - DNA, 577 bp, Homo sapiens
agtctcaaggttcttctggaatgacagaatgcactgaatatgcttgtgattgctttatgctgagaagcaggaaagagtttaatgtcagtgaaattttcaaataaatatagtttggataatatgattttgcataagtagatagggagcagaatagggtaattatttaggagttgttactcaaaagtggcccactgactcacaacatcaagatcacctggaggcttgggagaaatgcagaggagaaggccccacccctagcacctaaatcagaagttgcattttaacaagttcccttggtcacgtgtatacacaggmaagtctgagaattgtctatttagagcaaggagtctatggtgggagagttgagtttgaataccagctctgccaattagttgttccgtgacattgggtaagtctcctaaactctgtatctcaattttctcatgtgtaagtggggttaataacaaaagtaatgtcataggactgttgtgaggattaaatgagtccacacctgtcaaagtacttaagacagtgcctgggacagagtaaggaatctgcaagtgttagagatgatgat

SEQ ID NO: 204232 - DNA, 577 bp, Homo sapiens
agtctcaaggttcttctggaatgacagaatgcactgaatatgcttgtgattgctttatgctgagaagcaggaaagagtttaatgtcagtgaaattttcaaataaatatagtttggataatatgattttgcataagtagatagggagcagaatagggtaattatttaggagttgttactcaaaagtggcccactgactcacaacatcaagatcacctggaggcttgggagaaatgcagaggagaaggccccacccctagcacctaaatcagaagttgcattttaacaagttcccttggtcacgtgtatacacaggaaagtctgagaaytgtctatttagagcaaggagtctatggtgggagagttgagtttgaataccagctctgccaattagttgttccgtgacattgggtaagtctcctaaactctgtatctcaattttctcatgtgtaagtggggttaataacaaaagtaatgtcataggactgttgtgaggattaaatgagtccacacctgtcaaagtacttaagacagtgcctgggacagagtaaggaatctgcaagtgttagagatgatgat

SEQ ID NO: 204233 - DNA, 627 bp, Homo sapiens
ggtactctaagtctatatgtaggacaggaaatactgatatcgaaggagaaaaaaaaagtagtatgctgtgcatcatagggcctgaaggggaaacaggcattgaggcaactccttaatctctcatagcatggaatggtattttatttctgttcctgactttcagtcttctgtattctcctggatttctctgcagagccactttatttgcttacctatgattcttgtttcctcaaatccagtttttgtgtagattcagcttccttgcactaactcaagacccagattaagaccaactttcttctccctccacctaactggaataggttcatattacttagtcaagagctcacactaaaatatccaggtagtatgctggtattatttgagttcactactagtccaatcatttgtgggcrtggtcttgtcttttaaggctgttgctaccagctgctgtgactcattataaatctgctaaaatggaaattggattgaatgtttacaatattatatcttcatatgttggggaatgatatttcttcatttgtttgagtctgaataaatctacaacaatttctggaggatatttattacttattgaatattagggataatcctggatttttcctg

SEQ ID NO: 204234 - DNA, 587 bp, Homo sapiens
gttggggaacaaatgtacgtataaataacactgggtttaaaggtaataaaggatatgttagaaatgttaaatggttgtgctagtagaggtagggaaaaraataccaatatctttgagcaaaagtaagtcgagtaaagttttgagttttatggctctctatacctttatagccattaaaacaggagctttggaaggagtcatgcaatttggtttcaacagagtcatcttgttgaggcaaatggtcctaaaatccagctgagataagggttatccctacagggctctcatcctcaggtgagggagggggtagcctctgttttaaatattttttaaaattctattttaatttgtagccttttaagctacattttgtactttttttttttagtcattactctaaggaacagtatatatatatccttaacttttcatgtgctacttagagtccatattgtatcaccttacgaaagatgtagaaaaccttgcatagtgtagatccattttggtcgctagttctatatactatacatatatatactctggctacatatattataacccctcaagacataatttttgctgtaaag

SEQ ID NO: 204235 - DNA, 519 bp, Homo sapiens
ccagttatatgaaatcaaggctttctgaactaactacaaaaaagcttagtgctgctgctggtgttatacacaacttagatataatactgtaatggtggttgtgtggtatcatttgaggactaccacaatagcttattctctagttctcagaattcctcaatttgcttttaacagtgcctgcaactgcaattgtartcatgctttttagtaggcctagaacagagatgatgaatacctgttctttccccctgtgccacagcaggcattattcattacagcactccctccaggtgaggattccacccttagaggacttcccattatagcattacacccatctattgaaggaggttcctagatatatcctaaaggtggagattgtcacctacagaccagccctggctgaaaaacccatgttaaaatgtaaatcttgaaatccaaaagggaattgccataaaagaccccaaatgagggcagtgttgccaatgagagaaacagggcattaccctagttcactcc

SEQ ID NO: 204236 - DNA, 215 bp, Homo sapiens
tcactattgtatggaggctgcgaaggccccgagctctgggagcccatggtatttattggtaatgcaacgaagaaacaggtggtgagaacgtggaggtcaaaagggcacattgcgttaagcacatgatttacagctgtgatggcttagcatttatraggaacatgttctgctacttgagataatggtaacaggagcctaggaaggctagaaacaag

SEQ ID NO: 204237 - DNA, 336 bp, Homo sapiens
ggcatagtttgtagttaggaagctgaacaggcaaaagggagacttgtggagaggtgacgaggaatactctgaaactaccccgaggtggagagaggataagggtaggaaaggaaacatttgcatcagtggcttacagacttactttcccctacatctcctcaatctttctcctcctgtctccatggaacctacctgaaaagacgcagagaatgaacaatggatgaaacaattttgrgaaagctagagacaggaaagccaccggggagacaatagcctgggccgatgtagggaaaaggaaggtagagatctgaactgaggggcaatatctgtatctac

SEQ ID NO: 204238 - DNA, 567 bp, Homo sapiens
ataaattctgctacaaactaaatggtggttccttttttttcttttccacctataatgtattctatgataaaattgtgattcctttgaagaaatagtttctaaggtcagtgtccgatatttttctgaccccaggaggactcctttccacctcttttgcaggttctctcctgcaagctagctcccacactctaggccgtatcttcactagatccacamttctccccattctctcaccacaagcccaaaattctccaggcgctgttgcaaatgaagccccttctttgggaagagatcaggaactgttttatggtaccaggcaggatttctgagtcttgaggtgggactgaggataatgacaggtttttctctgagtggcagccccactctaggggctgagcactaagtggaggggccaagaggttgaggttcttgtggctgtgctattccaggggtggaaccactgccttacaagcccaggaagggctgtcagggccctaatattctcagcacactgcatgcacccaatgtagagcctgcattccatcagcaggggttgggtagagtaag

SEQ ID NO: 204239 - DNA, 421 bp, Homo sapiens
cgcttgaacctgggaggcggaggttgcaatgagccgagatcacaccatgccactccactgcagcctgggcaacagagcgagactgtctcaaaaaaaaaaaaaaaaaaaaagcttctggaatttcatcasctggaaggaaagccaatgcagacaaatgacacatttttaaattgaagttttcatcattgccatatctcatggccaatcgactcatctaagttttccactaaatgcatcagactgaatggaaaaaataaactttgttagtgacatcttgaaattcactttcagaagctttgttgcacctaatctgtcattatgatttggggattcagttgaatccattttcttttgcaacatccaccaaatcttcaaataagtgttttataaagtgcttcccttttgtccagtcattcataca

SEQ ID NO: 204240 - DNA, 458 bp, Homo sapiens
tgtatgactggcttctccttgccattggggtctcagctcatccctcatcctggccaccccatctaaggagttccccaagcactcctgtcacacaaccttcgttctgtcttctcagagcatgcattggttttggatactatgttgcttactaatgtattgctttctcctcaagactakaagctcctcaaaagctggatctttgtgtatactgctcactactcttataggtaaagggaaagggggttcatgcccctggggaagatgggagtacgtggagaagttccagcttcctcccccgcaacccctgtagggagtgggagagagaactaattctgagatgcattgttcactgttcctcagagtcctcagatatacagtgccctgggtgacccctgaggtagctctcaacccaacatcaactcctgtattagcttttcttccttccctgtttcattctc

SEQ ID NO: 204241 - DNA, 458 bp, Homo sapiens
tgtatgactggcttctccttgccattggggtctcagctcatccctcatcctggccaccccatctaaggagttccccaagcactcctgtcacacaaccttcgttctgtcttctcagagcatgcattggttttggatactatgttgcttactaatgtattgctttctcctcaagactataagctcctcaaaagctggatctttgtgtatactgctcactactcttataggtaaagggaaagggggttcatgcccctggggaagatgggagtaygtggagaagttccagcttcctcccccgcaacccctgtagggagtgggagagagaactaattctgagatgcattgttcactgttcctcagagtcctcagatatacagtgccctgggtgacccctgaggtagctctcaacccaacatcaactcctgtattagcttttcttccttccctgtttcattctc

SEQ ID NO: 204242 - DNA, 424 bp, Homo sapiens
ttgcgcattccagcttaggtagcttctcaaatttccagaagttatctaggtattcaagttaaactcagctgaatgcaaatgggcttcccttatgctgcagttttatagctttttatcagtttgtagatattgacagctttctatcagtttgcaaagtaactaaatggattgactgaataatttgctgaaaaatgaaagaatgaagyttgagttagcatattataagaatatttatgtaggaaatcttttcacatatcaaaaaaaaagtagacttgtaagccctctaaatatttttctcagatactatacagatcttgaaagttttccacgtttgcgtaaatgatccaaaatgaggttaagcatagtgtggtttcctttatttcaaattacagctgcaagtaataaaactcaatcaccataaaca

SEQ ID NO: 204243 - DNA, 568 bp, Homo sapiens
gataatacatagtttaaaaagccaaagtgctataaagtgtataacaccaaaaacaacagcaacgacaaagtgtcttgccccatcccaccatacttaattccactccttagaggcaactactttctactttttaagttgtttgttcaggcttttatttctgtatatctaaatattgttcagtatttttagatgttttatccattattgactttctttggtcaggtctgcttttctgccttgatttttttactccacacttcccttttaaccaatttggatatatttaaacatagctatattaatattattaccatacacagataatcccctgctcaaatggtgtgctatgactactcctacttttcaaacaattttcccattgcctgaagctgtgttatctctcttcctcctgtgtgcgtctctctttccttgatgtgcttagttttgtatgtatacaactatcattwatttttcacaagctatggaattatgttttctaaaagatcaaataaaccagctaactcatcaggttgtttttcttggggccatacttgaggaactctcagtc

SEQ ID NO: 204244 - DNA, 511 bp, Homo sapiens
gccccaaagttctcctccatgaatcccacttcctccttctacctctcacctctcaaatctcagatackcatcaaggcaattgcttcagattcctttcaattcccttcttacacagctgaggacccagatggaaacatgagccactcatgaccatacaacttagcctccacccaagcaagaacactttgagagtgtaaggggacactattgctaaatgtgttggcctatcagacataagataggctatcctagtccacctcaatgtataatcaacctgtcatacctcccagtcgccttctctgcaaaacagtttttaatggactgctgaggcaaagggcacaactgcagcagcagcgctttcccaggaagggcatctccccaggtggctgccgttactggcacacagagtctgcaagggcaacagctggcaaggcaggttggctcactttaattcaaattgaactccttctactgaaatctagtttattctgaaagaggtgctgaggatatt

SEQ ID NO: 204245 - DNA, 511 bp, Homo sapiens
gccccaaagttctcctccatgaatcccacttcctccttctacctctcacctctcaaatctcagatactcatcaaggcaattgcttcagattcctttcaattcccttcttacacagctgaggacccagatggaaacakgagccactcatgaccatacaacttagcctccacccaagcaagaacactttgagagtgtaaggggacactattgctaaatgtgttggcctatcagacataagataggctatcctagtccacctcaatgtataatcaacctgtcatacctcccagtcgccttctctgcaaaacagtttttaatggactgctgaggcaaagggcacaactgcagcagcagcgctttcccaggaagggcatctccccaggtggctgccgttactggcacacagagtctgcaagggcaacagctggcaaggcaggttggctcactttaattcaaattgaactccttctactgaaatctagtttattctgaaagaggtgctgaggatatt

SEQ ID NO: 204246 - DNA, 511 bp, Homo sapiens
gccccaaagttctcctccatgaatcccacttcctccttctacctctcacctctcaaatctcagatactcatcaaggcaattgcttcagattcctttcaattcccttcttacacagctgaggacccagatggaaacatgagccactcatgaccatacaacttagcctccacccaagcaagaacactttgagagtgtaaggggacactattgctaaatgtgttggcctatcagacataagataggctatcctagtccacctcaatgtataatcaacctgtcatacctcccagtcgccttctctgcaaaacagtttttaatggactgmtgaggcaaagggcacaactgcagcagcagcgctttcccaggaagggcatctccccaggtggctgccgttactggcacacagagtctgcaagggcaacagctggcaaggcaggttggctcactttaattcaaattgaactccttctactgaaatctagtttattctgaaagaggtgctgaggatatt

SEQ ID NO: 204247 - DNA, 439 bp, Homo sapiens
tgggtgaggcaatgcctcaccctgcttcagctcacactctttgcagtgtacccactctccwgcacccactttctgacactccccagtgagatgaacctggtacttcagttggaaatgcagaaatcacccgtcttctgcattgctcacgctgggagctgtagactagagctgttcctatttggccatctttgctccacccagttgattttttttctatcaacattttaaatcactctttttgcctgcatgatttctgagaagtcagatataattgtgatcattggtcctctgtaggtaagatgctttttctctgtggcttcttttgggattgttttctgtatctttgcttttctatagtttgataggtatagagttttcttgttttgtttatgttttgtgtttttttggtcatttatcctgtttgatttactctgagctt

SEQ ID NO: 204248 - DNA, 415 bp, Homo sapiens
tttctgaaccctcaccagaatcacctttaatgctccttttatgaaaatataggcttttcccagcatttccttgaaaagtgttccagcctctactcattacccagtttcaaagccacttccacattttcatgtatttgttatagcaacaactccaattcttggtaccaatttttggtattagtccatttttgytgctataacagaataccacagacaaggtaatttataatgaacaaaaacctattggctcatggttctggaggctgggaagcccaagactgaggggctggcatctttcaaagcctgctttgtgtgtcatcccatcgtagaagggcaaagagagggtgagagaaagtgaacaagagggccaaactcatctttttataagaacccagtcctgtgataatgaacccac

SEQ ID NO: 204249 - DNA, 420 bp, Homo sapiens
cacacagtttgtctacagagataccgaaaactctggcattgttagcatgctattcaattactgataccacatcattccccatacctttctgcttagaaattcagacaaatcagaaagtaggcttattacacacaagccatttcagcaaatgaataagagttggaaaagggtagagtatcatgactgccagtttcaaaaggtctttttagagctatttctcaagtttgaaggcttccctaaacatctttcaaattccctaactctgaaataataaccattaaatgtttaaaatagctttgttattttgtgtgattaaagatgcaacatatgtgtactggaagaaaatcataaagtgcatcaktataaaacaaataaaggtaattagtaatcccaccttacagatagtcactgatcacatac

SEQ ID NO: 204250 - DNA, 519 bp, Homo sapiens
ataccctgggccttttcctctctgattatcctcttcttccctttggtaatgtagttgtctcattcttttgccttcctccctgttcacaatacccacaaagctggattttaaatacatctggtgcataagtaatctgtatcagaaagaatttaatcactacttggaagtaytgatattggttaatactggcaccagaaagcctatatttaaatcccagttttaccatgcctcaatgtgtgactcagagcatgttagttaactcatctaggcttcaggttacttacctgaaatggggatcacacctactgcagaggtttttccatgaggattaatgaagtaattaaaaatagctttgaagttgggcctggtggcttacacctgttatcctagcactttgggaggctgggatgggctgagatgggaggattacttgagcctagtagtttaagaacagcctaggcaacatagcaagaccctgtctctaccaagaaaaaaaaaaaagctgggtatagtgactca

SEQ ID NO: 204251 - DNA, 531 bp, Homo sapiens
tccttggcatggtcctctccttatgcgtgtctgtgtgtccaaacttctccttcatgtgaggacaccaatcacattggattaggacccaccctagtggcctcattttaacttgattacctctgtaaagattctgtcttcaaataaggtcagtcctaacccagtacctcagaaggtactgggttgggacttcaacatataaattgggagttggggggttgaagtgaaattcaacccatagtattaataaacccacaaagacaaaaaaaggaaaattggaaacaaaacagttttggaagatgaaaaatagaaaaaatagaatacctaagaaatctgaatgtcagatgcacaccggaggaatgcaaacaacaaacagagtatttcataacaaccaacaccagaaagcttgagaaatggtagcaacttattctccccaaaaggaaagaaaagcaaggagctgaaagcaagatgtttattttgaaaawatatataaggaaaactcatatacccaggcatcctccctgtccacaaatg

SEQ ID NO: 204252 - DNA, 549 bp, Homo sapiens
cccacttaaaatgccagcacgctgtgagaagtaaggcttaagtcattatcagttaacacttggtttgtctgataattccctatttgagatcagtttgtccatggggaagaataagaaaatgatccagactggtacaaagagaagggagaggagtcctaggaggcagaaaaagatgactgctgtaagggagagggagwcccaaaagacacacatgatgtgctttacagttttttcacgctggctgtgtcactgcacatctgcaggtgtatccaggacactgggaacaataagcaattttgactcaggaaagggttttagtgagagataagtgtttctttaccagtcaatgtctatttcaaaaaatgagctggatgagtggggtcaaaggctaccaggccagcacccaacatccctggaaaataatgaagcagggggaagacacaatgttctggtatcaggctgatcagcagcacatggttagacagagctcggggctgaaattactcagaactgggcagtgacttggtgttctatccttccccacaagaa

SEQ ID NO: 204253 - DNA, 568 bp, Homo sapiens
gcatggttgaattgtgagctttagtgggaggtcatgaaaccaggtagttaatgwttcagtgagtgtttatactgtttgtgttatttaggcagcacatttttgttcggaatagtcaaaactatctttgcggtggcatcccaatgaaggaggaaggaggaatttgtatctggtaggtgtacttactttgaaaagttgaccaccagatcacagaccaccaggacagtccctgttatgtcaaggataagtcttttctgcttctctctgagaactattattagtagaattggaaagggttaactttttcatctaaaacaagtgattaaaagaaccactgcagacctggagatgtggggataattataaagttaatgttttctttcctattgaaaacatctggataaatgatagctatgggatttctcttcaccctgcaccttccacagattcagtgcctttatgtgagtgagactgcattatttgtaacaggcaagtaaagcaggactgttcttttctctttttggaaaatggttttgaattcaatgttctggaacatactaggaacatgtca

SEQ ID NO: 204254 - DNA, 547 bp, Homo sapiens
ttggtggccctagataaactttgtgaactagaaactactcctcgtgtatgacctattctgaaaatcctaagccagaggtcatcccctttaccttagcstatcagatgcccctctggaaaaaacatgattgctcctctaaactccattacactttatgaggaatcactgttgtgagcaagaccacttagattctcatggtgatacttaccttatttcctcttagtccatgctggtcacacctggaaggcaagttctcctctaattttttttctcccttgtagtgcctggcacaagttctttgcatgcggggggagttgcagtgaagttgcaagggccatggtaaagtggttaggagatgagttttaatcttgtctctggtaccacacctcaggtagaaatatactatgtatcaatctgtgcatttgcatctgtatctctctactagtgaaatgagttgctactattcatttcagctgtgaaattctgtaactctgtggctactttcataccgttcaaatgcgatgttatatgctggtaacatgaaaat

SEQ ID NO: 204255 - DNA, 268 bp, Homo sapiens
ttagtgtacaagtcttgtgcttccttggttaaatttttctcaagtatcaatcagtataatctaccacattagtagaatgaagaaaaaaaagaactcactacagtctgtcctttgtatmtatgagttccacatctgcagatcaaaaatatttggaaaaaaaaataaaaggtaatacaaatttattccttaatcaaggaccagaggaaaaaaaatacaacatttaaaaatagagtataacaactgtttgcatagtatttgcattgtatta

SEQ ID NO: 204256 - DNA, 275 bp, Homo sapiens
gatctggtgggtttttttgtatttttttgcagtaacggggtctcactgtgttgcccaggctggtgtcgaactcctggactgaattgatctgcccgcctccgccttccaaaraatctccttttttgtttcaggttataatacaatggcttcacacacatccccaaaatacacacacacgcgcgcgcgcgcacgcgcatacatacgatagacgtggtggtgggccctaagccaggtgaccggccgtcagtcaatacttacaggatccacaccaagct

SEQ ID NO: 204257 - DNA, 644 bp, Homo sapiens
aaaaggcaaaatttatgagacaaatatcacaatactgaataagaactttcatataggcattaagaagattaaagaaaaaagcaaatcatcttttaaaaaataacccttgtaatgaagagacaaataaatgttgataagttgattaaatgttgattaacatttaagactagtataacrttaacactataacttcttaaggataggaaaagcaaaaatacttaaaaatcaccattattttgcttaatatcttaaatttttggaggtcttacagatattcaggtcatagtaattatttttgaataccaagtccccagcttgttttttcttttagtagggcattaattcttgaatatgtcctccatctgtctcccaatctaaaatatacatcctagccttcatcaagcccagccccatgtaatatcaattgtttttcaggtaaagtgctttgtggcactaatttgggtagtgtacaaaattcttgattttgttcttaccacatgagaatcaaaggatacttagaaaaactaaacatggctgtcaattattcatataatcagcaacttttcaggttattatgtagtcagcctacaagatcattccttcccagagacctcacatagtaaagatacatccgtgggccatac

SEQ ID NO: 204258 - DNA, 484 bp, Homo sapiens
ttttctgatattaatggtctgttaacattgctgatcatcaggaaatcatccattgcaatgtgtgcaatttatgtaggcagtagcatctgaggtacacattttttatgactgaaaatggtcacacctttccttctgctaggatttttatacagacatttgtactaatcaacttagcatgtgaattagtttgtgatttgctgttaagtctatacctatttttagtgctccttggctttcacatcctgtagaaacagcttgtgtctagggtgaaaggtggtttaccagagcatgatttaaaaaacatatttatgaaatatatttatgtttrtctttgtgttgtgtctcagaatgtgtacctttgcaagttcttattgctctcctgtccctctcttagcacttgttatttgaaattcattactttggctgaggggcttaatggggcccctgtatgtggcttggtttgaatctttgtggttgtaataaa

SEQ ID NO: 204259 - DNA, 484 bp, Homo sapiens
ttttctgatattaatggtctgttaacattgctgatcatcaggaaatcatccattgcaatgtgtgcaatttatgtaggcagtagcatctgaggtacacattttttatgactgaaaatggtcacacctttccttctgctaggatttttatacagacatttgtactaatcaacttagcatgtgaattagtttgtgatttgctgttaagtctatacctatttttagtgctccttggctttcacatcctgtagaaacagcttgtgtctagggtgaaaggtggtttaccagagcatgatttaaaaaacatatttatgaaatatatttatgtttatctttgtgttgtgtctcagaatgtgtacctttgcaagttcttattgctctcctgtccctctcytagcacttgttatttgaaattcattactttggctgaggggcttaatggggcccctgtatgtggcttggtttgaatctttgtggttgtaataaa

SEQ ID NO: 204260 - DNA, 484 bp, Homo sapiens
ttttctgatattaatggtctgttaacattgctgatcatcaggaaatcatccattgcaatgtgtgcaatttatgtaggcagtagcatctgaggtacacattttttatgactgaaaatggtcacacctttccttctgctaggatttttatacagacatttgtactaatcaacttagcatgtgaattagtttgtgatttgctgttaagtctatacctatttttagtgctccttggctttcacatcctgtagaaacagcttgtgtctagggtgaaaggtggtttaccagagcatgatttaaaaaacatatttatgaaatatatttatgtttatctttgtgttgtgtctcagaatgtgtacctttgcaagttcttattgctctcctgtccctctcttagcacttgttatttgaaattcattactttggctgagggrcttaatggggcccctgtatgtggcttggtttgaatctttgtggttgtaataaa

SEQ ID NO: 204261 - DNA, 582 bp, Homo sapiens
cgcctttgtcaatgtaaacaaactaaaatacattccttaataataaatgccttgtcaatatatgcaattccactcttggcatttttaaaatataagtttatcctactaacatgttgagtcttttgaacatccatttagcttcaaaaacctgagtaccatttcatcatagatacttttccccactacctccagcagtcagtaaaatattaaacaacatttccttgcataatcagtgagtatgtaaaaaaatatatctgcattatttctatgttagctggacrtctgcagtgacaccaataataaaaacattgtaaacattcacaaagatatagttaaaattacaaagatatacttgagatttttctagttaagataatataaacatgcataaaggctcaacaccaagtaatttcaagagtaagaacacatcacaaatacttagtaggtcatatatatatatatatgtatacatacgtacatatatacgtatatatgtgtgtgtatatatgtgtgtgtgtgtgtgtgtgtgtgtgtgtgtgtgtgtgtatatatatatatccacttggtcatatcattgaggaa

SEQ ID NO: 204262 - DNA, 412 bp, Homo sapiens
atgtacacatatgtaacaaacctacacatcatgcacctgtaccctggaacttaaagtataataatcataaaaaaaaaactgatgagcaaaaatggagatttcccatagaagaaggaattctgccccaatactttaamatggaaatcacaactgacttttcagcctactggcccaccctatatatttcagattcaagataataagtatgaagtataagctgatgtcccatgctaaattaagagagagagtgcataattaatacaaagccaataattaaatagagttaattggaaaattgacacagtaaaatcttatacaacttatacattgatgagggacagttctctgggactggtaagcacagagatatactattcttgatggttcgctttatgaatatattgttgtttag

SEQ ID NO: 204263 - DNA, 412 bp, Homo sapiens
atgtacacatatgtaacaaacctacacatcatgcacctgtaccctggaacttaaagtataataatcataaaaaaaaaactgatgagcaaaaatggagatttcccatagaagaaggaattctgccccaatactttaacatgraaatcacaactgacttttcagcctactggcccaccctatatatttcagattcaagataataagtatgaagtataagctgatgtcccatgctaaattaagagagagagtgcataattaatacaaagccaataattaaatagagttaattggaaaattgacacagtaaaatcttatacaacttatacattgatgagggacagttctctgggactggtaagcacagagatatactattcttgatggttcgctttatgaatatattgttgtttag

SEQ ID NO: 204264 - DNA, 371 bp, Homo sapiens
acaaagtaaaaccgctaggactgatatgaaacaaagtatttattatagaaattagatcttayggatttatgagatccagtgacaatatctatagaaagctcttttatctttttattatggtgagcctgaagtcactgaaggtcaagagtagcagtaattacaaagagaaactatacagaaagtaagagagtgtgtgaaccaattagatccaacaaagaaaactagaactaatgaggtcagagtagaactcagttatgattctcatgaactctaattgtagcaacacgaccaacttacatcacagccttttgccctttgtcatgaagttgtacatataaatggttcaaaatcagagaagaagaatggagaca

SEQ ID NO: 204265 - DNA, 508 bp, Homo sapiens
tccaaccagaccacctggctaacctgcatggtgttacttcagggattccaagacagcccccacctgtttgggcaggcattattgaaagatctctctgagtttctctatcctcaggttaaagttttaagatgtgtatatgacattctcctctgtgccccaactgaggaaatctcccctgaggaagacagtaaggctcttcttaattttctggctaacagatgatataaggtcttaaaatctaagactcrgctctgtcagaattcattgaagtgcctatgtctagtctttacagagaggaccagggtactaggtgaagaaaggattaagcctatctcctccttttgtctctcaaaaccctcaaacagctgagagcattcttgggcattacaggattctgcagattatggatacctgggtacagtgagatagcttgtcccttatatcacctaataaagaaaactcaggcagctaagactcacttcctaatttggaaatcagaggctaaatg

SEQ ID NO: 204266 - DNA, 573 bp, Homo sapiens
ttttttcactcaatagttattttgggtgcatacatattttttaggatatcaatagtttgtttttattgctaaggtattattttatttatgaatatcccacaatttatttatttatccaaatgttgatggacatttggttgttttgagtttgaaactattataaataaagctgctataatcattggttttctattctttgtataacatatattgttgtggttgaggggtgcagatatctagaaatgaaatagctcgattgatggtaagtatatatttaatattttaaggttctgttaaactgttttccaaagtatttgcgttatttttcattcccactaacagtgcstgaggattccagtttttctacgtgcttacaaacactcgatgtggtcagtgtttttaagtttagcctctctgataggagagtggctttaatttgcatttcactcttaactattgatgtcaagcagatttctgtgtgccgatttgccatctgtatgtctttggagaagtgtctgttaactattttaccatttaataaaaactatgttgctttcttattactaagatttg

SEQ ID NO: 204267 - DNA, 564 bp, Homo sapiens
gaagtggaaggaaactggtcttaccatggcagagcaggagagaaagagtgaaaagggaagtgctacacactttgaaaccatcagatcttgtgagaattcacttgctctcataaggacagcaaggaagaaatcctcacttgtgatctaatcccctcccaccacgcccctccttcaattaaacatgagatttgggtggggaaacaaatccaaatcatatcaccagtcttctctgtatttcttgaatttgtatgtcaacctctctagtgagattaaggaaatttttatggactatattttcatggactatgttctctatattggcccctcccaaatctcatgtccttctcacattgcaaaacacaatgaccacttctcagcagtccccaagtctcaactcatttcagcattaacccaaaagtctgagtgcaaagtcttatctgagacaaggaaagtcctttctgcctatgacactgaaaaaaagcagggggaaaaaggtaattactttcaagatacaatgggkgtacaggcattgggtaaatgttctcattccagttaggagaaatt

SEQ ID NO: 204268 - DNA, 530 bp, Homo sapiens
gaattcagatttttaaaaactagtatcatttacaatagcaccccaataaaaataaaataggtatttcaagagacctaatatatgtgtaactggacccctaatgaataggaggggaaaggagttaggagaaaatgtaagaaacagcagaaattttttccaaatgtaatgagaattgtaaacctacagacccaagaagctcagtgagctccaagcacaagaaacaggaaaattacaccaaggcatatcataatcaaattgctcataaccagtaataagtagaataatatttatttttgtattttttgtagagatggggtttcatcatgttgcccagtctggccttgaactcctgggttcaagcaattcacccaccttggcctccmagagtgctgggattacaggtatgagccacgtacctggcctagaataatattaaaagccagagaaaataggcactgggtacaaaggatcaaaaataagatgacagcagattcctcatcagaaacaagaaggtagtggagcaacatctt

SEQ ID NO: 204269 - DNA, 564 bp, Homo sapiens
ggaattccagaccaggcctgggcarcacagggacaccctgtctcttaaaagaaacaaacaaaaacccagctgcctatacagctggggagaccctggacccaaagaaatgatgcagaccctcacattaaggctacacatgaacccacaaaacaaacaaaaattacagaagcatcaaggaagttggtcactctgtgtgggcttgagcaggaaaaatatctggctgtagaccaccctcccaaggacttcaaacacagtcaaggagctccatgtcacaaatatctagcgcttttcaaaaaagcatgttcttaaaactgaagactatcatatgaaatatttgaataaagaatggaatcacaaaaataaataagcaatgtctatcaaaaacacccagataagatgtgaaagtaactaataatttagaaattttaaatatatgtcatctttagaattagaaactgaaaggacaggttacaccgtacattaaaaataaacagaatcaagaatagagcaaacatacacggagagatgtgaaaaggtacagagacggagggagagggatgaaag

SEQ ID NO: 204270 - DNA, 564 bp, Homo sapiens
ggaattccagaccaggcctgggcagcacagggacaccctgtctcttaaaagaaacaaacaaaaacccagctgcctatacagctggggagaccctggacccaaagaaatgatgcagaccctcacattaaggctacacatgaacccacaaaacaaacaaaaattacagaagcatcaaggaagttggtcactctgtgtgggcttgagcaggaaaaatatytggctgtagaccaccctcccaaggacttcaaacacagtcaaggagctccatgtcacaaatatctagcgcttttcaaaaaagcatgttcttaaaactgaagactatcatatgaaatatttgaataaagaatggaatcacaaaaataaataagcaatgtctatcaaaaacacccagataagatgtgaaagtaactaataatttagaaattttaaatatatgtcatctttagaattagaaactgaaaggacaggttacaccgtacattaaaaataaacagaatcaagaatagagcaaacatacacggagagatgtgaaaaggtacagagacggagggagagggatgaaag

SEQ ID NO: 204271 - DNA, 564 bp, Homo sapiens
ggaattccagaccaggcctgggcagcacagggacaccctgtctcttaaaagaaacaaacaaaaacccagctgcctatacagctggggagaccctggacccaaagaaatgatgcagaccctcacattaaggctacacatgaacccacaaaacaaacaaaaattacagaagcatcaaggaagttggtcactctgtgtgggcttgagcaggaaaaatatctggctgtagaccaccctcccaaggacttcaaacacagtcaaggarctccatgtcacaaatatctagcgcttttcaaaaaagcatgttcttaaaactgaagactatcatatgaaatatttgaataaagaatggaatcacaaaaataaataagcaatgtctatcaaaaacacccagataagatgtgaaagtaactaataatttagaaattttaaatatatgtcatctttagaattagaaactgaaaggacaggttacaccgtacattaaaaataaacagaatcaagaatagagcaaacatacacggagagatgtgaaaaggtacagagacggagggagagggatgaaag

SEQ ID NO: 204272 - DNA, 564 bp, Homo sapiens
ggaattccagaccaggcctgggcagcacagggacaccctgtctcttaaaagaaacaaacaaaaacccagctgcctatacagctggggagaccctggacccaaagaaatgatgcagaccctcacattaaggctacacatgaacccacaaaacaaacaaaaattacagaagcatcaaggaagttggtcactctgtgtgggcttgagcaggaaaaatatctggctgtagaccaccctcccaaggacttcaaacacagtcaaggagctccaygtcacaaatatctagcgcttttcaaaaaagcatgttcttaaaactgaagactatcatatgaaatatttgaataaagaatggaatcacaaaaataaataagcaatgtctatcaaaaacacccagataagatgtgaaagtaactaataatttagaaattttaaatatatgtcatctttagaattagaaactgaaaggacaggttacaccgtacattaaaaataaacagaatcaagaatagagcaaacatacacggagagatgtgaaaaggtacagagacggagggagagggatgaaag

SEQ ID NO: 204273 - DNA, 556 bp, Homo sapiens
tttcttagcctagtttaatactggtgattcatggaggacatgttgatgtgaaaagaayaggaaatttatccttgaaaattcagctctgacatagccttctctagaaagatgcctgttttcttacacctaagcttgggttgcccttgtgagatacttagcagtagagactacatctgctttccctgaatccctaccttcaatagtgcccaggccaaaactaggccctcagtaagtgctgaaggaatgaatgaatgaatttggaaggaaagacttggggctccacttaatctctctggactttgtaacacgggagttgttaatatctgtgtcacagagctgttgtcacatcaaacgaaatgtctctaaaatccctttgtgaactgggaaatcatttgcatatcttataaatgtttggaaatgctttttgagtgaaatattttttattttatcttatgtatagctaggtaaataaaaggacattccacttattactatgggtaaacttgctttttgtgtaactttaattcttctccaggaggaggtgatcatgaagaaa

SEQ ID NO: 204274 - DNA, 556 bp, Homo sapiens
tttcttagcctagtttaatactggtgattcatggaggacatgttgatgtgaaaagaataggaaatttatccttgaaaattcagctctgacatagccttctctagaaagatgcctgttttcttacacctaagcttgggttgcccttgtgagatacttagcagtagagactacatctgctttccctgaatccctaccttcaatagtgcccaggccaaaactaggccctcagtaagtgctgaaggaatgaatgaatgaatttggaaggaaagacttggggctccacttaatctctctggactttgtaacacgggagttgttaatatctgtgtcacagagctgttgtcacatcaaacgaaatgtctctaaaatccstttgtgaactgggaaatcatttgcatatcttataaatgtttggaaatgctttttgagtgaaatattttttattttatcttatgtatagctaggtaaataaaaggacattccacttattactatgggtaaacttgctttttgtgtaactttaattcttctccaggaggaggtgatcatgaagaaa

SEQ ID NO: 204275 - DNA, 556 bp, Homo sapiens
tttcttagcctagtttaatactggtgattcatggaggacatgttgatgtgaaaagaataggaaatttatccttgaaaattcagctctgacatagccttctctagaaagatgcctgttttcttacacctaagcttgggttgcccttgtgagatacttagcagtagagactacatctgctttccctgaatccctaccttcaatagtgcccaggccaaaactaggccctcagtaagtgctgaaggaatgaatgaatgaatttggaaggaaagacttggggctccacttaatctctctggactttgtaacacgggagttgttaatatctgtgtcacagagctgttgtcacatcaaacgaaatgtctctaaaatccctttgtgaactgggaaatcatttgcatatcttataaatgtttggaaatgctttttgagtgaaakattttttattttatcttatgtatagctaggtaaataaaaggacattccacttattactatgggtaaacttgctttttgtgtaactttaattcttctccaggaggaggtgatcatgaagaaa

SEQ ID NO: 204276 - DNA, 594 bp, Homo sapiens
aactggacagcattctgatacagcggctccagcatctcgtatcagcaatctccaggtgtcttgatgtttcttgaagtcatgacaagcctctggacacggtgttttaccagcagcattttgtacaactgttggttgtttttcccagactggatgatgtttatcatgttagaggacttgaccagccccttatgggctgattcttatcagttttcttcaccattgcgttaaaggcacctaagcctccataaaattggattctagcaactggaacaatacgcttccttagttcactgcattcatgttcaaaactgtttgccagtacacaaaatcagtgactgaaactcaatggcagaagacaggccagaaaggagtctgccacacactttgcaaaacatgcaaccctagggagctcagtagaacttttgcctgagaagttaagagtatgattgtattaggagatggtgaaactcagagcttcttattctgggctccgcagaattcaaggagtcsgtgaacttgatgaggaaaaaaattacaacacaaacctctaactaaaatctatcatttctttccattacattgcagacaacagag

SEQ ID NO: 204277 - DNA, 598 bp, Homo sapiens
tgtggagttacacctattttttaaagaccttgctctatctgtcagtcaggattgttagttggaagcaacaaacatttacttgtgctaatttaagcagaaaaggatattgagtagcttgcaatagcttcaggaagacaagagatccaggtttgaaggctacagagccaggtacaatgcccaaaatcacaaggcaaaactgtttctacctttgggcacccaatgccacaggtggcactgacagcatcactagacatcaggcactagggctgccactaaaaccactgtccctgctgcctctagaaagcaacccctattgcataattgcctccagcaccaaggcagccactatcatcactaccacccccagagcctccactgcccacattaatttccctgcaccctgtcctcactgccccacaactacctctatccctactgctccaccgcccctgctgccacctgcatggattctgggcagaccctgcttcttcacawcagcagctttccatttaaaatctgcttgccagagcctaggctatgtaacccattccctagctacaatggaggctggtaaagaaaatgtctattttcatttcta

SEQ ID NO: 204278 - DNA, 576 bp, Homo sapiens
ttgtcatttctgagaaaccaaaataacagcatgtggctagtgtgaaaaacaaggctacaggcagtggagacaggcaggagatacagctgtttcacgtagaaaaatagttttcaaccctgactgtgcgtcaggacaaagccctgcagcgtgacagggtttagacattcagcagaagagaggaaacctgaaaatcagacaaagataaaataaccagtgaggctggagcaaaaccaagggaaataatcaatgaagcaaggaaaagagagggtgaagaaaaaagagggagtggttagctgtgccaaacattggtgataaaagaacagagaaaggatgccaaagtgatttttaaaatggaatccaagctgaaaagacgaatgcaaggaccaaagggggaaacagtgaaagagatmgaatcaacagattagaactctcaatgtactttttcaaagaatgataaaataagtcctgagtaattactggaaggaaattgagattttagaggcatctcagcgacgatggataattcttttgagaatgttcaccctaaaagggagaaaccatgacagataggaagaa

SEQ ID NO: 204279 - DNA, 425 bp, Homo sapiens
ctttcctttgccaccaaatgatgactcatttccacagcatctaattagtatttacaactctaattgtcttaatagataagcctaattttttaagtmctacaatgctcattctcccattttggtaaggctgacattcatttatatgatattctaatagttcaaccaccacaccttagtcattttcaacatcccactgcctagttaatatgtaaaacacagtagaggttcaatttaagtgtaccaaattatattgaactttaatatctgatcttttccagttgtcttaatacatgttaaactttgtcttctttttttccccatctagtcaggattctaaaataagccatttcattaatatatcgaatactctgaaaaccaatgccattttatgaactatttggacttcctcaagttacttagccatt

SEQ ID NO: 204280 - DNA, 486 bp, Homo sapiens
tggcaagctggtgaactttctctaataagtcaaagatctgaggtcacaggccactggactagcccagaatcccaggagagacagtcacttgcaaagagagaaaggacwcaagcaattgctcacttggagcagaggctgcaggataccaggaagaattcagctagaatatttcatgagtggaggctggtgagggcatagagcccttaaggggtacaggtgtaagagaaatttacacccttttgtgggtttcttctccatggaccacacttgacgagagccctatgaaagcattcttcatggtgctggcatgtggttggtggacagcagtcactgaaagataaacgttaagtaccaccaggacccatcctacaaatgaagacttcattgatccatggcctcatctacctcacacttgcacagggctttattctttacatttaaattacgtatttgaaggcaggaattgctagttagcttttttttttt

SEQ ID NO: 204281 - DNA, 486 bp, Homo sapiens
tggcaagctggtgaactttctctaataagtcaaagatctgaggtcacaggccactggactagcccagaatcccaggagagacagtcacttgcaaagagagaaaggacacaagcaattgctcacttggagcagaggctgcaggataccaggaagaattcagctagaatatttcatgagtggaggctggtgagggcatagagcccttaaggggtacaggtgtaagagaaatttacacccttttgtgggtttcttctccatggaccacacttgacgagagccctatgaaagcattyttcatggtgctggcatgtggttggtggacagcagtcactgaaagataaacgttaagtaccaccaggacccatcctacaaatgaagacttcattgatccatggcctcatctacctcacacttgcacagggctttattctttacatttaaattacgtatttgaaggcaggaattgctagttagcttttttttttt

SEQ ID NO: 204282 - DNA, 401 bp, Homo sapiens
gctggtgagggcatagagcccttaaggggtacaggtgtaagagaaatttacacccttttgtgggtttcttctccatggaccacacttgacgagagccctatgaaagcattcttcatggtgctggcatgtggttggtggacagcagtcactgaaagataaacgttaagtaccmccaggacccatcctacaaatgaagacttcattgatccatggcctcatctacctcacacttgcacagggctttattctttacatttaaattacgtatttgaaggcaggaattgctagttagcttttttttttttttttttttttttttgaaacggagtctcgctttgtcgcccaggctggagtgcagtggtacgatcttggctcactgcaaccttcgcatcccgggttca

SEQ ID NO: 204283 - DNA, 401 bp, Homo sapiens
gctggtgagggcatagagcccttaaggggtacaggtgtaagagaaatttacacccttttgtgggtttcttctccatggaccacacttgacgagagccctatgaaagcattcttcatggtgctggcatgtggttggtggacagcagtcactgaaagataaacgttaagtaccaccaggacccatcctacaaatgaagacttcattgatccatggcctcatctacctcacacttgcacagggctttattctttacatttaaattacgtatttgaaggcaggaattgctagttagcttttttttttttttttttttttttttgaracggagtctcgctttgtcgcccaggctggagtgcagtggtacgatcttggctcactgcaaccttcgcatcccgggttca

SEQ ID NO: 204284 - DNA, 524 bp, Homo sapiens
ccctgctttggctttgaggaagctgccctctcctcaccatagcctatagatccacggcaccctcactgtgcccctgcacctcagaggagaagtctataccagggcctactccactacctggtacactgtttggccacgtgtcctgtgtaggtccagcctgggccaaaagactcaattctcaggtttttattagactcccccttctcaggcctagacattgagataatggaggagaaacccaactcagaagatgcccagtctcgaaatgggttccagcaatgtttcatatcttacttaaagtgagatctaccccagagacttggtggttcagtgggcaatcaatctctcccttcctccaacccctgacctcttttgcttaagctatttgagtcaggtctttaaaaactgcatggaaagatatctaaatagcatacactttcacggctattaaataagccaaagtgtaaaaatgataatgacygatctgttggcaagagcatggaaaaatagactctttcctacac

SEQ ID NO: 204285 - DNA, 538 bp, Homo sapiens
ccaagcagccttctcagcctaagctatccagcatggcagcctccagccttacggtttccttacttttcttattagtatttccaccacctgctgtattgcacgtatgtgtttccttctctttgttgccattagaacaaarccactgttcgttttgctgaatttttacctcacctctgcccactcagtccagcttgctgcccacactgcttccggccagaataaagtgcagtggagtaggtattagcagggctgagaggccatcctaggacacagtataaaggtcgttatatgcttagctaaggagtttgcttttataactctgggaggtgtccacaaacaaagcatacctaaattcacagctttaccaaacagcaagagctctggggaccaagagtaggaaaatttgaagtctagtcctagtcttgacttcaacaatttgagcctgcatcatgtaggcccaggtttctacgtctcatctgtcaagactagccagtgttgttgaacgaagatttataagtccttctagatctagtagatc

SEQ ID NO: 204286 - DNA, 574 bp, Homo sapiens
caaaaagcttttaactgtcccacattcttgagttttctgctgctggttataattctgcctcacccatagcctaagtccacatactcttgactgcaaagcctacagggcagagactgttccggttttattcatttattcatcaaagatttattgagtatcttctacatgccaggcactgaaccatattgcagagcagctcaggcacacgcrcacacacacacacacacacacacacacacacacgacacaatgaggaaaatatgctagaggcttatcaggaagcagaaaggagaggacatgtccccctcaagtggacatgggaggggcagcaagaaagaaagttgcagaatggagcttctttatcacatggcttggaggggcaagactttcccaaagcacttcctctcattcaaggaaacttccaactatgcaacctgtcatttgctgtcttcctataatttatcattattagtactcacctcccctctcccctgttttcattcattgctgtatctctagcatctttgaatactgtctggagcaggtaacgggcataccccattttatggcactt

SEQ ID NO: 204287 - DNA, 588 bp, Homo sapiens
ttcacttgtttatctgctgacattccctccactattgtcccatgaccctgccaaatccccctctgtgagaaacacccaagaattatcaataaaaaaataaattaaaaaaaaaaaaaaaaaaaaaaaaaagaaccgctgttgctggccaggcgcggcggctcacgcctgtaatcccagcactttgcgaggctgaggcgggcggatcacgaggtcaggagatcgagaccatcctggctaacatggtgaaaccccgtctytactaaacatacaaaaattagcttggcgtggtggcacgtgcctgtaatcccagctacttgggaggctgaggcagaaggatcgcttgaaccagggagttggaggttgcagtgagctgagatcatgccactgcattccagactgggcgacagagtgagactccatctcaaaaaaaaaaaaaaaaaaaaaaactgctgtcaccgagagtctgagccctaagagagagttgagggagagaagggaacctgtcgtgaggctaaggtgtcattaggttggatttaacagactctcctgttagcatccttcctgcacactgcctagcactgttagtga

SEQ ID NO: 204288 - DNA, 509 bp, Homo sapiens
agatcttttagaagcagtgaggttgaggaccttgacctggaggatgaggaggggcttgccgtttaacgatctgagagcaggaatgcaggtagtgaggtggtaggcaagggcagaggcccaggggccagtgagcttggctttttcaatacacagaagcttcaggaacatggcaaacaatacawgcagtaacattaacataggtaggtggtgtgcagtttatgtgcctgtaagaaatgtagtgctgacttgtaagagggtgttggcctcttttcagaatgaggccaacttttcattctattgggcatacaccagacttgagcacagagccaagtctatcaaccataacccccggccatctcaggggttcccctctgaattaagggaaggagatggaacatgttagccagaggcactcaacagttctaaaaggtgagtatccacagaaatgagacaaccagaagatatccagagtgagagggaagatggatataacgttatttttcttaaaa

SEQ ID NO: 204289 - DNA, 509 bp, Homo sapiens
agatcttttagaagcagtgaggttgaggaccttgacctggaggatgaggaggggcttgccgtttaacgatctgagagcaggaatgcaggtagtgaggtggtaggcaagggcagaggcccaggggccagtgagcttggctttttcaatacacagaagcttcaggaacatggcaaacaatacatgcagtaacattaacataggtaggtggtgtgcagtttatgtgcctgtaagaaatgtagtgctgacttgtragagggtgttggcctcttttcagaatgaggccaacttttcattctattgggcatacaccagacttgagcacagagccaagtctatcaaccataacccccggccatctcaggggttcccctctgaattaagggaaggagatggaacatgttagccagaggcactcaacagttctaaaaggtgagtatccacagaaatgagacaaccagaagatatccagagtgagagggaagatggatataacgttatttttcttaaaa

SEQ ID NO: 204290 - DNA, 508 bp, Homo sapiens
ccttgacctggaggatgaggaggggcttgccgtttaacgatctgagagcaggaatgcaggtagtgaggtggtaggcaagggcagaggcccaggggccagtgagcttggctttttcaatacacagaagcttcaggaacatggcaaacaatacatgcagtaacattaacataggtaggtggtgtgcagtttatgtgcctgtaagaaatgtagtgctgacttgtaagagggtgttggcctcttttcagaatgaggccaacttttcattctattgggcatacaccagacttkagcacagagccaagtctatcaaccataacccccggccatctcaggggttcccctctgaattaagggaaggagatggaacatgttagccagaggcactcaacagttctaaaaggtgagtatccacagaaatgagacaaccagaagatatccagagtgagagggaagatggatataacgttatttttcttaaaaaaaaatggttggggggttactcaaatca

SEQ ID NO: 204291 - DNA, 577 bp, Homo sapiens
ctggtttaaaacctgcctgtgtacaggtgcaagtacttggtaaaaacataatttgtgagactgagcaagccaaaagtcaagctgcatccagatattccaagaattatacattttattagaagaaatcagctcagatttgtctgacatctattcctgacagcaaatatgtatgctatttctatgcagttaatctaaaatcacttagcattacttagatttgattcaagtcttctcctcttactttactcatataatgactacagtgtgagttagagctttgcaggggtacacacacacacacacacacagacaagacacattatattagtgtgtttgagtgtgtgtatttctaaataggcttaaattcacatattcttggttaatgatgtgaaatgttttatttgtaaatttttccattgatasagcctagatcagttgttcttaaactttaatgaatataaatgttacctagggagtttattttaaaatgtagattcctgaactacaccatgaaaatcccaattttattaatctagagtaaggcccagagatctgcattttaataagcatctttggc

SEQ ID NO: 204292 - DNA, 553 bp, Homo sapiens
ctgaaaattctcacaggattctatcctcctatgagaagggagcatctattcacaatacgacagataataactgaatgggaccgaggcatagacaaatgcacattccccgatagaaatggtcacttatccaaatgaaatatttatccagaaactagaaatccactcttcattttaggatacaggattatttttgtcacagaattcctgtttatattcctgcctttcttttttctttgtattcttttatttccagaatatttctgttttgaaaattttaaaaggtgaaatgacaggaaatggagaatgcttttattcaaaaaacaggcaaatgttatactggtgttctttctacatggcatatgccttttgatattagttcaaggtcgactgggctttggcaaaataatggaagtcagaaaattccaagtttagtcatgtatagagcaacaggttaatatgtaactgttaygatgaagtgtagatatgaatagtatttatgtagaatatcttgcagccagaagctgaagaataggctatgtaattagaaagtagc

SEQ ID NO: 204293 - DNA, 490 bp, Homo sapiens
gtgctgtgtttggcccaggtgaagcatctgggattctgccaccaagcccagctcagacacccaaactcttcttaggtaggagagtggcaggaataggctttttcttgcagaaagaaattgggctattctgtaggattctgtaagataaaaaaaaaaaaaagactttcaatttccagtaacaatttatattttaatattggctaaatgtatctgtttttcaataaaatttcccttaggtayataaaagctcctgatgaattacaagtgaacacacagaaaaatgtggtatctatatacggaagtcactgcacatgtcagagaaatactgatcatggtttacatcgtcattcaaaaagtcattggacagcccagcaaaattcttagacctcaaatttactatgcattcaacattgcattcatttttcacagatgctgcttgtgataaggcctattctgctgtccatgactgccatatcccaacgaaactgct

SEQ ID NO: 204294 - DNA, 393 bp, Homo sapiens
gaaacagtcttcacactatgaaatggtaaaaagtcaccccaaaaagagagctgtgcagcagatgtggagagcaaccagtcacaatcaaaacagaaaatacactgcgatgagacgtagctcttaaggaagggagaagagggaaattttgcatttttaacaagtttccaggtgctgctgatgcttctggttttggatctgcactttgaggaccatcatcctagggcatcrgtggcctctgtggctgaaggctttttgctgactacaggggtacagcaacttagttacagccaagccacaagtgccctggaattaacagccctcaacgtggaggaagtcactggataaataccctcactttcatgcctttaggtaggagaactctgaatctccaga

SEQ ID NO: 204295 - DNA, 539 bp, Homo sapiens
tgcaaaaacatttctgtcttatcctaagagtcttccccttgttcttgctcgtgcaacagagtaacatgtcttggagttgtttaaatgccaatcttccccattaattatggatcattttatgacaggaagtcactttacccagaattgagcatgtatccctgcagattagtgaggacttaataagtratttaatgcacacttccattctccctaaacaatgactttccagctctatctaaatctgtaactatttttccctactcacataaatactgcacacttttttaaaaaaagagtattctgaacctttaattggagtataacaagtttaaataagggagaaaactcagtgaaatttcaaatttcgtatctttgttagtttaattaatcacttaaacattatttgcaacaagcgttttgctaggctttatgtggctagtggtgaatgaaacaaaatcctcactttaagagtttatcaagtggaggaggcaaaccagagagaagtaaagagtattttaaaaatgtgaaatacattaaaa

SEQ ID NO: 204296 - DNA, 539 bp, Homo sapiens
tgcaaaaacatttctgtcttatcctaagagtcttccccttgttcttgctcgtgcaacagagtaacatgtcttggagttgtttaaatgccaatcttccccattaattatggatcattttatgacaggaagtcactttacccagaattgagcatgtatccctgcagattagtgaggacttaataagtaawttaatgcacacttccattctccctaaacaatgactttccagctctatctaaatctgtaactatttttccctactcacataaatactgcacacttttttaaaaaaagagtattctgaacctttaattggagtataacaagtttaaataagggagaaaactcagtgaaatttcaaatttcgtatctttgttagtttaattaatcacttaaacattatttgcaacaagcgttttgctaggctttatgtggctagtggtgaatgaaacaaaatcctcactttaagagtttatcaagtggaggaggcaaaccagagagaagtaaagagtattttaaaaatgtgaaatacattaaaa

SEQ ID NO: 204297 - DNA, 539 bp, Homo sapiens
tgcaaaaacatttctgtcttatcctaagagtcttccccttgttcttgctcgtgcaacagagtaacatgtcttggagttgtttaaatgccaatcttccccattaattatggatcattttatgacaggaagtcactttacccagaattgagcatgtatccctgcagattagtgaggacttaataagtaatttaatgcacacttccattctccctaaacaatgactttccagctctatctaaatctgtaactatttttccctactcacataaatactgcacacttttttwaaaaaagagtattctgaacctttaattggagtataacaagtttaaataagggagaaaactcagtgaaatttcaaatttcgtatctttgttagtttaattaatcacttaaacattatttgcaacaagcgttttgctaggctttatgtggctagtggtgaatgaaacaaaatcctcactttaagagtttatcaagtggaggaggcaaaccagagagaagtaaagagtattttaaaaatgtgaaatacattaaaa

SEQ ID NO: 204298 - DNA, 575 bp, Homo sapiens
gtcttccccttgttcttgctcgtgcaacagagtaacatgtcttggagttgtttaaatgccaatcttccccattaattatggatcattttatgacaggaagtcactttacccagaattgagcatgtatccctgcagattagtgaggacttaataagtaatttaatgcacacttccattctccctaaacaatgactttccagctctatctaaatctgtaactatttttccctactcacataaatactgcacacttttttaaaaaaagagtattctgaacctttaattggagtataacaagwttaaataagggagaaaactcagtgaaatttcaaatttcgtatctttgttagtttaattaatcacttaaacattatttgcaacaagcgttttgctaggctttatgtggctagtggtgaatgaaacaaaatcctcactttaagagtttatcaagtggaggaggcaaaccagagagaagtaaagagtattttaaaaatgtgaaatacattaaaaggaacaaacaataaattaaaataaaaaatatggggtgagacatatttagatttagtgtttggaga

SEQ ID NO: 204299 - DNA, 537 bp, Homo sapiens
aaatctagtattttacaaaattgtacagttttccagggattgtgcaagaagaaaagttttcattaagaagtaatatgaatgtttcggctctgtcttttaaatatttcaaaaatatttttacatttttaatatacaaggacacaacagaaatgtaaagagactagacttggcgtaaaaccaaaagtcaatttccaactcatgtgcttttatttgtgtaaattcacagagtccccaagtatttcagaagaatacaattattcatgttatgaatcaaattatggtggggttaagtaaaattaaaattcatgtccttrgtaaacatattaattcaaatcttgccatgtaattagaatgctgaattattagatggagattagatgagtttttcttggaagaatgaatattcaccatatatcccaagacacattccaatttcatcaacattctaaatgtgctcttatcttatcactgtgctctcctgatttataatattttccttaaccacacttcctatattttaacaaactctatgtctat

SEQ ID NO: 204300 - DNA, 493 bp, Homo sapiens
acattttcccccacaaaggacagctttgcagggacatttcaaaagatggcaaaaaaacatgttttggggtaaaaaattttgatttttttccttgtctcawaatgttatgccagagtcaggatggaaactaactcccaataaatagatttaaataaaagccatttgatgagaatttatggtttgtagggcatgactccccaaaccctttcgataaaaaagtggtcaagattaaaaaaaaaaaaaaaaaaaaaaaaaacttattcctcaacagtcatgttctgaaattaattgtcttttttttttaaacaatgtactgtattagtcagggttctctaggtggacagaattaatggaatttattctaaactaaaggggagtttattaagtattaactcatacaatcacaaggtcccacaataggctgtctgcaggctgaggagtaagaagagctggtcggagttcccaaactgaaaaacctggagtctgatgttcg

SEQ ID NO: 204301 - DNA, 536 bp, Homo sapiens
atttataaaatcttcagtcttttatagtaatgtactagggcttcacattcacccaccactcactcacttacccactcagagcaacctctagtcctgcaagctccatttatgtcaagtacaattttttaccttttatgctgtatttttactgtaccttctctgcatttagatgtttctatgcatgaatacttatcattgtgttataattccctgcagtatttagtacagtascatgctgaataggtttggaacctaagagcaatcggttataccatatagcctaggtgtgtagtaagctataccatctatatttgtgtaagtgcactcatgttgttgtacagtgatgaaattgcttaaggatgcatttctcagaacatatattcatttttaagtgatgcatgactattccaaaagtgaaatgccagataaacactttagtatggtactcaggaacctccataatattggcctgataaaatgtcttaccagcttcatatttactattttttttccaatttcataatccagttatttta

SEQ ID NO: 204302 - DNA, 519 bp, Homo sapiens
atagcctagcatgcaagatctttgatgatctctgagcaarttttatttggccaacttaactccctccatttatcccacacacatgagcgctaggtgaatcggtattcccaaaccatgaatcacctcccaattcctgtgtctttcacctgcagttccgtgtaccagacatggcttttgccatttgcttccaatgacctcctgttcgtctttaagttccacctcattgttgctctcccgtaaactcctttctcttcgctcatagcataatgaattactcttccctttgtgttttcatagcattttgcatattacattttattgcggtgattttgtgtctgatgctgcttattaaactgaagtatttcaggtttaggataaagactaatttatctttgtggcctgtatgtgcttttcacagtacactgcatatagtggttttcaataaacatttgatgaatgaaggaagatagtttttaaaatatgcaatggcattgtcaatcccttcaaggtattctttta

SEQ ID NO: 204303 - DNA, 519 bp, Homo sapiens
atagcctagcatgcaagatctttgatgatctctgagcaagttttatttggccaacttaactccctccatttatcccacacacatgagcgctaggtgaatcggtattcccaaaccatgaatcacctcccaattcctgtgtctttcacctgcagttccgtgtaccagacatggcttttgccatttgcttccaatgacctcctgttcgtctttaagttccacctcattgttgctctcccgtaaactcctttctcttcgctcatagmataatgaattactcttccctttgtgttttcatagcattttgcatattacattttattgcggtgattttgtgtctgatgctgcttattaaactgaagtatttcaggtttaggataaagactaatttatctttgtggcctgtatgtgcttttcacagtacactgcatatagtggttttcaataaacatttgatgaatgaaggaagatagtttttaaaatatgcaatggcattgtcaatcccttcaaggtattctttta

SEQ ID NO: 204304 - DNA, 562 bp, Homo sapiens
tttctaagaaactgtgaggtttttttttttttgtcataatgggatatagaagtatacttcacccataggggaatgggaaaaatagtgatcatttgctgaacgatattaagtagtataaaaactttatctgaagatagtcttaaatagaagagggtgcataacattcctaagtaaggaggaaccattaatggaagaaactaggcaatatttagaaaactttggctgttgcacatctaaaagttcaagggcttgggagaatttacaacaactagaattcctttacttgatgtcactagtcagcttgctaaaagtagactgatcagaatggactttttgtgagccagtagcgaatcaactcattgtaatatacaaaccaagacttactattcccaagtcgtctttgggttatatttttctcttctctctattcaagttgagatcttttcttttattctktagttattactgttttcctcttttccttctattttggaattcccctcaatttgcaaatggttgagctattttttaaacaaacttcttgtgtgacaaaagtcctgaa

SEQ ID NO: 204305 - DNA, 581 bp, Homo sapiens
gaatactatgaaaagttttatgccaacagattaaataacctgtatgaaattgacagctttcaagaaacacaaaatccatctaaaactgagtcaaaaagaaatagaaaatctgagcagaagtataactgattcaagaaattgaatcagtattcagaagttatctgttaagaaaagtccagaaccagatggcttcacatctgaatgctaacratgatttaaataatttaaatccaaacttctcaaactctttcaaaaaatagaaaaggagggaacacctcctaacattaactgagttaagcattgcctttgaaatctccgttgcaaaattataactgtgacagtgaaagagatctgacctaacaatctccatcttgcctctaacctccaagctgtccttgttcattcctgggtgtaggctgaattaactttgagaggaactttatttatagttcatacgttgaaacaaagattataataaaccttgctgcaaacaaaccctcttcttgtctggagactagactgcctttgtaggactaacaaattagccaaaagattagaaattatagtttaggagctgaagg

SEQ ID NO: 204306 - DNA, 485 bp, Homo sapiens
aatttcatgtcattttttgaaagcagtgcttgttttataatttatgaagtattacgatgcattattttctgataagatgtgtgaaggaacaaaatcccctgaaaccgtttcactgttagaataaaaattgtactgcccagtgactatcctgacctgctaattgcttcaaaatctgaattcatatttataatcacattttctaaggtatgtacatgctatgaacctttctttctagtgtctttcattacatgaagtgatatatgaggtactctgaagaaaatcaaagttttggcaagatatttttcaatagaatacttctacatacattattcatttttgaaaagatattagtaaaagaataacaggattattctttgtgctataargttctatagattttcacaaatgtttaatgttttgtattatacagaatagtttcactgccctatattatcctaggatggaattcagaatgtgataaaaga

SEQ ID NO: 204307 - DNA, 455 bp, Homo sapiens
gaagctcttctattctatgattttctgcaagttgcttatgctttatgaatatcatttctcttatctataaaatggaaaaaatagcactatgaatgcagtagactgaatgcaaaaacttcattttaattatagctatcattaattgagyatgtattacatgtctagaatgaaactaattgctttacaaggtttattttattaaattttaattacaaatataaaagacttgctgaaattcagcttcttctattgctgaaaaataactttaactagtcattcaaaagtgttacgagccctaataaacattcagtttttactaactcttagtttccctgagcgtccagtgttgcctaacattataaatatttcacttatgtcctctagtgattgtgatgattaattttatatgtcaatttggcttgacaatgttgcttaggtttttggttagacattag

SEQ ID NO: 204308 - DNA, 619 bp, Homo sapiens
ccttttaaagtatgtctttcatttaatagaactagaatttccccactcttgtgtccttttatatcagctatttataccaatgttttctaaagaatcacaattttacctcatctgtttgtcagcctaaagctctcagtcttcaccaaagtatgcataggaaaataacttgattgataatgattgtatatctgactctgtctccaagttaactcatatttctttaatagatggaaacattttccatgttcatatgtacatgcacaatgtgcagcctgtgtgtgtgtgtgtgtgtgtgtgtgtgtgtgtgtttcgggaagtgcttattagcacttcaaaragtaaaagctaaaactggtggactattacaagggttttaagttatagaattaacatgttccacaagaaaacatacattcaggtttgaataaaagtcttttttcatatagagggttatctatctgcaataatttaacagcaaatgctattgtgatttatgaacatggaaaagtgtggacattttttaaactgtcaaaaattaaaataatgagagttaatatagaaggcaaaactaattcacattaattattttagactgtgtccttattgattattgtactca

SEQ ID NO: 204309 - DNA, 625 bp, Homo sapiens
cttttaaggccacagatctgagcttttgcacttcattacaaaatttaagttaataatgctgtggctattttgtgttagaggtagaaaaagcctggttttgtgtaataaagtaatgtcagaattctgtcatgggccagttagacaggtaaaaagagtagtctcagctgttattttatttgctgtaaatcatagtaatatgtcatattggcagattggctgtgaaagtatattttctaagcaatatttaaaatgacttatggaacaaagtttccatagaacattagggagtttcactgattgtctacccttttccttataattccagttctcaattgctagtgatgagaaactacatttaaaattactatcaggtttttgcattgaacgcaaatatgaaagggaataaggcttgtattataacctcacctgacaggctaatgtttagccgcacaaagctgttggtatttaattactgtaacattttaactttaaataagacatgagttktttaggggtagtgtctttatgtaatacagcttactattgactttgaatttagacttaatacccggtaaaaaaaatcttgtttaaaatatgttataactgttagaactcctaagatcga

SEQ ID NO: 204310 - DNA, 234 bp, Homo sapiens
ccaaataagtcagtttaggttaaaaatcaataacaatttctgtaaaacaaaaagagcaagctaccagtaagtatgattttaaaataaaatattactgattcactccaacttayaaaaactcactctttcttttttttttttttcacaaagaagtttctcagaatgcttctgggtagttgtttttttttaattattattattattatactttaagttttagggtacatgtgcaca

SEQ ID NO: 204311 - DNA, 609 bp, Homo sapiens
aatcaataacagaataatagttaaaaaataccacaatacttggagatttaaaaatatagttctaaaaatacatgggtcaaagaaaaaatattagataaattttaaaacattttaaagtatacaagagtgaaaatacaacttaccaaatgtgggaggcagtgaaagctgtgcttagatgaaaatttatakcattgaatgcatatatatcagaaagaaaaaaaatctaaaatcaataatataaatgtccaccttagaaaaccagtaaaagaagagaaaaattaaatccaaagtaagtataagaacaaaaataataaaaacaagaccagaaatcaatgaacctgaaaacaagaaatgaaaagagaaaattaacaaaatcaagtggtggttttttgaaaagatcaataaaattgaccctttagctatgctaacagaaaaagagagaaaacacaaattcctagtatcatctctacagagtccataaaaattaaaagaataataaataaatactatggagaactctatgcctacacattttatcttctcaataaaatgaacgaatttcttgaaagacataatctgccaaaactcacagaagaagaaatagacaat

SEQ ID NO: 204312 - DNA, 433 bp, Homo sapiens
aatcttcaacaaattatgagtaaatcacatccaataatgtataaaagaaattaaaaatcacagtcwgtgagatttgttcaggtatgcaggattggttcagcatttggaaatctattaatacaatccatcacaacaacaggctaaagaggaaaactacatgatcatataaatagatacagaaaaatcatttgacaaaattcagtacctattcatgataaaaactctaagcaaactaggatagaagagaatttatttaacttaataaagagtatttacaaaaaaccttgcaactaacctcatatttaatggcgagaaactaaaagcttctccactaagatcaggaacactttattggaagtcctagctaatgcaataacacagaaaggaaaataaaaagtatacagttttgtgaggatgaaataaaactgttttt

SEQ ID NO: 204313 - DNA, 582 bp, Homo sapiens
attaactcacatgtttaccagagagagaataaaatcaggccaagtgtggttcaagtctgtaatcccagcactttgcgaggctgaggtcaaaagtacgagaccaacctggccaacatggtgaaacctcgtctctactaaaaatacaaaaattagccaggcgtggtggcacacgcttgtagtcccagctacttgggaggctgaggcaggagaatcacttgaacccaagaggcgaaggtcagagtgagccaagatcgcaccactgcacaccagcctgagtgacagagtgagactccatctcaaaataaaattaaaaaaaragagagagagagagaataaaatagatatcaaagttgaatttcaaaactttagaggtgaaattatctttcattaaccaaagagaagggaaacaaggaatgtagcccctaaattatttcggttaaggctgtaatttgttctgctggagcaataaggcattaaaatgtcattttttttctgcaagtatgcttttgttaaagaaatccaccaatttctagagacctaaaacttactattaaatatccactccattaagttaaaggagga

SEQ ID NO: 204314 - DNA, 582 bp, Homo sapiens
attaactcacatgtttaccagagagagaataaaatcaggccaagtgtggttcaagtctgtaatcccagcactttgcgaggctgaggtcaaaagtacgagaccaacctggccaacatggtgaaacctcgtctctactaaaaatacaaaaattagccaggcgtggtggcacacgcttgtagtcccagctacttgggaggctgaggcaggagaatcacttgaacccaagaggcgaaggtcagagtgagccaagatcgcaccactgcacaccagcctgagtgacagagtgagactccatctcaaaataaaattaaaaaaaaagagagagagagagaataaaatagatatcaaagttgaatttcaaaactttagaggtgaaattatctttcattaaccaaagagaagggaaacaaggaatgtagcccctaaattatttcggttaaggctgtaatttgttctgctggagcaataaggcattaaaatrtcattttttttctgcaagtatgcttttgttaaagaaatccaccaatttctagagacctaaaacttactattaaatatccactccattaagttaaaggagga

SEQ ID NO: 204315 - DNA, 581 bp, Homo sapiens
cctattcagccagcagtgttggcttcatagagagatgtaatggtgaatctgaggagccagacctggacctcttgcctcaattcygaaaaactctgaaagccatctcaatttctgctctcactgtgggattggcagaccctcttgttgagtcaccatcacaacttagcttcttctaccaaagtttgcctccatctcccttctgggtgtgcgtttttagagcatttcctagtaaatatccttcacacaaatctcagagtcctattcctagggaagccaacctaaaatgacacacaaaatgtatttatatattagcaaagagagttaaaaaatgaaattaatcacaatatagattacaatatcttcaaaaatcaaatttgtaaaacccaaatttgtaaaaatcagatttgtagactacaataccaccagaattcaaatttataaaataatctaatgaaaaatacactgaaacaagaaaaactatgaaacatgaatgattctaatttatttccaggtaaaatagaacatcaaagataaatggattgggagaaaagggagatgttaaaaagtatggaggagattga

SEQ ID NO: 204316 - DNA, 581 bp, Homo sapiens
cctattcagccagcagtgttggcttcatagagagatgtaatggtgaatctgaggagccagacctggacctcttgcctcaattctgaaaaactctgaaagccatctcaatttctgctctcactgtgggattggcrgaccctcttgttgagtcaccatcacaacttagcttcttctaccaaagtttgcctccatctcccttctgggtgtgcgtttttagagcatttcctagtaaatatccttcacacaaatctcagagtcctattcctagggaagccaacctaaaatgacacacaaaatgtatttatatattagcaaagagagttaaaaaatgaaattaatcacaatatagattacaatatcttcaaaaatcaaatttgtaaaacccaaatttgtaaaaatcagatttgtagactacaataccaccagaattcaaatttataaaataatctaatgaaaaatacactgaaacaagaaaaactatgaaacatgaatgattctaatttatttccaggtaaaatagaacatcaaagataaatggattgggagaaaagggagatgttaaaaagtatggaggagattga

SEQ ID NO: 204317 - DNA, 581 bp, Homo sapiens
cctattcagccagcagtgttggcttcatagagagatgtaatggtgaatctgaggagccagacctggacctcttgcctcaattctgaaaaactctgaaagccatctcaatttctgctctcactgtgggattggcagaccctcttgttgagtcaccatcacaacttagcttcttctaccaaagtttgcctccatctcccttctgggtgtgcgtttttagagcatttcctagtaaatatcctwcacacaaatctcagagtcctattcctagggaagccaacctaaaatgacacacaaaatgtatttatatattagcaaagagagttaaaaaatgaaattaatcacaatatagattacaatatcttcaaaaatcaaatttgtaaaacccaaatttgtaaaaatcagatttgtagactacaataccaccagaattcaaatttataaaataatctaatgaaaaatacactgaaacaagaaaaactatgaaacatgaatgattctaatttatttccaggtaaaatagaacatcaaagataaatggattgggagaaaagggagatgttaaaaagtatggaggagattga

SEQ ID NO: 204318 - DNA, 581 bp, Homo sapiens
cctattcagccagcagtgttggcttcatagagagatgtaatggtgaatctgaggagccagacctggacctcttgcctcaattctgaaaaactctgaaagccatctcaatttctgctctcactgtgggattggcagaccctcttgttgagtcaccatcacaacttagcttcttctaccaaagtttgcctccatctcccttctgggtgtgcgtttttagagcatttcctagtaaatatccttcacacaaatctcagagtcctattcctagggaagccaacctaaaatgacacacaaaatgtatttatatattagcaaagagagttawaaaatgaaattaatcacaatatagattacaatatcttcaaaaatcaaatttgtaaaacccaaatttgtaaaaatcagatttgtagactacaataccaccagaattcaaatttataaaataatctaatgaaaaatacactgaaacaagaaaaactatgaaacatgaatgattctaatttatttccaggtaaaatagaacatcaaagataaatggattgggagaaaagggagatgttaaaaagtatggaggagattga

SEQ ID NO: 204319 - DNA, 391 bp, Homo sapiens
atgaaaaatacactgaaacaagaaaaactatgaaacatgaatgattctaatttatttccaggtaaaatagaacatcaaagataaatggattgggagaaaagggagatgttaaaaagtatggaggagattgaactagagatgtttagaaataacaaataaaatggaaaggctggcaagatctaagtttgggtcagaaaaagatactgtagttaagaatttcataawggatgagttccagatgacaaatttctagcttcaccctttcacaggctatttcttctgactggtgttttcttcttttctttgatctcttagcttactcctaccagttcttaaagatttagattaaaaatttagttagcatactaccctcacccttgagtgaacattt

SEQ ID NO: 204320 - DNA, 499 bp, Homo sapiens
gaattcaccagtaatacatatttgagaactttcaagttaaaaaaacacttttcaatttttttcctagtaaattatatcagaatgaatcactatgcaccagaagtttcttctaaagcctgactgaagtcataaattagtctgaaagttatactgtgagaaatttacccacatttctactaaacaaaagctaattttcttacagcttgtgaaatatakaacatgacatacccttccttcctgtactttggttaaccagtacttttttctttattctcagaacatacctcgactctaattcttaccgcaaactaaagtgatgcttgctccgtcccttccctgccccttttttgcatttgaggtctactgtcatacagcagtgttacacttctgtattaaagtcacaagaaaagcaaatgatctatggtctgctttcccgtatgacctatgtcattctgtgtagttctcaaagcattttttcaccttgtagaagatttcaaag

SEQ ID NO: 204321 - DNA, 499 bp, Homo sapiens
gaattcaccagtaatacatatttgagaactttcaagttaaaaaaacacttttcaatttttttcctagtaaattatatcagaatgaatcactatgcaccagaagtttcttctaaagcctgactgaagtcataaattagtctgaaagttatactgtgagaaatttacccacatttctactaaacaaaagctaattttcttacagcttgtgaaatatagaacatgacatacccttccttcctgtactttggttaaccagtacttttttctttattctcagaacatacctcgactctaattcttaccgcaaactaaagtgatgcttgctccgtcccttccctgccccttttttgcatttgaggtctactgtcatacagcagtgttacacttctgtattaaagtcacamgaaaagcaaatgatctatggtctgctttcccgtatgacctatgtcattctgtgtagttctcaaagcattttttcaccttgtagaagatttcaaag

SEQ ID NO: 204322 - DNA, 471 bp, Homo sapiens
gaattcggagactgggtaatttatgaacaatggacatttctttcttgcagttctggaggctgagaagtccaaggtcaaggtgctggattcccgtgcctggggagggcggctctctgcttccacgatggcgccttgagctctgtgtccccccatggcgggaggcaggacagcaaaagggagctgaggtgtgaagcctcttacacaggccttaatcccrctcacaggggaggcgccctcatgacccaattacccggaagggccccacctcttaatacgctagactggggattcggtgccaataggggttttggagggacacgatgttcagaccacaacagtgggcaccctccctctcaggttgcactcttaacactcttaagagacttctgtttctcacagcaaatcctctcgcttgaacctggagggaccaaaggcatgaccggagccgcattctctggcgtcagtttgtat

SEQ ID NO: 204323 - DNA, 451 bp, Homo sapiens
aatggacatttctttcttgcagttctggaggctgagaagtccaaggtcaaggtgctggattcccgtgcctggggagggcggctctctgcttccacgatggcgccttgagctctgtgtccccccatggcgggaggcaggacagcaaaagggagctgaggtgtgaagcctcttacacaggccttaatcccactcacaggggaggcgccctcatgacccaattacccggaagggccccacctcttaatacgctagactggggattcggtgccaayaggggttttggagggacacgatgttcagaccacaacagtgggcaccctccctctcaggttgcactcttaacactcttaagagacttctgtttctcacagcaaatcctctcgcttgaacctggagggaccaaaggcatgaccggagccgcattctctggcgtcagtttgtatttttgtca

SEQ ID NO: 204324 - DNA, 444 bp, Homo sapiens
gatcaggctatttgtattagttcattctcacgctgctaataaagacatacctgagactgggtaatttataaaggaaagaggtttaactgactcacagttcagcatggctgaggaggcctcaggaaacttacaatcatggtggaaggggaagcaaacacatccttcttcacatggcagtagcaaggagaagtgctgagcaaaaaagggagaagccccttataaaaccatcagatctcatgagatctaastcactatcatgagaacagcatggaggtaaccacccccaatgattcaattatctcccaccaggtccctaccatgacacaaggaaattatgggaactacaattcaaatgagatttaggtggggacacagccaaatcatatcattccacccctggcctctcccaaatcttctgtcctcacatttcaaaatacaatcatg

SEQ ID NO: 204325 - DNA, 462 bp, Homo sapiens
tgtgtggggcctgtagcccctttttggcttatttctcccctttgaaatgagaatatatattacttaatgcctgtacccccattgtatcttggcattcactagactgttttttattttataggcctatagcgggaagagactagccttttctcagatgcaactttggactgtggactttcgagttaatgctggaatgggttaaatttttccattaagtcttacatctgttgtataggcatgattatatcttgccatgttagaaggacatgagattttggaaaagccagggtcagaaggaaacgttcaaatctgtgtycctgccccaatctcatgtttaattgaaatccccagtgttagaggtggggaatggtgggaggtcattggatcatgagggcagatttcccccttggtactgttgttataataatgagtgagttatcatgatatacggttgtttaaaag

SEQ ID NO: 204326 - DNA, 601 bp, Homo sapiens
ttctttcttcttcttggtctattctgctatccatacttgtgatttcatcgtgaaactctcatgtgtttttcagctccattaggtcagttatgttcatctttaaactgactattttggctatcagctcctgtattgttttattatgattcttagcttcttttcattgggttacaacatgcccctttagctgagaaaagtttgttattacccaccttctgaagcctacttctgtcaattcagccatctcagcctcagaccaattatgcacccttgctggagaggtgttgcggttatttggagaaaaagagacactctgtcttttggagtttgcggcatttttgtgtttattctttatcgtttttgtgggcttatctacctttaacctttgaggttgttatctttgaaygggtttttttgggggtcttttatgttgatgttgttcctgtcatttttttttctgtttgtttgtctttcttttaacagtcagtccattctactctagggcttctgcagtttgctggggctctgcttcagaccctagttgccttgggctctcctaaacctggaggtatcaccagtgaacgctacaaaatagcaaaga

SEQ ID NO: 204327 - DNA, 567 bp, Homo sapiens
aagcttccagaggaaggatcagccagcaacatttgctgttgtgcagtatttgctgttctgcagcctctgctggtgatacccaggcaaacarggtctggagtgaacctccagcaaactccaacagacctgcagctgagggtcctgactgttagaaggaaaactaacaaacagaaaggaatagcatcaacaccaacaaaaaggacatccacaccaaaaccccatctgtaggtcaccatcatcaaagacaaaaggtagataaaaccacaaatatggggagaaaccagaacaggaaagctgaaaattctaaaaatcagagtgcctcttctcctccaaaggaacacggctcctcgccagcaacagaacaaagctggagggagaatgactttgatgagttgacggaagtaggcttcagatgattggtaatatcaaacttctctgagctaaagtaggatgttcaaacccatcacaacgaagctaaaaaccttgaaaaaagattagatgaatggctaactagaataaacagcatagagaagaccttaaatgacctgatggagccgaaaaccatca

SEQ ID NO: 204328 - DNA, 567 bp, Homo sapiens
aagcttccagaggaaggatcagccagcaacatttgctgttgtgcagtatttgctgttctgcagcctctgctggtgatacccaggcaaacagggtctggagtgaacctccagcaaactccaacagacctgyagctgagggtcctgactgttagaaggaaaactaacaaacagaaaggaatagcatcaacaccaacaaaaaggacatccacaccaaaaccccatctgtaggtcaccatcatcaaagacaaaaggtagataaaaccacaaatatggggagaaaccagaacaggaaagctgaaaattctaaaaatcagagtgcctcttctcctccaaaggaacacggctcctcgccagcaacagaacaaagctggagggagaatgactttgatgagttgacggaagtaggcttcagatgattggtaatatcaaacttctctgagctaaagtaggatgttcaaacccatcacaacgaagctaaaaaccttgaaaaaagattagatgaatggctaactagaataaacagcatagagaagaccttaaatgacctgatggagccgaaaaccatca

SEQ ID NO: 204329 - DNA, 562 bp, Homo sapiens
acaatggctgaactaatttgcattcccaccagcagtgtgtgtttcctttttctccacaacttcaccagcatttgttattttttgacattttaataatgccattctaattggtgtaagattgtatttcattgtagttttgatttgtatttttccagtgattagtgacattaagygttttttcatatgcttgttgctcacatgtatgtcttcttttgaatggtgtctatttatgtcctttgaccactttttaatgagtttggttttttttttgcttatgaattagtttaagttccttatagattctggatattagacctttgtcagatgcatagtttaaaaatattttctcccattctgtagactgattgtttactttgtggatagtttattttgctgtgcagaagctttttagtttaggtcctatttatcaatttttgtttttgatgcaattacctttggcatctttgtcatgaaatatttgcctggttttattcaaaatggaatttcctaggttatcttccagggttgttatagtttcaggtttcatagttaagtcttcaat

SEQ ID NO: 204330 - DNA, 550 bp, Homo sapiens
ggtaagtaaagaatgtcacttctgacaggccaaggagctccaagtttatcttgggaccataagagaagaggattacccaactaacaggtatttgaggatacaaacccatggctgggctcagctttaaaaggtcttatctgagattccttgtggaacagagttccatcaaagccaatctaaaaggcctatgtagaaataatttttcttgcagcagtttacgtgaataatcaggccaagtataagactaaagtctattttgcaaacaactcagccctatcatgatttgttttttaacaaaaataagggctgcagagagataaattatgtttcaaacgttataaatttgtcattgaattttasagtcattagttgttttcaagattttgcctagattttagactaaccctacttgttcctgtgaaccaaccagcaatctctggctgcagctcagaaagaacaaaagggatgggtgatgtaaaaatctggatcaatattctagttctgagcaattatcttgcagatcctgccaggtgatgggaataaatagggt

SEQ ID NO: 204331 - DNA, 502 bp, Homo sapiens
gctgcacagtccctcatggttttccttggctcaggtagggagttccccaaacccttgcacttttgggctgaggcaatgcccactctgcttcagctcaccctctgtgggctgcacccactgtctaaccagtmccaatgagatgagcctggtacttcagttggaaatgcagaaatcacctgtcttctgcattgaggtgggagctgcataccagagctgttcctattcagccatcttgccagccacctccaaaactgatttttaaataagcaacagtaaaagtgtgcaaagaaggatgttacataatgataatgggtccaatttacaggatgatttaattctactaaatatattcatacccaacattcaagcatccacattaataaaacaagtacttttaaatctacaaaaatacttaggcagtcatgcaataataatggaaaattttaacatcccagtgacagtattagatagatcatcaaggcagaaaactaatgaataaatt

SEQ ID NO: 204332 - DNA, 502 bp, Homo sapiens
gctgcacagtccctcatggttttccttggctcaggtagggagttccccaaacccttgcacttttgggctgaggcaatgcccactctgcttcagctcaccctctgtgggctgcacccactgtctaaccagtcccaatgagatgagcctggtacttcagttggaaatgcagaaatcacctgtcttctgcattgaggtgggagctgcataccagagctgttcctattcagccatcttgccagccacctccaaaactgatttttaaataarcaacagtaaaagtgtgcaaagaaggatgttacataatgataatgggtccaatttacaggatgatttaattctactaaatatattcatacccaacattcaagcatccacattaataaaacaagtacttttaaatctacaaaaatacttaggcagtcatgcaataataatggaaaattttaacatcccagtgacagtattagatagatcatcaaggcagaaaactaatgaataaatt

SEQ ID NO: 204333 - DNA, 502 bp, Homo sapiens
gctgcacagtccctcatggttttccttggctcaggtagggagttccccaaacccttgcacttttgggctgaggcaatgcccactctgcttcagctcaccctctgtgggctgcacccactgtctaaccagtcccaatgagatgagcctggtacttcagttggaaatgcagaaatcacctgtcttctgcattgaggtgggagctgcataccagagctgttcctattcagccatcttgccagccacctccaaaactgatttttaaataagcaacagtaaaagtgtgcaaagaaggatgttacataatgataatgggtccaatttacaggatgatttaattctacyaaatatattcatacccaacattcaagcatccacattaataaaacaagtacttttaaatctacaaaaatacttaggcagtcatgcaataataatggaaaattttaacatcccagtgacagtattagatagatcatcaaggcagaaaactaatgaataaatt

SEQ ID NO: 204334 - DNA, 620 bp, Homo sapiens
gtacaggctataccactgtggtctgctcactcttagtgatgcgtgagtaatgctccctggactccccaggttctagtcttctcatgtcgatgtagttgattccacttcccttgctgcacaaccaggctgggatgcctgggcagaggcagacatgtgaggtakaggggttcaaatctgtttccaagttttatccagatcccaagtatttcttcacgtacatgggcggtggcttggcaggagatgcagattctctctcctggaagtgaggcaaggaggctggcgtctgggtaaggatgatgtccccacatactgctaaagagtcaaagaggaaagtggcatcgatggtgcagggcagagacatgcactgagtagctgctgccctcactgaagagaaagtgttcactgacttggcctttccccagggcctctccctcccctgctttccagaaagcccagttttttgggagctgtacctgaacacctgggaacattccggtgggaaaggcagctcagagcattagcaatggtaagttaccttgttcttcttcctgtggagacaattgatcatatgggtcagcaagacggaggtgctgtccatttagtccctggttattacagag

SEQ ID NO: 204335 - DNA, 620 bp, Homo sapiens
gtacaggctataccactgtggtctgctcactcttagtgatgcgtgagtaatgctccctggactccccaggttctagtcttctcatgtcgatgtagttgattccacttcccttgctgcacaaccaggctgggatgcctgggcagaggcagacatgtgaggtataggggttcaaatctgtttccaagttttatccagatcccaagtatttcttcacgtacatgggcggtggcttggcaggagatgcagattctctctcctggaagtgaggcaaggaggctggcgtctgggtaaggatgatgtccccacatactgctaaagagtcaaagaggaaagtggcatcgatggtgcagggcagagacatgcactgagtagctgctgccctcactgaagagaaagtgttcactgacttggcctttccccagggcctctccctcccctgctttccagaaagcccagttttttgggagctgtacctraacacctgggaacattccggtgggaaaggcagctcagagcattagcaatggtaagttaccttgttcttcttcctgtggagacaattgatcatatgggtcagcaagacggaggtgctgtccatttagtccctggttattacagag

SEQ ID NO: 204336 - DNA, 483 bp, Homo sapiens
aagacctgatagccccattctctaagacattatcagacattccctacaaatggtcatactctcctatatactcccgatacaactctaaaatatatgactccatgtagtccctaggtttgaattaaattttgacttttttctcccaaaatatctcttgtcgaaacaacggatgtagagagaaatacattccctccaggcaaatctgtcaggcctggtctgacctgggaccctgcggacactgcccctttgctgagttaccgagatgagccagccccgtggctgtgcccagsctgccccatcccctgctgatttgtgtgtcctagagcgcagccccctgccctgaagacttcttaataggctggtcacaccctgtgcaggagtcagttgcagtcaggacacagcatgaacatgaggatccccgctcagctcctggccttcctgctgctctgtctcccaggtaaagaaggagaacactgggaagtt

SEQ ID NO: 204337 - DNA, 483 bp, Homo sapiens
aagacctgatagccccattctctaagacattatcagacattccctacaaatggtcatactctcctatatactcccgatacaactctaaaatatatgactccatgtagtccctaggtttgaattaaattttgacttttttctcccaaaatatctcttgtcgaaacaacggatgtagagagaaatacattccctccaggcaaatctgtcaggcctggtctgacctgggaccctgcggacactgcccctttgctgagttaccgagatgagccagccccgtggctgtgcccagcctgccccakcccctgctgatttgtgtgtcctagagcgcagccccctgccctgaagacttcttaataggctggtcacaccctgtgcaggagtcagttgcagtcaggacacagcatgaacatgaggatccccgctcagctcctggccttcctgctgctctgtctcccaggtaaagaaggagaacactgggaagtt

SEQ ID NO: 204338 - DNA, 483 bp, Homo sapiens
aagacctgatagccccattctctaagacattatcagacattccctacaaatggtcatactctcctatatactcccgatacaactctaaaatatatgactccatgtagtccctaggtttgaattaaattttgacttttttctcccaaaatatctcttgtcgaaacaacggatgtagagagaaatacattccctccaggcaaatctgtcaggcctggtctgacctgggaccctgcggacactgcccctttgctgagttaccgagatgagccagccccgtggctgtgcccagcctgccccatcccctgctgatttgtgtgtcctagagcgcagccccctgccctgaagacttcttaataggctggtcacaccctgtgcaggagtcagttgcagtcaggacacmgcatgaacatgaggatccccgctcagctcctggccttcctgctgctctgtctcccaggtaaagaaggagaacactgggaagtt

SEQ ID NO: 204339 - DNA, 611 bp, Homo sapiens
gataaatatcagatgaaatacttcttcctactgaccatttccactgctcaccatcccccaatgtctctttatgtcactaaccgctttacctacatttagccattggtgctggtggttgcttggcacctgggtctccactctgtgacctctactaataggttagatgagtttacactccaagcgggaggtgaaagctgcaaggtctgagctcttgggcacagacttccttttaccacattctactggccaaaacaaggccagagcccagcctagatccaagacatggggaagtaggtcctccatgggagaaccatcagcaagccggagcctgaagatttggcactttatcactttatcagtatagcagtgtgtgtcccacaacgttcattcagcatgaaacaaaacctttccaaacaccataggtattttttttttcttttgatcaagccagctgctgcttttgtggacaactgctttggtgacccctgggtttttaacattattacctctctttgaaaatttggaagtcgtaaggagtaaattgccrcaaacattttattgtgattcttgattttttcctcagactcagctgcacagccaggtttcagaac

SEQ ID NO: 204340 - DNA, 540 bp, Homo sapiens
attatatttcataatatcatagattcattttcacatgttaggtataagtccatctcaccacrtataagaggttccacgtacaagtttcacaaagtctaaatgacctcagggacacatgaatcaccaccctgtctttctggtactgcaaaaaattgaaattcctatgtactgaaaatgaatcgtacttaacaatgattcttagtgcctctaaatttatgaaacaaattaggtaatattcacagaacaagaacaatttgcttcaaagtattttctacccccaagactgcactgaagcctctggcaattttactcattgaaaggtgaaactaaaacatagtctttttcctacttgctatatcattcatagaaatgagatgagtaaaattcaagtagatacgtgatgagagttgttcatcgtcattcaccttgaagaagagcctcacggagaattctggtgaccccatttaaagacaaacctgtcagtcactagttctaaagttggatcatatcaatatttgcaaaccttttctcagaacaatg

SEQ ID NO: 204341 - DNA, 581 bp, Homo sapiens
ggcacttcctcaactctctctgtcctaaagcctctggagagcccttaaatttgtggtccttgaagctattgtaaaggtaagatcttttttctccccaagtcctactcatcctgacttttcaagtttgtggtgtctctgatawtctctgctcctgttctttgagaccatccccgtcactctccactctcccacgtgacacctgtaaagtctcttccagggatctggggctgcattccagggtctctttgctctgagctctctgaggcctcaggctgtcataataaatcaaatggcagggatcttctccaacatcatccttcttccttctgctttcctacgagggtggcaggttcaacgtgtctgtagaggcctcgctgtgtgagggtctgaagggaatttccaatttgatgcaggggaaggaagggagagagagactaaaaattggttgatggccaccatgtgccaggtgctcccaatacagtctcaaactcatgacatctcccagccaatggattcaccccctttaccagttccacctggagctccatctcccagacaagcaaaggccatgttggggggct

SEQ ID NO: 204342 - DNA, 455 bp, Homo sapiens
gaattcttgggatgaaatggccaaagatgagctgccatctttgctgtttgtgcaacttagccactccagcctgagggttttgtggaatccatacctaccggggcagaagggatctcccagcacaacacagctactctacaaaatcttggtcaggcagattcttttagcaggttcctgacccatttcttcttaattggcaggaccttgacaactctatccaagggagaatgtaaatctctgtcagctctagaactaaggggtggaagccccacttgggaggtctcacccagtgaggaacrgatcggggatctacttaaagaatcttgccatgatttgatagagcagttgtgctgttctggggatcccctccaccctagtcactttggactctccaaagcccacagactggaataactgagtcacccaaacagcaaagatggcggcccccttctccc

SEQ ID NO: 204343 - DNA, 561 bp, Homo sapiens
ttggtcctaaatatttaaacacattttataaatagcttttccacaccacatatatagggaaaaacagggagttaacttggcccagcagcactgtttgtggggytaacaccctgtctgtgtatctcacaccaaccctaagctttgtttctctcctgtcactttgctcctatttctttcatgtgaaagaatgttcattttctttgaaaatgagctcatttcctcattttctttccatatttcagcaggaacaaagatcaccacaactggctcgccttcaactatgttagatggcaacttgccttcagtatggtgaaacacatcagttaagaccggggttgtgcatggcaggactttctacaaggacacccagtctccttaataaacatgagatgctctctttccagaatttctcttgcctgacacagcataggaagatgctgaacggccacacagtgatccattggtcagtggtgacataaggaggtcagaggggaggagtgaggagaagtagggaagactaggtggttgtaggcctccttcatctgttcattggctgtggca

SEQ ID NO: 204344 - DNA, 337 bp, Homo sapiens
ctctctttccagaatttctcttgcctgacacagcataggaagatgctgaacggccacacagtgayccattggtcagtggtgacataaggaggtcagaggggaggagtgaggagaagtagggaagactaggtggttgtaggcctccttcatctgttcattggctgtggcattaggccagctactctttgcacttctgtaaagtgagacggtcgatcttgtctgcctctctagaggatggttgcaggtgtcaaatggggtagttaggtgggagggcatttcacaaagttaaaaaatatgactttggaggcttgttatattgatgaggattataatccct

SEQ ID NO: 204345 - DNA, 337 bp, Homo sapiens
ctctctttccagaatttctcttgcctgacacagcataggaagatgctgaacggccacacagtgatccattggtcagtggtgayataaggaggtcagaggggaggagtgaggagaagtagggaagactaggtggttgtaggcctccttcatctgttcattggctgtggcattaggccagctactctttgcacttctgtaaagtgagacggtcgatcttgtctgcctctctagaggatggttgcaggtgtcaaatggggtagttaggtgggagggcatttcacaaagttaaaaaatatgactttggaggcttgttatattgatgaggattataatccct

SEQ ID NO: 204346 - DNA, 337 bp, Homo sapiens
ctctctttccagaatttctcttgcctgacacagcataggaagatgctgaacggccacacagtgatccattggtcagtggtgacrtaaggaggtcagaggggaggagtgaggagaagtagggaagactaggtggttgtaggcctccttcatctgttcattggctgtggcattaggccagctactctttgcacttctgtaaagtgagacggtcgatcttgtctgcctctctagaggatggttgcaggtgtcaaatggggtagttaggtgggagggcatttcacaaagttaaaaaatatgactttggaggcttgttatattgatgaggattataatccct

SEQ ID NO: 204347 - DNA, 337 bp, Homo sapiens
ctctctttccagaatttctcttgcctgacacagcataggaagatgctgaacggccacacagtgatccattggtcagtggtgacataaggaggtcrgaggggaggagtgaggagaagtagggaagactaggtggttgtaggcctccttcatctgttcattggctgtggcattaggccagctactctttgcacttctgtaaagtgagacggtcgatcttgtctgcctctctagaggatggttgcaggtgtcaaatggggtagttaggtgggagggcatttcacaaagttaaaaaatatgactttggaggcttgttatattgatgaggattataatccct

SEQ ID NO: 204348 - DNA, 558 bp, Homo sapiens
gctatttagagcaggactgagaacactgcctggtgcttgccattattatcaccatattattattactgttgtcaccattgtcatccttacctctgcggtctttctggtcctgtcaccctgtgactgcatattcagccccacctcccagttccagaggtggaaggtatgaactactgtaatgcactatccggtgccccctccccaaacacacactcctttcctccattccagcatttagagctgtcgctgtcattgcctcaggaaagggatattttgcaagaagcagaggaagggcttcaaaggtatcgaaaacctctggattcagggcaggcaaaacccacaggaggtcacggcactgccctttgccccagaagagacagagtcycccaaactggggacaaggaacttcagagcaggagctaagtgtgagtagatgctgtggtgcctagaaagatggaagagccccagggaaagtgacagtgacaaaggcacctgttcagacgtgaacagcaccagccctatttcgcagatgggaaaggtgaagcgaagacagatttg

SEQ ID NO: 204349 - DNA, 435 bp, Homo sapiens
ccaggcagcctggagataaggctgagaatgactgaaactttagataggcatctggtctccagctcaccccagtccccaccacaccctattgccttacatttacccacgcttccacacttagtcatcatctgcctgaycttgcaggaatttgagtctgtggcccctgcttggaatgtcagctttcctggtgacagcaggagtgtggaaagctagccttgcgctttctgcttctgttttgccttttatcagtctggagagaaatggaaaaaggtctcctcttactcctgcacacacagtgaaatcttatctcaagcattcactctgcagactgagggtagtgggacatcgtggtgtggaagcttataagagctggagggcccagagaagttatgcaatttggcccatgtcacacagcaagagagtagcaagttgggc

SEQ ID NO: 204350 - DNA, 442 bp, Homo sapiens
tgttcctgcacaaccagcattgccaccaggcagcctggagataaggctgagaatgactgaaactttagataggcatctggtctccagctcaccccagtccccaccacaccctattgccttacatttacccacgcttccacacttagtcatcatctgcctgatcttgcaggaatttgagtctgtggcccctgcttggaatgtcagctttcctggtgacagcaggagtgtggaaagctagccttgcgctttctgcttctgttttgccttttatcagtctggagagaaatggaaaaagktctcctcttactcctgcacacacagtgaaatcttatctcaagcattcactctgcagactgagggtagtgggacatcgtggtgtggaagcttataagagctggagggcccagagaagttatgcaatttggcccatgtcacacagcaa

SEQ ID NO: 204351 - DNA, 577 bp, Homo sapiens
agatctgatggtttcataaggggttcctactttgctcaatactcattctctctcctgcygccatgtgaagaagggcatgtttgcttccccttccaccatgattgtaagtttcctgaggcctcccaagccacacaaaactgtgaaacaattaaaccccttttctttataaattacccagtcttgggtatgtctttattagcagtgtgagaatggactaatacacagctactcaggaggccaagacaggaggatccttgagcccaggaggttaaggctgctgtgagttatgatcatgccactgcactccagcctggacaacagaacatgactctgtctctcaaaaaccattttttttttctttaacagatgctactatgcgctggccctggggtaagcctgccacatgtgttaatctctttactcctcctgtagcattacattcattctacagatcagaaaactgacttgcctgcagccacatggctagtaacgtgttgaaccctagagtctgccatggtgaagtgttctgagcagggctttgcacccaggacttcaggttgttatcattattattatt

SEQ ID NO: 204352 - DNA, 577 bp, Homo sapiens
agatctgatggtttcataaggggttcctactttgctcaatactcattctctctcctgccgccatgtgaagaagggcatgtttgcttccccttccaccatgattgtaagtttcctgaggcctcccaagccacacaaaactgtgaaacaattaaaccccttttctttataaattacccagtcttgggtatgtctttattagcagtgtgagaatggactaatacacagctactcaggaggccaagacaggaggatccttgagcccaggaggttaaggctgctgtgagttatgatcrtgccactgcactccagcctggacaacagaacatgactctgtctctcaaaaaccattttttttttctttaacagatgctactatgcgctggccctggggtaagcctgccacatgtgttaatctctttactcctcctgtagcattacattcattctacagatcagaaaactgacttgcctgcagccacatggctagtaacgtgttgaaccctagagtctgccatggtgaagtgttctgagcagggctttgcacccaggacttcaggttgttatcattattattatt

SEQ ID NO: 204353 - DNA, 505 bp, Homo sapiens
tctagagttagaagattctataaagtttatgtagttcaactcatttacttaatagatgatagaatagaagtttggagatggtaaatagttaaatgaagttcgctcaccacttgtgtacaagagtgacggtttgactataaaacacctgtgtctagtgtgtgtactcctgactttatttgcaattaaagtagcacaatgtgtaactcaatttgtactgaagaattgtcaagcacgcactccttttcttacagagctatatataccaacyacattcctaacaacaagattttgttccattttatatcatctctgaattttccacactaacagagcccacagactctaactggggacatggtcatttgagatcaagactgcttgcatttctgaatctatcttttgcagaacagaaataagtctgacctctgcccagtgagatgcaaacaaagcttcaggtgagaatttctggaaagcatcctttaagggaggtagatatgtcttttct

SEQ ID NO: 204354 - DNA, 403 bp, Homo sapiens
catttttggagtttagacacaactgaccagcattaatgtgaaatagcgatcgtgagactgtcagaatggactctttgtgacaataagataccaaattgtaaataagacttaaggccttgcaaggcaagggttacatcacagcttacaaagcataaaatctcattaaactggttaacctattgttaatcygttatggcttatttccaacctgactctggtatagcatcacacaacagatagcacaccccttatcttaacctaagtgttcctttgtaccgacttgtagtctttaacaatgcttcactcttttaaccaattgcaaattaaagaatgtctgaattcacctataacctgtaagcctccacttcgagatgacataccttttcaggccaaactaacgtat

SEQ ID NO: 204355 - DNA, 613 bp, Homo sapiens
ttacccaatagctgtaccctcattgtatctaggaagtaactagcttgcttttgaatttacaggctcataggtggaagagagttgtcttgtcttagatcagatgttggaatgtggacttttgggttaatgctgaaatgagttaagacattgggagactgttgggaggrcatgattggttttgaaatgtgaggacatgagatttaggaggggccaggggcagaatgatatggtttggctgtgtccccacccaaatctcaattttatctcccagaattcccatgtgttgtggtagtgacccagtgggaggtaatgaaatcttgggggccagtctttcccatgctgttattatgatagtgaataagtctcatgagatctgatgggcttatcaggagtttccgcctttgcttcttcctcacttttctcttgccgccatgatgtaagaagtgcctttcacctctctccatgattctgaagcctccccagcaatatgaactgtcagtccaaataaacttcttttcatcccagtttcgggtatgtttttatcagcagcatgaaaagatactaatacagctaattagaaggtttttgttttaaatagcatttacatgttcac

SEQ ID NO: 204356 - DNA, 592 bp, Homo sapiens
gaactgtcagtccaaataaacttcttttcatcccagtttcgggtatgtttttatcagcagcatgaaaagatactaatacagctaattagaaggtttttgttttaaatagcatttacatgttcacaattctcaagtctaagttattattttatatcattcattggatttttaatcatggttaatcttatagtttattagagtctctattattatatctaacaggcaactcaagtttaacatgctgaaaatccactcacttatctttgcccctaacataatattaggttggcaaaaaccgcaattacttttacatcaacctaatattattcttatattcctagattctccatcttgaaaggtggtagctagaaaatttatgtttttgcttccatctttcatttttcataacacttcaattcttcatataactytttttaaattaatatattgtatttttaggacagctatgtgtgtgtctgtgtgtagagatatactctgaagagagagattgtgtgtgtatgagatacatatagatacaacacacttatataaaaacatatataagaacttatataagaacttatataaaaac

SEQ ID NO: 204357 - DNA, 565 bp, Homo sapiens
cattctgagctaaatctgttcatatgcatcctgccttattcacaaatatgaaaagcacatcttgtttaggcactatatatctcttattttttgatgtttttgtttgcttacttttaaataattttcaagcacattaccagtgaaaaagttaagcataaatgcttcacaaagacctgagtgacttaaaaacctttctcaggaaaaaaaaaargtcttagaaaatgaattgaatatatatgaaaatttagcatgcagctactgcaagacagagtgaaggatccccgccatgcacagggaacacaacaaagacccaagagatgcacttagaagccatggcagatgggtctgttaagacagagcagaccaattaaggttgtatttggagcactccgtcacccctagaggacagagagaaaaacgaaaggaggaggccctgcatttagtaactgctcagattgcaaagctgtgtatgagaagtatgtccctgggaatgagatgctttttatttgtactgtgctttttttcttatgcattgtgatcagcattcagggattctctactacac

SEQ ID NO: 204358 - DNA, 610 bp, Homo sapiens
tgacttttatgacactgtactacaatctttcataatatctgttcataaaccttgttaaggtttctttttaaaaataaattacttaataagactttcaggagaataactgtagacgttttaaaaaattcaagtgtgaagataaattatgttcagagtaatttattttcttgtaccctgaggaagttaactgttttataaaagaaaattttttaaatgggtgcagtgctcacacctgtgatccttatgactcaggaggctgacgtgggaggatttctcaaggccaggagcttgagattattctggccaacaaagcaagtccccatttctacaaaaattgaagaaaaaatrcttggcaagcacttgtagtcccagctaatagagaggctgaggtgagaagatcacttcagcccaggggtatgaggctgcagtgagctatgatcatgccactgcattccagcctggttgacagagcaagacctaaagttaatttaaactatttattcagaactaatagattagcttgaatagacaactaagcaggtcatttcattccatactcaggtagcataaattagtttgtcactgagtgtacctgagttaggttatttta

SEQ ID NO: 204359 - DNA, 638 bp, Homo sapiens
taaaagcatgtttaagcatgaatgccattaaatatagttgctttcattctgaatattaaggcaatataactatttaatgtcagccagagaaaatggaacacagtctacaggattgggaaatattataaaatacataaatgctctgtatgccatctataggaactaaaaggtttgtcttagtgcataacaatgtacagcttggaaaataagtgtttgttaactaacatggcaaccagaaagacactgtggcttaggggagtttgttcctgaaacatttaattaaaattttccaaggatttcaaatggtttccatgtatcattgaagaactgtattcccaatcactacaactagaacaactcaaaatggattgcttatgttgacattattttcactgatgtaaaaagaaaaaaaagaggtgtatttctgcaccagaaaaattttaacttttgtctgcaagaaattataaatatgaaaaaaacctgcttttgtatggagaaaattatttgggttaaactaragcaaacttacagcattttgaccaaatttttttttttcaaacatcagaaattctgttttctctatgatcaaagttgaaacctctcaagtcacatttgcagttaccctccactgtagccct

SEQ ID NO: 204360 - DNA, 575 bp, Homo sapiens
atctttttaatacgtgtcatcccaatgcccatgcacccacatacacatacatctcatgttaataagtgataacttaattatctgtaacaacaactttatcacagtttgggatacgtttcttttatgtagagttgttgcttttattgtttttcttcytatactagtttgtcatcttgtcacagaatgcactaagtcttgaacactggagcagagtaaaatttaagtaagtattagtaattattattattactattgttattctcactgctattattattgtcattctaaattttcctatatcaataaataaggctaataacaaaatcatatacatcttacaaatgttctaagatttttaaaaaaatgtaatttatcactgtatgatcttacctaaaggtaaagaaatacagaatattcaataactgtaacagtatctaatggcaaagaggggaagaaacccatattgctcatggtaaatttgagttcacatccttgccttttaagctcactccagagtcattttaacctttcctgttaatatctctctttaagtttccttcaactcactggcttac

SEQ ID NO: 204361 - DNA, 311 bp, Homo sapiens
agtcttcctggcccatccaactccatataatgtaatttttcttcaacaaaagcaataagctccctatactaccttggtcatgrctatgcctgtgaacacttcaagaagaacactaggccccagaaatttggttagtccatcttacataaacttacttagatgatagattaatataagcaaaatttataggggatacttaaaattttataagtagcatgaaaactacttgcactaagtacaacaaagttctcacatgtaaatcaagagaaataggtgcataaatattctaaaaatttagttttatgctgata

SEQ ID NO: 204362 - DNA, 558 bp, Homo sapiens
tattcatactagtgcaaaaatggcctaatagagcttatttttactgtaggcctaatacggcctttccagactaattaaatgggagagttcccwggccctccttgcaggatgtgtgacagggatgtggctcgcctgtttggttgcctgctgcaggagcatgcagatgggcaggtgaagaagctgggggcaagggctttgggctacagccctgtggtagggtggatgcctgcaacccatgttacaatgctttcttagccttgccatccacagatggctttaagggttaaagccctgtcacaaaggcagagggccagtgtgacagctttctgtatccttgacagctttctgatatctcttgaccatcatcccagaaaaatttggctcacacgggctcgacgaatgaatgtgaggtttactcagtggtggaggtggctctcagcagggtagatggggagccagaatgtggggatggagtgggaagatgatcttccccttgagttggactgtccagcagctgaactcctccccaaacgccatcagccaaactcctctgtagtc

SEQ ID NO: 204363 - DNA, 609 bp, Homo sapiens
tattggctcttttttttttcaaccattctgctacttgttttacttcaccccacctttcttttttttgctttaatcatacctgatagataatggtattaatctttgactaatgtgatcgatggtaagtaatcaattcagatttttaacactattatattctcttaaaataatttctattaaacttagtgcaatattttagcatacaagtctataaataaatgccttttaaccaataacacattacctaaaattaaagaaatagtttatgatgtttttgtagtaaatcacctagtgtcctgccttgtgaaagactattattcaggtacatgttttgattctaaaatatgaatgaaaaccatcactgggtatatgacaaagccaaaagccacgttgatctttttattgtcatagcgttcttcttactatatatggaartttacataattacaaaggaatttataaagctaaaaataacagtgattgaagatattttcttattctttttttatttcaatagtttttggagtacaggtggtttttggttacacagatgagttttttagtggtaaattctgaaatttcaatgcacccatccctgagcagtgttgc

SEQ ID NO: 204364 - DNA, 359 bp, Homo sapiens
gagttaaagttaaataaagacttgggatcagttcaatggggtggtcttctagaactgctatttccaagtcacctattctgctaccttctggaaaattaagggaagacctggtaaagaaataaatttatgattcaaatcttctatgaaattgatatacccatcaatttcacataattatgaacaaaaataggrttaggttatatgctaacctaagacaatatttggatagaggaaattcggaggacaaagtgcaagaaaattctacagattaataagatattggacagtggtacaaataggaaaataaaacccaagggaaagatttgcactgatcataaaatgtcagcaaattccttcat

SEQ ID NO: 204365 - DNA, 634 bp, Homo sapiens
tattagactccgtctggtagagcataatggttttgagcacagacactgaaaatatactatctaaattctaatgccagctccactatatgcaaacagtgggcctggctttagttttcttatatgtaaactacaatgatttaaaataatagttcctattccttagcattattgtgaggtttacatgcatccatcgagttgatgatgtacaaactgctagaccagatttggaaccacttctagatatctcacagggtgccctttgactgcaggtcagggatttggaaatgggtttctatgggaaaataactaaagcctgggaatcccggagaccaagaaaaatagggccgtatcagaacctagtggattataagccagacatttaaaatgtgtattttcctattctcagcacggatttctcttaaattctcccttagtaatttagggaagccttttgaagacctgtctctctcagctgtcagaaatgaaagatctttcaagtattraaaaggaaaatgccctccacacttcttctcttgtattctgtttgatttaagcatgttgtgataatcagaagagaaccccaagaagtgaaaacccaaacagaacagaactaagagtaagtagatctactaca

SEQ ID NO: 204366 - DNA, 228 bp, Homo sapiens
tggcccagggatgagcagcaggacccagaattggccccaccccaaggaacacccctgggcggacagaggaccactctgctcactgcttaagcaccaacccatctgtagtgagttgactggtgaccactaaaaagatatgtccacatcctaggccccagtaccgatgaatggggccttataggraaaacggtctttttcctataaggatgtaattaggttaggggtctc

SEQ ID NO: 204367 - DNA, 431 bp, Homo sapiens
ccctctacttctcctctcttcgtcctctctccygctctctttctggttgagtcactagcaaatttcaccagccacatgtgtactcagcgacaaaaggttgaatgaatagaaagatttttaaagtcactcatgttttaccttttagcatgaaagaaaagttatgaagaatctgactcagtacagaaatttctaagaagcaactccctcaagacagatccgagtgaaaccaacaagcatgtgcatacacctgtcagaagcacttgatcaaattacaggtttatgttcggcccaggacaatgtgagagccagtgttaaattccccaacaggcacctgtcactcttcttttagaccaaaaccaacataagagctgtccagagaagaaaaagagaagagcacatcagaggaacttggcaagttatcagattaccac

SEQ ID NO: 204368 - DNA, 440 bp, Homo sapiens
tttgggtcgctccctctacttctcctctcttcgtcctctctcctgctctctttctggttgagtcactagcaaatttcaccagccacatgtgtactcagcgacaaaaggttgaatgaatagaaagatttttaaagtcactcatgttttaccttttagcrtgaaagaaaagttatgaagaatctgactcagtacagaaatttctaagaagcaactccctcaagacagatccgagtgaaaccaacaagcatgtgcatacacctgtcagaagcacttgatcaaattacaggtttatgttcggcccaggacaatgtgagagccagtgttaaattccccaacaggcacctgtcactcttcttttagaccaaaaccaacataagagctgtccagagaagaaaaagagaagagcacatcagaggaacttggcaagttatcagattacc

SEQ ID NO: 204369 - DNA, 415 bp, Homo sapiens
ctctcttcgtcctctctcctgctctctttctggttgagtcactagcaaatttcaccagccacatgtgtactcagcgacaaaaggttgaatgaatagaaagatttttaaagtcactcatgttttaccttttagcatgaaagaaaagttatgaagaatctgactcagtacagaaatttctaagaagcaactccctcaagacagatccgagtgaaaccaacaagcatgtgcmtacacctgtcagaagcacttgatcaaattacaggtttatgttcggcccaggacaatgtgagagccagtgttaaattccccaacaggcacctgtcactcttcttttagaccaaaaccaacataagagctgtccagagaagaaaaagagaagagcacatcagaggaacttggcaagttatcagattac

SEQ ID NO: 204370 - DNA, 620 bp, Homo sapiens
taaaaaaatgttttaagttatattttacaactgtgttggcataaagataaatatattaccattccatctaaaagtttatctttttctgattttaaaagagttaaaacattttcacgggcctctaaaagtatcatgggccatagacaccacgcctttttgcctaatggagaagtcagccctggattaatgactgaatgaatgttttcatttcctgagaatttgtataaaagatttctttgacctcagaaaaaaattttaaaaaaccacacgtgtcatttctcatatcttatgccacacttgttgcctatttttattttccaaggaggtggctggacttttcctcattctgccatttcatatttaagagaaagctacttcctgactccagggctgctggtagctcacgtggtgcttttatgcaaattacaaaaaggcttcttatctttaagaaaagggaaaagtggccaggagcagtggctcacgcctgtaatcccaacactttgggaggctgaggcaggcggattgcctgagctcaggagttcataaacagcctgggcaacacgatgaaaytccgtctctactaaaatacaaaaaaaaattagtcggacatggcggtgtgc

SEQ ID NO: 204371 - DNA, 479 bp, Homo sapiens
gtgttttccattgactcagagcttggttttgtggtagtgggaatgtggcaatatgaaggattctggtgataggaagtggaagacttcataagcaaaagccccagtcttagtggaacgcttcaaagccacaggttcttccagtaactgcctgggtcttccgcttctccccttggctctaaattcccaacaggctttgtggaggtttgacagctgctccaggagcttgcaatttactttttgttcactttatgcaaattcatacttggctttgtagcacaaaggacaaacctagtggggtctgagttgccctacggaggttttatccccrcaaaactcgggagcccaggaagctgcaatgacaagggaagagtccaggaacaaaaccgtgggagagacctacatatgaggcattccagagtggtctttgcactgtgctgtcttaataggtatagagctatcaacctggagtaggcagtaga

SEQ ID NO: 204372 - DNA, 468 bp, Homo sapiens
gttttccattgactcagagcttggttttgtggtagtgggaatgtggcaatatgaaggattctggtgataggaagtggaagacttcataagcaaaagccccagtcttagtggaacgcttcaaagccacaggttcttccagtaactgcctgggtcttccgcttctccccttggctctaaattcccaacaggctttgtggaggtttgacagctgctccaggagcttgcaatttactttttgttcactttatgcaaattcatacttggctttgtagcacaaaggacaaacctagtggggtctgagttgccctacggaggttttatccccgcaaaastcgggagcccaggaagctgcaatgacaagggaagagtccaggaacaaaaccgtgggagagacctacatatgaggcattccagagtggtctttgcactgtgctgtcttaataggtatagagctatcaacctggagta

SEQ ID NO: 204373 - DNA, 564 bp, Homo sapiens
gatgtctttttgaataaaccactaaacaatgaagtagggaatatttttgagggtgctgaaggaatggactgatttttatttttttgcttaagcagggccaagagaaagcaagagagggccacacacacagagagagaaatgcagtagccttygcccctaatctcatgagaatctgctaattttccaatctctcactggaatattttatgcctaaaataattcacgatgtggctgtagcatgcactgccctggactgctgagcattttagtagcaaaacatggagagtgttacctgctgacctgctaaggagcatgggctcattcccatccctctgtgtgctaacactgggaccagggagagcaaacgggaggtgggacgcttattgttatcagtattatgtgcctattttcacactcatacgtaagagcaccctgggaatgaagtgcaaggttcaacattcctgtgtttagaggaatgtacttgctgaggcatgagaagtatgagcagactgcgaggctgtaagaaactcagttgtcccgggatgctccaactctgagggtgag

SEQ ID NO: 204374 - DNA, 566 bp, Homo sapiens
atactcaggttcttcccggcttgctttgttctctgtctttcccaccccactttctatggctcctttcccccagccaatcgaaattcttcacaccctgtaaggtccaagcaagctctgcctcttccatgaggcctcacagggttcagccaatcctgtgctccctcctcaaaccagtttagctctccccagcaaggggagcaccccattggcccctgttctgtttcctacttcccccatgtcaatgacatttctccaggcagaattaagccacacggtggtcaaacaatcgtcttatggtcttctcgctccctcctccccttggcaccatgctgagcacatgaagaccacagcacctgttggtgacaatttagggagcctgtcaagatacctcttggcctgactgtggatccaaaccacaggagagttcattgaggacaatttgatgagtgaatctggctacaaaagctcaacacagctaactcatttcagatcatgaaattgatcctgttcgccatgctacctcaggagctaggggcagaagsaatgatcttccacattttaccaca

SEQ ID NO: 204375 - DNA, 657 bp, Homo sapiens
agaccgatgctggaagctaagcagaggtgtgtcctttttatttattgtttttctaataagaaatcctaacaagctcagagctgactggtctcccagaccagaggagaccaaagcagcaaataaagggaggagatggatttgctataaaacaggcacaytgagagcaacaagaggcaagcctgacagtgaatggaaaaaaagcccagagctataaatcaaagaaaaaaagcccaaacacgtcactgtctggaatcctttatgagaaaagccaatgtttctacccaccttacaatctcctgaggccaggtctgcattgaaggacagaacagtagctgatgtttcagcaagatggcacggagacatgaagaaaaagcttaaattatacccagtgccgtctgcttgtgaagaaagggaagcggctgccacagtttagaaagatttctggcctggaattgggaagtgtttgcttgcttgcatgacaactgaaaagtggtgagtctgggtcagctggagcactcatcctgcggcctgtaaccccgcgttgctgagataccggctgggacgctacccttagcctttctcccttccagcagccaattttccaggcccaagaggcccaggttaagaggcgcctgtcatgcagttttaacccaagcc

SEQ ID NO: 204376 - DNA, 657 bp, Homo sapiens
agaccgatgctggaagctaagcagaggtgtgtcctttttatttattgtttttctaataagaaatcctaacaagctcagagctgactggtctcccagaccagaggagaccaaagcagcaaataaagggaggagatggatttgctataaaacaggcacactgagagcaacaagaggcaagyctgacagtgaatggaaaaaaagcccagagctataaatcaaagaaaaaaagcccaaacacgtcactgtctggaatcctttatgagaaaagccaatgtttctacccaccttacaatctcctgaggccaggtctgcattgaaggacagaacagtagctgatgtttcagcaagatggcacggagacatgaagaaaaagcttaaattatacccagtgccgtctgcttgtgaagaaagggaagcggctgccacagtttagaaagatttctggcctggaattgggaagtgtttgcttgcttgcatgacaactgaaaagtggtgagtctgggtcagctggagcactcatcctgcggcctgtaaccccgcgttgctgagataccggctgggacgctacccttagcctttctcccttccagcagccaattttccaggcccaagaggcccaggttaagaggcgcctgtcatgcagttttaacccaagcc

SEQ ID NO: 204377 - DNA, 610 bp, Homo sapiens
ccacatataaaaatagcacttggacccacagcctgcagccacctgcccaggaaaccaactgcttttctacaataaacaacccaggaagccagcctgttgtaagtcagccttgcaagaaaccagtgacactccagaaagctaaacaataacttctgtaacaattggcccaaatgaccaggacttggttaataaccaaatttccctgatttttgctcctacttccaacttaaggccaattggtaaaagtcaaatatgccccctcaccaatcacacaggatgtccatttctaggtagctcacctgcagcttccccatgatgacagtttccatcagggcatgcctgaggccttcccccttttccaacatgaagctttctcactcccctgcctgcctttgggccgttaccaaatgcacgtgatggtcccttactacagcacgtgygaataaatagcctctgttttcctcacttggttgattttcacttatttccacaacccaaagagttctggtgctttggggacagcaaagagggaccatgaggaaaggcttttaggaaaaggaagccacaggacttggcatctgttggcagtggggtgaaagatggagacaca

SEQ ID NO: 204378 - DNA, 391 bp, Homo sapiens
ttccctagctgcgagttccccttcccaacttatgattttgtaagacaccaggatcttcccacttaccagatcttaatctgccatcaaatcttagaaagtctttttttctctattagccttatcccttctcctccatccccagcatcctctctctagtgttgacccatatcccaaacacaagccccttaaatctttcactccattatttccacttcttctgctccactggggtaatttactctattaacacaggagtgaggcaagattcttcttgttgccactttttctcaccttgtacacacatgcaggcacacaaacacacacacayacacacacacacacacacttctctcatctatctgcaatggcagaaaggaaagaagacaagctt

SEQ ID NO: 204379 - DNA, 541 bp, Homo sapiens
gggcacaggagtaaaggaaaaggaaaacatcatctatgtagcctggtgtttgaaataaaatggtwaagtgtctacaatcagttctgtttttgaatattggcaatacagattcattttacagtattcagaagtggtgagagtggtttgtatccatctaattttattggaatcatatcctccaggctgttttcatgtattgtctatgtattgactatacctctggctttgtccagggggttctctcatgaggatgactttcatcatattggtattctgcacacaaacttctcccaccataatttgtcacaggatctaaaaatagggctttgcctgttaaatctccatcttgcagggcctgcccctgtgtttgctcagtgcctatggcacattccttagctatgtttcagtctgttttcctggatcctaggcagagtgagctttgcaatcaccacccgtaacacgcactcccttcccctccaagctctccttctcacatggtcttattgggaatgaaacggccacccaaagacaggttgtttgc

SEQ ID NO: 204380 - DNA, 574 bp, Homo sapiens
ggctgggaaatgtagtttarctatgtgtctataaaagggaactgtaagtgacaagcatttagccagcatctgacacagtatatattttaaacatcccaactgcaatagccccatttaccctgaaatagtaatgaatggtaccagaatagctcttgtaagctaaaacaaaagtacatgctgtgtgatatggtttggctgtgtctgcacccaaatctcatcttgaatccccatgtgttatgggaggaactggtgggaggtaactgaatcacaggagcaggtctttcccttgcttttctcatgatagtgaataagtctcatgagatctgatggctctataaggtggagcttccctgtacaagctctctctttgctgctgccttccatataagacaagaattgctcctccttgccttttgccttgattgtgaggcctccccagcctcatggaactgtaagaccattaaattctttttcctgtataaattattcagtctcaattatgtctttatcagcagtgtcaaaatggactaatatacacactgtgtatattcattgccactgcttttcttacctt

SEQ ID NO: 204381 - DNA, 574 bp, Homo sapiens
ggctgggaaatgtagtttaactatgtgtctataaaagggaactgtaagtgacaagcatttagccagcatctgacacagtatatattttaaacatcccaactgcaatagccccatttaccctgaaatagtaatgaatggtaccagaatagcycttgtaagctaaaacaaaagtacatgctgtgtgatatggtttggctgtgtctgcacccaaatctcatcttgaatccccatgtgttatgggaggaactggtgggaggtaactgaatcacaggagcaggtctttcccttgcttttctcatgatagtgaataagtctcatgagatctgatggctctataaggtggagcttccctgtacaagctctctctttgctgctgccttccatataagacaagaattgctcctccttgccttttgccttgattgtgaggcctccccagcctcatggaactgtaagaccattaaattctttttcctgtataaattattcagtctcaattatgtctttatcagcagtgtcaaaatggactaatatacacactgtgtatattcattgccactgcttttcttacctt

SEQ ID NO: 204382 - DNA, 520 bp, Homo sapiens
ttcatgcttccccttgaaggaaagagcaaaataataatatcccacagtattagaacaaagcagcaagttcaaggatcaggcttcagttctgtaggttcacttggaagttatgtaaaastaaagtgacaaaatgcactgggtttgttttggactttccttggtttagcaccgagagtctacggtgaacagagttggttggttgcccataacctccaaagcagagttagaaaatttctctgaggtcaataatttataaatggaatccttttcaatttttcttggaaaagtaagctggtcaaatggactcatcaaagaatggtgaaggtgtgaggttcagaccagataagggaggagctttctctctctctctctctctcttcaaatcatatttaacatagatttctgtattgctcaatttttcatcagtcatgtatacttttataattaggaaaaatcacaatatttacaaataaagtacttaatgaattttaaatgagacataacaaaatattgggtgcct

SEQ ID NO: 204383 - DNA, 383 bp, Homo sapiens
ctagagctgctttctttgtgttctatcagagtggctacaccactccaatctctgcctcagtagtctccttgtygacccttctatgttaataatcccccttcttctctgataagaacacttaggattgtatttggggtccatctggatgatgcaggacaacctccttaacttaaaatctttaacttgatcacatctgccatctctgccacgtttataggtcccagggattaagccctgatatctctgagggccattattcagccaattgtacctaccctaaaaaagtggctaaaggaagtttactggttcatgaattgtggaaaatgttccatatgtatataatttgttaataaaggaaaccaggtagggctatgagagaattc

SEQ ID NO: 204384 - DNA, 597 bp, Homo sapiens
tgtgcacctctctctaggcttaaatagctgctgcctgccctgagttctcagtgatgtccgcgtgtaaatagacagacagtggaagagaatacaaatcccagaagtagatccaaatacatatggaacattatgacatcctctcaaatcagcagagaaaaatggactgttcaataaatgaggttgggaccatcgggtggccatctggaagagctggctctgccttcgtcctctccaatggggaggagtgaacctagcagagaggaacaggaatgcgccagagtcgtttgctctccatgctttgtcatctttgaagtagcacctattcaaaagtattacccactctaaaaagtcaaagaaaaaaagatagataaatagttctccagaagtgaygaaagatggattgtctgggagaagggccaggaatcccaggaggaggttggcttctctagcgagtacatgcacccttcttccaagaggctacaaaacacatgcacagctagggacaacagtgcagaagctggaaaagggctctaggggaccatgcggtccctcttgcctatcattgtactttgggccaaaacttgaatgcaaattcaa

SEQ ID NO: 204385 - DNA, 421 bp, Homo sapiens
tctcttactaccacagggaagagcctaagaatgaatcatgatgaaagagaagaacctagtgatggtgaatcaaaaagaacataagtcctgatcaagcatctacatcaaaccttcccaggcttttcagtcacatgagaacccccatgttgctgtggctggttttggtaacattttcagttgtggaaatctaaagagctttaacagcacaacgtatctgtaaatgctgataatcttggaaggaaggggatctggttcagaagcaggacacatgagtaaggtcagagccagggctcacaccagcggtggggccaatgggatgggagccaggcaaacacacctgggggcacctgacatgctagaggtgtgccaggcccttctyatcacagacaccggggcaggctgagcaaaggcggggagatct

SEQ ID NO: 204386 - DNA, 511 bp, Homo sapiens
agaagatatccctctacatcttgggacatgaaaacagttcttgtagatgttccygagatttataggtttggctcagaggcagagactctggcaatgagctgtagtgggtctgcctcaccagcagagagtgccctgttgtcacttttctctcctattctcagggctaggttggatgtcgctctagagcttgggcagaaccaagagtcaaggacggtacacaaatgggttttttgtttttggtttttaaagaatgcctcctagcatgatgtcagacttgcaccatacataattattttgctttgggcaatgtcctttgacccaaactattgtcaatcctaaccaaagagtaattttctgaatgttgtgctttcattattatgacagctgctcatgtttgcaaaccacttatttcaaaacaacacatcattcagatctccatgattacagatgcagggacaaggagagagaagtgactctctcactagcccatcagggctcctagttctgacaa

SEQ ID NO: 204387 - DNA, 540 bp, Homo sapiens
gctcattctggctgacagcaatgaagcacctatctaaatactgttgagatgttgaattcagtagaaaatgaacagtcaaaacgttttgacaggtgtttgccttgtgatgtcctgaaacattcatctttcacaattaaaagactctaaggatgaattccagttcctgaaatatggaacactgagatgaagaccaatgacaactgtgaaagttcttkctcccaaaaccaagaattcttcacaaaatataactttaaaaatattttaaatatatgattaggctcacaataaaaataaagtagaaatttccaggtgccaaagagaagcataaaaccagagtggcaacttaggagctgataatatagttaccagaagggaaataatacgacgacttggtttttaaaagtataagagacaagatattgggccaatgcaaggaggagagttggaattgagaaccctcaaactggaactctcaaaaattgataccctctcagaaaagacagactggaacaaaatctgtcagcacagataaacaaggag

SEQ ID NO: 204388 - DNA, 390 bp, Homo sapiens
caatggtattgatacctgatctggtggctttggagggacattgagagcttttaggcaggccagtgacaagttcagttttgtgtttaagaatgatggcactgaaatgacatgatgtctgggtattgcaaaatataaaaacatgttactcaagcaaaatataaaaaccaaaagggaractgattttttttaaatgatgaactgttgataatgaagacaagtgatgagtatgtgagggttcatgatattattcactctatttttgtgtaagtttaaacttttcatagtagatatatttttaatcacatgaattattaaaaaaataagatctgaagaagtcctattaaattcatacttttttttcaatgttaaatatcctaatttagcagccaa

SEQ ID NO: 204389 - DNA, 605 bp, Homo sapiens
tgtgtgagttttctctggggactccaatttcttctcatatccccgagctgtgcacatggggtgaattggtgtgtctgcattgtcccakcatgagtgaatgtgggtgtgtgagggtgcaccctgcgatggaactgtgtcctgtccagggttgcttcctgcctggcaccctgagctgctgggataggctccagccacccttgaccctgagctggaataagaggataaataattatcttacttatttttaccaatctttcttaaatgtctgtacagctcccatttatttcaatgtttaatattagaagtgttttggtcttcattaggaagtttggtgatgttttcattcctggaaatatgctgtaggaacttaactcatttatatcaattagcttgtggtaaaattggtaaagttgcagttgccaaaacctatggatgatcttaagagaggacttaatgtatattcatttgctagggctgctgtaatatgcaacagaataccacacacctggtgggtttaacaacaaaaacttactttctcacagttctggaggctggaagtctgagatcaaggtgttggcaggtttggttccttgtgagggccgtgg

SEQ ID NO: 204390 - DNA, 488 bp, Homo sapiens
cgttccagctcttgacggcctttctttgacttcctgtggcatttgtgtttggcatgtctctctgggaaaaaaagatatgccatgtcatattgctttctctgcagacattatatttttgcacctagttttgggtctcttgagggcaagaacaatgtcttgcagctctttgtatatccaaggcctcaagaaggcttgaacaacagcaaccaaattgtgtgttgtcagtgatgcttaraaaaggtgattatccagttcttgcattacctaccctcctttagaaaacaagggctccattttttcaagaactgtcagctcacaggaagagacatacagatacacacacacgcacacatacaatcacaggagagatatatgtattatatatatatatctcctatgtgcatgttatgtgtatgtgtgtgtgtgcgtgtatatatatatataaaatgggaccttacaaaggagatcctatgtgcatgttgaggcat

SEQ ID NO: 204391 - DNA, 584 bp, Homo sapiens
agattgtagaacaagtatatttaattttatgggatccgaatttatttagctgtggataatacattagttaacactaacataacgagaactttacttagcatatgaagtacacaaggcacagcaccaaccaaagatgtataaaccataatgtctgaccgtaagaatctacaagaaagcaagaaaaataagacaatataatatgcccacaaataaccaacgtcttaaatcactatttaagaggctcttcaacagtatattgacaactatatgagtaggatggtgcataagtgctaacggttgaaaggaaaatgatttttttttctgaaggtgtgttatagaaagcaacaaatctacaggtgtcacttgtcctgtatctccaagagtgtttaaggagggtttctagtggttcataactttgactgaacattataattggtgaacttaaaaacwattcctgacccatccctaagaaataataaaataaatctgcagtctcagagatggttttcaaggtccttaggtaacccaaatatgcagctcacactgagaaccacagaggtaaacattctagtgtttacctctgc

SEQ ID NO: 204392 - DNA, 607 bp, Homo sapiens
cttttttactagaatggtaaaattctagactggatatgagtttgaactgttcaacccgctatacgataagccttttctttcaagcattttttttaataaaatgaagatttgcaacatcagggaaagagctaacatatgcagttctgtatccaaaagacattaaacacattttctgctaagatctttgtgtgtggaaacaactcacagttttgtttttatggttctcccaaagatgctgactctttgcagcatcttcctcaaagcttgaaaagacccgaatttcctattttgagcctttaatcatatatccctaatgtgaaattctcttttgtaaggcaagcacagattcacatcctaattcacaatttgrgctacactatcacctctcccagagccctgctccatgcagattctgcaagtctccttctggctgctctaacgatgccgattgcttgtcagatggttttttccctgtgtatactggatacttgcttcagtctcttgaccacaccatcaaggtgcttcaccttacccactttgattttgatggcttcgtgtgcctgcagaagaccagcttcagactttctcagaaagttgtgtttttttg

SEQ ID NO: 204393 - DNA, 592 bp, Homo sapiens
atatttagcaatgtgaaatgagtctctctctctctctctctctcttttctctttccctttctctttctctttcttggtgtcgtattttttctgttccatccagagaagccaattacgcacagtgaaggatttcctcagtaccagaaatgcaattattatcaaatactagataacatcattagttactaatgattaattagaccatattctgttggagttgttatagagtcgagataagtagaagtggaaatgtcctcaatagcagagaaaaattcaaagagacctgaagaattggcactactacattgtgagccatcagccttgtgtatcaaaaagtagaatcaggtaatctacagacaggacaaagattataaggcagaatcstaggatggagaaacaccaaagatacaagttaaaattaaaagataggccgggcatggtggttcatgcctgtaatcctaacactttgggaggctgaggtgggccacttgcttgagctcaggagttcaagaccagcctggacaacatggtgagactcccgtctctactaaaagtgcaaaaattagccaggcatggtggcacatgcctgtgg

SEQ ID NO: 204394 - DNA, 573 bp, Homo sapiens
gatgacaatgtgtctaggtgatgatctttttgcaatgaatttcccaggtattttttgagcttcttgtatttggatatctaggtctctagcaaggctagggaagttttccttgattatttcycaaatatgtttttcaaacttttagatttctcttcttcctcgggaacattgattattctttggtttggtcttttaacatactactaggcttcttggaggctttgttcatattttcttattcttttttctttgtctttgtttaattgggttaatttaaaaaccttgtctttgaggtctgaattttattcttctgcttgttcaattctattggtgagattttccagagcattttacatttatataagtgcatccattgtttcctgaagttttgattgtttttttatttatgctacctatttcactgaagatttctcccttcacttcttgtatcattttgttttttaaatttccttaaattgggcttcacttttctctggtgcctccttgattagcttaataattaaccttctaaattatttctctggttaatcagggatttctttttggttttta

SEQ ID NO: 204395 - DNA, 573 bp, Homo sapiens
gatgacaatgtgtctaggtgatgatctttttgcaatgaatttcccaggtattttttgagcttcttgtatttggatatctaggtctctagcaaggctagggaagttttccttgattatttcccaaatatgtttttcaaacttttagatttctcttcttcctcgggaacattgattattctttggtttggtcttttaacatactactaggcttcttggaggctttgttcatattttcttattcttttttctttgtctttgtttaattgggttaatttaaaaaccttgtctttgaggtctgaattttattcttctgcttgttcaattctattgstgagattttccagagcattttacatttatataagtgcatccattgtttcctgaagttttgattgtttttttatttatgctacctatttcactgaagatttctcccttcacttcttgtatcattttgttttttaaatttccttaaattgggcttcacttttctctggtgcctccttgattagcttaataattaaccttctaaattatttctctggttaatcagggatttctttttggttttta

SEQ ID NO: 204396 - DNA, 509 bp, Homo sapiens
ctatgtggtcttctagtagtttcatagttctgggtcttatatttaagtcttaaatcgttgatctttgtataaaatgagaaacaggaatctagttttatcctcctacatgtgaatatccagtttgcccagacttatttataagagaggctgtcctttcccccatgtatgtttatggcacctttgtgaaaattcagttggctgtaaatgcacagatttatttcyagcttctctgttttgttctattagtctgcatgcctgattttatgccagtgacatgcagttttgattgctatagctttttcacgtattttgacatcaagtagtatgattcctccacctttattctttatgctctaaactgctttggcaatctgcggcctttgtatttccatatgaattttaagtgttttctttttctattattttcaaatgttaaactaagcttgcactactggagtaaatccaacttggtattaatgtgcaatcactttatacaaataagttgccaa

SEQ ID NO: 204397 - DNA, 452 bp, Homo sapiens
acagatttatttccagcttctctgttttgttctattagtctgcatgcctgattttatgccagtgacatgcagttttgattgctatagctttttcacgtattttgacatcaagtagtatgattcctccacctttattctttatgctctaaactgctttggcaatctgcggcctttgtatttccatatgaattttaagtgttttytttttctattattttcaaatgttaaactaagcttgcactactggagtaaatccaacttggtattaatgtgcaatcactttatacaaataagttgccaacattttgttagaagtttttgtgtcaaatttcatggggaacagtggtctgtggttttctgtatttgtaatattatcagtttggtatcaggttaatgctggcctcaaaaatataaattatgaagtatttctccttcagtttttctggaagagt

SEQ ID NO: 204398 - DNA, 577 bp, Homo sapiens
acaggcataacaatatttttttactgggaaaataatgtcttatttttatcccagcaataaaggttattataaggtataaataaaataaccaccctctcaactgcatatcacctgatatcctttgtttatgcaaaagtcatctatacaaaattgcttaacattcctactaattagtatagcactgtctttatctcactcaaagtttctcaatagaaacatttggtgtttgtcattttataaatattttcatctttctgaactttttaraaaaatcatttaattttaattgacatggttatatatatttattatgtgcaacagaaagttctgacatacaatggcatcacatactaatcattttgtggtgagaacagtcaaaatccacggtcttagtaatcttcaagaatacaagacgttggaattgactatattcaccttttttttttttttttacaatagatcccttgaccttaaaatctttcacatattaacaaaaaacattttgaaaagaatttaataaaataggccttttaattccttgggtttttgaaaagtgctaaacaagaattcgtgcaga

SEQ ID NO: 204399 - DNA, 191 bp, Homo sapiens
acccctagcatcttttgagaataatttcagacaatgcatctatgagtgggagaaatggattgggtaaatggaagctttattgaggtaaccagacatgctagatggcaaaaaattctgaaataagtgtgctgacaattttgttttgagtatttggtgggmgaaaaaaaggaagacagatagagtatagtagt

SEQ ID NO: 204400 - DNA, 350 bp, Homo sapiens
ataaccaggttaaaatgaatttgaaaatgttaaattcatttaacaactatttatttaggtcctactatgtgcctaatgctgatctaacccctatgcrggaacatcaaataaaacaacaaagttcctgccctcaaggaggttatatcctagtgggcagtcagataaaaaatatatgaaaaatatgttaaatttaaatatataaatcatatattgtgttatataaattatatgtattatacttaaattatatatacacacatatatattagacagtataggctatatctttcatggattttatcattttttctttatattaaaagagacttggctatcaaaaatgtgaaagc

SEQ ID NO: 204401 - DNA, 350 bp, Homo sapiens
ataaccaggttaaaatgaatttgaaaatgttaaattcatttaacaactatttatttaggtcctactatgtgcctaatgctgatctaacccctatgcaggaacatcaaataaaacaacaaagttcctgccctcaaggaggttatatcctagtgggcagtcagataaaaaawatatgaaaaatatgttaaatttaaatatataaatcatatattgtgttatataaattatatgtattatacttaaattatatatacacacatatatattagacagtataggctatatctttcatggattttatcattttttctttatattaaaagagacttggctatcaaaaatgtgaaagc

SEQ ID NO: 204402 - DNA, 350 bp, Homo sapiens
ataaccaggttaaaatgaatttgaaaatgttaaattcatttaacaactatttatttaggtcctactatgtgcctaatgctgatctaacccctatgcaggaacatcaaataaaacaacaaagttcctgccctcaaggaggttatatcctagtgggcagtcagataaaaaatatatgaaaaatatgttaaatttaaatatataaatcatatattgtgttatataaattatatgtattatacttaaattatatatayacacatatatattagacagtataggctatatctttcatggattttatcattttttctttatattaaaagagacttggctatcaaaaatgtgaaagc

SEQ ID NO: 204403 - DNA, 287 bp, Homo sapiens
ataagctcaattagaaatgaaacgagatattacaatkgacaccacagaaatacaaaagattactcaaggctactatgaacacctttatgtgcataagttaaaaaaccaagaggagatggataaattcctggaaagatacaaccctcctagcttaagataggaagaattagataccctgagcagaccaaccaataacaagcagctatattgaaaaggaaatttaaaaattaccaacaaacaaagtccaggagcagaaggattctcagcagaattctaccagacatttg

SEQ ID NO: 204404 - DNA, 649 bp, Homo sapiens
ctccaaattgctcaactgttgggtgacataaacaaaaaaacaatttaattaaccaggattgtatttttaagttgtttctattttaataatatagtattctgtgtcagataagtcaatgttgaaaccacagttaccatcttctgaactgtcatgctgggtggtaggatatcaccatgctttattagcttgtcagccttacacaattgcaatttccacaccctctgtaatagttttttgctcctatcaatttttaagaggcatcccctattactaaaaaaatttctatgttcttaggaaagaattttattctttgtctctgcctctgtttctctctttctttctttctctctttctctctctctccatctatctacctatctaccaacatatgcatatatttctgagaaaaagtagattataagtttaccgatgaggcaagctggaccyaagattttaatcatggatattaaagaaagactggtactcttaaatccaaaatgtttgtaccaagcagctcaacagctccatgacccttccagtgtttgtctgctttttacagaaacctctttctgaatggaattggaactgctgaagcagtaagtgaagatgactgtgattgagcaggcccaaggaaatactagttaatatc

SEQ ID NO: 204405 - DNA, 554 bp, Homo sapiens
gaattcaaagccatctcttagagaaggaatgacttatttcttgggtatattcatgtatatatgaaatatacatgttaataaacttctgtttgtttttctcttgttaatttacctgttgttactggtttccttccaactaagaactatgytgaataaaaatgtgctgttcttcccctacagtttcaacaagcgattgctaagcaattaagttagtgtgtgataactccgtcactacagaacaactaaacatgactgtttccaatcatatcaaacaccaaaagttgtaaaatatttcagccagtgttgagagatacatattcagaggtcatagagatatcttagatttactgactcttttgtgagttggaaagcactgtagattttagaaaatataaaacaacaaaaaggaattttctgtctgcaatatttttatctgcaaaaagtatatattacctctaattggatgaaactttttgatcagatactagaaacaataagaggatgtacatctcaaaatatgggttatatatctatatgttgctttaaaaaataga

SEQ ID NO: 204406 - DNA, 399 bp, Homo sapiens
ttatgaagcacctactgtatgccatacaagatggagatgtagaaaatccattgtgtgaactgcgtcatccacaaggtgtcaactaactacattatccgggaaacaaggcactcaaggccgtgtaggagacctgaaactgagtatcaaagtgattcttccaaaaccaccaggaagttgttggcagacttgaacccagagcccctgacagagtctaacgctctctcaccacctcatctctttggacgtaagtacatgttgagtgtacaaggtcttgattcagaggtagcttcagacaaactacattttaaaagtgtatggtttttcatatgytcccaggaagtgagcaaattcgatctcttcctgctcaggggatcccaccttaatcacctactagaattc

SEQ ID NO: 204407 - DNA, 415 bp, Homo sapiens
ggaggtggttacatgagcaaaygcatttttttcaaaactccaattatatctccataaagtcagcggaaacaaaggggaataaaatgagaggggtgggggcatgatcaccaggattcaaatggggtttggatgacagctgaccctggattctagtgtttttttttcccccatttgcagcgattgcttctaggttatttttatttctcacttttctaaaagctgaagtctgaatgatcacttccatgctttaaaatctttgaatatctctcccaactttcaggatagaattctatctcttgggttagccaagatttcctgtactctgcctccatcctgcctacctagccccatctctaacccctgaccccctagatccaaccaatttctcccccagccagcctgaaatactaactct

SEQ ID NO: 204408 - DNA, 558 bp, Homo sapiens
ccttgcagaaagtggtttgggccatggccctctgcggatttctttgtcaatatcactcaaaagtctggtccctggatccaagaactgctatccagatgcattctgatgcagcaaaaaagggcaggatcattatatacctcccctctcagttgaaacgagctccatatctctttcttttatctcacattttccattctgctttcaaatttatctttcagtatattctttcattaaactcatacactcattttactstctttccattattcatactattaaaaagtataccacatatgatattttcagtacacgacacagatataaaaagaaaattgtaatacatttgcatataatatttatttaagcctcattctgtctggaggcagaaaaataactatttttgcatttcctggtaaccctagtcattttaaaatttaagtctgccaatttatgatttcccttctgtcttctttgcaagagcacatttaagctctgagaggcttacgttacatcgtggggaaaacacctgggccctagctgcatcaatacaagctgata

SEQ ID NO: 204409 - DNA, 606 bp, Homo sapiens
gctatctaagaaaaaagggaagcttggagaggatcgggtcagttgtctaacatcccagagttatcaagtggcaaggccaggatttaaaactcaacaagcagaaagatcttgagttttcttgatacggatatggctaaaatgaggaagtctctgaatttgaaaatcttacctgtttggtgtgtttgcctctattatggaaattcatatctggaaatgcaggtgtaactctttgagagtgtcccctttctgagtagagttttgtgcttccttcttttcacccagctatgggatacagctgctcacaatttggagcccacactctcaatgaccccctcaccttcatgctgtgttcacactgatctctctgtgttattactctcctgcccttgtgtacaagtaaaattccttcccattctttaagactacttcaaatgctatctccccttaaagacytccctggacatcccagtttaaattaaccattctctcttcttccttccctctacagtcttatacctttttaaaacaggtattctaatctgccttatcttagagttatagcatgtagagaaggggagggggcttgtttgaccctctcagtatgct

SEQ ID NO: 204410 - DNA, 553 bp, Homo sapiens
atctaccatttactgttacctcatgtaattgccaatttttggtgtgtaaccacaaccaaaaaaaaatcagcggcaataagcatttttttcttctctatcagttagctaggacagctgcttcaggctgcagaatacagtagtctcaccttatccatggatgacacattccaaatctcctggtggatgcctgaagctgcagataatgccaaatcctatatacatgaattttccatcttaactatcaggcactgtggccataacttttgcagtttggggtgccacagcaaaactaacatgattatatttttccttcttcacaatatcatggatgaaagattcatttttactatagatcttagcagcttcatcatacaatgctgtctcttttcttttttcttaagtcaggaattttcaagttttcccttaaaggraacactttagggcttctcttaagcatttctgaattgtcagcatcactattcttgtgctttggggccattattaagtaaaataagagttacttgaacacagaaactactataccaggatagtc

SEQ ID NO: 204411 - DNA, 399 bp, Homo sapiens
gagttgggccagtagcagttacataggtccatggcttacctacatctagacctttgctgctcagagtgtgacccayggactaacagcagtgatattacctgggagtttgtgagcaatagaatctaaagttccaccaaagacctactaaatcagaaactatgttttaaaataaaaacttcagtgatttgtatgcatatttaagtttgagaaacactgctcaataagaaacttattttttggtttggatcctgatgttttgttccttcactacatgttttggcctgcagttgagatagctaccattttctaactcttttactttaaacatatacacatctataaggaaagagctctatttattcaacaaattgaacacactatgaacaactactatgttgt

SEQ ID NO: 204412 - DNA, 605 bp, Homo sapiens
tagagttcctcttaggagcttccccgaaggctcttcttcctatcaaggtagttatcacactgaattgcagctatttcattaatagttgatctttctctctagaatgtaaacttcatgaagcacaaagaaaatattgctttatctttcccacagttatacctyagaaaccctgcacatttttactgactggtggaaggcaggcagacaggcaggaagggaagaaactacaataataagccatcctatttcaaggaatcagagaaagggagaattttgtctagctcttaaagaataaaaagacatttctaggcaaagtaggtaaaaggcattccaagaagagggaagtgcaagtacaaaggtcagagttcaggcaactcacatgtcctgagtttcatccatatggagcacagagcaatagcataatatgaggttgggttgagtctgattgtgaaggccttttttgcttggtatcggctttggactttaacatgtaggcattgctggtagcattatcttctcatatatttaggatattatgacatctgattttatcactctatttctaggtcttaatttttatctgctatattgtaggtgccctgaaa

SEQ ID NO: 204413 - DNA, 605 bp, Homo sapiens
aagcttttcagatccccttggcaaattaagtcatgctctacagtatttgtatacttgtctgtgtaaatatctttaacatttatctatttctttcaatcaccatgatgaccactgtgatgtctaacccagcatcatttctgtgtagaactggtgaaacagctttctaactggtctctcgcatacacccttgctctaattctctctcacacagcacccagagtaattcctaaaatgcaattatgatcaggtcctttatgcttgatacctgtcagttaaacgtcattttctgggactctttatcctcattgatactataatctttaaagtagtttggatggtctttaatcatgacccatgtgatctggcctctgtggctttttaccagtcttgtctgtgcctcacactcttgctctgtcctccaaccatacaggccttgaatacttgagctcaatcctaccttgtggccatggaggatgttcttttccccacttcatactttcacataattaattcctactcacccttctgtaggctgcatcaagaggcaactcccccaaagccaccstaaataaacatacagtataatctaaaaagaagtgggatta

SEQ ID NO: 204414 - DNA, 557 bp, Homo sapiens
  misc_feature (1)...(557): n = A,T,C or G
aaaagaaatggtattattaaacaaatgcacacagagacaaggacaatacggtctgaggctcaggcactatttccctcttcatctgagtataaaccgtaacattattgaaagtatcttgccagtacacttttaatgagagtttcagtaatggaaaataggaaaagaggtattactaaaaaaaaaaacaagtttgctaagaattttctataacttaaatatacaagtccattgatttaggtagcacaataagccccaacagcatttatcataagaaatcaaacytagacttactatagtaaagctgcagaacaccaaacatacagaacagactttaaaatcaacccaaaaggaaaggtagattacctaaagtaacacaactaaatatggagtaagatggaatctataagagagtagagttacattttcaaggaacaccaaaaaaacaaaactagaattttgttgccatgaaaaaataagtatttcttcagaaaaaaagaataaaataaaaacattttggacaaacaatgcacattttatgaccattactnnnnnnnnnn

SEQ ID NO: 204415 - DNA, 557 bp, Homo sapiens
  misc_feature (1)...(557): n = A,T,C or G
aaaagaaatggtattattaaacaaatgcacacagagacaaggacaatacggtctgaggctcaggcactatttccctcttcatctgagtataaaccgtaacattattgaaagtatcttgccagtacacttttaatgagagtttcagtaatggaaaataggaaaagaggtattactaaaaaaaaaaacaagtttgctaagaattttctataacttaaatatacaagtccattgatttaggtagcacaataagccccaacagcatttatcataagaaatcaaacctagacttactatagtaaagctgcagaacaccaaacatacagaacagactttaaaatcaacccaaaaggaaaggtagattacytaaagtaacacaactaaatatggagtaagatggaatctataagagagtagagttacattttcaaggaacaccaaaaaaacaaaactagaattttgttgccatgaaaaaataagtatttcttcagaaaaaaagaataaaataaaaacattttggacaaacaatgcacattttatgaccattactnnnnnnnnnn

SEQ ID NO: 204416 - DNA, 433 bp, Homo sapiens
cattacatttctattcctagggccctcatgaattaatcaatcactaattgatatagaattatatccagagtgtttcaaatattttccctttttacatttctgctctccgtgcttgagttttggtgtgttatcattcccataaactgtttgcaataacctgtagcctcctagatctcttcaatccattatgaatattgctgccaaatttatcttaacactcagttctatttgtatcacttactgatttaaatgatttaacaacttcaaatcatttaaagaaggcttcactttaagtgtaatctgacttacacttacgtatctwtggaaatgttaatgagtggtctatgttggattaaacatgttttaagcagttctctattttttatcctaggatttttcaaagctcttgggggcttatatctccaagagactg

SEQ ID NO: 204417 - DNA, 326 bp, Homo sapiens
ttagcagtgtgagagcagactaatacacacacacacacamaaaaaaacaggttctgtctgcataatcaaatgtatgccaaggaatcattttaagtaataatgactaaaatttgttgtaactttactctgtgataggcagagagatgaacattgtcatatgtaatactgtctttaaatttatccttgttttaaaaatcttccagaacacaagaggatgtttgggtttgtgccaaagactagttagtttaaatgaggacaaaaagacagtagaggatatcatgttcctaattaattcttgtccttttaacatttttttcaactaacac

SEQ ID NO: 204418 - DNA, 595 bp, Homo sapiens
gagacagacatctaacaacctgaaatggttaggcacagttgcacctgtaaacagaaaggtgccactgatgtcatgagaattcccctttgtaaactttgaggtctgtagatggttgggctgaattcaaagttaacatagaaaattatataaggcagataaatctgagaacacagttttcaatttatgtttaactctttcctgaccctctgtcactttctaccttcctagtcttcctcaaactctagatatttatgtagtggatttcatctgycagccacagggcactgtaggtttccttgtccttgatcgtggattcaaatccatgcagttcagccctagcattggccaatcaaaagtttctactaacatgacctacatgactgattcagaaatagttaattcaagcagagtcaatcagtccttggatgcatgctataaaaattaggaaaaagaaattatcttgctactggggggctgaagctaaggcttcggctggcatcttgccacagtgacactatagcttgcctaatgagtcaactaatgtgtggaaatacattgtgtgtgtgtgtgtgtgtgagagagagagagagagaga

SEQ ID NO: 204419 - DNA, 431 bp, Homo sapiens
gtagttgctttttggagaaacaatagtctctctgagtgacttaggastagatcagagtaccccaaatcgaatatgagtgcccaatctgtatgcaactgatctgaatttaacaattggccttgccgcctctattcgctgaaagggagagggaaacaagctgagatcaactaaccttcaggaacagctggaagagagaatgaaatgtgaacaacaaatagccagaaaatgagtgtctcttttgtagatgacatttttatattactgaagttcaggaggattatagagacttccccaatttctatcgtatcaacttgcttagtcttctgatttgtttttaacttaaggaagtgcttattaccctgttacataagtatatatataataggttatgtatatttgaaaaataccatcatagacagccaatgcacatt

SEQ ID NO: 204420 - DNA, 512 bp, Homo sapiens
gtgaagacaaaaggccctatgattaactatatctaggatataaaaaagtttaaaatgttaggtcctattatgtatcctttttatattgtgtatcattttatcttattgtttatcttttttttttttttttttttttgagacagagttttcctttgtcrcccaggccggagtgcagtggcgcgatctcggctcactgaaaccaccgcctcctggtttcaagtgattctcccgccttagccttatcctttttaataggacataaaaagctctgagtaagctctgagtaagagtcttgcttaacttcatatgttcccaaattcacctgactatgaaagccttttttgctttactcctatgagaataatttgaaactactgtccaaagaaacagtttttgagaaatatgtagctaaaaatgatgaactgggaaactacacctccaatctctttgtgtccgttgcttcatttctgagatgtcatataaatacattaaaatttaaaacccagctgtct

SEQ ID NO: 204421 - DNA, 577 bp, Homo sapiens
caattttcaaatgctgacatttccatcccaagcttgacctctctctctagtgctcattccaggcaagattttattctttcatccctcaaactcaactgctgacttgatccgtgtattaatagcttcaaactcaactattcaaaaccaaattatttatttttcttcacaaaactgatcttttcctaggattctccatctcaataaatgacaccatcaaccagcatttggctcaatgtagaattctggttatcaaacttactacctccctctccccgcatctgcattgtattaatcaccattctttcaattttgcttacctctcttcatatgtaacatcgtattctaaattaacaatgtctttcacttgttttcctcttatccagtgttgctccctcaacctctacctctatttttttcttctgtaagcagttagagwtgtccttacaaaaacaaacttttatcatgtcattcttcttctgctgttcaatggagttcctcattgctcctagaaaagcctttaaaatccttaacatagactgcaggtattgaaattacatcatttgtattgttcttgcca

SEQ ID NO: 204422 - DNA, 608 bp, Homo sapiens
gtttcttaacctcggcactactgacatgttgaaacatgattttgttgttgttgttgtgagaggctgttatgggcattgtagaatgctgaccagcacttctggcctctactgactggatgccaatagcagtttgatatggtaaccaaaaatgcctccagatgttgttcaatgtcccctggaagtaaattttttcgtagttgagaaccacycaaacatgtagttgtgatattctacctaggtagggtaaaaggtttccatgactttagttagtattagtagaatgatatgaattcctgcatttttggaaaaatgagaatttttctttctttcctgatttgaattcatatttatcttttaattcattaattgatggattgatttttagtagcatggttagtggtataagataagaaggtttgttttcagggtattaaatactgaagcctaaaacaaacaggaatgctaagatactgacttactgagaaatttcagaaatgattcaaaagagatttctactataagaagaatgaaagtttttcatataaaaagatagggctcagatggacatatcaaaaaaaaatcaaaggtgaaatgttgattttatcagc

SEQ ID NO: 204423 - DNA, 584 bp, Homo sapiens
gctcctccaagtgctaaggaaaaaaatagtttgtactctctgctttctcacaagagaaaatggcatggacctagggtctttagaataatttgttactcctacctcagctctgtgcccacatttctcttgccctttgagcaatggggactccaatctccttccaacaagaytcaattcataattttcttttctttttcctttttttttttttttgagacagagtcttgctctgtcacccaggctggagtgcagtggtgtgatctcagctcactgcaacctctgcctcccgggttcaagccattctcccgcctcagcctcccgagtagctgggattacaggcgcccaacaccatgcctggctaatttttgtattttttagtagagatggggtttcccatgttggctaggctggtcttgaactcctgacctcaagtgatccacctgcctcggcctcccaaagtgctgggattacaggcataagcaccacacctggcctcataattttctttctattcacatctccaagggtaatgaaatgtttcctacacttctgttaaaaagaacttctgccatgagaaagaattc

SEQ ID NO: 204424 - DNA, 449 bp, Homo sapiens
atggtgtgttaggagattgtaggacagctcttagccagtctaaatgattttaggaactgatgaggccagagaaattctaggtgttaagagaatgtgcaagtaacattgatgcatttctgaaataaaaccattcattccccaactcttttaaaaatatakatgttaatttagaagaaaaaaaaattcagtcgattcatattagtatcttcattttgcctctggtcaagattctaacagattattttttaaaaccaaagtatacatgcacatagtttaagtagtttaacttgtaaccaaaaaaatgttcttctccttgttctccccttccccattttcctctttctggaggcagacaatctcaacttttaatttatactcaaagtattgccattatatttacaaatgacatgcttaaattgctacttttagattttgcctatttcaagcat

SEQ ID NO: 204425 - DNA, 449 bp, Homo sapiens
atggtgtgttaggagattgtaggacagctcttagccagtctaaatgattttaggaactgatgaggccagagaaattctaggtgttaagagaatgtgcaagtaacattgatgcatttctgaaataaaaccattcattccccaactcttttaaaaatatagatgttaatttagaagaaaaaaaaattcagtcgattcatattagtatcttcattttgcctctggtcaagattctaacagattattttttaaaaccaaagtatacatgcacatagtttaagtagtytaacttgtaaccaaaaaaatgttcttctccttgttctccccttccccattttcctctttctggaggcagacaatctcaacttttaatttatactcaaagtattgccattatatttacaaatgacatgcttaaattgctacttttagattttgcctatttcaagcat

SEQ ID NO: 204426 - DNA, 436 bp, Homo sapiens
cacttgtgaaaggaaaataaaatcttgagactccaattcactatgctaaaaggaaaaaattaagctgaaagctaagttatgcmaaaaaaaaaaaaaaaaaaacaccctgcctttccttttgttcctaagcagataactatagacaaaagtttagatatcgccacagatagctactccatgctcactttatcttatgtaaagtgctggtttattgagcatgtgaatacataattggtgatcccctacctgctccttttcccttgcaatgtatggattcagtagtatgaccataccctcccagtgtcccctctagcccacttttccagtttaaatgttgaagtcctcaaaatcatccttgggaaaagtcatgaaccacagattgttcctgtggtgtggctttgtattccttttaactggacgcatccttaaccttggc

SEQ ID NO: 204427 - DNA, 572 bp, Homo sapiens
tattggttcccaattgtgactaacataccgtagtaaggtaggatgctaataatcgcggggaatgtgcaggtggtattggtagggtatatggcagctctctctactgtctactcaagttttaataaaatatgtcaagaattttgagttcacaaaatgaagtacatttatagatactctcttttgcttaatgtttgttcatgaatggctgtatactgtagttactttagcacctagcttttacagtttttcctttggggactcttttttttatggttgtgcatggatgtggtagagtaacttaacaagtcattgttggtggacagggagtttgttttcagcctttccattgttgttattataaacatgtagccttgaagaccgccaatgtctaagtgaactttttaactgaagtatcacaggcatccaggaaagtgcaagaatcatgactgcttagcttgatgaactctcccaaaaggaagatgcctgtaactgctacccagattgtgaaatgggacatccyaacacccagaagccccgtatatgtcctctctcagttactgtaccctcactct

SEQ ID NO: 204428 - DNA, 550 bp, Homo sapiens
caacaccagcaatccatcagtagcctgtgatccagggatatgcgggatgtagagttacttcattgccattaccatggtctctgaggtggtgagttctgagctcctacagcactgctgcagtgggtcatttctgtttcttgttttttgtttttatttagtgggtcatttcttgatagcagtcttgcatctcargtgagtgtttttttcctccagtcctcacatggcgatgtttatgtgcacagcacacatcctccatgctaatagttaaaccatacctatctctctcaaaaaaacacaacaacaacaacaacgaataaactgcaatcgtgtgggaataacagtaaggatacgattgaattgggcctaaattacgttagaaaaacaatgcattcacaagcattaatactgtatcgtagttaatttcctgccacatagctgtgggtgagaaccactggcctggtccatgggattgggtttctgctcagatgctgtgaggactagaacctgaacatcacctgaattcctgaccacttccattgccaactccatc

SEQ ID NO: 204429 - DNA, 598 bp, Homo sapiens
ggcctaaaacatccttttctatctagtataagcagtacttcacttagtaacattttactttaaaatcacacacacacagtaactgccaacatcttttatattagaccgaagactgactattcggggtctcgcacaaacccggtttttcagcrctagtgttacttatgaagatctagggacgttaacttttactgtcttacctgaattgttaattatatttttgttttgttttcttcctccactcccttgctttccactttcagccccgggaaatggatacaagtagaagaaaattccatttataaagtactgagagaatgatattggattttgctgaacaggcctatcttgaactttggtaaattatttttgacagaatactcttttcaaaatggcatttgctgatttcataaacctttcacgtctggacgaattaccaaatgccatgaattgccactgtgtgtttatgtagaaaatacaaataaaagttattttgatggcttaggtttccttaaacttagttctcttgtttttgggtaactgtgaataattaagttggaatcaagattcagattaactttcctatttgcatagaaca

SEQ ID NO: 204430 - DNA, 586 bp, Homo sapiens
tttccttccttctcacactggatgggcgtttagattgcacttgactctggagaccattcctccttcttgacaccactcccttggctgccatgactcccagcagtcctggctctcttttgagctgctttggtcattccattttattttcctcttctactcagcccttgagtattggtgttgctcagagccctgccctgagcagcttttctcattctggacactctcaggatagtctcaccattctcatgactttagtgaccctctgtggcctgatgagacttaaatctgtgtttacaacccagatttttgcccacacttgagtcttgtatastcaactacctttggacctctgcaagttgccttgaactcaaggtgtcacaactgaaaataatcatcttccctcctgaactggattttccttctatatttgctagtctacatattttatctttattaatagaaatagcatttaacccactatgaggcactggcagaaaatacaaaatcagtcttaaactattggaaataggcagatggaggctctcttacttgttgaatttgtgaaacatatttcataatgaaagta

SEQ ID NO: 204431 - DNA, 586 bp, Homo sapiens
tttccttccttctcacactggatgggcgtttagattgcacttgactctggagaccattcctccttcttgacaccactcccttggctgccatgactcccagcagtcctggctctcttttgagctgctttggtcattccattttattttcctcttctactcagcccttgagtattggtgttgctcagagccctgccctgagcagcttttctcattctggacactctcaggatagtctcaccattctcatgactttagtgaccctctgtggcctgatgagacttaaatctgtgtttacaacccagatttttgcccacacttgagtcttgtatagtcaactacctttggacctctgcaagttgccttgaactcaaggtgtcmcaactgaaaataatcatcttccctcctgaactggattttccttctatatttgctagtctacatattttatctttattaatagaaatagcatttaacccactatgaggcactggcagaaaatacaaaatcagtcttaaactattggaaataggcagatggaggctctcttacttgttgaatttgtgaaacatatttcataatgaaagta

SEQ ID NO: 204432 - DNA, 561 bp, Homo sapiens
gaattcagacacttaagtgccttctggaaaaatctatctattctgcctttattaatagaagtaaaattggacccacaggtataaggtacttagagaaaatatgaaattatttagtgttagaagtaggctgacttgaaaaattttgtttgctgttccagaattataagacaccrttttgctaattaaacagaaagaaggaacaaaatgacaaggaagatataatcaattaagcatggagaagggtgttaattatggttttataattattatatcttatcacatgataatttctatatgtttgaattttcaagtaccaccttgaaaactgtcactgtctacttatcttttacatatttttttttttttttagagacaggggtcttgctttgctgcccaggctggagtgcagtggcatgattatagctcactctaactacataaaaagagaagttttttttggctcaagtgatcctcctacctcagccttccaaatagctacgactacagctacttggaagtgagccactgtgcccagctaaatttaattttttttttttttaa

SEQ ID NO: 204433 - DNA, 600 bp, Homo sapiens
aagcttctcttttcatcagaattaacccattgacccawatggatctttgacacttcctaagtccaaaaaaacccacaaaaaagacaacaaaaaacatctttactgaagaggtttgaaattagacactgtattagttctctgataagtaagtacaaaacctcaatctttaatgaagttcctctgaaacagtttatttttcatggactattcttcaacaaatcttccataccattttaggtttgtttttatgagacttcttgagtattaacagttagtggtcttggtcactgattcttattctagtcacctatctagttcttgggccagaggaatatcagcttagttaaaagtgcttccaggtcttgggacccttgaaagatctaagggaatctatagtcccactctcaactgtggagacctcagctataaatataataccattcagatggtctccagctagaccatccagtaacagataggtatctataataataagagttctagtttgttcctccattttgcaaattaaaagtgcagaccttttctgaggctgaaattattacatctcacaaaggacttcatgggaatggatgaagggtg

SEQ ID NO: 204434 - DNA, 306 bp, Homo sapiens
gaattccatcattctcctgcctccaacctatttgttacktatggagtcctcaaaagaatggggactgagatgagggagactatgtccaggagacaagtggccatgggtccttttcagcagtcaggggccctcttcgtctgtgcccatttttccttcattcatcaggaacaagacccatgaatgtcctgaattgacatgtgatgttctttccaccacaatccatgctgcctccctgagtggagaaaccactcccctcttcaaagagggccttttgtttgatcaaggctgttttcactgtgtcatggt

SEQ ID NO: 204435 - DNA, 306 bp, Homo sapiens
gaattccatcattctcctgcctccaacctatttgttacttatggagtcctcaaaagaatggggactgagatgagggagactatgyccaggagacaagtggccatgggtccttttcagcagtcaggggccctcttcgtctgtgcccatttttccttcattcatcaggaacaagacccatgaatgtcctgaattgacatgtgatgttctttccaccacaatccatgctgcctccctgagtggagaaaccactcccctcttcaaagagggccttttgtttgatcaaggctgttttcactgtgtcatggt

SEQ ID NO: 204436 - DNA, 429 bp, Homo sapiens
tgttacttatggagtcctcaaaagaatggggactgagatgagggagactatgtccaggagacaagtggccatgggtccttttcagcagtcaggggccctcttcgtctgtgcccatttttccttcattcatcaggaacaagacccatgaatgtcctgaattgacatgtgatgttctttccaccacaatccatgctgcctccctgagtggagaaaccactcccctcttcaaagagggccttttgtttgatcaaggctgttttcactgtgtcatggtctcagacagctttcttttgtgttctgtttaaatacagaatgacagtccactaacacgawgtctaaaaactttggcttatctttttgtaaaagctactgtatcaaatctgtcctaaaaatagcagaatgacccattctgtatgtacaggggaattc

SEQ ID NO: 204437 - DNA, 589 bp, Homo sapiens
caaaaaaaaaaaaaaaaaaagagagagagagagagaaaaccagacactgtatactgtagcaattatagactctgaattcagaatcccttgagtttgccattttctagcagtatgaactgagacaaattactgaattgttctgtgcctccactttctcatctgtaaaacagtgataataagagtacttacttccaagggatattatgaagattaattgagtcaataagyataaagtgcttagaacaaagcctgccacatatatgtgtatgctaggttactattactatacacattattattatatattattatcatagaatggaagatggatgggtgcaaaaaactatcaagaagagtaggtattggttatttagtgactaaatcatcaacccaggaaaaagaatatctgttttggttgtacaaggacatagatgaatcaaggtaagatttccttttgccaggcactgacaggaacatatagtaaatcctatagctatatttaggacatgagatacaaccctaagcattgtgcaaactctgcacaataataataaaccctctttctgcgttaccaacactgagaaagggt

SEQ ID NO: 204438 - DNA, 467 bp, Homo sapiens
ataatagcagttggagatttccatactcttttatcagtaattggtagaagaagtagagagaaaatcagtaagtttgtagtgatctagacataatcattagcatatttgaccacactgacattcatagaacactccacaaacaacaaaagaatacacaatcttctaaagtgtacaaggaacattgatccaaatagttcatattggtagcaatagaacaaatcctggcaaatttaatagaaattaaatcatatgaatkaatttttagtcaacaagaaaaattaataggaatcaacgatagaaatatatctagaaaattcttaaatagttagaaattaaattattcactccaaagtaactcataggtcaaaggggacacgtcaagaaaaattaaaaattggtttgatgcaaataaaagtaaaatacaatattttaaacctctggagcttaagataaactagtgcttagag

SEQ ID NO: 204439 - DNA, 700 bp, Homo sapiens
gcaaataaaagtaaaatacaatattttaaacctctggagcttaagataaactagtgcttagaggaaaaagtaattatgtaaattattacattaagaccccaaaagcaaatgcaacaaaataaaaaataaataagtgaaacctaattgaactagaaagctctgcagagcaaaacaaataatccgcagagtaaacagacaacttacggaatgggagaaaatatttgcaaactatgcattggacaaagaacttatatctagaatcttcaagaaactcaaacaaatcagcaaggaaaaataaataatccgattaaaaagtggacaaattacatgaatagatatttttcaaaagaatatatacaaatggcaaacaaacacgtgaaaatatgctcaacatcactaatcatcaggaaattgctaattaaaactacagtgagataccatcttacttcagccagaatggccactattaaaaagtaaaaaaacaatagatgttcttggagatgtgktgaaaagggagtgcttatcccctgctagtggaaatgtaaattagtacagcctctataaaaaacagaatgaagatttctcaaagaactgaaagatctacgttcaatctagcaatcctaccactgggtctcaatgcaaaaaaaaaaaatcattatatcaaaaacacactggcatgcatttatttattgcagcaaaa

SEQ ID NO: 204440 - DNA, 526 bp, Homo sapiens
gtgatgttttcctggatggtgttgatgctagtagatatttttcagtgtctgggcattgaagaactgggtatttattgtagtcttcactatctgggcttgtttatacctttccttcttcagaaggctttctagatatttgaaatgatttgggtgttgtgatctaagctgtatctgctttagaggacaccttaatcccagtaatgctgtggtccttgcagttttgtagaggtactgccttgatgatcgtggacaaaatccaggagaattctctggattaccaggtaaagactcttgttccattcccctactttctcacaaacaaatggactctctcactctctctctctctctccctctctcttctgagccacctaaagcttgaggtggactgacagaagcacccttgtggtaaccaccactatgastgtggtgggtcaaacctaaatctagcataacactgggtctcggccaaggcctgctgtaaccattccctggccactacctatgtttgctcaaggccttatgg

SEQ ID NO: 204441 - DNA, 507 bp, Homo sapiens
gaatatgtgcatatcctgcaggatttatcccaacaccttggaatgtttttattttcaataataaaagtcagttggacatcatggcaaccaaaatacaataagcaaacaaaaattatcactgtttctaacaaattgttgattttytgaaaattgagtcattgggaaaaatttctgaggtgccaaggatgtagaagagggcaacaggaacacagactagcaagagagaaaagatagctacaattattagttgggcttcaagaccagctacacaatcagggactttagtgatgatgcttgggttatttttttttttttttttttttgctactgtatatgaagaacactggtgattgtcaacatcagtcagacaccaatatgaggaacggaatgtgttggaattaattccaccataatattgattggatttgtttcacatgctttgaagttatgctttatgcttttacttccaaagaaaggacaagatcaatgctacaggacaaaataaat

SEQ ID NO: 204442 - DNA, 507 bp, Homo sapiens
gaatatgtgcatatcctgcaggatttatcccaacaccttggaatgtttttattttcaataataaaagtcagttggacatcatggcaaccaaaatacaataagcaaacaaaaattatcactgtttctaacaaattgttgattttctgaaaattgagtcattgggaaaaatttytgaggtgccaaggatgtagaagagggcaacaggaacacagactagcaagagagaaaagatagctacaattattagttgggcttcaagaccagctacacaatcagggactttagtgatgatgcttgggttatttttttttttttttttttttgctactgtatatgaagaacactggtgattgtcaacatcagtcagacaccaatatgaggaacggaatgtgttggaattaattccaccataatattgattggatttgtttcacatgctttgaagttatgctttatgcttttacttccaaagaaaggacaagatcaatgctacaggacaaaataaat

SEQ ID NO: 204443 - DNA, 549 bp, Homo sapiens
aacttaaaaataaactaatatatcattagttgtgccccagagtggtttctattagctttaggttcaggtttgcattacattactaagaaaaaaaattcaaggaacctggccaggtaccacatacagtgattacttcatcacttactaatctgtggccatgggcaaattatttaatatatctatctatctatctacccttataacatagtttaaagatgtaawtttttttctcctcatttaatctactcatagtattttacatgcaatgcacaatgtattataagagttaatggctgatttacaaagtaccttatattaacattgcatacatttagtattcaatatgttgtagctcttattttattttgtacatgagttctgttttgttcactcttatatcctcattgcctagaagagttattggcatataatgtacatgcagtatattttttgaatgaaagaatgaattataattactttaaacaaataatactctcctgtgtttctttttaaggccaaataaaggcttacttcctctatagagactgt

SEQ ID NO: 204444 - DNA, 549 bp, Homo sapiens
aacttaaaaataaactaatatatcattagttgtgccccagagtggtttctattagctttaggttcaggtttgcattacattactaagaaaaaaaattcaaggaacctggccaggtaccacatacagtgattacttcatcacttactaatctgtggccatgggcaaattatttaatatatctatctatctatctacccttataacatagtttaaagatgtaaatttttttctcctcatttaatctactcatagtattttacatgcaatgcacaatgtattataagagttaatggctgatttacaaagtaccttatattaacattgcatacatttagtattcaatatgttgtagctcttattttattttgtacatgagttctgttttgttcactcttatatcctcattgcctagaagagttattggcatataatgtacatgcagtatawtttttgaatgaaagaatgaattataattactttaaacaaataatactctcctgtgtttctttttaaggccaaataaaggcttacttcctctatagagactgt

SEQ ID NO: 204445 - DNA, 433 bp, Homo sapiens
aatctatgtattccttgaccctccccactttatatttctggttagcataaaacagaacagctggtggtgtggcactcatgctgcaaacaggaagcaatgagcaggatagcagaggctacaaggaatgttggagcagaagatctggatctctgagtctcagtcactgtatttaccttgactgcttatcttgggttatgcatgtaagataaacagctctgtattttgcaatgaacacattattactgcatatattcacctttcattctacttcccaaacattcttgattattctgtaatcttttttttaacctttttttctctatgtcttccaacatacartgatgttataggaatcatctattcctcctagattgcaactagcccccaatttctggacaaattgtttgtaatctccctgaggggatcttctgac

SEQ ID NO: 204446 - DNA, 538 bp, Homo sapiens
tgacactaagattatgaaataggattatcaagtataaacaaaagaagtactaaatagtattgattctaaagtgttagcagttataaagcttatcaataatttagcaagtttttagtgggagataaatgattcagcaaatgtacctattgacagtaagatacaycggagatttgaaaatataccaatgtcaaaaacacaagttagaataggaaatttaacaatatgggaatattattgacatgtgaccattggtaaaaaatatgcgatagttagagtaaaacatgttttatatgattttggggaaagggaataaatgatgactgtttagagatgggatttattggagataccataataaagttattttagaaccagaatttgatagattgataataaaagaatgcaaagatgaaatggttagtgttgttattactaatgagaaaaacaactttcactatctgacatacatcgtttgtctcctaatccttgtcttaaaggaaaggacaatgtgaaagaggctctagaaaacatttcaaag

SEQ ID NO: 204447 - DNA, 538 bp, Homo sapiens
tgacactaagattatgaaataggattatcaagtataaacaaaagaagtactaaatagtattgattctaaagtgttagcagttataaagcttatcaataatttagcaagtttttagtgggagataaatgattcagcaaatgtacctattgacagtaagatacatcrgagatttgaaaatataccaatgtcaaaaacacaagttagaataggaaatttaacaatatgggaatattattgacatgtgaccattggtaaaaaatatgcgatagttagagtaaaacatgttttatatgattttggggaaagggaataaatgatgactgtttagagatgggatttattggagataccataataaagttattttagaaccagaatttgatagattgataataaaagaatgcaaagatgaaatggttagtgttgttattactaatgagaaaaacaactttcactatctgacatacatcgtttgtctcctaatccttgtcttaaaggaaaggacaatgtgaaagaggctctagaaaacatttcaaag

SEQ ID NO: 204448 - DNA, 461 bp, Homo sapiens
gcaaaccaaaatgcataagaaaagaatcaactgagcaattgataacttctaattattggctagttttcaaatcttcaaaactatctacttaacgttctctctgttgactttctgggggcgaatcatttgttggggcacatttctctcttttaaatgaagagttagtagccaaggttttggacatgtgcgtttgaaactgtgtgaaacctacactttaggatctagaaacagattttcytacgctggagagagattttaactctccatctggcaacagaccagatgctgtttgttgcaactggcagaacaggaacaactgatttataaaaaataaataaataaaaaataagatgctgagttcctttttagtttactcatgctatgaaaacagtttcagaaaacagtcagcatgaggagatatagcaagtagcgaacagtttatactaaggtagacaaagtct

SEQ ID NO: 204449 - DNA, 607 bp, Homo sapiens
aaaggttgaggaagtctcgggtattttctttgcagtgttctatctgggcctgtgtatgttagtttattctctctctstctctctcactctctctctcattattaatatcccctagcttattttaaatatcttaatttctcaaatagtctcagcccagtccctcttaaaatctcaaatccatatttttgtttttatccaacagttttcaaacatttcagcatccaccactgccttctggggcttccagactgaaatcaaatctatgtttccattccccagcagagctccaaattaggcaagacaatggtacttcttaggacaatccacagattggccagaatgttgcaaataagtttaattctactccttttgtcttgaggaaaaaaaacttggaattaggccactttctcttaaatgtgcacaacacgatttcaagagagttttgctagagcaactcaaaatgccataaaatgttctaccactttaatgtggctttttcttaattgggtattctgttggttattgtagatacttgactggttttccagacctctcataaagttatttcttagtcaatctgcagttgtttattgatgtgtccatttga

SEQ ID NO: 204450 - DNA, 434 bp, Homo sapiens
ggcaatcaaggcgatatatccatgtgattctgcaagagycacactattactggcttggggtgccccctaaagcagatacagcttatatcgcaacacccatgtccttttgaatatctggaaaactttcccaaagtggacaggcacaaaaaagcccagactatgaagactataatattaatacatgtgtaactcttcaatgcccagacacagacaaatattcacgagtatcaagaccatccaggaaaacatgacctcaccaaatgaactaaataagacaccagagatcaatcctagagaaacagatatgtgaccttttagatagaaaattcaaaatagctgttttgaggaaattcaaagaaattcgagatcacacagagaagaaatgcagaattctatcagataaatttagcaaagagattgaaataactaaaaga

SEQ ID NO: 204451 - DNA, 432 bp, Homo sapiens
aaggcaatcaaggcgatatatccatgtgattctgcaagagccacactattactggcttggggtgccccctaaagcagatacagcttatatcgcaacacccatgtccttttgaatatctggaaaactttcccaaagtggacrggcacaaaaaagcccagactatgaagactataatattaatacatgtgtaactcttcaatgcccagacacagacaaatattcacgagtatcaagaccatccaggaaaacatgacctcaccaaatgaactaaataagacaccagagatcaatcctagagaaacagatatgtgaccttttagatagaaaattcaaaatagctgttttgaggaaattcaaagaaattcgagatcacacagagaagaaatgcagaattctatcagataaatttagcaaagagattgaaataactaa

SEQ ID NO: 204452 - DNA, 434 bp, Homo sapiens
ggcaatcaaggcgatatatccatgtgattctgcaagagccacactattactggcttggggtgccccctaaagcagatacagcttatatcgcaacacccatgtccttttgaatatctggaaaactttcccaaagtggacaggcacaaaaaagcccagactatgaagactataatattaatacatgtgtaactcttcaatgcccagacacagacaaatattcacgagtatcaagaccatccaggaaaacatgacctcaccaaatgaactaaataagacaccagagatcaatcctagagaaacagatatgtgaccttttagatagaaaattcaaaatagctgttttgaggaaattcaaagaaattcgagatcacacagagaagaaatgcagaattctatcagataaatttagcaaasagattgaaataactaaaaga

SEQ ID NO: 204453 - DNA, 564 bp, Homo sapiens
agaattcccctaagtttctttcatgtctcatctccttaacctgttttacctatacatcaacttcaaagggaattatttctctgagagaaagatgaataaagtgggcaagacttacatctactcagcacagtgaatttgctagattatcatcaccatggtcataaacataaagtatttcagtgaagagtgacaggaaaatacaagatcaataacaagtatacactaaatctaaatatccatttmgtttttgtatgtagaaattttttagcaactgacttagctttttctaagaatttcagttgctattcatttcaactttacagaaattaagctgttagaaaccagataacattatagttccttgccaacacacatcaacttactctttagtaaatgatgccataaacaatataaatgattatttaagcattgctcataatatctaaagaagaaattctgaaagtccttaatctctgtctggggaggttaagagtagcatggctctggacatagatgatcttgagtttaaaattttgctctgataaattccagctatatgacatt

SEQ ID NO: 204454 - DNA, 400 bp, Homo sapiens
gtgacaggaaaatacaagatcaataacaagtatacactaaatctaaatatccatttagtttttgtatgtagaaattttttagcaactgacttagctttttctaagaatttcagttgctattcatttcaactttacagaaattaagctgttagaaaccagataacattatagttccttgccaacacacatcaacttactctttagtaaatgatgccataaacaatataaatgattatttaagcattgmtcataatatctaaagaagaaattctgaaagtccttaatctctgtctggggaggttaagagtagcatggctctggacatagatgatcttgagtttaaaattttgctctgataaattccagctatatgacattgggtaacttactttattttact

SEQ ID NO: 204455 - DNA, 590 bp, Homo sapiens
agaattcccctaagtttctttcatgtctcatctccttaacctgttttacctatacatcaacttcaaagggaattatttctctgagagaaagatgaataaagtgggcaagacttacatctactcagcacagtgaatttgctagattatcatcaccatggtcataaacataaagtatttcagtgaagagtgacaggaaaatacaagatcaataacaagtatacactaaatctaaatatccatttagtttttgtatgtagaaattttttagcaactgacttagctttttctaagaatttcagttgctattcatttcaactttacagaaattaagctgttagaaaccagataacattatagttccttgccaacacacatcaacttactctttagtaaatgatgccataaacaatataaatgattatttaagcattgctcataatatctaaagaagaaattctgaaagtccttaatctctgtctggggaggttaagagtagcatggctctggacatagatgatcttgagtttaaaattttgytctgataaattccagctatatgacattgggtaacttactttattttacttatc

SEQ ID NO: 204456 - DNA, 631 bp, Homo sapiens
acagatgacaacaattatagccattagagagataataatacaaagataaattaggaacaatttgtgaagaaatttatttattttagtattaactttacataacatcttattttcagtagcaaaatgtctggcttattctgggactactgagaaaaataagcatatatatatataatatgtatattttatatcatatatttaaaaacagtattttaagatatgcctatgaagagataatatgtttggccttttaatataaaaagaccacattctaactaggggaatagtgagttcctattagtctataaagattgacctactaacagattatccattcaatgggaaggtattatatataaattgaatcttttctaggattttgggtatttggtggccaattatccatatgtctgacaaattcatttatatcagtagttcaaatttgaaaatgagtgagcagacataatstattaccaataaaaaaatacataaaatcaactggccacatatgtattgaaactagactaggtatttgatggatgaatatatatgaaaaaaattaaaactaataataaaaaaactacagtcttacattaggcagaggaatacctatttttatttttctcagctc

SEQ ID NO: 204457 - DNA, 361 bp, Homo sapiens
aattagtgatttttttccaccttagaagtaattgaaatttaagtgtaacaactccttttggtgaggtattttaaagggtgaaaatctctgcttagcctatattaaacactcaataattactagtttctttcccattaatgaataaaatatcttcagaaagttctcaaaaaagaacacatactctcrcctgcctgtgatgatgaattatatctgatttattgcctaaataaactgataatgttccacttagaaatctcagattaaggtgaaaccaactacctcattttggactcaccttctcattgcccttcaaagaatcttgagccaggaatcaacataactgatcacattgttacaaata

SEQ ID NO: 204458 - DNA, 481 bp, Homo sapiens
aatcagaggaataaaattattttaggttttgtatagaaagagtgacagattatagatttatttattaaagccaaaattgtttgaataacataaatgctacaacatattgagtgtaataacaaaatcagtgcccagagtaaaattgaaaagaaaagraaaaaaaagaagcacatttgaacattataaagaaatatctctgctggtttatgccgggagaaagtcaataaaagttcaaaccataatgtgatactaaatctcaattactctttgtgaggaaccattaaaacaattatgtagttttatttatttaggagagcatattgatggtttctttcttcttggttctggtacttacctagtagggtagatataaaatagaaggctttgtaggatataattacttccagggttttgtttacggtgccttttcctttatcaagtgataagtttgttgagcatgtaactggaactaatagtttag

SEQ ID NO: 204459 - DNA, 592 bp, Homo sapiens
acaataaatgaaacagataatataaaactgtaattatttatagatgacataatgatgcaggtagaaaaatccaagtgaattcatatgggaatattacaaggtcactaaatattgtaaatatgtagaatcaactgtattgctatatattagtaacaaacaggaaagttaattttaaatgataatatttgctatattataataaatataacccattaattgttttcgtaaaakatatgaggcatatacactaaaacaaactagcaacaaaaacagcaacaaaaggcctaaaataccactgagataaagaaaactacataattggaagcaaatgcgatgttcacaggttagaagattcaaaactataaagatagcaactctccatcagatttatctataaagtcaaggcagtcttaatcaaaatctctccattattttcttacaaatttacaagcttattttgaaacttacattgcaatacaaagagctaagaatagccaagacaatcttgaagaacaaagccagggcacttatgcttccagaaatcaaaacttgtcatgaaactacagtaatttagataatattatgttggtac

SEQ ID NO: 204460 - DNA, 372 bp, Homo sapiens
cccagaagttgccagtttagggctggcatagcagcttcatgttaactgggacccaggatcctccattcttattgctctgccatcccgagaatgttgtctcaagattgctgacttaaaacagctccttgtgctcctactatcacattcatattccaagtagaagaaaggagaaagggaaaaaagagaagtgtaccttctcccttttctaaatttacagttcattaaaatatcacataataaagaaacacactcaatgtacagcttgataaattctcacmaagtaaagacaaacttttaaccgtcacctagatcgagatatggaacactatcaacactctagaagacactcttatgacccttctcgtaattatt

SEQ ID NO: 204461 - DNA, 541 bp, Homo sapiens
actgacattggaacttcaccctggtgagaatgactttgaccttcatatcactttcacttcttattcccatgaaaccttagaamtcttagcctaaagtcagttttccccccaatcattttcaacatgtgtcctttccaaacacaagtaatataaggtagtcttcagcacgtttttgtgcttgtctaagagaacgtatatgaattattctcagaaacttcatgatgaattactagagaaatagatttaatccataaatatatgtgaaatcataaaaatttaatatgtctgtagacacatatgcaggcacacatcctttcctcccccctttcaccatcacacatctttcatcttcctttttgtttttgtgtcggactctcacttgttctattctgtcatcttaaaatggttaaattgattggaaaagtccaggatgttatatttcattgatcttttcagcacacttgagtattctaatatagagtttgggaaacagtaacagtggcccaggtgaaatatgcagatggaaatttctcattaaatc

SEQ ID NO: 204462 - DNA, 511 bp, Homo sapiens
ttttgttttgttttgagatggagtcttgctgtgtcacccaggctggaggacagtggcgtgatctcagctcactgaaacctctgcctcctgggttcaagcgattctcctgcctcagccttcagaatagctgagactaccggtgtgcaccaccacrcccagctaatttttgtatttttagtagagactgggtttcactatgttagccaggctggtcttgaactcctgacctcaagtgatccacccgccttgtcctcccaaagtgctggaactacaagtgaaagccactgtgcccagccattgttaatgaacttctaatcctcatttttttaaatgtattaatacttaaatactttatacccaagattcttgtgtttcaaggaaagcttttaaatgtttatgtggcattttaatgaaacagagaagcaaaggtacattgtttatttaatctgtttgtcaaagtagatcatattcatcactgctaggaaaatcttaccagattgtaccttttata

SEQ ID NO: 204463 - DNA, 511 bp, Homo sapiens
ttttgttttgttttgagatggagtcttgctgtgtcacccaggctggaggacagtggcgtgatctcagctcactgaaacctctgcctcctgggttcaagcgattctcctgcctcagccttcagaatagctgagactaccggtgtgcaccaccacacccagctaatttttgtatttttagtagagactgggtttcactatgttagccaggctggtcttgaactcctgacctcaagtgatccacccgccttgtcctcccaaagtgctggaactacaagtgaragccactgtgcccagccattgttaatgaacttctaatcctcatttttttaaatgtattaatacttaaatactttatacccaagattcttgtgtttcaaggaaagcttttaaatgtttatgtggcattttaatgaaacagagaagcaaaggtacattgtttatttaatctgtttgtcaaagtagatcatattcatcactgctaggaaaatcttaccagattgtaccttttata

SEQ ID NO: 204464 - DNA, 426 bp, Homo sapiens
cagggtattacaaacttggagtagcaatataaaatttattttatctgcacatttttgtttcaattggtttccaaagatgttgaaacaatataatcttgtcaaattgttgttataatatgaatttttttgaacagctgatagtttgaccaagaatttttgatgtttatgtagaattggggaggctgtatatttcataaytgcatacattttttgttaatagatatttgtaacatttgttttcctcctgccaagaaatttcctgaggcaaagaaacatgatgctggggagcatttctcagtaagattttctttagttttgctttagattcacactggtgaaatgttaggcttcatttagggaatatttttaatagtggctgtggtctactggacatgaaaaaagtagaaacaagaagctctgggattc

SEQ ID NO: 204465 - DNA, 452 bp, Homo sapiens
aactttaatatagaaaacttgtgattcttatagtttttttactgtttctcaacctaaaaatattaaaatgaatgctatttgaattactaagatatggtatatttatacaaaaatataatttcaaacagtgacttatattggggaaaactaggaaacaggaattagtagggccaaggaattttgaccttggccctactaataactgaccttgggtatgtcacttaacttccctagattttagttttccccatctgtaaaataagtgcattggatcacatgatcccttagagatgaaaagcaagagctaaatgagtagtaattattataaagaagttcttgctctttttaagatgctcatcttttattatttgagatgttcttatgtgcagcaagtcatcaaataaatagagttaccctcaatgtaygctttttactctgctgtggtctgaatg

SEQ ID NO: 204466 - DNA, 417 bp, Homo sapiens
aaattaaaaggtgaatatgtmtttacctatttactatttacacaactatcaaagattgccaaaataaaaatcctgtataggcgctcatcattttgatgggtggataagtcgtgatacccatagtttggaaggaagattccttcaagagagtacaattttgcttggtaaatcttttgcatgttaaactttttagaagaagaaagtaaataaaaatataaaatgtatgttggtatgaagaatctgaaacataaatgaaattcctgaaaattaaagggtgaatatgtatttacctatttactatttatacaactatcaaagattgccaaaataaaaatcctttttaggcactcatcattttgatgggtggataagtgatgatattcagagtttggagggaaaattcctttaagagagtat

SEQ ID NO: 204467 - DNA, 582 bp, Homo sapiens
tataacaacagaatttgtaacagcacaatattgagaagcctctaaatgctaatcaataaatggtttgttaaacataaatgattataaatatgtaggttaaagtcttcaaagaactacacttaagagttgatatcagtgtaattttagattgagaagatgaccaaggagaatttatctctaaaatcgtacctcctgaaggatgaaaatgcaacagtatgcaaaaattcaataaaatgaaattttaaaattactcttctctctttccctccaagaacaactagtattgggtatataagagcaaattaagtggtatgaatgaaacatcagcaaaaagagttgatttgtaaataatatttaaaatcaatgctaattataggtgtgctaaaaatcagtttcagtccatggcacagaacagaaaacttcagaaacayagaataaaggaagattgaaaaccattttctcctttactcaattggctctagagattcttaatttctctgtattgtaaagttataatatttatccagtctatattttgttgaactccaaatatctttggaggaaaagaagtaattactacat

SEQ ID NO: 204468 - DNA, 582 bp, Homo sapiens
tataacaacagaatttgtaacagcacaatattgagaagcctctaaatgctaatcaataaatggtttgttaaacataaatgattataaatatgtaggttaaagtcttcaaagaactacacttaagagttgatatcagtgtaattttagattgagaagatgaccaaggagaatttatctctaaaatcgtacctcctgaaggatgaaaatgcaacagtatgcaaaaattcaataaaatgaaattttaaaattactcttctctctttccctccaagaacaactagtattgggtatataagagcaaattaagtggtatgaatgaaacatcagcaaaaagagttgatttgtaaataatatttaaaatcaatgctaattataggtgtgctaaaaatcagtttcagtccatggcacagaacagaaaacttcagaaacacagaataaaggaagattgaaaaccattttctcctttactcaattggctctagagattcttaatttctctgtatygtaaagttataatatttatccagtctatattttgttgaactccaaatatctttggaggaaaagaagtaattactacat

SEQ ID NO: 204469 - DNA, 429 bp, Homo sapiens
atttctgtttaactgttcccttatattttatgttaatgaatatcaaacttacttcaaggcttccaaagggccgctggacctgggtcctcctttatctctgctcttcattatgttaacttatgctcatatttagttttcaccttaaatgtctatttcccaaaacaagcaattacagtgcccctcttatgtagtccttttagtaactcaccatagcagtaatcacagtgcactgtaattgcttgtctactcacgtattagctctgtgaaggtaaaaactgttgtcacattcaccattttatttgcagggcctagcatggtaagttctcaaatacttagtgaataaaacacacacacacacacacacacacacacacacacacacacacamataaatgagttctcaatcttggttttcaaccaatgaacaga

SEQ ID NO: 204470 - DNA, 429 bp, Homo sapiens
atttctgtttaactgttcccttatattttatgttaatgaatatcaaacttacttcaaggcttccaaagggccgctggacctgggtcctcctttatctctgctcttcattatgttaacttatgctcatatttagttttcaccttaaatgtctatttcccaaaacaagcaattacagtgcccctcttatgtagtccttttagtaactcaccatagcagtaatcacagtgcactgtaattgcttgtctactcacgtattagctctgtgaaggtaaaaactgttgtcacattcaccattttatttgcagggcctagcatggtaagttctcaaatacttagtgaataaaacacacacacacacacacacacacacacacacacacacacacaaayaaatgagttctcaatcttggttttcaaccaatgaacaga

SEQ ID NO: 204471 - DNA, 588 bp, Homo sapiens
ggtggtgcatacctgttttcccagctacctgcaaggctagcctgagctcagaaggtggaggatgcagtgagctgtgattacgccactgtactccagcctgtgtgacagagcaagacccrgtctcaataaataaataaatatttttaaattaatttttaagtaaaacagcatggcaggatcaggcatggtggctctgccatctccgtgctttgggaagctaaggcagatcacctgattccaggaatccaaggctgcggtgagctatgattgtgctaattaatgcactccagcctgggtgacagagtgagacactgtctctctcaaaaaccaagcacggtaatggcataaaaaaagacatatcacccaatggaacagcatagaaagcctggaaataaacactgcatttacagccaattgacttctgacaaaggtgctaataacaaaacaagggggaaggacagtcttcaataaataaggccgggaaatctggttatccacggggagaagaaggatactagatatccttatcaaacaccatatacaaaaatcaactcaaaatggaataaagacttaagtattaagacctga

SEQ ID NO: 204472 - DNA, 602 bp, Homo sapiens
gagccaccacaactgacctaaattttttaatcatacgtgtgcaataaaatagggtacaatataggaaaaaaaaatatcctctgttaggaaayaatatataaaattagtgcataatttaagaaatatttggccttgaggtaaattaatgtgctgtttagagggctccgggtgatagttaaagtgtcatgtttcctggttccaagggtctacaaagaaacaatagtatgtgcagtatataaagccacatgtcattacaacaagccttccttggtagacaattgatacttctcctagaattgtatggactgtccatgactgactatgggctcaactgtcaaagccagcagttgaagaaaaacaaattaaagccaggagagccagtgttgaagagaggagaggcttctgttcttttctccagacatcaacagtgcttttgttcctttactggctttgtatgatcatccatccctctcttttccccaaaaggaaaagaaaatactaataatgtcatattgcaaacattgagccctatttacccatggtaatggttggggtcgctgtatgtaaaatggtaatgctcttgtgcatggtcttcttttcaa

SEQ ID NO: 204473 - DNA, 573 bp, Homo sapiens
cagggttgggaatcctttcgttttgtttgatttatatytgggttgattcaaatcctttaatttttatttctgagccctaaactctcagaaaggcatgttggagaatttcttgtctaattttataaaaataaaacgaatatctttaagaaacctagatatcttgtttcacactaattgcctgatttagtattcaggttggatcaagaggctttctagaaaatgggtcaaaaaggataaattagtttcattactaacaagaattcttaactaagtagcagttttgctttaggctcagtaattaaatctccctgatgtgatattatgttgcctctttctctagccttcttcctttgctaattgcccttaatttattattgatcactgaaaatttttctctaaccttcctatctcctaaatcaattctcaaacccaatcaataattctgttttcaactagctttcttttttctacattgctaagtctttccccaaattaaaatgaaatttcaaattaccttgtacaaatctacagacaggttaatacactcactgtatcatttcaggggatagaaga

SEQ ID NO: 204474 - DNA, 559 bp, Homo sapiens
tacctgctgttacttaggtacatacaacactagtgactaagtgtaagatgttgttttagtcatttcaggctgttatactaaaataccagagatttggtggtttaacaacaaacgtttattccacagagatatggaggccaggaagtccaagatcaaggtgctggtcgattcctgctaagtgccctcttctttattttcagactgatggcttctaactgtatccatacatgayggtaagagagacctccagtctctcttttcttataaggacagtaattctattatcaggtttctgccctcatgacctcatctaaaacctaattacccctaaagactcagtctcctaaaataccatcccagtgggggttagggcttcaacatacaaattttggaggggacacaaacacaaattttggagtggccacatcacaaattttggagaagacacaaacagatttcaccaaaatcagaagaaagttttttaagggaacgtacatcattcgtggcttgattccggtgaaagagacaaagtaatctggaagaaaaaaaattgcagctt

SEQ ID NO: 204475 - DNA, 564 bp, Homo sapiens
ctcactcactatcatgaaaacagcatggagggaccagcctcatgatctaatcaccttccaccaggtctctccctggctcccgacacatggggattacaatttgagatgagatttgtgtggagatacagccaatccattttacccacaaatacttmtatgtttcctgtttgttcatgtgatcttgaaagtgaagagttttgaatgacaaatatcctcaaatattttaagagttttttatacgcccttcaaaacacatttctacttattcaaaatttatttctagaaagtcctagtcagattaattaggtgagagaaataaataaaaagtacccaaataggaaaagaagaagtcaaaccacccctctttactgacaatctgattctataactaaaaatccctaaagactcagccaaaaggtttcttgaactgaaaaatgacttcagagaagtttcaggatagaaaataaatgtacaaaaattagtagcatttctatatatgagtaatattcaagctgagagccaaatcaagaatgtaaccccatttacaatatccacaaaatgaat

SEQ ID NO: 204476 - DNA, 552 bp, Homo sapiens
atctaatcaccttccaccaggtctctccctggctcccgacacatggggattacaatttgagatgagatttgtgtggagatacagccaatccattttacccacaaatacttctatgtttcctgtttgttcatgtgatcttgaaagtgaagagttttgaatgacaaatatcctcaaatattttaagagttttttatacgcccttcaaaacacatttctacttattcaaaatttatttctagaaagtcctagtcagattaattagrtgagagaaataaataaaaagtacccaaataggaaaagaagaagtcaaaccacccctctttactgacaatctgattctataactaaaaatccctaaagactcagccaaaaggtttcttgaactgaaaaatgacttcagagaagtttcaggatagaaaataaatgtacaaaaattagtagcatttctatatatgagtaatattcaagctgagagccaaatcaagaatgtaaccccatttacaatatccacaaaatgaataaaatacctagggatacatctgaccaagaagg

SEQ ID NO: 204477 - DNA, 589 bp, Homo sapiens
acagaagttatttgttgattactgagtacaaagtggagagagcatatagggaatacaccttagagagctttgaataaaaactgactcctgggaccatctacaaatattggatttagttggtatggagtggacttcacacattgatttattgaaaaagtttcttttgtggattctaatgtgtggctggtttgagaaatagcattcttgaataatttggaataatctattataaatatgttcgagtgtgtgtgtgtgtgtgtgtgtgtgtgtgtgtggcagtggggagagttgtagtttgcagctattgtttttgctttttggcttgggctgctcagctgtttgaataattcctaatgttcttaatctactaaaagagtttcataaaacatagttaacctgaacaaataaaaaggatartggcaagtccagtttcttaaaggataggattaaagcagtaatagttcatattttaattatttataactacacacacacccctaatataaataagtaaatagccaggtaatgctgacactgatggttagtggaacctgctttgagtaagagtaattctgtgaactccctgctt

SEQ ID NO: 204478 - DNA, 581 bp, Homo sapiens
atatgtgtttattttactagtttccttgtagttattttattttgactaccattcagagggatgggtgatatcttcaccacagctttcaggaagcatgactagtaaggaaggattggactttggaagacaatagattgttcctggccttcaagcataggaggaggccactacctggtaacatgaagcttgttccctaaagaagtgcaagagagttttaaaaatattcatatattaggcagttcccacaatcacaaacacagcaagaattaaatattaaattaacatttaacttaatatttaaatttttaagagttaactattaattttctccaaactagaatacacatttcctgtgattgtgcttgtagatcaattcctttctcatatgtctgaacccaactggacacttcctattatcatacgaagtcccgaatgatttttaccataaccaggtatattccttcaaagagaaaaatgtcctgcgcctttttgtaagtttttctagagtcaatatrattggcaacaatgatgccagtcataatgccatgagttaatttaagcaatattaaacagcaagctgg

SEQ ID NO: 204479 - DNA, 476 bp, Homo sapiens
tttgcacgcatgtaatgtgtagttaaatactaagaacttgtggaaaacacataacatacctacaataagcatagttacttgcacacatgacaccctcaaagagtcatttccattcccctccacctcgttattttttgtgcttatttttggacttatgtaattgaaattttaggaagtagagtcaaactagtatctctaaaaacttaaagcgtactgatttcacaatttcaaataagcaatatctttgtttaggtactttcaaggatcataagaaaaataatctcacccctgttgagaaattttattttgttgcctcccagctgtcacttaagattcacttaaratctctctgattgactcccattttgaccatagattggggcttgctgtgaaaacccactggtttgtatttatttttttctctcagggaaaataagagactctaaaaatacttacataagattaggcaatagacc

SEQ ID NO: 204480 - DNA, 572 bp, Homo sapiens
caggacgtttgtatttatcttcattgctgaatcattcggggactcaattctcataaagaaggacaaaaaaacctgcttctaaaatatacttttagtgagatcaatattatcatyagtcagagtaaactttgttgattctagggaggcatagggaatgtgccagaaagctttgtaattatttcaatggttagggtaccacaaatatcattctaaaaaaacccaattgtgtaaacttgttttgacatcatcgtgtcataagatcaaagctctttggcatgacatataattttctacttagaaagtcatatattggctagacgtggtggctcatgcctgtaatcccagcactttgggaggcaaagccaggaagatcacctgaggtcaggagttcgagaacagcctgaccaacatggagaaaccccatctctactaaaactacaaaattagctgggcttggtggtgcatgcctgtaatcctagctactcgggaggctgagacaggagaatcgcttgaacctgggaggtggaggttgaggtgagtcaagatcccgccattacactccagcccagcag

SEQ ID NO: 204481 - DNA, 572 bp, Homo sapiens
caggacgtttgtatttatcttcattgctgaatcattcggggactcaattctcataaagaaggacaaaaaaacctgcttctaaaatatacttttagtgagatcaatattatcatcagtcagagtaaactttgttgattctagggaggcatagggaatgtgccagaaagctttgtaattatttcaatggttagggtaccacaaatatcattctaaaaaaacccaattgtgtaaacttgttttgacatcatcgtgtcataagatcaaagctctttggcatgacatataattttctacttagaaagtcatatattggctagacgtggtggctcatgcctgtaatcccagcactttgggaggcaaagccaggaagatcacctgaggtcrggagttcgagaacagcctgaccaacatggagaaaccccatctctactaaaactacaaaattagctgggcttggtggtgcatgcctgtaatcctagctactcgggaggctgagacaggagaatcgcttgaacctgggaggtggaggttgaggtgagtcaagatcccgccattacactccagcccagcag

SEQ ID NO: 204482 - DNA, 572 bp, Homo sapiens
caggacgtttgtatttatcttcattgctgaatcattcggggactcaattctcataaagaaggacaaaaaaacctgcttctaaaatatacttttagtgagatcaatattatcatcagtcagagtaaactttgttgattctagggaggcatagggaatgtgccagaaagctttgtaattatttcaatggttagggtaccacaaatatcattctaaaaaaacccaattgtgtaaacttgttttgacatcatcgtgtcataagatcaaagctctttggcatgacatataattttctacttagaaagtcatatattggctagacgtggtggctcatgcctgtaatcccagcactttgggaggcaaagccaggaagatcacctgaggtcaggagttcgagaacagcctgaccaacatggagaaaccccatctctactaaaactacaaaattagctgggcttggtggtgcatgcctgtaatcctagctactcgggaggctgagacaggagartcgcttgaacctgggaggtggaggttgaggtgagtcaagatcccgccattacactccagcccagcag

SEQ ID NO: 204483 - DNA, 539 bp, Homo sapiens
acttcactactgaattctactaaatatttaaagtataattaacaccaattcttctcaaattcttaaaagaaaatggagaaggaaatattttctgcttcactggtacagagtttctttttgtgatgatgaaagagatatctggaacaaccttgtaaatgtatttgttgccactgaattgtacacattgaattagttgaaatagtaaactttatgttctatgtatcttaccataattagaaataccattagagctttaaattytaaatttttatattttttatttctaaaatttatatttgaacattttttcaactgtgaataatcaattttatatagtctttttattttccatattttggattccttactttattttttccaatattaaacacacatttaaaaaatttttacatataattcctatacctaaaatcttttaaatttggtttggtagtgtattacatcaactattatttataatgccttgcttcttcatttgctttgtgattgtttttattgtgaattcatattttcagaaa

SEQ ID NO: 204484 - DNA, 601 bp, Homo sapiens
ataattaaaagagtgttctggcacacggaaagacagagagactaatgaaaaagattagaaagaccagaaatagataaaactactcatagaaatcgagtgaaggtggaatcataaatcaatggagtaaagttctgctttctgtgtgtttgttaaagtaaatgattttggttaaactgttcagctattgkgaaaaagataaaattaaatcatttcttcttagcatacacacaaataaactccaaacatataaccatgtatatgtggttatatacatagatgctgttatatatatgtacatatgtacatacacacatatgtatataatttaagtgttagaagaaaattagagtgaatttctttttaatctgcatagaaggaaaagttttatagctatgactaaaatgccagatgtaaaaaaataaagattaatacattttacatgattaaaaaaagccaattcatggttttaaaaaatcctaaacaatgtcaaaaggcagatgacaaaataagagaaaatatttgccacatatattatagaaaaagcactaataccactaatgtacaaagaactttttacaactgagaggaaaaacccaagaat

SEQ ID NO: 204485 - DNA, 353 bp, Homo sapiens
taaataagacattctgtttcctggtgaggaaggagagagtaatgagcaaatcatgctcctggtgttatatacccagtcattcaacaggatctcccaactagagcaaaatggaaaaaggtaggaagcccatggcggaagagggtgcactcaccaacatttgctcagtccagtgctcccacagaccccaggcatgttgcaaatcatattgttctgttcagtgyatgaaaaatccaatcaatctttccataggggataaaaaagactttcattgagctttatatatattaaatatatgctttacttggaatgaaaggtgccaggtgttttatatgctaatatataaaggaaacaga

SEQ ID NO: 204486 - DNA, 271 bp, Homo sapiens
acaaaaccaatagaagataaagaaatgtatcataaaaaaagcagaagagctgctgctgtaagttccagtccaagcctgggtccaaaggtagaagaccartgttccagcttgaaaacagacagagagactgggttcagtggcttatactgtaatccctgcactttgggaggctgaggcaggaggatcgcttgaggtcaggagttcaagaccagacgaggcaatatagtgtagatgttgtctctacaaaaaaatttaaaagtcagccaggtgt

SEQ ID NO: 204487 - DNA, 441 bp, Homo sapiens
accacaaactgagttgctaaaacaacagaaatttattatctcacagttcaagagactagaacctcaagatcaaggtattggccgggtttgttccttctgggaactgtgaaggaaaattgatcccaacttctcatagaggttggtggtttgctggcaatctctgctgttcctaatctctactttcctgttcacatggcattctccctgtgtcatgtctktgtccagatgtccactttttataattacaccaatcatattggactatgacccaccctatcctagtatgacttcaccttgattaattatatctacactgaatccatttctaaataaagtcacattctgaaatactagggattaatactttaacatgtatttgagggaacataattcaacacataataaactatttatcttcccttccctaacacacactgttgt

SEQ ID NO: 204488 - DNA, 557 bp, Homo sapiens
ggcccttctggaagcacatgaagctctgaggactttagccataagactttagctgtagtatccratgtggtcctgttgatggcattcatgaaatatgcctgacaggggttgtttctcctcagatttttgaaacttccttgtccagttttgaggtaggcagtgggactcgactctgaaggcagggcttggactccagaccagattaaagactggctgagacaggtaagaggctaaagtacctctccataagacatgcccaccactgccatgtcagtttaccactgccatggcaacacctggaagttatcaaccctttccagggcaatgacccagaagttaccaccctttttctaaacatttctgcataatcctccccttaatttgcatgtaattaaaagtgggtataactataactgctgaacttcccctgagctgcttctgcgggcacactgcctatgggtagccctgctctgcaaggagcagttcctctgctgctgctgtacactgccgcttcaataaaagttgctgtctgacacctccagctcacacatgaattc

SEQ ID NO: 204489 - DNA, 557 bp, Homo sapiens
ggcccttctggaagcacatgaagctctgaggactttagccataagactttagctgtagtatccaatgtggtcctgttgatggcattcatgaaatatgcctgacaggggttgtttctcctcagatttttgaaacttccttgtccagttttgaggtaggcagtgggactcgactctgaaggcagggcttggactccagaccagattaaagactggctgagacaggtargaggctaaagtacctctccataagacatgcccaccactgccatgtcagtttaccactgccatggcaacacctggaagttatcaaccctttccagggcaatgacccagaagttaccaccctttttctaaacatttctgcataatcctccccttaatttgcatgtaattaaaagtgggtataactataactgctgaacttcccctgagctgcttctgcgggcacactgcctatgggtagccctgctctgcaaggagcagttcctctgctgctgctgtacactgccgcttcaataaaagttgctgtctgacacctccagctcacacatgaattc

SEQ ID NO: 204490 - DNA, 464 bp, Homo sapiens
taaaaaaaaaaacaaaaaacaaaactttaccctgaaayatttctgttgaattcatcctggcaatgtaaactgatagctgatcttaacaggtgcaggacagaaaatcattcctctgctcacctgagagaaatgcttatctgattgcttcctcagacctactgtgtatgtaaaaatgaagattcactgagccagactagattgtgaattcactgaaaggctgatcaaggactcaaaagaatgcaagcttttgtctcttatctacctatgacctggaagcccccctcttcgagttgtcctgtgttactggatggaaccaaagtatatcttacatatattaattgatgtctcaggtctccctaaaatgcacaaaagcaagctgtaccccagccaccttggggacgtgtcgtcaggacctgttggcaaaataaacttttaaattgcttgagacctgtctcagatatttt

SEQ ID NO: 204491 - DNA, 573 bp, Homo sapiens
taaggtcagtttgtttgaaaagggagaacgtcagtccgatggtcggtggttgtgtctctcctgagcattcgtacaaagtgaagccacctcccctccgccatgcagtctcccagaccgggtcaaaggacccaggctccaggtcgctgaggcctggagggctgaggcccttgctgtgcgccctggtsctctgatcccaaggcccaagctgccccggtacccacttagggtcagggtggaaagcctacgtgggaaagggggacctggaggactacccccacgcccatggcagggtggagtcccgaccttggcatattggacctactcacttggcatctccctgccccgaccccgtctgggatccgtattggcagcgacgaggaagggaggaatggtaagggagttgggtcggtacaggacggaagtgaagatggaaagagagaagaaaaataaacaaaactgggtagggacatggagatgggtgaggcaggggtaggggtggagttggggctgcctcggggagcagcggcttttcaccctgctatagggaggtgcgtttggctgagctgtcccccc

SEQ ID NO: 204492 - DNA, 514 bp, Homo sapiens
ggtgtataagccaaccactgggcgttcaggagtatgtgtgcatggaggacggggctgtttgttaggaatctgcatttgtatatctcttcacctaaacttgtttgtaagaaaggctcaggtggggaccacctttggttctgctgctgtgtgatgtcatgaacagcctccccttgacagccttgccaccgaccagtgaccagtttatttgaatggtatccggcaaggttcaatccctaaagcccgactcctgtagggcagacccccagctctctgctgagctagcctggcccaggggtggacttttgaacccctgaaagagtaaagaggacatgcatccttaaagcaagtacaaacagtatatccctccttttggctgagcttgccacaaaggcagaggagtggtaagctgaagggtgtgctgcctggcaggcacctgggaggtcaccaatatcttcttccccttgtaagataagacagtcaarttgggagcaggcatggctgcacccttgtggaa

SEQ ID NO: 204493 - DNA, 481 bp, Homo sapiens
tgaatatttctaccgattttgaaaacagggaagttgaatagtaataatggcatgggtaatagattcaaaagaagtgattttcaatgtttcctgaatcttactaacagtgaaatctcaagatatttaactcttctgagattcagatgatgtaaatgaaaatcctagcattgctttgagcctgaaataagaaaatgtattcaaagtgtctagtagaatccttgataattaatagactctcaatagtcatgtgttacatgtcgatggggataagttctcagaaatgcattgttaggcaactttggcattatgcaaacatcatagagtgtacttacaccaacctgatggtaaagtcagctacacacctaggstatgtggtacagcctgttgctcctaagctacaaacctgtgtggcatgttactgtactgaacactgtaggcaattgtaacacaatggtaagtatttgtgtatctaaacttagaa

SEQ ID NO: 204494 - DNA, 587 bp, Homo sapiens
gtgtgttccattgttattagataaaattgctgggtctttttagtcagggatctgatcttctatggtatctaatctgatgtaattttcagattttgtccagtgaatctttatttcaaacatttacttttcacatgtagaaactcttcatagttcctgttgtacatcttttctttctctcattttcatgtttttctttaaatacatgtatatgcagttaatcttttctactatttacactatgtctgttatattaaggtcttttttttattgactttttccccctggwcattccccctaagacatttttctgcttcttagtaagtctatttatttttcctttcatgctaagcattgtgcgtattatatagttgagttctgagattctaacatcctttaaacaaagtgactagctttgttttttcaggaaatgaagttttctgattatcagtttgatctctttgagacccatttatgtgctatgtctcaggagagtctagactagcattttctgtatatatagtttagccctactactaagctgtagcttttctgcagtctccactaaaaaaccacaagggatcagcaag

SEQ ID NO: 204495 - DNA, 634 bp, Homo sapiens
tatcaatagctggtaggctccctggaaggtaaatacatctgacagcttcacagatgttgcacatattggcatagtaaataagtatttawcgtaagttttctgtcctacatcaggtagtggcaaattttaagaagtacagttgacagggaaagacccaggcttggattgtcaacctaaataacaagcagaaagagtctttctaaaaatattgagtataattggaaataagcagaggatttgaaaatccaggatattcaagctatgaaagtttttatgtattcacaagatctccttcaaatgtaagtagaaaaaaagtatgttagcttattactctgtaccacaaataaaatctctattccttcttaattgataaacatattaattaataagtcactctatctatccattcacccaaacttctattaattaatttaacagtatcttttattatagacatcacaaggcagatactttaatagctgctttgaatacaaaggcaaagaagacataatatctctgtcctcagtccttgttttccattaaggaaaagatacagaaaagcagacgtgcacttataacacgtggttaaagtgttgtggaagatccaagatcccctgggacagagacttccaga

SEQ ID NO: 204496 - DNA, 520 bp, Homo sapiens
gggggactgttgggaaggaatgattggttttkaaatgtgaggacatgagatttgggaggggccatgggcaaaaagatacggcttggctgtgtctccacccaaatctcatctttagctcccataattcccatgtgttgtgggaaggacccggtgggagattgaatcatgggggtgggtctttcccatgctgctctcatgatagtgaacaggtctcacaagacatggtggttttaaaatgggagttgccctgccctgtaatgcctgctgccattacataagatgtgacttgctccttcttgccttctgccattattgtgaggcctccccaaccatgtggaactgtaagtccaataaacctctttcttttgtaaattgctcagtctcatcagcagtgtgaaaatggacaaatataggagagaatcttcataaccagcaatcaggtacataaattttgacatgacaaaaaaaaacttcatttaaaaacaactttgaaaaattagactttataaaaattgaaaca

SEQ ID NO: 204497 - DNA, 621 bp, Homo sapiens
agaatttatcttaaagacattttccgactcaggctaagattcatatatgaatatgtttattgcaacacttagaataataaaccagtggaataacaaaatgcccatttattgagttgaattcaggcccaagtacagtgttctatagtggaatagcatgaactcaaccaaaatcatgtaaaaaaaatttttctaaaaggaaaaaatatgtaaaatgcagtttaattagaaaataacctcataaaattttacatttaccaaaatttgctttgggcttcaacatttatataggtataaagaaaataacacttgaaagaaatatatcaaaatattaagtgattttgtcaagaatgatattatgtggtwttctttttcttccttaattttcaaatgcctgtaatttgaatccaaaacttttataattagaggacaagaacatatttttgataggttataaggagtcctgaaacttacagtcacataatatcaaagtaaactgaaaattacataaaaacacatagaatgctcttcaatggttgtaattaacaaagtgtcttttcttcacataagtgaatgtttatttttaattttttagcatcataattactggctaaagcaaatata

SEQ ID NO: 204498 - DNA, 548 bp, Homo sapiens
cacttagaataataaaccagtggaataacaaaatgcccatttattgagttgaattcaggcccaagtacagtgttctatagtggaatagcatgaactcaaccaaaatcatgtaaaaaaaatttttctaaaaggaaaaaatatgtaaaatgcagtttaattagaaaataacctcataaaattttacatttaccaaaatttgctttgggcttcaacatttatataggtataaagaaaataacacttgaaagaaatatatcaaaatattaagtgattttgtcaagaatgatattatgtggtattctttttcttccttaattttcaaatgcctgtaatttgaatccaaaacttttataattagaggacaagaacatatttttgataggttataaggagtcctgaaacttacagtcacataatatcaaagtaaactgaaaattacataaaaacacatagaatgctctwcaatggttgtaattaacaaagtgtcttttcttcacataagtgaatgtttatttttaattttttagcatcataattactggctaaag

SEQ ID NO: 204499 - DNA, 576 bp, Homo sapiens
catctaaaccaaacattgatgcctgaagctgttttttgaaaatgggggtgacagcctttccctggcttgtacaatttgtccttgtttcccccaaacarcaattattccacaatcataagaaaggaaggttcatcaaaaagaaggtctactttggtcttttcattattttttgtttcaaaaataaagcttgtcataggataagcactcagaaaatgggttatggttagaaattaatacattctagccacagatgtgataataatagctgggtgactctcattaagttacttaatctgtctgaatatatctctctacctataaagtgggaataataatgcccatctctcagtgtttcatggatgccaatgaataaaggtgaatacattccatgaactcttaaggaatgtggaaacaaaggtctgaaaaatagcaaagctttctccatgccaaatgtgcccacacatttgtattttttgtgtgttttatgccactttattgaggaataattaacatataatgtattgcacgtgaagtttgataaatcttgacatgaatatgcacgtagaacatcaccac

SEQ ID NO: 204500 - DNA, 381 bp, Homo sapiens
ctaggagatattaatattaaaaaataccaagatatggaaagtacaaggatagaaaaacatataaaactgcaaccatagaaagctgtagaggttataaagtagcatcaggaaaataaaatagactttaaaatttttaaaatgtcactgagataaagaaaacattgataatgataaaagtgtaaatccattaggaaggtatatcaattataaacacatatgtccaacracagagcctcaaaatacatgaagcaaaactgataaaattaaaggaaggaacagacaattcaacaataatgatcaaagaatctaataccccacttttaataacagacaggacaactagagatcaaagagaaagtagaaaacttgagcagcactaaa

SEQ ID NO: 204501 - DNA, 583 bp, Homo sapiens
aactgacattcgtaggataaaaaatgaactgacacttacctcattccatacacgccttcatacacactcaraagggatcatagctcctggagaaatgaagccatacgtccatacaagacttatttgtgaacgttcattagcagcattattcatagtagccctaagacgaaacaatacaagtgtccctcaactggaaagtggataagcaaaatgtggcctatccatacaatagaataatcatcagaaatgaaaaggaatacactattgaaacatgctattacaagggtgaagtgcaaatcattatgccatggaagaaactggacataacagaacacatatagaattatttaatttatataaactgttcagaaaaggcaaatcagtacagacataatgcctatagtttggaattggaaggggaaaattttactgtggtagaaatgttttaaaacttgattgtgatgatgattgtacaacctctaaattttaccaaaattcactaacatatatacttacaaggagtgaattttatggtatttaaatcatacctcaataaagttttttaaagaccgtatataatcca

SEQ ID NO: 204502 - DNA, 349 bp, Homo sapiens
gtgtgatacggtaatggtgcatacatgtcattatacatttgttaaaacccatagaatggacaacaccaagaatgaactctaatataaactatgggttgtgggtgatgatgatgtgttaatgcaggttcatcgatgtaacagatgtattgctagggtgcaacactttgatagtgagggagtctgtgtatatrtgggaacaatggatacatgggaaagctctgtacattctgctcaagtttgatatgaccctaaaacagctctaaaaataaagtctatcaagaaaaaaaatgaataaaataaaataaaaatggatcatagatctaatttaaaagctacaaattataaaaat

SEQ ID NO: 204503 - DNA, 536 bp, Homo sapiens
tcagaggataatctaccataactcctaaactaattaagaatagatattctttttcaacaggatttgaaaattaagctgtatacaggttaagaaaaagataaagtctctacattgatagaagagtaataacatctaagataaaattggcctctcacttcctcctcctctgccatatcctgttgatagaaatatgccccttcattgaatgtatgctttcagatagcctttcccttaaggaaaaggtcagtctcttatacatctttgaatcctgagcatctggtaaagagtaaaagcatagaaggtgtttatagatcaaaatatgggagttaattcagagagaccccaccttgcaatccatgaattttcacaagtatgtgggaaaacatgtacacaaatctatttattgacacatayacaaatatatatatccatatgttataaatgaataaaccgaggcccagaattttttaaaaatatagaaatcagactgatagttatgtttcagttgtgactcaaacaaagagaacctgatgctt

SEQ ID NO: 204504 - DNA, 417 bp, Homo sapiens
ttaattcattcatacatgcattcattaattcaacaaataataatttaaaacccactttctctcagccatagtgcatattttccaagaaagaaacattgttaagatagaaactctcttgaggacttcagagtttgtattgtagacttatatcagtgcagtcttcctgagtgatcattttataataaatgagtgaataattatggcatatataaaaaacataatttaaataatttaagaggtattataggtttaggctcaactgagagaaatcaggaaattaaaaatctatgttgtacctcactagcccccagttacttaggtattatatgtctaaacttccattttactaaatcaaaaaaagttaatatatatagtgtaatattrttactattattattataatcataattactaacc

SEQ ID NO: 204505 - DNA, 327 bp, Homo sapiens
tctcttcattaaccacatctcagagaawtttcaaagcatcagcttgcatattattaacatgtacttaaaataacaatatcgaaagcttcaagattaaaataaaaggtgaaatgtaaaatgtaaggtgccttcagtgtgtttgtatacatgtaatttgctttttaattaaagtgaactagaccttacctagcccagagagattaataagtatctcattctagtacaactattctccttaataaaagcagatggaattcattttcaaaagaaaaaaaattagtattaactatcattgcttcttttatgtggttaaacacatataattat

SEQ ID NO: 204506 - DNA, 584 bp, Homo sapiens
ttccatcattttgctaatgatatatacatcagtgtacctttttaaaatgggaaaaattgttttccaaacaacatattgccaccagttgtttgtgataaacaaattatggacccagtagctgcatataggtgactggacacagctgagtcaaaactgttagtaaaaaaaacagtatcctttgccttttgcctctgtgtattctgtttcttctttttagtgcattcttgctttcatattcccatgagtcagagcttttcaccactgtgctatgaatgggttgtaattgtgcccagattctggtccacttgaactttgagggaactgatagagatttgggtgtctcgacctctgggtagacaccaccagctttgaatctacacatccagttacccataaaccaatggttccagtgagctgcatagatatcattgatgcctatgtgtgctatgacttggaaaatgttargaaatattgtctttggtgtccaaattcttcacaccctctcccacttttcctttgtaacaggtataggctattagtaacagtgcctgccatttaatagacaatcattattttctaaatgt

SEQ ID NO: 204507 - DNA, 570 bp, Homo sapiens
gtaataatgttagttctaaactatttggggatggctaatttaattttgtaatttactatctgattcaagaggataactcttgattttaaaaaacttggtttgattagtaatttcattcaagttctaatctcattgagtacttttatactgaaaaaagaaagtattacttaataattgaaataaacctaaggacatttagagactagtcacaatatctgatttagaaggtcattaccttggattaattaatttgtacattttctatgtctgcgaaaagttaacctcaatctaagtgagtgggaagaaaaatgaggaaaagagtagaggtataygttggtcaactggctccttagggaaatctactgagctaatgaaactgttgactaagtcagctctagtttcctttagaattgcctttaaagatgttttcttgaactactgcctatcaaacttaacattttggaaaaccattttaaggttattttctttgtattttaaaaattctttccaatgcattcttttggatccagtaaatatcctaacttttgtaatacaaaatatgcctaataa

SEQ ID NO: 204508 - DNA, 570 bp, Homo sapiens
tgtagctgggaatataggcgcatgccaccacacctggttatgcttttttttaaataattttctgtagagatggggtctcactatattgtccaggctggtgtcaaactcctagcctcaagtgatcctcctatcttggccttccaagattacggcatgaaccactacacttggctttgttttaattttaatggaagtaattattcatatttatattctttgtttttattttttttcaattgatgaacaaaggaaagatcaacatttttgatgcatttaatcatcttgatcaaaatcagtcctctggccaggcgcggtggcccacacccataatcctagcactttgggaggccaaggagggyagatctcctgaggtcaggagtttgagaccaacctggccaaaatggtgaaaccctgcctctactaaaaatacaaaaattagccaggcgtggtagcaggtgcctatagtcccagctactggaggctgaggtaggagaagtgcttgaacccgggaagtagaggttgcagtgagctgccatgattgtgccactgcactccagcctgggtgacata

SEQ ID NO: 204509 - DNA, 516 bp, Homo sapiens
agacaatcagtgttagtttctagtctagataagaagttctcaggcacagaaatatgtcttaaggtttgagaatgtagatattagaattatagcagaaaatttgttagagcagtgatagggagaatactgaactgacctatcatggtggcaccaagatactcaatgggctttagtattgatttgktttttttatatatacagtactctaaagatagagccagttactagggataaggaagtgggtgtgcttgacagggggtgcaagaattacacatctgagtgtgctggaatggggcctggaggaccaggagtggaaccaagtgtttttctacagtgttcatggaagcaaaatggcaatatcaaggattctttcccaggtattaaaccacctttgacaatgagaatgtttcccctccatatcgttgttccaccaacaccttcttgtctgctactccttttcccatgagggattatggttatccaagccctttgatacagcagcctacccaagtcagc

SEQ ID NO: 204510 - DNA, 562 bp, Homo sapiens
gagaatgtagatattagaattatagcagaaaatttgttagagcagtgatagggagaatactgaactgacctatcatggtggcaccaagatactcaatgggctttagtattgatttgttttttttatatatacagtactctaaagatagagccagttactagggataaggaagtgggtgtgcttgacagggggtgcaagaattacacatctgagtgtgctggaatggggcctggaggaccaggagtggaaccaagtgtttttctacagtgttcatggaagcaaaatggcaatatcaaggattctttcccaggtattaaaccacctttgacaatgagaatgtttcccctccatatcgttgttccaccaacaccttcttgtctgctactccttttcccatgagggattatggttatccaagccctttgatacagcagcctacccaagtcagccctcctgaaattgttcctgactctcctgatgaggggcccttcaaactgatttytggattttttgacacaacccagttactctgtgatctttttgtttgtttccaggacagaaa

SEQ ID NO: 204511 - DNA, 523 bp, Homo sapiens
tggattaaatgagctatagagaaaaagcttaaaacagttttgggcacaaactaaaaactaaataaatattggctgctattattgttattctcaacagcaytctcatctcttgatttgtgaccctatattttttcccataaaccacatcattttcttatagatttccatatgctaactactaattaaaggtttgatctatacactgcaagttttgtgtgcagatagtatattcatttagaaatagataactctgaccaagaactattcaataaagctaaaaggaaggatcctttagccaactcagctgttataaaacgcaataccaagaaattccttaggaaaagattcagtggttttattgctacaagcaccaacacttcacacttcctgacatactcagagtggtacttcttgttactataatatttcatgaatcctgaaaaacttaacacagccaaatgcaatagcatgtgcaaagtagtctttacacacaggcctacaaaaatattggttattatttatt

SEQ ID NO: 204512 - DNA, 553 bp, Homo sapiens
gcctagaaccagcttccactttcaattttcctggggaagccaagggcctactagaggcagaaagctgtcatcccaaactcccagcattagtcggttgagatcattgtgcagccagaagtctctattcaacagtcgcccatgcacgcaccctacctttccttctgacccataccacctgggtcctgaccacgactttcttgaaagtgtagccccgaaattctccttacctctgaatctacttcctctgatccttgcctcctaggtagtaatggttcagactttcatttcctctagcaagttgtatctccaaagggatctaaggaagctctgtgctgcatccttaggcatctagatataaacccagggagtctcgtccctggtgtccctaccgayttaggtatatagctctcgacatggccagttatgtgggacccgttccccatcacccttgccaaggccctaagtttgtaaatggctaagagagatagagacagagagcgagacagacagagagacaaggaggagagagacagagaggagagagacagagagg

SEQ ID NO: 204513 - DNA, 433 bp, Homo sapiens
tgagtacaagtcttttaaatatgctgcatgatgaaatggaccagatggatgaaaggcacttctgctgcattctgcagtacaatgagtttctcaagaaaaattccttgtctgattayctgagttgcgagctgaactagctgctatttgtttagagtgctacttttacttgaaagagccactgactgttaagctatggttattcagactggcagtttggtagagatttttacatcattgaatggagtaagcctgccatttcaagaaaaacaactggcaattatgttgctaatgatgcaatttaagtttttgaatgaaaattagaattttggaaaatgtatatcctctactttttgcctgacaacttcacaatacttacaacttctccaatgggatcagtggtgatatttacaaaagtgagcttttagtattttac

SEQ ID NO: 204514 - DNA, 579 bp, Homo sapiens
gtgagataagttttcattcacaccaggagcggtggcttactcctgtaatcccaaaactttgggtttacagagtcacggttatattatctttatgctcatttcatagataaaataaataaataaaataaataaataaataataatgcatggacagattaagttatttgtccaaaatcacacggccaraagggcagagaggacatctgaacctagagttgtgctccactctatgtgcttgactactctctattcctgtcttgtcacagcggctttattatttattatttccatcctcttgagtaaggcagtaaccatggagtgtggtgtgtatatgggtggggggtggtaggtaggttaatgtttctctctgtctctctctctgtctctctctctctctctctctctgtctctctctctctctatatatatatatacataaaatagttaaaacaatatattaaagaagacaatgattgattcaagagggtatctcaaatgcagctggaaaaacactcgagacttcatctgtctgtccatcattggtctttattttagcagttctacaattaaaaaaaaatg

SEQ ID NO: 204515 - DNA, 331 bp, Homo sapiens
ctaaccatttaatctatattaatctcctcatcccaactattaatgcagtggtaaacctgaccatcttggttttgtttatctagttcattttttggcatggaaaggatggagagatgagtttcagatgctggttctatgccattcgtcagacatctcctgtcccwtgccatgtacagacacattctgttcaccagctgctgatttctgttcgttctcagcacattgtttcctgggccaatggtggcggtgctgctgctgctgctactggcctcttttctgctacagtgtcccctaatcacatcacacagatataaaatgtgttatctatcat

SEQ ID NO: 204516 - DNA, 657 bp, Homo sapiens
ttctggaaagatggccactgggcccaagccagggctgagcagttgctgagagcctaagcactctgggtgacccacattactgaacaaccacacagcaggagcaagaagtggcagatggaaacacaccagaacccagaagagaagtccccatcttactggaatgttcctcagacaccctctcctgacaaagcttaacatagtgcccattagaaagaaattcaacacaatccccatcaaaatactgccatcattcttcacagaattagaaacaacaattctaaaattcatatggaaccaaaaaagagcccgcatagccaaagcaagactaagcaaaaaggacaaatttggaggcttcagactacctgatttcaaactatactayaaagccatagtcaccaaaacagcatggtactgactggaatagaaataggcatatagaccaatggaacagaatagagaatccagaaataaacccaaatacttacagccaactgatctttaacaaagcaaacaaaaacagaaagtgggaaaaggacatccttttcaacaaacagtcttgggataattggctagccacatctaagagaatgaaactggatcctcatctctcacgttatataaaaatcaactcaagaaggattaaggacttaaacctaa

SEQ ID NO: 204517 - DNA, 428 bp, Homo sapiens
ggttgcagtgagggctctcttttgagctgcaggtggctgtcttctcatttatcttcacatggtgagaaaaggatgagagagttctctgtgaacccctttataaggatgctgaacccattcataagggctctcccctcaggacctaattacctctcaaaaaccccacctcttaacaccattatattgagggttaggatttcaacatattaatttggggggctacaaaaacattccatccccaacagatgttaaattgaaacatttttaattctcactctatgttctgtgctaggcgacagaattccctccctaaagacatttacctcctaawccccagaatgtatgagtcgttattactttacatggcaaagaattactttacagatgtggttaagaatgctgagatgagtatcctggattatataggc

SEQ ID NO: 204518 - DNA, 573 bp, Homo sapiens
aagttatttaaatataaaaaagctagaaatatagaaatcacaaaatatgaaaaatatttttataaatgtattgcctgctatacttctatattattcctacattttttggttgcctactctttgatccccttttcatattgtaataattttgtgatatcactctttaaagatatgagaaagataattcagtctttcctctggtgcgattgaccagacctaaatttttgatagttggaacacataagatcttgtgacctacacaaacatactcttatttgtaggactcttatggtttgtrccttatcagaaattttatcctataaatttatttaaaatcatataaagttttataaaatatgtaaattctattttaagcaataacccccaaagaaaaaatgtatgatgcatttataattgtatacaccagcatgttatctagcatatttttgataggtgagaacttacatttttattagagatcaattagaacaaaatcatccagttgcaagtttacatgtttggtggttgaaaattttccacagaatagcttctggttctgtacattgcaataac

SEQ ID NO: 204519 - DNA, 573 bp, Homo sapiens
aagttatttaaatataaaaaagctagaaatatagaaatcacaaaatatgaaaaatatttttataaatgtattgcctgctatacttctatattattcctacattttttggttgcctactctttgatccccttttcatattgtaataattttgtgatatcactctttaaagatatgagaaagataattcagtctttcctctggtgcgattgaccagacctaaatttttgatagttggaacacataagatcttgtgacctacacaaacatactcttatttgtaggactcttatggtttgtgccttatcagaaattttatcctataaatttatttaaaatcatataaagttttataaaatatgtaaattctattttaagcaataacccccaaagaaaaaatgtatgatgcatttataattgtatacaccagyatgttatctagcatatttttgataggtgagaacttacatttttattagagatcaattagaacaaaatcatccagttgcaagtttacatgtttggtggttgaaaattttccacagaatagcttctggttctgtacattgcaataac

SEQ ID NO: 204520 - DNA, 573 bp, Homo sapiens
aagttatttaaatataaaaaagctagaaatatagaaatcacaaaatatgaaaaatatttttataaatgtattgcctgctatacttctatattattcctacattttttggttgcctactctttgatccccttttcatattgtaataattttgtgatatcactctttaaagatatgagaaagataattcagtctttcctctggtgcgattgaccagacctaaatttttgatagttggaacacataagatcttgtgacctacacaaacatactcttatttgtaggactcttatggtttgtgccttatcagaaattttatcctataaatttatttaaaatcatataaagttttataaaatatgtaaattctattttaagcaataacccccaaagaaaaaatgtatgatgcatttataattgtatacaccagcatgttatctagcatatttttgrtaggtgagaacttacatttttattagagatcaattagaacaaaatcatccagttgcaagtttacatgtttggtggttgaaaattttccacagaatagcttctggttctgtacattgcaataac

SEQ ID NO: 204521 - DNA, 573 bp, Homo sapiens
aagttatttaaatataaaaaagctagaaatatagaaatcacaaaatatgaaaaatatttttataaatgtattgcctgctatacttctatattattcctacattttttggttgcctactctttgatccccttttcatattgtaataattttgtgatatcactctttaaagatatgagaaagataattcagtctttcctctggtgcgattgaccagacctaaatttttgatagttggaacacataagatcttgtgacctacacaaacatactcttatttgtaggactcttatggtttgtgccttatcagaaattttatcctataaatttatttaaaatcatataaagttttataaaatatgtaaattctattttaagcaataacccccaaagaaaaaatgtatgatgcatttataattgtatacaccagcatgttatctagcatatttttgataggtgagaacttacatttttattagagatcaattagaacaaaatcatccagttgcaagtttacatgtttggtgrttgaaaattttccacagaatagcttctggttctgtacattgcaataac

SEQ ID NO: 204522 - DNA, 587 bp, Homo sapiens
attgtacctatagttacaatactatattgtgcacttaaaatttgttgagtgtcgatctcacattaagtgttcttatcacaacaaaatcaaatgaaaacaatgacaacaaaacccctaagcctctatcaacttgttagaagaaaaaggaagaactaatttacaagtttattttttaaaaatcttctgactatatgtagagagacaaatattctaaggacaaaaagaattttaagaattttcgaatctggctcagtaagtttgttcttggtagcagtcccggtgtagcaaatctgaaactatttcgtgwgtgttgtaggactgaggaaataaataaatatgttgatattgtggtgtaccaggattcttacttgggagaatggaaatgcaaatatgaaatgtagacccagtaatgctgaaatgaaattgagggtagcagtatagcaacactataccatatggctataatactgctgtgtatgtgtgtgttcattctattatccactgagaggacctagaagcaagccactccaggagcaatacgcaaaccgactatctagatttgggtttctgaataccattccctccct

SEQ ID NO: 204523 - DNA, 584 bp, Homo sapiens
agacagaccaatgcatttaatgtaataaagtatgaaaattcactgakacagtttcagattccagattgttactgaggtttccaaaaggaccactcatctagttccactgtgttatcaaatggaatgaaatactgctcagcaataaaaaaggaatgaactatttatacctgcaaaaacaaggatgaatctcaaagagtttgtgctgagcaaaagaggccagtttcaaaaggtagcatacggtatgattccatatatgtaacattctggaaaaggtaaaactatagtggtggagaagagcatagttgttgccaagggtgagggatggagagacagtgtaagtaagtacaagggtataggacaaaataagtttttagagtgatggaactgtttgaattgtgactgtggtggtagtttcatgaatctctctctatatatatgtatcaaaactcctagttcaaaaaagttcattttattgtttattaaaaaatgaaaagaaatcatatagcacaatgttagctcacagatgatacttcaataaatgttatgtttataaatgttaaaaacattcaaaatcctgcgcacca

SEQ ID NO: 204524 - DNA, 584 bp, Homo sapiens
agacagaccaatgcatttaatgtaataaagtatgaaaattcactgagacagtttcagattccagattgttactgaggtttccaaaaggaccactcatctagttccactgtgktatcaaatggaatgaaatactgctcagcaataaaaaaggaatgaactatttatacctgcaaaaacaaggatgaatctcaaagagtttgtgctgagcaaaagaggccagtttcaaaaggtagcatacggtatgattccatatatgtaacattctggaaaaggtaaaactatagtggtggagaagagcatagttgttgccaagggtgagggatggagagacagtgtaagtaagtacaagggtataggacaaaataagtttttagagtgatggaactgtttgaattgtgactgtggtggtagtttcatgaatctctctctatatatatgtatcaaaactcctagttcaaaaaagttcattttattgtttattaaaaaatgaaaagaaatcatatagcacaatgttagctcacagatgatacttcaataaatgttatgtttataaatgttaaaaacattcaaaatcctgcgcacca

SEQ ID NO: 204525 - DNA, 517 bp, Homo sapiens
gactcgagctttatggttctcccaatatagttcatgaagacttacacagtgctaaaagcctggagactgcttatgcgatctaaagtgccttctccatcctcatctcaggtcctagctcatgtaccccttcctctgtggggctttctttctcatgagcccagcctgatgcgtgctctcctttcctgaagtcctatagggcagggctcattgatgggtctcagttgagacctctagaatccaggcctgtgccctgytttcctgatggggataacgaagggcaggccttgtgaaactgtattttttttcatgcccatatgcactcttctctctgtagaggtcaaaggttttcatctgatgatgagagtggctcacaaccctggggaagtttaagaaccacatagggtataatctgtctccttctttccattgccatccccacctcaagccagcttcttcccccaaacactgtaatgatctctagctggctctcctgcctttgactacctctcctgaattc

SEQ ID NO: 204526 - DNA, 524 bp, Homo sapiens
tctagaggaaggtgaagatgactctgatctactccatctgcacctaccttgctggcagggaggcagtgacaaggctccagctatcagcacctctgtcatgtttccctttggtgaaaaatgagttctgaactgttttgttttttctttttagaaatacatcccaaatcacattgatttgtgctatatgccacatcttaaatcctyaggttattaatcaattaaagtcctaagaattaatcttgtaattctaataaactagtcatccagaactttcaaaccctatgaaaacgaactcaaaagttcattttcaaaatctatcctttgtatcatttatgttacagtgaacattcttgagaagttcacccaagatctgctctgataaaaaaaatgaaatatgagccccagagaatattctttaagaagaaatatctaaatgtcagttctgttgtttattatgttaagcatcctgcatgccacaatattttaaccattaccatttcactgtctcattcaataaatattta

SEQ ID NO: 204527 - DNA, 433 bp, Homo sapiens
ttctgactcatcactcttccatggttagtgcctctccctcagtgcttgctggagcttcctccttgccccttctgttcacaggagcaagtacttgcctcctcctgcagcaggccctgtcatttcacctttcaactccagtaccctaaggggaccactgcaaacctggacctcatagaccctggctactcggtgtggtccctgcaccagcagtgtctakctcctggaagtttgttagaaaatgcaatcttggacttcactcaagaactattaaatcagagcttgcctttttaagtttgagaagcactgatttagaacaactctagtcaggcacaattttttcatatttttctaagagatcagaagtgtttaatttggtccatatttattagcctatcccaggagcaatggctcctaaccttgtttctaccaactg

SEQ ID NO: 204528 - DNA, 497 bp, Homo sapiens
ctgtgagctttggtttctcttcttaccctctgatgcattctatctattataaaaatggttttctctatatttccttagtgtcatatgactcttacttttatatgtggttaatttgagttggtaaaccacattagagtatgatgctcttgagattacaactagagttatgatatcatcatagatcagggagttttactgtacttcattgactgcactgctaattagggtgaccatataatttaccacacaaccagtttgaatttggtaaaggatttttagatatgataccaaaaatatgagcaacaaaagaaaaaaatagataaactggacttcatcaaaactaaacaatgttgtgyctcaaatgacaccatcaagaaagtgaaaagacaactcacagaatgggaaaaaatatatttaaattatataactgaaagaaacttgtttctagaatatataaaggtattatatatttattataactcaagaataaaaaaacc

SEQ ID NO: 204529 - DNA, 549 bp, Homo sapiens
tgcatggcttgggttacattgcgagagtaaatcagtgatagatatatcacatttggtgttaattattgctcaggttccacctgggcggcagttaagatgtccagggccatgtgattttgctaagaatggtgcacatcccactacctgtatctgctctgccattatccaccctgtcccatcatgtacagcctaccccacagtgggggtaacattaacttgcttccatactaggaggaaaatatgttgtctcatcttgttgatggtgggaaactcactacacgaggtgcaattgtcactaaagggaaatagatgagggtcattatactaagtacagaagtggctccaggtactcaggtgaggtgcttggagcaggcctgtgatggaagagagtggcagctctctgcagtcacaacartctgtttgttatagggagagaccagcatctgtgctcagtcggtgaagaggtttgctgcacaccacaccgtctatgggtggacggggagatgtttagtgggtacaagaaagggcaagtcatggccatttaacaag

SEQ ID NO: 204530 - DNA, 651 bp, Homo sapiens
ccctcttttttcagaagaaagcattttgatttcctcygaagctgcaatgcattttattcacatctccattacagtacttaagactgttgataacctgcaatgcattttatttacatcttcattacaacacttaagaatgttgattgtgtattacttgtgcatgtgtcttcttccccaaagagctctaagctcttctggcttagagaccagacttaatttactgctgtttgtctagggccctgcccagagaaggcacttaatgaatgtgttgagtgaatgtaggcgtaagggaatagcatctgtgtttttaatataagaactgtgctgctgcatactacctgattaaaggttttattgctcattgataattatgatcatcttcaaagagtacatggattatgagaattacagaaacaagtttaagacctcttataaatgaagtatgttcctaattttggctttaagtcagtactctagaatccagaagcatttttcatggaaataataattcctgggatagtcctcaaaagcttaattaacctgcaggacagctgtgtaagatacagcattgcattagcaatagcacctcaatgccaaccctactataaggggtcttgaaaaggagtcaatagcctatgagtgtttatgagg

SEQ ID NO: 204531 - DNA, 388 bp, Homo sapiens
tcttaacattggagcacacagtgagaagggggcatctgcaagccaggaaaagagccctcaccasaaactgaattgcctgaagacttgttcttggacttctcagtcttcagaactatgaaaaatttgttaagcaagtctatggcattttgttacagctgcccaagcaaactaatatagctggtatcatgttcatccgtcacattgcaaagagcagggccaactgaactctgtcgagctgccagctagggagcagtgtggtctgacaaatcacatgaggggctgacaacctggagttgtggcctatggaatgtaagaatgtcctaggcaaggttagcatgaatggggttcagtataaactactttccctggaatgaaactgtccaagttc

SEQ ID NO: 204532 - DNA, 447 bp, Homo sapiens
attttcaacactttgcttgaaaatttccttagctagatatccttgctcatctttcacaggttctcttttccacataactgaaggagacaattccactaagcctttttgccactatgtaacaaggatctatctccattctttcagttcccaataatttgtttcccatatcttactgagcccctaccagcagagtctttaatgtccatatttctactaagtctgttcaaagcaatcaaggatttttctatcatgctcctctaaattgttccagcctctatccactttctgatttcttacatttttagctacttgttatggcarcacgccacttcaggtacctaatttatatcttcagaaaagttctacttcccttggtggttatatttttaacagccacaaatctgggttttatatttttatggtgagtttactgcatcattttgtctt

SEQ ID NO: 204533 - DNA, 599 bp, Homo sapiens
cgtccaagattatcaaggtagtacctctatgagtctgtaagaatcacattatggacttggggtggtccctaaggcagacacagcttagatcacaacatccaagttctttcaaatatctgggaagtgttcccaaaaaggatggctacaaataagcctagaaagtgaagactacaataaacacctaaatattcaacacccagacactgaagaacatctactgacatcaacaccatccaggaaaacatgacctcaccaaaggaagtaaataaggcactaaggaccaatcctggagaaatggggacttttccaacaaagaattcaaagtagctgtgttgaggaaactcaaagaaatacaagataacacagagaaggaattcakaattctatcacacaaatttaacaaacagattgaaataattaagaagaaccaagcagaaattctggagttgaaaaatgcaataggcatactaagaatgcatcaggactctttaataacagaattgatcaagcagaagaaatcattattgagcttgaaaagaagctatttggaaatacaatcagaggacataaaagaaaaaagaatcataaacaatgaagca

SEQ ID NO: 204534 - DNA, 605 bp, Homo sapiens
gacatcctagctagtacaatatagtaagaaaaagaaaaaaaaaagagtcttacagattggaaataaggaagttaaattgccttttcttcacagacaacacaattatatttgtagaacatttgaatcttccaaaaagttacttgaatgaataagcttctttagcaatgtcttggaatataattgtcaattaaacaaaattttaattttatatgttagcattcaacaatcagagggttaaactttagaaaatgyagaatatcatataataaatacttaggtagaaagttaaacatacatttcttagaactttatatgaagaagtataaagcattataataataggtaaaaaaagaggtatatgatgttcatggatcagaagggttaatcctaagatatcaattctttaccaattaattttcttgttcattgctatctcaatcaaaatgccagcagatattttgacaaaattgacaaaacaattctaatgattttagagaaatgtgaataacctagaatagcaaaaaccattttgaaatataaaaagaataagctggaagtctgttttcaagacttaccactactataaagacatagtaaacaattaa

SEQ ID NO: 204535 - DNA, 605 bp, Homo sapiens
gacatcctagctagtacaatatagtaagaaaaagaaaaaaaaaagagtcttacagattggaaataaggaagttaaattgccttttcttcacagacaacacaattatatttgtagaacatttgaatcttccaaaaagttacttgaatgaataagcttctttagcaatgtcttggaatataattgtcaattaaacaaaattttaattttatatgttagcattcaacaatcagagggttaaactttagaaaatgcagaatatcatataataaatacttaggtagaaagttaaacatayatttcttagaactttatatgaagaagtataaagcattataataataggtaaaaaaagaggtatatgatgttcatggatcagaagggttaatcctaagatatcaattctttaccaattaattttcttgttcattgctatctcaatcaaaatgccagcagatattttgacaaaattgacaaaacaattctaatgattttagagaaatgtgaataacctagaatagcaaaaaccattttgaaatataaaaagaataagctggaagtctgttttcaagacttaccactactataaagacatagtaaacaattaa

SEQ ID NO: 204536 - DNA, 441 bp, Homo sapiens
tacttactctaagtgtgatccagggaccgaatccagacagcaaattgctgtaacagattatgtaagaataagatttaaaaatttttataggtatttaacatttccatgacatccaagtatgtgatcagtcaacctgtcttaacgataggacatagatggctcaaggtgttaacttttacttctagtcacatgtaacaatttgttacagcactttgtcaattgacagctaaagcgaataaaagtctgmgaaaaagtaccattactgagtttttattactaaaaataatacaattagtgagaaattaatgaaagactaaaactaagatgttttcttggaaacgtccaaaatctatggcaatgaaagtagcttttctcccattttgccaagagcgcatagtatgacagaatcagtatgacatgaagaccaattttacctttcag

SEQ ID NO: 204537 - DNA, 435 bp, Homo sapiens
ctctaagtgtgatccagggaccgaatccagacagcaaattgctgtaacagattatgtaagaataagatttaaaaatttttataggtatttaacatttccatgacatccaagtatgtgatcagtcaacctgtcttaacgataggacatagatggctcaaggtgttaacttttacttctagtcacatgtaacaatttgttacagcactttgtcaattgacagctaaagcgaataaaagtctgcgaaaaagtaccattactgagtttttattactaaaaataatacaattagtgagaaattaatgaaagactaaaactaagatgttttcttggaaacgtccaaaatctatggcaatgaaagtagcttttctcccattttgccaagagcgcatagtaygacagaatcagtatgacatgaagaccaattttacctttcag

SEQ ID NO: 204538 - DNA, 565 bp, Homo sapiens
ttttcttcgggttacttctgctttttagggtcttttgtagttccatatatattttaggatagtttttgttccatttctgtgaataaaggcattggtatttgatagggattgcattgaatctatagattgctttgggcagtattgatattttaataatattgactctttcactccatgtgcatggaatagctttctatttatttgtgtcctctttctttcgtgagagttttgtagatttcttttagatattttttcttcttacattgaatttattcctagtttctttatagttttgtaactgttgtaaatggtgttttcttaatttcttttacagattgtcccctatggataaacacacacacacacacacacacacacacacacacacacacacayatttttaatgataatttgttatcctacaagtttactgaattcatttatcagttctaacaaattttttgttgagctgggttcgagccccacatatgggcaccacttgttcacagatgaacaagtatacattttaaaaatataagatgatgtcatctgtgaacaaggaaaa

SEQ ID NO: 204539 - DNA, 545 bp, Homo sapiens
tctccctctgtttcatcaagcttcctttagtaacttgggcacctagccagaagcctgtaagaaatctattacggattgtgtttagcctctttacgacccygtaaatcaggccctttacgtgagacacatcgctatcataacattccaagttgttgctgagggcaagcagagtctatcactttagaagtattgattacaaaaaacagaaagcaacacagactaacctacaaaaggaatttattgaaaggattttggatctcacagtggctagacctaatcatagcaagaacgatgtgcgttccacaggatcacagagcaggaagcagaaaatacggcgtgtctattgagaagcacagcctcatgaacacgacactgccacaaagagagcaatagctcgatcaccatgccaccactagatctgctctttaggcagaactgactgaagctgataaacattcaccacgtgagactgactgctgcttgacagggtggtttgggtaaagtaactagaatgacaatccctaggcatatttgcctgaattctg

SEQ ID NO: 204540 - DNA, 419 bp, Homo sapiens
tggtctgaatgtttgtgtagcccagaatttatgtgacagacctaatcgcgaatgggatgatattaggccgtgaggtctggttgggaaatgactaggtcatgaggctagtgcccttatgaatgacatttgtttctctaaaagcttgcttgtccctatcatgtgaggacgtagaaggtrctatctacaggaaagtgaaccttcagcaggcactaaattagcttgtaccttgatcttgaacttctcagctaacagaactactggaaataaatttctgttgtttagaagctacccagtttatagtattttgttatagcagcccaaacagactaagacggtatctccaagggtccttttcacagttaaataatgagataattcaagggtgttaaataaacaaaaataaagcaatagaatgaaca

SEQ ID NO: 204541 - DNA, 534 bp, Homo sapiens
ccaacatatgctgtctcatcttttttgataacagccattttaacatgtggaagatgataactcattgtggctttaatttttatttccctgatacttagtgatcttgatcatactttcagatacctgttatttacttgtattactcctttttagaaatgtctgcttggtccttttcttccttttaaaatcaggtaattcattttcttactattgagttgtrtaattttcttatatattttgaaaattaacctcttatcaaatgtataatttgcagatattttctcgaattctatagattgcattttcactctgttgattgttttctttgctgtgcagaagggtttttgtttgatgtaatcccgcttgtctactgcttttgctgaatgtgcttttgggaccatatttaaaattattcgccaagaccaatatcatagagctttccccctatgtttttatcttgtctttctacaaatttgggtcttccatttgagacttgatccatttttagttgatttttatatattatgtgagatg

SEQ ID NO: 204542 - DNA, 534 bp, Homo sapiens
ccaacatatgctgtctcatcttttttgataacagccattttaacatgtggaagatgataactcattgtggctttaatttttatttccctgatacttagtgatcttgatcatactttcagatacctgttatttacttgtattactcctttttagaaatgtctgcttggtccttttcttccttttaaaatcaggtaattcattttcttactattgagttgtataattttcttatatattttgaaaattaacctcttatcaaatgtataatttgcaratattttctcgaattctatagattgcattttcactctgttgattgttttctttgctgtgcagaagggtttttgtttgatgtaatcccgcttgtctactgcttttgctgaatgtgcttttgggaccatatttaaaattattcgccaagaccaatatcatagagctttccccctatgtttttatcttgtctttctacaaatttgggtcttccatttgagacttgatccatttttagttgatttttatatattatgtgagatg

SEQ ID NO: 204543 - DNA, 534 bp, Homo sapiens
ccaacatatgctgtctcatcttttttgataacagccattttaacatgtggaagatgataactcattgtggctttaatttttatttccctgatacttagtgatcttgatcatactttcagatacctgttatttacttgtattactcctttttagaaatgtctgcttggtccttttcttccttttaaaatcaggtaattcattttcttactattgagttgtataattttcttatatattttgaaaattaacctcttatcaaatgtataatttgcagatattttctcgaattctatagattgcattttcactctgttgattgttttctttgctgtgcagaagggtttttgtttgatgtaatcccgcttgtctactgcttttgctgaatgtgcttttgggaccatatttaaaattattygccaagaccaatatcatagagctttccccctatgtttttatcttgtctttctacaaatttgggtcttccatttgagacttgatccatttttagttgatttttatatattatgtgagatg

SEQ ID NO: 204544 - DNA, 571 bp, Homo sapiens
tttgttactaccaatagttatctgtatatatctaactaactagctaagattcataatatggtgctttgcactgggactttttgttgaaacacagaagaggggcagagcttgcctctaaggcagttggctggtgaatgcgcatggtcaaaatttgtgaattttgttaatgatattagcaaataattagcatttatttgtacatatgatgtcattctttacatgtcttacattgcaagcttattttgaagataacatttkatgaatataaaaacatgggttgaagtaaaaacaactttattttctaaataatgtaaaagaatgggggattagaattgattgagaattgtttattcaagtgacaacagttaatttattttaaaagaaaataattttttatatatttccctatattttaaaacaaattaagaaaagtaatactgaataaatattaataaaagagcttgaaaactaaaaaaatctacagaataaatttgcctgtatcttactaaccatttttagtttaatagctaattttcatatgatttttttccctaaaatactaggccatatg

SEQ ID NO: 204545 - DNA, 480 bp, Homo sapiens
ttctgtcagtgacttaaaatagggctacttctatcttttcagccttgattttcttgatatattttaaacctacagatcagtttaaaaatagataatatgtaacatagatactattctwccacagtccttggcagtgtttctcagtcctctcaagaattagtcatttcatcatccctcactagacgcagcaagaagggataaagaggaaactggaaatttgttctgaagtacatctccaatattttgaatgttgatcaacagcattctgatcttctccctgaatgagtaaaaagaaaagatgtaatactgggtcagccaaacccactgcgtggcacttagccaggatgattcattttgcttggagcaatcttacaccctttgtgaaactgggtttcttttggttgaaggaagaaaaagactcgtccagagctgtcagtcacttcttaagcaccttcaaatgaaggccttattggattgttt

SEQ ID NO: 204546 - DNA, 378 bp, Homo sapiens
accttcttactctgtaggccacatgtaatgcttgggattttttgtacaatctttattagaataataacctgacaggtttcaaatctacttgagggaagttgaggtgaacataatgatcaggttccctcatttctactcttccctcccagacagcatgagggagagaagccagctggtgttttcttgtgttcctggcccacttcccccaaccccccaccccgcccccagctaccatcatctcagcctcactggaatgtgtatgtgtgcttctctttccaaacttggagagtaaaactatctgagcacttcctcctgtctacaagaaaartagcctctgcattttattttttgtttcctacaaccggcatattctgtttt

SEQ ID NO: 204547 - DNA, 189 bp, Homo sapiens
ccccaggctcttcttcagctgagccagtgtattggctctttstggaataggttttgtgcatttggcctctgtccaaatgtcccacaactccccctagtgccctactcaccctattttttcccacttcctctagtacccctactccccctagtgccctactccctctagtactcctcattcccccagtaa

SEQ ID NO: 204548 - DNA, 507 bp, Homo sapiens
actccaccaaaaaaagagaaaaaagaaaaagaaaaatgaatttttattttaattgataagatgaaaattcaattgagttcctattttaatgatacgatggaaactactmaaaacttatgtaatctttgagacttttttacatttagagttaggtttaaatccatcatgctttaaataggctactcattcctgaaagcactgccctctgggatacagtagaaagataaaatatgatgcaatttgtcatttagttagagatttttttcttaatttacacttttatacccattatttaaaggatgaaatcttacaatggtttcctatgtttaaaaaaagttaaaagtcaataaattttagaaacaagttaattaaaaataatggctaatagtaaagtatggtttatataatttttttcaatcatttaaaatacacacaaaggtttaaaaaaatctaaaagaaagtgtgggttgagaaaacttactgctagaatatcctggtttaccctag

SEQ ID NO: 204549 - DNA, 623 bp, Homo sapiens
tctaccttctgaattcatcttttcctttttaaatgttctgaagtgccctgcttatctgagctagttcaaattttcgctttacttcccttttgatttctttacagattacggaaatagaacttgtttttccatgtatttaataattttattcacttgttggcagttttttattttcttgggtgaaaatgagtagattgatttgggaggcgaaagtgggaggttcacttgaggctaggagttcaagaccagcctggacaacaaacgaaatcccgtctctacaaaaaattaaagaatttgccgggcttggtggcatgtacctgtagtctctactactcaggggactgaagcggaaggttcgcttgaacccaggagatggaggctgcagtgagctatgatcatgccattgcactctaacctgggtggcagagctagaccctgtctcaaataaataaataaagtaataaataagtaaataaartaataaataagtaaataaagtaaaaaatagagagagataaagaggtatggtatgagaaagccttgggcacgcttcccatatcctcatcccaaatttccgatccctgggaatatcacgccctttcttctgttccagtcctgcctgg

SEQ ID NO: 204550 - DNA, 437 bp, Homo sapiens
ggtaaaaatacccattcaaggtgggccaacctgcaagtcacagcataactggatttaattaaaatttgcgcacaaggattatgttgcctccagcagaacaaagaacaaaagaatctraaagatattgtgatggtgagaaagtcaatagctatttcttagcctggccaacatggtgaaacctcatctctactaaaactacaaaaaaattagccaggcatggtggtgtatgcctgtaatcccagctactcaggaggctgaggcaggggaattgctgggaacctgggaggcggagattgcagtgagccgagatccactgcactccagcctgggtgacagagagattctgtctcaaaatacaaaaacaaaaacacgctatttcttcactatgtcagagaggatgcggtcctctgcttaccacataattttcaggaatttag

SEQ ID NO: 204551 - DNA, 429 bp, Homo sapiens
tgggccaacctgcaagtcacagcataactggatttaattaaaatttgcgcacaaggattatgttgcctccagcagaacaaagaacaaaagaatctaaaagatattrtgatggtgagaaagtcaatagctatttcttagcctggccaacatggtgaaacctcatctctactaaaactacaaaaaaattagccaggcatggtggtgtatgcctgtaatcccagctactcaggaggctgaggcaggggaattgctgggaacctgggaggcggagattgcagtgagccgagatccactgcactccagcctgggtgacagagagattctgtctcaaaatacaaaaacaaaaacacgctatttcttcactatgtcagagaggatgcggtcctctgcttaccacataattttcaggaatttagccaaggtgtcagt

SEQ ID NO: 204552 - DNA, 429 bp, Homo sapiens
tgggccaacctgcaagtcacagcataactggatttaattaaaatttgcgcacaaggattatgttgcctccagcagaacaaagaacaaaagaatctaaaagatattgtgatggtgagaaagtcaatagctatttcttagcctggccaacatggtgaaacctcatctctactaaaactacaaaaaaattagccaggcatggtggtgtatgcctgtaatcccagctactcaggaggctgaggcaggggaattgctgggaacctgggaggcggagattgcagtgagccgagatccactgcactccagcctgggtgacagagagatyctgtctcaaaatacaaaaacaaaaacacgctatttcttcactatgtcagagaggatgcggtcctctgcttaccacataattttcaggaatttagccaaggtgtcagt

SEQ ID NO: 204553 - DNA, 410 bp, Homo sapiens
cttgttgggttctaacaactatggagagctagttgctattctaggaacttcagatgccttaagtcatttatttttctcaattatcttctgaggttagccaaatttacagaggaataaactgaagcaccaacggaagaataaygcttctaaagtctcacagaaggcaagcgtgatgccaggattcagcctcaggacatcaggctctgtggccctcgctagccactgtaccacactgccactagatgaatgaaaacttcttgggcctccacttccttgtgtttctcctccttcaggggaaaatgctgtctttgtttgtaactttcagcggagacactcccaggtgtcaatgtgtatctcatccacatggtgcaatctgccatgttctgagagctggtctccatggagttggt

SEQ ID NO: 204554 - DNA, 619 bp, Homo sapiens
tctactgagacaggggaaaaccgccttagggctagaggtgggacatgtgggcagcaatactgctgtttaaggcattgagatgtttatgttatacatatctaaagcacagcacttaattctttaccttgtttatgatgcagagacctttgttcacstgtttacctgctgaccttctctccactattatcctatgaccttgccacatgcccctctctgagaaacacccaataatgatcaataaatactaagggaactcagaggccggcaggatcctccgtatgctgaacgccggtcccccgggcccccttttttctttctctatactttgtctctgtgtctctttcttttgcaagtctctcgttccacctaaggagaaaaacccacaggtgtggaggtgcaacccaccccttcacacatgccatctttcttagagaccaaacacaaatgaagctagaatttgtgttcttaactctttgaatatgctagttttatctcctttttcccttcttacaaaacatgtgcaactactatgaaaagaaatgattatctagatcaagaaaggtagctcatggtcttttcagaagccaatggatataatttttaactccttacattagag

SEQ ID NO: 204555 - DNA, 619 bp, Homo sapiens
tctactgagacaggggaaaaccgccttagggctagaggtgggacatgtgggcagcaatactgctgtttaaggcattgagatgtttatgttatacatatctaaagcacagcacttaattctttaccttgtttatgatgcagagacctttgttcacgtgtttacctgctgaccttctctccactattatcctatgaccttgccacatgcccctctctgagaaacacccaataatgatcaataaatactaagggaactcagaggccrgcaggatcctccgtatgctgaacgccggtcccccgggcccccttttttctttctctatactttgtctctgtgtctctttcttttgcaagtctctcgttccacctaaggagaaaaacccacaggtgtggaggtgcaacccaccccttcacacatgccatctttcttagagaccaaacacaaatgaagctagaatttgtgttcttaactctttgaatatgctagttttatctcctttttcccttcttacaaaacatgtgcaactactatgaaaagaaatgattatctagatcaagaaaggtagctcatggtcttttcagaagccaatggatataatttttaactccttacattagag

SEQ ID NO: 204556 - DNA, 569 bp, Homo sapiens
aagcttctagagcaacacaggagtgacaggggtgaaggggattaaggggacgatgtgactggagaggcacttcctggtgctacctgtgacccagcctctgttctggggctgagacaggatctgaagttacgagcagaaagccaggcaagaggcccaatttctagagggcagccaaatgctttcataagtatcccagtgcctcagaggtggaacaaaggtccccctaacggtcttcattccagagtycagatgactcttggaggctggaccctgcctcactgcttctctgaggctgtctcttcgctctaacatcctccgccacctcctccaaagaactcctggcacaaacttcccttctctcccctcacctcctctttcctccagccccatgtgtgcatgctctgcagggtaaaacaagaccagtgtgttctggtaaaggtacctctgctttacccacaagctcacaggtgaaatcaggaggacaggaacaaagagggcagggaaatgggcgcttattacctccagtgcccactgatttcataatggctcactgttgcccatctgcttct

SEQ ID NO: 204557 - DNA, 602 bp, Homo sapiens
tgactttgggctcccttggggatcatgtgggcagtattctcctaattttgtgtttatcagctttcctatctgtgacacagcagctgtggtgcttgctgccccagccagccctactgttccaaaccctcacgcctctcatctcatcattaccattcctcctcttccctcagatcctccttgccttgcctccctgcctcgcccttcacacagggtgcctgtcccttctagatcacacccaccatcagcatgcttttgtctcttggccagcatatcactcctctggcccttggctactctccattgttttccccgcctctctcccctcaagctctgcttttcttttctttctttyttttttaaactatcaaagaccttttctgaatatactgtcagcttcaggttccagaaggctagtaaaatatatattttagggtactgatttttttcaaggtctattagcttctttcttgacaaagcatgcttaactaagcaacatcacataggtcttataaagtatctagctctcaaaatcaatcttgctccattccatcaagaatgggcctgaatttggactgagtccaggggtagcccacaaggctacc

SEQ ID NO: 204558 - DNA, 464 bp, Homo sapiens
  misc_feature (1)...(464): n = A,T,C or G
gaattcgtccagacctgctcacactgagggtgagtgccccaggaagccctgctgcctaaccactgagacgcctgcgactcttggtcatgatacgtcatgtcaggttactgaacatcgccccagcacacgtgcctgaatatcagcttttctaagctgcttagaacattggccctccaagtctatgggagtaggcaaggactacacanccagcaatagatgggccagacaaggtattggcaagcagaagaatgatttagggatcaattttcccagaggagggtgcctrggaatctgtttcaaatgaaaagagagatacagaagaaatgccaatactaataactaccacgggctttaaacaccttatctcatctatctcacaacgatcatgtgaggtgagtaccaccatccccacttacgggacgaacacacagaggccataactgggaggttatgtagtttgttca

SEQ ID NO: 204559 - DNA, 464 bp, Homo sapiens
  misc_feature (1)...(464): n = A,T,C or G
gaattcgtccagacctgctcacactgagggtgagtgccccaggaagccctgctgcctaaccactgagacgcctgcgactcttggtcatgatacgtcatgtcaggttactgaacatcgccccagcacacgtgcctgaatatcagcttttctaagctgcttagaacattggccctccaagtctatgggagtaggcaaggactacacanccagcaatagatgggccagacaaggtattggcaagcagaagaatgatttagggatcaattttcccagaggagggtgcctgggaatctgtttcaaatgaaaasagagatacagaagaaatgccaatactaataactaccacgggctttaaacaccttatctcatctatctcacaacgatcatgtgaggtgagtaccaccatccccacttacgggacgaacacacagaggccataactgggaggttatgtagtttgttca

SEQ ID NO: 204560 - DNA, 588 bp, Homo sapiens
gagggttaaacgaaatgcgaatcaccaagtttccagtacagagtaagtacttagtatctgctccctcttagccatgtctgcctgtttttatactgtgtgtggaaattgaggctcacagaagttgagcagctgccttgtttatatggcataagaagcagagtagagtcccaaagcttcctcttgtctttcaagcccctgcttggtcccttataccaggctggctactgtctgtctaataccttgggtgccccttaggcccctggagtgggtagcctgtgagccctttaccatgggttactacacactgagaaaggtctctgcttcatagtgtagtagagattagaaaagcataggctagagggaagtcataagaataytttgtcactaaaacaatattggataatgaccttttaagccagctgcagctcaaggaacctgagagcagtccagtaatgattacagctcaggacctaatgaagagaccatcacttatttataacattgctgctttcttgcttttattgcttgtgtgcccctgtgtctaggcaggtggatacctttcataatctgagcaataaatgagtcagt

SEQ ID NO: 204561 - DNA, 580 bp, Homo sapiens
cggtcaggagataagccacaagaaaattgttactgacaacaaagaaactaggtttgtgaataatttacttctcttataaatggtaagggttcaaagttgttccctataacaccttccccctctcactgcatgtgctttcctggttgggaaagaagagggtgtttctgctatagaaagctgggggctgtgtgttacctgcagcctgtcatacccgtggtttcggccccataacctggagggcctggggatgctgtgccaggcttgtcagtgtcaccccaaggcagtgagtcaggccagatccrctctctagaccttcagcaagaggagtcctcttccactgagctcccagagcctccagtgctatctggctggcttccaggtgaagtcggagtgaatcccacacagtccctgggagcggtggctgagggaagggtggctcctcctgctctgcctcctggcctgggctctctctgcatggagattaccccagccttcccccggagggcaggcactgagtgtgacaggttttccaaccccagctgaggacggccttgggtgctgaggctggaacttcctggga

SEQ ID NO: 204562 - DNA, 584 bp, Homo sapiens
aaggacctggaagcccagagaggtgaagtgatttgcttcaaggcaagttaaaaaagcaggagccaagattccagcccagagcagtctggctccaaagcctattccagcatctgatttatcaagccaggtgggacatacattggagttggcagtgagaggaaagacccctgatccttgagggtgtctctgtgaagggaatagcctgagtggggaggaggaggtctggggaagtgagcagaaaaggggtgtcaagatttctggggctccaagggctccattcattcttgaccccacattgtcatttccttcaccagtaccccagggctcctgtttccctgccctgtggggtcctttggtcatagattggaggcttcaggcatgggagctcatttggtccaaacatagaaatgactggcacactaccaagagtcagcaagcttcttcataaataaggttttagtgaaaggctgtatcacagtcagtagtttgtgccttctgtggacactcyatttgacggcagaagtgaaggcaaagggtatctggagagagggagaggatgggccctccctcatggagagctatcc

SEQ ID NO: 204563 - DNA, 501 bp, Homo sapiens
ggaattccaaacaaaatcaccctttaagacctgcagtaaaggagtcattacatccactccatgtttccgctcaggcactgtcaactccagcatgcctgtatgtacatacacactcaataaatgcttgctgattgactgactgtaggtcctaagatcaggtttaaataggtagattgctcaattgtggttcatcagtttggtgcctcccttgtgcccacacacagcagcacagctcaatccacataacagaggaaacagacaccagtattccacygtgccccataccttgttctcttaaaatgcaaggattcagaataaccaaaggaaatgtggtctgggtcattcaagtcttttcaaaggaaagagtattattaaattttatcctgttgcttatttatgccaatttttgatattttacttaactaacagaaatgtgtctgatgctcattaagtctttgaatcccaactaattataagccaccatattctctagcaaaaata

SEQ ID NO: 204564 - DNA, 580 bp, Homo sapiens
cgctccagtcagaaacaattttattcactttaactgcatcccaactcccagaacccttcggccatgtaattctcacatcatctcttcctctcacagataaagcgataatattccatccctcttaaaaggaagacccagaaacccaattcctggctgcctaatctgcgtgtgaagacacacttgggattctcatcagttctgagtgtgcctggaagggccgcaggccctcagcctcacagcttggctctaaggcccagatgctcatctaccgctctgcccaagcattggctgggtgctcagagrgtggtccaacaacatgaatcttggctgagcagtggtatgagcccagctgtctggccttgtggcctctggtgatgggccctcaatgccacacccttggaagtggttggggtcatctcttggctgtgtcggggggctacagcagtctccatgaagggactccttgttaggatgacaacaggcagctgccacagagtgcctgccctgatttcaggccagtgacaagaggaatggacaaaggaggaaagagcagaactagtctttacctcctataggaagt

SEQ ID NO: 204565 - DNA, 443 bp, Homo sapiens
ttctagattcaaaatgatttctgctcagaacttgaaggtattgctccactgtcatctggcatccagtgttgctatgagatgtttgataccaactggaattttattcctttgtaggtgctatggtctgaatatttgtgtccccccaaaattcacatgttgaaatcctaacccccaaggtgatggtattagaaagtaggacctttgagaggtgatgaggtcacatggtagagccctcctgagcggattcatgcccttataaaggaggccccagataacccctcctccctcccaccatgtgaggacacagcgagaagacgctgtcttagtccatttgcattgctataaaggaataccggagactgggtaaatgataaagaaaagcrgtgtatttggcccacagttctgcaggctgtacaggaagcatggcacctgtacaggaagca

SEQ ID NO: 204566 - DNA, 468 bp, Homo sapiens
ctggttttaagcaatttgatcatgatgtatcttggtgtctttttctttatgtttcttgtgcttagggtttgttgatattcttgcatctgtagattaattgtttatatcatagtttgtcattttttggccmttgtttctttatatatctttttttttaactaaactctctcttgtttgggaatcctaattaaacatttattaggtttcttgaagtttcctctgatgtactgtttatttattttatattttttatctctgtgtatcaccttatattatttcttttgctgtatcttcaatttcattcatctctttttctgcaacgtgtaatttgccattaatttctcatctcagacattgtagtttttatctgcagaagtttgattaggtctctacttgagcttttatacatatagaatgcaactataaatgttttaatgcctttgtctgataattctaacatctgtgtca

SEQ ID NO: 204567 - DNA, 543 bp, Homo sapiens
caccttgcaagctcatttcagacctcggcttgcatcctgtctgctctgacccactgggcagaacaagtcatacggccaagcccagtgagaacatacagcagagggtgtggatgaatgaggggccatcactgagggcactaacacaatcaaaatcaactaaaaactgcaacagtaagtagagttcataacttttatgacaggaagaaaaatcacaagcaacatggcaggaaattggtaaaaaaaaaaaaaaagtgtaataatatgctgaaactttaatggaaaacataaagaagacctaactggaattgcttaccttttttttttttttttctgtatggggagactcagtattgtaaagatcccaatttctgtcatattgatctataattcattgcaattccagtacaaatccaaagaggattttaaaaaatgggacttgattccaaaatttatctggaggagaaaatgtataagatgcaacccaatatgacacracaatggtggtagaggtggggagattgcctgacaaattactgaaacatc

SEQ ID NO: 204568 - DNA, 580 bp, Homo sapiens
agtaagtgctaaaataactcatcagacagtacaattttggagacagcttattgataggaaaaagaacatcatgtgtcattaggaartttcctattgtctccttaaattccttttcaccagaaagttgtcttttggtggggagaatttggggtggggagaataccagtacatgtggaaactatgttgttatgaaaatgtttaactaaagaaagtattagttgatactgaattttcagtaattcttaagaattattccaagtatatacattggttaaattctccaagtagtgaaggacattgtgatcatatttatgttttgcagtatgatgactcactagcttaccatattaaaaaaaaactcttaaaattgtctttttcttctggaccctcttatgttttttctaagctactttctaacatgagtatgtatgttttcccactgaaaagtcaatacattgaaaactgacatagatgtctttgatatttcattgtatgtttatttcggtgaagttgccaatttagaagagtaatgagaggcagttttccctgggtttgtttagccctgagtaagctaataatt

SEQ ID NO: 204569 - DNA, 571 bp, Homo sapiens
atttggttttctttgtttgtttgtttttttgagacggagtcttgctctcttgcccaggctggagtgcagtggtgcgatctcagcttactgcaacctccacctcctgggctcgagcaatcctcccacctcagcctcctgagtagctgggaccacaggcgtgtgccaccatgcctagctagtttttgtagagacaagggtctcactttgttgccctaactagacccgaactcctgggctcaagcaatctactcgcctcggcttcccaaagtgctggtattacaggtgtgagctaccacacccagccctcagtaaggtttttattaagtttcttagacggaaatactgatgttactgaaaatcagacctttttcatatatttgagactgcttcatgtctaactgatgatgttgtttgcaccacagaggaaaatataagaagggtttcagcgtgaatcctagrtgccaggcacagatggaggagagagctgtagacagaggaatgccattttcaattagcatgcgacatgcctttgtgcctttcccaggtaaggtggctgatagctttgaagctt

SEQ ID NO: 204570 - DNA, 571 bp, Homo sapiens
atttggttttctttgtttgtttgtttttttgagacggagtcttgctctcttgcccaggctggagtgcagtggtgcgatctcagcttactgcaacctccacctcctgggctcgagcaatcctcccacctcagcctcctgagtagctgggaccacaggcgtgtgccaccatgcctagctagtttttgtagagacaagggtctcactttgttgccctaactagacccgaactcctgggctcaagcaatctactcgcctcggcttcccaaagtgctggtattacaggtgtgagctaccacacccagccctcagtaaggtttttattaagtttcttagacggaaatactgatgttactgaaaatcagacctttttcatatatttgagactgcttcatgtctaactgatgatgttgtttgcaccacagaggaaaatataagaagggtttcagcgtgaatcctaggtgccaggcacagatggaggagagagctgyagacagaggaatgccattttcaattagcatgcgacatgcctttgtgcctttcccaggtaaggtggctgatagctttgaagctt

SEQ ID NO: 204571 - DNA, 596 bp, Homo sapiens
ggaggtgaatggaagagaccccatggtttcttttcctttcctacttttatcacctcctctttggaggaagctacagaggcaatacctgctttgggtggaaattgggctgagcgagattgaaaggcctttccactttggagatctgtgagtctatggatatatttctggcccccaacaatagagggaggaccccaactctcaatctggagaagaaggatctataaaatagaagcagatggatgtccctggtggtttccagtacaaaaatcacatggccctgtgctcactcctcctctggggctttgctggatgtcacctgctactgggcactgtgcagacagttgatgtctcagagttgggaggtttttagagggagtctggactgagatgaggatgtgaaaccaatctcttgactaggaactcacctcctatgcactagcctcttgcaatgtttgtgagagtggcctaaactcttagaatattccttgttatttcaaacccaattatgccatctgataacctccctctggaggaacaaaaaaaagacytttctccccttttgcttcccctctctcttcctcctctgagatactcaa

SEQ ID NO: 204572 - DNA, 549 bp, Homo sapiens
gggctacaggccctatgcaagtcataaatccagcagggcagtcaaatcttaaagtttcaaaatgacctcctttgactccatgtcttacatcctggtcacgctgatgcaagatgtaggtacccatggttttgggcagctctgtccctgtgcctttgcagggtacagcctccctcccagctgctttcatgggctggcattgtgtctgtggcttctgcaggtgcacagtgcaagctgtcagtggatctaccattctggggtctggaggatggtgcccttgtcttccaggacaggtgtgtcccatttcctctgcatgatkgtaggaagcactccttacaattttccctttctaagcatttattccatgacttaacccaccaccactacaactgccatcactcagatataccaaaacttgggtaaataattatctttcttgtttatattgatcttttccaagctcacatttatttccatttctactattggaagtgatttggggctgggcacagtggctcacgcatccatctgtggtaggggaccatctcaggt

SEQ ID NO: 204573 - DNA, 549 bp, Homo sapiens
gggctacaggccctatgcaagtcataaatccagcagggcagtcaaatcttaaagtttcaaaatgacctcctttgactccatgtcttacatcctggtcacgctgatgcaagatgtaggtacccatggttttgggcagctctgtccctgtgcctttgcagggtacagcctccctcccagctgctttcatgggctggcattgtgtctgtggcttctgcaggtgcacagtgcaagctgtcagtggatctaccattctggggtctggaggatggtgcccttgtcttccaggacaggtgtgtcccatttcctctgcatgattgtaggaagcactccttacaattttccctttctaagcatttattccatgacttaacccaccaccactacaactgccatcactcagatataccaaaacttgggtaaataattatmtttcttgtttatattgatcttttccaagctcacatttatttccatttctactattggaagtgatttggggctgggcacagtggctcacgcatccatctgtggtaggggaccatctcaggt

SEQ ID NO: 204574 - DNA, 549 bp, Homo sapiens
gggctacaggccctatgcaagtcataaatccagcagggcagtcaaatcttaaagtttcaaaatgacctcctttgactccatgtcttacatcctggtcacgctgatgcaagatgtaggtacccatggttttgggcagctctgtccctgtgcctttgcagggtacagcctccctcccagctgctttcatgggctggcattgtgtctgtggcttctgcaggtgcacagtgcaagctgtcagtggatctaccattctggggtctggaggatggtgcccttgtcttccaggacaggtgtgtcccatttcctctgcatgattgtaggaagcactccttacaattttccctttctaagcatttattccatgacttaacccaccaccactacaactgccatcactcagatataccaaaacttgggtaaataattatctttcttgtttayattgatcttttccaagctcacatttatttccatttctactattggaagtgatttggggctgggcacagtggctcacgcatccatctgtggtaggggaccatctcaggt

SEQ ID NO: 204575 - DNA, 460 bp, Homo sapiens
agggactgttctgtgccaggcatgggaaggtgatrcttctgggttcagaaactagtttgctccaccacaacataagaagatatggaatctcatctggaaagcatcaggcccttttaggaagacaaagcctatgctcaggggttacgtgacctgcccgcatcacacggaataacacaggcaccagccctgcccagaggaggctcccagtttgagagtgactaggcattgctggtcagaaccaaactctgtgcattgtgctcttactgtttcccattattttattgttaagactcgaacaacaaaagtggtatcagtgccactgaattgtatactcaaaaatagttaaaatggtaaatcttaagttatatatattttataaaacaatgaaattggacccttaccttacactatacataaacattaactccaaatgaataaaaaacttcagagctaaaactat

SEQ ID NO: 204576 - DNA, 460 bp, Homo sapiens
agggactgttctgtgccaggcatgggaaggtgatgcttctgggttcagaaactagtttgctccaccacaacataagaagatatggaatctcatctggaaagcatcaggcccttttaggaagacaaagcctatgctcaggggttacgtgacctgcccrcatcacacggaataacacaggcaccagccctgcccagaggaggctcccagtttgagagtgactaggcattgctggtcagaaccaaactctgtgcattgtgctcttactgtttcccattattttattgttaagactcgaacaacaaaagtggtatcagtgccactgaattgtatactcaaaaatagttaaaatggtaaatcttaagttatatatattttataaaacaatgaaattggacccttaccttacactatacataaacattaactccaaatgaataaaaaacttcagagctaaaactat

SEQ ID NO: 204577 - DNA, 441 bp, Homo sapiens
ggactgttctgtgccaggcatgggaaggtgatgcttctgggttcagaaactagtttgctccaccacaacataagaagatatggaatctcatctggaaagcatcaggcccttttaggaagacaaagcctatgctcaggggttacgtgacctgcccgcatcacacggaataacacaggcaccagccctgcccagaggaggctcccagtttgagagtgactaggcmttgctggtcagaaccaaactctgtgcattgtgctcttactgtttcccattattttattgttaagactcgaacaacaaaagtggtatcagtgccactgaattgtatactcaaaaatagttaaaatggtaaatcttaagttatatatattttataaaacaatgaaattggacccttaccttacactatacataaacattaactccaaatgaataaaaaac

SEQ ID NO: 204578 - DNA, 376 bp, Homo sapiens
caaaagcctctcctccccttccccacactgatgcatatactccacatgtatgtacaattccagagggatcctggactacctgaacttgctcacagaactggggttaggagcccaggacaaaggagaccaccggactccaagccaatcactrtccaatgggaggcaaagcggaagaacacggagagctgatgcacaggggcccaggcttagatgtctttccacactggcccacatgtcaggagtaaatggaataatctgcagaaggttctactgacttaatatgaggtatattaagattaaaaaattatttttttgcttctcactaaaatagagtggagtaaaccatcctttggggccacggtcaggatgaaaaagt

SEQ ID NO: 204579 - DNA, 434 bp, Homo sapiens
gaattctgtgctgtggaaggtaagcagctcagccccaaatcagatcacaagttattccagccagacccactgaagcagaagagaacttgatgccagtctcagtgcatctcgtgggccattctcagccaatgctgcatccactgccaaactcagtattcttctaggccccatcccacgctgccacagagctcatccctgtcacgcacagccagatacgttcatctttgcttttgttccagatcactttgttcagcacttgatactrattatgatatgtgagtttcttgggcacaggagttgtgttcatgtctatttctttagcacatagcacagggctaagctcacagtagatatccagtatatgccgatgaatgaatagggtttttgctcatcactcctgggggtatgttttattttaagctctatattaaaag

SEQ ID NO: 204580 - DNA, 653 bp, Homo sapiens
caatgactttcagtgacagttcctagttgtactaatggtgaagagtagcaacagggcatttattaaaaccaaacagctttatatcacatacaaaggaaatatggaaatatggaaaaaaaacaaatttgaaaagtgtttttctaagtgaaccaacttttgaacgctattaagatttatactgggttttttttgttgtttctcatttgtgtatttttttaaaggattgctttcattcttctgctaaaatgaaaaayagatttattttcccttagcaatcatgttctcctgatcagatttggcagctggagttgacccatacacgaaacgatttgggggtccatgcccatattgttgacctgcgatcagatctgtccataaagtgcaagtatgtcttctggttttagacagggagaataataagctgcctttggtctgtttttcctctggtagttccacctcttatttttcactccacagttagtaaccaatgccagtttgtcttgaaagatttttgatttgctttgttttttgacaagagcttttaagctcacatattctaacacacaaccctgtcagcatccccaatccctttctttttgctttcttctctaccataggaagactagcccttttcagtcatccctgcagccctc

SEQ ID NO: 204581 - DNA, 611 bp, Homo sapiens
ttcaactgtagaatgtgctttttaactgtgattgatcttgtgaatatwtaaaatcttcacatatgtaaaaaatcagaaatatagtaaaaggtattctcagaaaagtcttattttcatccttaccttctacacttcaatctccacatcctttgttgtaagcatttttagtttggattatttgtctaacacttgctttttgttcccttcaaaattgggcaaatagtatggattcttattctcttttctttcttacaccaacaaaatggcattatatacattgctttgcatctttagcaaagatgtaaaacttactctttgtttttcttctaaattttatttggacaatttcaatcatatatagaagtagaatagctttatgagcctcaatgtgcttttcattcagcttcaagcattatcaattaatggccagttttgtttttttcaatctccccaaactcatccctatattcttttaaagcccaaggcaagcactattctactttctgtctctaactacctaatgtaagtgcaattatacagtatttgtctttttgtgactggcttatttcatttagtgtaatgttgtccaggttaatttatgttataacaca

SEQ ID NO: 204582 - DNA, 558 bp, Homo sapiens
ctgctcactgcaacctccatctctcgggtttaatcgattctcccacctcagcctcctgagtagttgggaccacaggcacccaccaaaacgcccatctaatttttgtatttttagtagagatggggtttcactatgttggccaggctggtcttgaactcctgacctcaagtgatccacccatctcggcctcccaaagtgctgggattacaggcatgagccactgtgcccagcttcactgggcacattgataggcatttgtatgtctttggaaaaatgcctattcaagtcctttgtctatttttgaattagattggttgtttcattgttgttgarttttaggtgttctctgtatattctggatatcagtaccttatcaggcacctgagttgcaaatattttctgtcatcctatgggttgtctatttattctgttggtagtatcttctgatgcacaaatttaaaaaaatttcatgaggtgcagtttgtctattttttcttttgttgcctgtgcaagaaaagaaactgccaaatccagtgttgtgaagctttgccctacgct

SEQ ID NO: 204583 - DNA, 572 bp, Homo sapiens
tttttcaatttggtaatatagtaggtcaaaaataaaactgtgccctaattctttcataaaggtaggcaagtgatcaagaaactccttttctgcactatagtaaagaggtaaataaattccttattccagaagatcttcaggctgccgcacctccctctcattaaaaatttttccagacacttattacaactttttttttttttggagacagggtttcactcagtcacccaggctggagtgccgtggcatgaccatggctcactgcagccttgacttcctgggctcaggtgattctcccacttcagcctcctcagtagctgggcccacaggggtgcaccaccaagcctggctaatttttgtattttttatagagatggggtttcaccatgttgctcaggctggtcttgaacttctggcttcaagcaatcctcccatcttggcttcccaaagtgctgggattacargggtgagccacagcacctggccacttattacaaagattttaatagaatgtcctctgttcttagtgacagttttaggttttcatacctattcctctccaaagtaactat

SEQ ID NO: 204584 - DNA, 575 bp, Homo sapiens
caatgatgaaaatgacagagccagttagaatatcaaagattaaacatgaaaagaacctgagaaatcatctcaccttaatctcttaaattatgtagagaaaaattgaatgtcaagaattttgaagggtctgagattttaccctgcctgcaagctaatgcattaccctgtctacagttttgtatgygctggtagaagacatgagaccacggggtcagaaacaaaagactttactatccaggccacagcaggcaacatgagcttcatgttcatactgatatcctgtttccaagtaccatatggtgatgaggatgtgggcctacatagatactgcacatgcagtagaattgtgttacagtagttgagataccctcagcttaggaaaccctcaatcttatagggagaatgctagcaaacctgcctaatatttctcaggaaggaaaaaattatatttatcatcctggttaggaaacaaatctgtcacctgacctggaaggagatattaggcatataaacagaacaaagatgtgaaagcctcttgcccagatgcccaaaaatatgagagacacatagagaat

SEQ ID NO: 204585 - DNA, 575 bp, Homo sapiens
caatgatgaaaatgacagagccagttagaatatcaaagattaaacatgaaaagaacctgagaaatcatctcaccttaatctcttaaattatgtagagaaaaattgaatgtcaagaattttgaagggtctgagattttaccctgcctgcaagctaatgcattaccctgtctacagttttgtatgcgctggtagaagacatgagaccacggggtcagaaacaaaagactttactayccaggccacagcaggcaacatgagcttcatgttcatactgatatcctgtttccaagtaccatatggtgatgaggatgtgggcctacatagatactgcacatgcagtagaattgtgttacagtagttgagataccctcagcttaggaaaccctcaatcttatagggagaatgctagcaaacctgcctaatatttctcaggaaggaaaaaattatatttatcatcctggttaggaaacaaatctgtcacctgacctggaaggagatattaggcatataaacagaacaaagatgtgaaagcctcttgcccagatgcccaaaaatatgagagacacatagagaat

SEQ ID NO: 204586 - DNA, 575 bp, Homo sapiens
caatgatgaaaatgacagagccagttagaatatcaaagattaaacatgaaaagaacctgagaaatcatctcaccttaatctcttaaattatgtagagaaaaattgaatgtcaagaattttgaagggtctgagattttaccctgcctgcaagctaatgcattaccctgtctacagttttgtatgcgctggtagaagacatgagaccacggggtcagaaacaaaagactttactatccaggccacagcaggcaacatgagcttcatgttcatactgatatcctgtttccaagtaccatatggtgatgaggatgtgggcctacatagatactgcacatgcagtagaattgtgttacagtagttgagataccctcagcttaggaaaccctcaatcttatagggagaatgctagcaaacctgcctaatatttctcaggaaggaaaaaattawatttatcatcctggttaggaaacaaatctgtcacctgacctggaaggagatattaggcatataaacagaacaaagatgtgaaagcctcttgcccagatgcccaaaaatatgagagacacatagagaat

SEQ ID NO: 204587 - DNA, 401 bp, Homo sapiens
gaattcttaactagtacaaaaaaaatggtacaaatacataatttaatatttggtagataggtggacaaagcccaaggtgacatcttaataagttaatctcctttccttgagggcaggcagaatctgtgacttagttttcattaatagaatatgctaaaggtgatgcaatgacactcccatgattaggttactctatgtgtctatctagatctatctatagcttagcatacctgaagtatataaaaggtcatatatgtatgactgctagcagaccaaagttgagaccttctaaccttgaagaaacaaactcccatgttgcaactgcctatgtaaaggttcatgtagcgggaaattatgagyggcctctagggtctgacagccaataaaacctggggcctcag

SEQ ID NO: 204588 - DNA, 622 bp, Homo sapiens
tgttgttctgcctgcactcctgagagaagaaagggctttctgcattattatatgcctgcgtgggtggcattcacaccactgtgagtcctgttgtattagtggggttgttgagtcctgtgggctcctgatcccagaaagcgctgcctccagtaagggtattgtgtgtatcctatgagctatgatgcttgggattgctttcccatcaacacctgragagcttccacagcccttccctgggccctgagtgtgcaaaatgtgacaatcagagttatttattaccagcaccttcctctccaggcggcggatcaattttcttttctccagatggctgtcataggccagccagagagaggactgggctggccatctgcttcctgttgccttttcaagctggctagccactcagtgaggctggcaaagcccaaggcaccagctgtcagtttaggctgcccctgcttggccttgcaccttgtcacactaggcaccgtagcacaggggccaggctgaaatcagtgtttgacactcacgaggcgggatgctttccttccaaaccatgccagccagcttctcgatggcaaacagaaaagatgcctgccctggaacttcctctaagaatgagctt

SEQ ID NO: 204589 - DNA, 622 bp, Homo sapiens
tgttgttctgcctgcactcctgagagaagaaagggctttctgcattattatatgcctgcgtgggtggcattcacaccactgtgagtcctgttgtattagtggggttgttgagtcctgtgggctcctgatcccagaaagcgctgcctccagtaagggtattgtgtgtatcctatgagctatgatgcttgggattgctttcccatcaacacctggagagcttccacagcccttccctgggccctgagtgtgcaaaatgtgacaatcagagttatttattaccagcaccttcctctccaggcggcggatcaattttcttttctccagatggctgtcataggccagccagagagaggactgggctggccatctgcttcctgttgccttttcaagctggctagccactcagtgaggctggcaaagcccaaggcaccagctgtcagtttaggctgcccctgcttggscttgcaccttgtcacactaggcaccgtagcacaggggccaggctgaaatcagtgtttgacactcacgaggcgggatgctttccttccaaaccatgccagccagcttctcgatggcaaacagaaaagatgcctgccctggaacttcctctaagaatgagctt

SEQ ID NO: 204590 - DNA, 624 bp, Homo sapiens
ttatccttttcattttttctttaaaaaatctttgacttcctttacctccctgaatatgcacatagtttactatggaatatgcatgccatattcctattgcatattcctattgcaatgctctattccctaatagatatctttttcttttagagggcctctctctgttatttaggttgacacgactttttttttttttttttttgagatgaagtctcgctctatcacccagggtggagtgcaacggtgtgatctcggctcactgcaacctccgcctcctgggttcaagcgattctcctgcctcagcctcccgagtagctgggactacaggtgcrtcccaccatgcctggctaatttttgtatttttagtaaagatggggtttcaccatattggccaggctggtctcaaactcctgacctcgtgatccacccacctcaacctcccaaagttctgggattacaggcgtgagccaccgtgcccagcagagatgacattttaaagcttacttcaaatgacagaagtctggcaatttgatgtgggagggatatgacactagtacaaggaaaatcagacagtcaacaaattgtcaattagaaacaaaaagttttgagtgtctaaaatatacc

SEQ ID NO: 204591 - DNA, 560 bp, Homo sapiens
agacattattaactatgagcgtttaccatgctggtggaagagggctggctttagcttcccttagagttcttaataaacacaaataagttgatgagaaaaagtgttggcagtggtatggaaaaaagggaatccttgtaaaccattgggaatataaattgcataaccattatggaaaacagtatgaagattctaaaaacaaaaatcaaaaatagaactaccacatgatcctgcagtcccacttctgagtatatacccaaagggaatgatcttagtatcttgaagagacattcacacttttgtgttcattgcagcataattcacaatagtcaagatatggaaacaacctaagtatccattgatggatgaatggataaagaaattttggtccatatatacagtggaatgttattcagccttaaaaaagaaggaaatcctgccatttgtgacaacatggatgaacctgggagawgttatgctaagtgaaataagccagacacagaaagacaaatactgtttgacctcacttacatgtgaaatctaaaacagtcataaaaccagag

SEQ ID NO: 204592 - DNA, 655 bp, Homo sapiens
gaattccttggttgataaaaggaaacccaatctgcagaatcgcagaatacagtcttattattcttgaactgtctattttgaaggggagaatcttcaaaataataaaatccgttagtcttaaaccaagagttcattcaatattaaagaaacatgttgagttagaaggaaataatggagagtagaaatggtttcacataagaaggttgctgtctttgtccacttttatcattcactatctttttttttaattattatactttaagttttagggtacatgtgcacaatgtgcaggtttgttacatatgtatacatgygccatgttggtgtgctgcacccattaactcgtcatttagcattaggtatatctcctaatgctatccctcccccctccccccaccccacaacagtcccaggtgtgtgacttttttatggcatacacctggttgggagcagttcacatacagagcacgaatagcgctgttattgccccagcttccaagagccatggaccatgagaatggtgcttgtgttctgttaagcccctcatggtatgtaaatatgcaagagaaagagtccagaactttcatggaatttccattcaaattctccagaatcgctgcccctgagctggtttagagaagctgaagccttgtta

SEQ ID NO: 204593 - DNA, 575 bp, Homo sapiens
ttaacacagcagctggcagaaagaggcatttgataggtgttaattgttataataatagtatgtgttattgtgtccagtgcttccttggtgtggggctagccagtcatatgttgtccttccctttcctccatgttttccctgaatcagaggtgatctgtcctattttcttttcttttctttttttttttttgagatggagtctcgctctgttgcccaggctggagtgcagtggtgcgatctcggctcactgcaagctctgcctcccaggttcacgccattctcctgcctcagcctcccaagtagctgggactacaggcacctgccaccacgcctggctaattttttgtattttttagtagagatggggtttcaccatgttagccaggatagtctcgatctcctgacctcgtgatccgcctgcctcggcctccccaagtgctgggattataggtgtgagccaccacgcccggcgacctgtcctrttttctctgagataactattgctgcaaaatggaatgaccctgggtatctcttaatcagcaccttggacagtgcacaaggctctgtcaccctgg

SEQ ID NO: 204594 - DNA, 606 bp, Homo sapiens
catattggtcagtataatcagaacacaggcagccccaaagggaactcttttctaccaaaacaatggggttgaacttaggagagaacaattatgccacacagctgaggaggtcaaaaatgggaaccctcatatatttccagtggagatgtaaaatggtgcagccactgcagaaaacagtttagtggttccctaaaaagttcaacagactcactacattacccagcaattcactcccaggcttatgcccagagcattggaaacaggtattcaaatacttatatacaaatgtcacggcagcattattcataataaccaaaattcagaaacaacccaagtgtcgattgatggatgaatggataagccaaatgtggtcygtccataaagtggaagattcttcagcctacagaaggaatgacgtgctgattcacaccacaacagggatgaacctcaaaaaatgacatgctgattcatgccacaacagggatgaacctcaaaaaatgacatgctgattcatgccacaacaggaatgaacctcaaaaaatgacatgctgattcacgctacaacagggatgaacctcagaatgacatcctgattcacgctacaac

SEQ ID NO: 204595 - DNA, 550 bp, Homo sapiens
atgcccatcttaaatctgagcaggatctgtaattgcttttaactaataaaatataatgcaagtcacactatgccaggtcctggccttaagaaactggcagcttctgatggcaacagtgggccatctgrcgcaaccactgccatcacgctggccacctcagggagggcacaggaaggagttggacagccctcgctgcctgcagcccaccaccctgggagccgccatgatggggttgggccaggttgcgtgctgaggccacaggggcagctcacagcaacgtggcgcctgccccggaagacagtccaggcctgacctggagttgccaggagggtggggctgcagccacccacgttgtgactgtggatctgggcctcccactacaagagcaggcagaagccctgccccccagccagctgcagcctcccaaaccagagctgcagacccaggcattcctgcactcttggggatcctgggaagggcccccttgcccttgcaggattagaggtgcctgctcccactgcctagcctctcccaactcccagcattaact

SEQ ID NO: 204596 - DNA, 550 bp, Homo sapiens
atgcccatcttaaatctgagcaggatctgtaattgcttttaactaataaaatataatgcaagtcacactatgccaggtcctggccttaagaaactggcagcttctgatggcaacagtgggccatctggcgcaaccactgccatcacgctggccacctcagggagggcacaggaaggagttggacagccctcgctgcctgcagcccaccaccctgggagccgccatgatggggttgggccaggttgcrtgctgaggccacaggggcagctcacagcaacgtggcgcctgccccggaagacagtccaggcctgacctggagttgccaggagggtggggctgcagccacccacgttgtgactgtggatctgggcctcccactacaagagcaggcagaagccctgccccccagccagctgcagcctcccaaaccagagctgcagacccaggcattcctgcactcttggggatcctgggaagggcccccttgcccttgcaggattagaggtgcctgctcccactgcctagcctctcccaactcccagcattaact

SEQ ID NO: 204597 - DNA, 530 bp, Homo sapiens
tttccacactccagaaaccacacaattcccatccacctgtttctgagtagcactgctactggaaaactacagctgctggggcccaaccacctaatttgaatcttgggatrtcaactaaagcccagatagagaaagatttgctccatcaacttggaccctgaatcaggttcctgccaccttacttggaggccaactctcccactgattacgtttccctagtcctggtactgcctattcctaacttatttttctcttcctgcaggctaaataattgagggctcatggtgccacatgacctgccccaccaagtttattacaataaatacctttggcagcctaatgctgtcttctttctctctggcacctttcattaatacagtgtcaatgaaaagtatcctcagttataccaagtatttctccagaacattttgggctcatttccaagtccctaatgcctcaccagcaaactaatatgggattctctacagttaggatactgagctttaaaaaatgtgtatagttcatgtaga

SEQ ID NO: 204598 - DNA, 530 bp, Homo sapiens
tttccacactccagaaaccacacaattcccatccacctgtttctgagtagcactgctactggaaaactacagctgctggggcccaaccacctaatttgaatcttgggatgtcaactaaagcccagatagagaaagatttgctccatcaacttggaccctgaatcaggttcctgccaccttacttggaggccaactctcccactgattacgtttccctagtcctggtactgcctattcctaacttatttttctcttcctgcaggctaaataattgagggctcatggtgccacatgacctgccccaccaagtttattacaataaatacctttggcagcctaatgctgtcttctttctctctggcacctttcattaatacagtgtcaatgaaaagtatcctcagttataccaagtatttctccagaacattttgggctcatttccaagtccctaatgcctcaccagcaaamtaatatgggattctctacagttaggatactgagctttaaaaaatgtgtatagttcatgtaga

SEQ ID NO: 204599 - DNA, 460 bp, Homo sapiens
attttgggctcatttccaagtccctaatgcctcaccagcaaactaatatgggattctctacagttaggatactgagctttaaaaaatgtgtatagttcatgtagagtcctctgtggaccaagaaagggaagcctttgttgctagctcttctctcacgccacayttctggagctttcttttagtgccactcccagctcctggtcttcctcctgtcttctcctctcctgttttttccccactgtttctattgtttctattctctgcttcacttctttttcttttctttttttccatcctcagtctgcaatgaagaccttcataacatagctttgcatacttggaagtatatctataggacagattccttaaactggacttacaggggctgttcaaaactttctaatatgtaataaaaagcaatggtgacatcctacaaaaatgttttgctttccattccctg

SEQ ID NO: 204600 - DNA, 421 bp, Homo sapiens
gcagcactatgatcccacctacatgaagcctagccatggtggaacaactgagaccacaatgttcaaacccatgcaatgccccatccccaccaaccaggccggaggcagcactgcctcctcagagaaaccactgtacaaccaaacaaactactgtgttcatgtgaaactgcaactggctcaatggccagtctagcagcaggcctacctccacaaagagaccaccacacagctacccagcctccygcacctacacgtaccaggcctgaccaccatcccagctcttccactttcagaaaaaccacaccattgccatcacaactgccattgcaactcccacagcctagtccactaaggcaatcacagatataactgacgaggattacagctaaagaaactgcacaaagaccatgctactgagccc

SEQ ID NO: 204601 - DNA, 530 bp, Homo sapiens
tgatggttgtgtttcttccaaagcagagaattattagtcaattataactttctcaaggttttggcaaagaaaaatatttttacctcaagggcgtatgttcagcayagtgaaaaatgtgttttagtaaacaccaatgattacttttaaaagagtttggttttcttagtgtcattcaaatgaaaatttaaaaagaaaaccctattttcttagattgctctgtctgaattcatgtgtctttgttcttgaggctgtatttctcatttattttaacaactctatgtggaattgaataggtgtgaattctgagcaaaactattcaaagcttccattatcatttcacaagtgtcacaaataattataagttgttctttcatttttaaaggagaagtttggcaatgtactaaaggaagcattatcttcaaagattgctgccaaaacttgttctttgatgactctcatatttgagagtattgacaacatatcactggaaaatatgataactaaggatacattttccccaaacctcctat

SEQ ID NO: 204602 - DNA, 567 bp, Homo sapiens
tgtggcagctacaattcaagatgagatttgggtggggacacagtcaaaccctatcatccacttatattgtcattgctgctgttactgctrttgccagggctgggcttctggtaaaaatggtccttctttcttgtcacccttttcaataaagcttcaaatattatttagtatgacacttatttttatagacctttgtaaagaatctttatcaagatgatgataacaacctttcaagtccttgtttgctacggaatgccatttaagttatatttaaaaggctgtacttatgctttaagatgttgatattgtatattgcattgacagattttgttgttgttaaatcattgttacatttttgggatagacattacatgttcatatgacatattttaatttcaatggactgtttgatacgattttaaatgtttatttaagagttttgcattcatgtttacatggatttttttcctgtgagcttacatgttgttttccctttatcagattttaaaatatatgtattcccctttttcatcctttattgaattaatcactgaattaatcaaattt

SEQ ID NO: 204603 - DNA, 567 bp, Homo sapiens
tgtggcagctacaattcaagatgagatttgggtggggacacagtcaaaccctatcatccacttatattgtcattgctgctgttactgctattgccagggctgggcttctggtaaaaatggtccttctttcttgtcacccttttcaataaagcttcaaatattatttagtatgacacttatttttatagayctttgtaaagaatctttatcaagatgatgataacaacctttcaagtccttgtttgctacggaatgccatttaagttatatttaaaaggctgtacttatgctttaagatgttgatattgtatattgcattgacagattttgttgttgttaaatcattgttacatttttgggatagacattacatgttcatatgacatattttaatttcaatggactgtttgatacgattttaaatgtttatttaagagttttgcattcatgtttacatggatttttttcctgtgagcttacatgttgttttccctttatcagattttaaaatatatgtattcccctttttcatcctttattgaattaatcactgaattaatcaaattt

SEQ ID NO: 204604 - DNA, 567 bp, Homo sapiens
tgtggcagctacaattcaagatgagatttgggtggggacacagtcaaaccctatcatccacttatattgtcattgctgctgttactgctattgccagggctgggcttctggtaaaaatggtccttctttcttgtcacccttttcaataaagcttcaaatattatttagtatgacacttatttttatagacctttgtaaagaatctttatcaagatgatgataacaacctttcaagtccttgtttgctacggaatgccatttaagttatatttaaaaggctgtayttatgctttaagatgttgatattgtatattgcattgacagattttgttgttgttaaatcattgttacatttttgggatagacattacatgttcatatgacatattttaatttcaatggactgtttgatacgattttaaatgtttatttaagagttttgcattcatgtttacatggatttttttcctgtgagcttacatgttgttttccctttatcagattttaaaatatatgtattcccctttttcatcctttattgaattaatcactgaattaatcaaattt

SEQ ID NO: 204605 - DNA, 553 bp, Homo sapiens
cgtgaacgcatcatgttcagacctttaggaaaacagaatagccaggagggcctagaaaaaatatacagctgtttccaagatgtttttatttacaatttcatggacagtgcactttgctaaaaaatatctgtagaaggtacacactcatctgcaagattgccttacggtcccgtctgcagcagtgatcactaatgaatatgcaatacattttttaaggttcagtagttttcagatagggtggtgacaaccttgactgcatttgctctcaaggacttactcagagggctagagattctgatatggtgccagtcttactagcataggaraaaaactgccttgatcgtgcccttctgtgctgaaaatcctggcagttgtattcagatcctttctcaataacagcctcttcaatggcttggtgtgaaacagacattctaagaatgcctgtttaaatcttagatgatgaaaagaagtagactaccttgtcatgaagacttgtggaaacagtgggcaacattgaaattaaaaatattcctgggtatgcacagatgaaatt

SEQ ID NO: 204606 - DNA, 553 bp, Homo sapiens
cgtgaacgcatcatgttcagacctttaggaaaacagaatagccaggagggcctagaaaaaatatacagctgtttccaagatgtttttatttacaatttcatggacagtgcactttgctaaaaaatatctgtagaaggtacacactcatctgcaagattgccttacggtcccgtctgcagcagtgatcactaatgaatatgcaatacattttttaaggttcagtagttttcagatagggtggtgacaaccttgactgcatttgctctcaaggacttactcagagggctagagattctgatatggtgccagtcttactagcataggaaaaaaactgccttgatygtgcccttctgtgctgaaaatcctggcagttgtattcagatcctttctcaataacagcctcttcaatggcttggtgtgaaacagacattctaagaatgcctgtttaaatcttagatgatgaaaagaagtagactaccttgtcatgaagacttgtggaaacagtgggcaacattgaaattaaaaatattcctgggtatgcacagatgaaatt

SEQ ID NO: 204607 - DNA, 598 bp, Homo sapiens
caaagacagtaattgctaaccatacaggctcagccccagccatttccctttcccatctcctccagagaaaccactatcctgccttctaacactgtatcttagttttgactatttggtaaaacttaatatcaatgaaaatatacagtatatacatttatttgtatctgacctccccacacacacacattgtaattgtgatattcagccttgtcattgggtatgatggtagtttcttcatttctgtatggcatttcattatataactgtcatatttattcatctattttgctagatggacatttatgtttttcctgtttggggctattatgaatagtgatgytctgaatgtctatttacatgtcttttgaggcaaatatatacattttctgctggatatacctagaagtaaaaatgatgaattatactgtatgcaaaatgtctgctttaaaagatagtgctaagtatttttccagagtggtttcaccaatttatattcctatcagtagtgtaggaagactcctataatctgcacattctcagcaaaccataactaatgttgccttttgaaatttagtcattttgatgagtgtgtagtggt

SEQ ID NO: 204608 - DNA, 560 bp, Homo sapiens
ctacatcaaaaaagaagaaagatttctaatgaamaacctaacagtgcatctcaaggaattagaaaaaaagaaaacaaaaacaaatacaaaattcatggaaaggaagaaataataaagctcagagcagaaataaatgaattagagactaaaagaattcataagattgatgaaacaagttttttcttgaaaaaataaacaaaaccggcaaacccttagctaaaccaactaagaacaaaagagaaaagacaaataaaatcagatattaaaaagtagacattacaactgatagcacataaatacaaaggaccataaaagactattacaaaaactatactccaacaaatttgataacatacaagaaatggataaattcttgggcacatagaacctaccaagattaaattataaaataatagaaaatctgaacagaccaataatgaatgaggaaattgagtcagtaataaaaagtcttccatcaaagaaaagcccaggatatgatgacttcactgcttaattctaccaaacatttaaagaactagtaacaattttcatcaaactat

SEQ ID NO: 204609 - DNA, 509 bp, Homo sapiens
cattatataacatacatatgtatataaacattaattgtatcccataaatatgtacaattacaatggcagtcttaaaattatacataaaattatattacatactcactgttacagtgtctctcaataaactcacatatattcataatattaaatttctacrttcctaaaacattttttatggctaatactttagtttggatgatcagagccaaagaaataaatatgtgagtcatttctaaatggagagttatactgcagagataaaacctttcacaattcatggattcttttaatagcggtaacagagaacagcacatttttacctattcaatagattaacatttaaatcctggtccttactccacagaattgtgcaaatagataagggggggggtgtctaaaacaattatgtaagatagtcaagatagcataatagaatgtgcatttgaaatgcctggattagaatataggcgattgaattaaaacatggcacttctcaacaacctaaa

SEQ ID NO: 204610 - DNA, 509 bp, Homo sapiens
cattatataacatacatatgtatataaacattaattgtatcccataaatatgtacaattacaatggcagtcttaaaattatacataaaattatattacatactcactgttacagtgtctctcaataaactcacatatattcataatattaaatttctacattcctaaaacattttttatggctaatactttagtttggatgatcagagccaaagaaataaatatgtgagtcatttctaaatggagagttatactgcagagataaaacctttcacaattcatggattcttttaatagcggtaacagagaacagcacatttttacctattcaatagattaacatttaaatcctggtccttactccacagaattgtgcaaatagataagggggggggtgtctaaaacaattatgtaagatagtcaagatagcataatagaatgtgcatttgaaatgcctggattagaatataggygattgaattaaaacatggcacttctcaacaacctaaa

SEQ ID NO: 204611 - DNA, 442 bp, Homo sapiens
gtttgtggtacttcgttacagcagccatagcaaactaatacagtataaatagcaatataactaatattgatggtcagttctagctartgtgtattgagtgaccactacatttcaggtccactacatacatcattgtcgctgtgttacctagtcaatgaaagtttccatcagagtgtggctatagaggtaaattccgggtaataaaaagatgctacctttttggatgatggggaggaaaaaaaacattcatagcagagggaatggtaaattcagaggctttgaaggggtattaacagaaaggtcagtgtggtttgattaaactaattgaggaggagaagaatacctgttgtctaggttagagataaactttttcaaaatcaggtagggcccactcaggtattctaaaatatacatggctcagcttactgatatcagcttacat

SEQ ID NO: 204612 - DNA, 601 bp, Homo sapiens
ataattgtctagactgaagacaggaactggatggagaattttcagtctgatttaaaatcaaagagccggaggcaacaggagrcaaaggataggagaaagtcaaatctgaacctggagtttgaaggctgggagctggaagaatgtacaattgaccgttgatcaacatgggtttgaactgcatgttccacttatatgcgggtttttttcaatacgtatgttgaaaaatattttggagatttgccacaattttttaaaagtcacaataaaccacagactagaaatgctgaaaaaaataagaaaaattaactatatcatgaatgtataaaatatatgtagacactagtttatcatttactaccttaaaatatacacaaatctattatcaaaagtcaaaatttattaaaatttatacacacagagccagtatatggtactatttgcagtcaagagaaatgtaaacaaatgtaaagatgcagtattaaaacataactccataaaattaactgtagtctgcataaaaataactgcataattataactgtagtatactacggtgataattttgcagccacctcctgttgctattgtgatgagctcaagt

SEQ ID NO: 204613 - DNA, 582 bp, Homo sapiens
tattatagtagttaagtttttagggagtaaaaagttatagatgaatttttaaccatgtgggargtggttagtgccactaaccccagtgttgttcaagagtcaactgtattcatttgctcatttattcaaagtacatttaatgagcagttattattgccagatactatgctgcaggatataaacaaagagctcatattccatgaagcctagtaacagcacacaaagcaactgtgaatatggcagtgtgaaattctggaaaatgggacctagtgccccagaggtaaggcaaagttggagctgaaactaaaagtttccctaggtggagatggaaggaacgtcatctaggcataaggaacagtatgtaccagaacatgaagacatgaacttgaatgtcatatttgggaaacttggagaagttcaagtgtagttgagttctaagttgtatggtcaggaaagtgaagctggagagagacaaatggggaccaaatcatgacgattcttatgcatcttgacaaagaatgtaaattttgccccataggttgtaagaaacctaacagaggtttccagtgttgtaagcaggcc

SEQ ID NO: 204614 - DNA, 582 bp, Homo sapiens
tattatagtagttaagtttttagggagtaaaaagttatagatgaatttttaaccatgtgggaagtggttagtgccactaaccccagtgttgttcaagagtcaactgtattcatttgctcatttattcaaagtacatttaatgagcagttattattgccagatactatgctgcaggatataaacaaagagctcatattccatgaagcctagtaacagcacacaaagcaactgtgaatatggcagtgtgaaattctggaaaatgggacctagtgccccagaggtaaggcaaagttggagctgaaactaaaagtttccctaggtggagatggaaggaacgtcatctaggcataaggaacagtatgtaccagaacatgaagacatgaacttgaatgtcatatttgggaaacttggagaagttcaagtgtagttgarttctaagttgtatggtcaggaaagtgaagctggagagagacaaatggggaccaaatcatgacgattcttatgcatcttgacaaagaatgtaaattttgccccataggttgtaagaaacctaacagaggtttccagtgttgtaagcaggcc

SEQ ID NO: 204615 - DNA, 582 bp, Homo sapiens
tattatagtagttaagtttttagggagtaaaaagttatagatgaatttttaaccatgtgggaagtggttagtgccactaaccccagtgttgttcaagagtcaactgtattcatttgctcatttattcaaagtacatttaatgagcagttattattgccagatactatgctgcaggatataaacaaagagctcatattccatgaagcctagtaacagcacacaaagcaactgtgaatatggcagtgtgaaattctggaaaatgggacctagtgccccagaggtaaggcaaagttggagctgaaactaaaagtttccctaggtggagatggaaggaacgtcatctaggcataaggaacagtatgtaccagaacatgaagacatgaacttgaatgtcatatttgggaaacttggagaagttcaagtgtagttgagttctaagttgtatggtcaggaaagtgawgctggagagagacaaatggggaccaaatcatgacgattcttatgcatcttgacaaagaatgtaaattttgccccataggttgtaagaaacctaacagaggtttccagtgttgtaagcaggcc

SEQ ID NO: 204616 - DNA, 620 bp, Homo sapiens
gatgtcccctactattattacattgctatctatcttttctcttagttgtagtaatatttgtttcatgcatctgggtgttctagtgttgatgcatatatatttaggcttgttatatcttgttattgaattgatcccattatcattatataataacctttttcaccttgtttttactgttgttgatttaaagtctgttttatctgatattaatatagctactcctttaacttttggttttcatttgcaaggaatctttttccacccttttactttgatattgtgtcatatcagtcggggatttcttataagcagcatatggttggatcctcttgttaaaatccattctaccaatctatatattttaggttgagtttttaatccatttrtgttcaaatggactttcccacatctttacggatagatctatagattcaattaacattatgacaggaacaaacctcacataatattgatatgttataatgttaattgttatctatgtgctttgtagtctcaattatataattgctatataaaacctgtgagttgtatactttcatgcgtttgtatggttttaaaatatactttgttactgcatttttttatgagttctctcccaa

SEQ ID NO: 204617 - DNA, 395 bp, Homo sapiens
gtccagttgccagttaaccaacatttcagtgagactaacagtggcttctaaagaggctgagaccaggctcttgcttctgttgcactcctgtgacatccagcatagggttgggcgcactgtaaatgtttctaaagatttctgaagaatggtaagaagtcaatggtaggatgtggctgctgagaaacctgatgtcatctcaggttgcattaatagaagcatgttaattagaatgagggaggtgatagcctcactgttgcatgstgaagagaacttttttgtagaacacagttccattttgattactcactaatgctccatgagagtaggcacagtgtttgccttttttgctactgtgttgccagaagaagcactgggcctgtcagataccaggcttg

SEQ ID NO: 204618 - DNA, 449 bp, Homo sapiens
gggcataaagacagacatgtacatcagtggaacgcaatagagagcctagaaataaacccacacatacgtggtcaactgattctttacaaagatgctgaagggtagcagaatatgccactcccaaatgtgctgctttggcataaggattattctgagttgaaggcaactgagaagaagcagatgtatgaaaagctgcraatcccagcactttgggaggctgaggagggaggatggcatgagcccaggaggcagaggttgcagccagccgagatcacgctaccgcatttcagctctggagacagagcaagaccctgtctcaaaaaaaaaaaaagaaaagaaagaaaagaaagaaagaaaagaaaagaaaagaaagaaagaaagaaagaaagaaagaaagtttctgctcttctcctaaaacagggacataaatttgtaaaggtgtccctacc

SEQ ID NO: 204619 - DNA, 532 bp, Homo sapiens
ggtagactgcctcacagtgcactgtgaaaagctctctasaggagctgttttttggatagcgaggccccaggagagggatcatggaggctgcctggaaagcagggaagtcttacagaagattagagttgagctgtgtctcaaaggagcaggaagagtttctcaggcagacaaagggaagagtgaaagccagaagtgtgggctctgaactcaacttgcctggttcaaatcccagctctgttacttgctagctctgtaacattgggcaatttcttaactgtttttttttttttttttgcctgttttgtttttgttctaaataagatttgaaaacccagctttattgagatataattcacacactgtacagtttatgtatttaaagtgcacaattcaatgtcttttcagatattcagagttgtgcaaccatctctacagtctccaccgtgaacgtttgcatcacccctaaaagaaacctcatactcaccagcagtcactccccgtttcctcttaaactcccatcccataggcaacc

SEQ ID NO: 204620 - DNA, 433 bp, Homo sapiens
agtcaggcccccaccatgcatcatttagtcctctttcccaccaaggccatgtctccccccacctcacctacccctgtaccagtagcatgaagtgttcaccgttgctgccaccagccctgtgaaaccatgtgtggtgaaaggagtgccctggcatctggcatttgtgatcccaacaagctcttccgctggcccactttgtgaccttggataatccctgttaaatgtccagctgtagattccacaattgtagaatgagaataactcctcttctgtattgytgtgaagacttggtgtggtaacatacgacagagcttctaggatggcacctggtagagaggtgcttgccatatgttagttctcttccccctttgcaggaatagctgcgcatttgggttgggtcccttttgctgcctcacagcttagcagacagtat

SEQ ID NO: 204621 - DNA, 596 bp, Homo sapiens
taagctttggaagccctggctcctgtgcaggtctcggttgctgttccagccactggctgtcagcaggactcagaggctcccatggctagtgacccacttggtggcggttgttcctgctgcccctctgctatgggtggtttctctttcctgtggtaaccctctgcaaacccctcagcaagatgctgcccctgtgactgtatggattcttgaccctgcttacagagttcccaggctatttcctgaaagctctcttaaggaacttgttctgatgtccctagagtcaggaagtcactgtagagtcacagttacatctggagctttgsggagagaattctccagaccttagtaactgtgtgtgatctcaggtagcacttggtaacagctctgaattctccttcctgtgtcccactgtgggctaaccaggcaaaccaaatcccgtgaataacctgggttacctgctactcccgaagatgggtatgcaaatgtgaaaggaaaatatcttgggttcccgaaatcactaagctaaagggaaaattcaagctgggaactgctcagggcaaatctgcctcccattctgttcaaagtaatccctccgc

SEQ ID NO: 204622 - DNA, 386 bp, Homo sapiens
tttgagctctttattactagaaatatatattagaagttcyacctttgtttagagttccttttctcttactttgttaaaaggacactcattccctagtgtcacataaaacttttttgtcagattttttcttaaggtaacatactctttggtaaaagtcaattacttatcaaaactaatctgctgtctattgtttttattggatatctgtggccagggagcagaaggaaaaggatattttatttccccttttattcgtttttcaatttacaaccatctggcataaacctgaaacttgtggcaggggtcccattaaaaagaggaatacaaaaacatgagccagggttattttcgtaactgaagattgagactatattcacatatttatg

SEQ ID NO: 204623 - DNA, 615 bp, Homo sapiens
taagcttttgggctgagatggtgaggttttctcaatataggatcatgtcatctgcaaacagaggaagttttactttttctcttcctatttgagtatctttatttctttctcttgcctgattgccctggcagcagtgatggatgctgcccctccccccagaaactgtcatcttaggcagccagcagctgcagtgatgatggccactcttcccccagggaactcggtagtcttaggcagtccccagctgagtggctgctgagaatctgcacagctctgtgcttgggaactagrcccttgtggcatgggatcacaaaggggatttcctgatttttgagttgcacagatccttggaaagggtgtggtttcttgggtggggtagcacaatcactcattgcctcccttgcctggggatgggagcaccccttgccccatgtggctcccaggtgagccattgcaccaccctgcttttcctcactctccatgggttacaccaaccagcccgttagtcccagtgagagaacctggatacctcagttgccagtgtgggattcacttactgttttcgttatctcagtgggcctggattgctctcaaagtttttttgtgttgattttt

SEQ ID NO: 204624 - DNA, 483 bp, Homo sapiens
ctttggtggtgtcattgcattcacaactttttatgctgccagaattcttgtatacagaattcttctatagccctatgtgctttttttgaaagtttttatactttcaatgtgtatttcaatctacaagctagtagaaggtacttatacaaaagaacataagcagccaatgtggctgagtatatacttgttattgggagaagctctctgttgcctcaggctgattcatggaatgaacattgatctgagatcccttctcagccttgaggtgtagctgggggcaagatgggtggagccagaccaagcaggagagcctataggtcccccaaaggcaggtgccagcaccagttctaagcaagaatacagtaggtagacaccaagcaaagcacacagaggtgtgcctaggcatgtaatttggaaacctcctcagcccaatcwctctgtatggggactggggtggccaaaactcctaatccaagatagtgg

SEQ ID NO: 204625 - DNA, 645 bp, Homo sapiens
ccagtttttccaggaacctttttattggttccataaagtcaaccttaatatcttaaagcacactggtcaattttaaaggtatgacattatgctcaaaaccttggtaaaatgaccagtgtttctaattgtgttctgttatacaagagaacagattcttattgaacttatacaaataaccatactgccataaaataagaatactcacaaatagtttctgaaatctggaggggtcaggtaaagagaaagataaatgtttaaatgttgctcacaaaagtatagattaccaaattgctataaacctatagacagtttaagaaaaaaagttttcttaactttagaaaacaaaacrtaaaaagaatcagtaatgcttcaaacaatgaaaaaaaggcataaaaattatttcagtacaatgtaattaattcttgttttgcttggtgttaggttgggagttttatgaacccatcagtttcttcataagagttctggaaattcttatacagtccaatgacatgattctaaagttatcagaaatctatattcaagggcacttgttagggtctttcccataattctccttgaaaaataagcaaattttagactgtagctgattgcaaagcacttttagaaagagtatcagaataaaac

SEQ ID NO: 204626 - DNA, 645 bp, Homo sapiens
ccagtttttccaggaacctttttattggttccataaagtcaaccttaatatcttaaagcacactggtcaattttaaaggtatgacattatgctcaaaaccttggtaaaatgaccagtgtttctaattgtgttctgttatacaagagaacagattcttattgaacttatacaaataaccatactgccataaaataagaatactcacaaatagtttctgaaatctggaggggtcaggtaaagagaaagataaatgtttaaatgttgctcacaaaagtatagattaccaaattgctataaacctatagacagtttaagaaaaaaagttttcttaactttagaaaacaaaacgtaaaaagaatcartaatgcttcaaacaatgaaaaaaaggcataaaaattatttcagtacaatgtaattaattcttgttttgcttggtgttaggttgggagttttatgaacccatcagtttcttcataagagttctggaaattcttatacagtccaatgacatgattctaaagttatcagaaatctatattcaagggcacttgttagggtctttcccataattctccttgaaaaataagcaaattttagactgtagctgattgcaaagcacttttagaaagagtatcagaataaaac

SEQ ID NO: 204627 - DNA, 645 bp, Homo sapiens
ccagtttttccaggaacctttttattggttccataaagtcaaccttaatatcttaaagcacactggtcaattttaaaggtatgacattatgctcaaaaccttggtaaaatgaccagtgtttctaattgtgttctgttatacaagagaacagattcttattgaacttatacaaataaccatactgccataaaataagaatactcacaaatagtttctgaaatctggaggggtcaggtaaagagaaagataaatgtttaaatgttgctcacaaaagtatagattaccaaattgctataaacctatagacagtttaagaaaaaaagttttcttaactttagaaaacaaaacgtaaaaagaatcagtaatgcttcaaacaatgaaaaaaaggcataaaaattatttcagtacaakgtaattaattcttgttttgcttggtgttaggttgggagttttatgaacccatcagtttcttcataagagttctggaaattcttatacagtccaatgacatgattctaaagttatcagaaatctatattcaagggcacttgttagggtctttcccataattctccttgaaaaataagcaaattttagactgtagctgattgcaaagcacttttagaaagagtatcagaataaaac

SEQ ID NO: 204628 - DNA, 563 bp, Homo sapiens
acctgcacagttcacaataaggttcaggctcctataagaatctattgctgccgctgatttgacaagtggttgagctcacgcagtaatgctcactcacttgtggctcacctcttgctgtgtgacccagttcctaataggccacagacaggtactgatctgcagcccaggggttggggatctctgacatagagccttcaccttgaaaaagtacatctgcagtgttacctcctgaaataagacataattatttaacttaactgacttattctaggactaagatactgattcaagaagatgtggtgcagtgtactcaatatttttccattctgcttgttccaatctatgttttcttcccctctgccaatctcttttcttaaattttctaattcaaagaaatcaccatagctaccaattttactttaacatgtgaaactttctgraaataaagtttcaaatgggggactcaaggaaaccaaaatatgacaccccaaaatatatttggcatatttcgaaatgtctatttagagggactgcagacacagaaatagttctgaaaagctgtc

SEQ ID NO: 204629 - DNA, 536 bp, Homo sapiens
ctaattatgttctgaatttaaagaagtgctcatcatagaaatcattttatataaactgtgtttaaaatctagttatttgtgaagtaataaagtaggcctaattcataaatttatatgcatatgaatttaagcacatgcatctataagcagaattatatatacaaacaatgatattaataaatatattatttatcataacttaargcagcgtatcttatttaattactgaactgaaaatatttttactccagtgacagaaatgtactgcaaagcactaataaaatgcaacacgtattgcagataaatcctctccatattgaaaactttgagatttattgtgatctatcatcccaagatctattgagagttgaataacataaatacacaatttatgcctaggagataaaacatggataaaaaataccatgatctaacaatgcgatttgaaatctggcatctaatttacacacacaaacacacactcacccttaagtctagtgtgtattgcctttagtgctctgacattactaaaggta

SEQ ID NO: 204630 - DNA, 176 bp, Homo sapiens
gaagaaggctccaagtttattrtaaagtcccagccacacagtttgcttgagactttataaagagagaatgagatgtagaggctgggcccaaacccactaccaggctgtgggaatgggggatggggtgcttggctggcatctcttctcagggcctcctggtcagcctcaggagatct

SEQ ID NO: 204631 - DNA, 509 bp, Homo sapiens
gaattcagggaagctgctacttaccaccatgtaaaaaggatttcaatattttcacccctggtagggatgcaccagtgtgtgcttctcagcctcagtcctggacgtatgccccattgccctaaggttgtcccaaagaggccaccattasacctcaccttttatggacaggtgggagatgtctgaacgcaaccacatgttgcccggtgacaggggctgggctgaccaggacacggagagtgacttgccttctggggctgagccagtcactcatactcccagcgtagccctggagcttcactgcaactgctatgttacaggaagttgtaccagcagctctacactaaggtgtatagtcggtgaccactttaaagaaagactcattagaaagaggcattgtttggggaggccaacaggccagctgttggggaccatgccagaggtactgtgtcaaggtacctggcttgatgcttacttcccattgtctgtttcttgagtttattttgcgccat

SEQ ID NO: 204632 - DNA, 621 bp, Homo sapiens
ctagggttggtattagaaaagggtgagtatattttaatcaaaaatgccaaattacatacacatatatataattatatacatgtacatatatgtgtgtgtatacatatgtgtgtatatgtatatatatggaaagagagagacatgaagagtttgtgttttttgctatagtrtatctttgtgatttagtcagaatatataagaaggtcattcaaactgagcttcagtggtaatataaatgagaaaatctgagttcctgaaagtaagtagaatgaagctttgtgttttaagaattttaggggaattttaatgtagtttgttaagaagattatgtttttctaacatttcacttgtgaaatccaatcagaaattgaggcctaaagtctatatagatccttagaataagatttttggcagctgattgttctctgaaagcaggaattcatgtgtgctatctgtgttattctaaattcacttgcatttatttttctctaatggttgtatgtgcagcatgtagtgactctgtggtaatcgcccttttccataactcttgtttcttcacggttggaggggatttaactacctatcagtagtgattttgatgtttcctcaagaacaaaaatg

SEQ ID NO: 204633 - DNA, 601 bp, Homo sapiens
gttatttgtttttgcttgttcgatagtttaagttccttaaagattctggacattagacctttgtggaatgtatatattgaaaatactttctcccatctgtaggttgtccacttactctgtggatactttcttttgccatgcagaagtcctttagtttaattaggatccacttgtaaatgtttgcttttgttgcaatttcttttgaggacttagtcataaattctttcccaaggctgaggtcaggaatgatatttcctargttttcttctaggtttcttatagtttgatatcttaaatttttcatctatctcgagttaatttttgtgtatggtgaaagataggagtccagtttcattcttctgcaaatagctagctagctatatcagaataagttattgaattgggagtcattccccattgcttatttttgttgactttgtcaaagatcagatggctataggagagtggcattacttttctcaaagactttgttcattttttaaaattattttctttttactttttgtctgactgagttagttcaaaagactggtcttcaagctctgaaattattttttctactttgcccagtccattgata

SEQ ID NO: 204634 - DNA, 601 bp, Homo sapiens
gttatttgtttttgcttgttcgatagtttaagttccttaaagattctggacattagacctttgtggaatgtatatattgaaaatactttctcccatctgtaggttgtccacttactctgtggatactttcttttgccatgcagaagtcctttagtttaattaggatccacttgtaaatgtttgcttttgttgcaatttcttttgaggacttagtcataaattctttcccaaggctgaggtcaggaatgatatttcctaggttttcttctargtttcttatagtttgatatcttaaatttttcatctatctcgagttaatttttgtgtatggtgaaagataggagtccagtttcattcttctgcaaatagctagctagctatatcagaataagttattgaattgggagtcattccccattgcttatttttgttgactttgtcaaagatcagatggctataggagagtggcattacttttctcaaagactttgttcattttttaaaattattttctttttactttttgtctgactgagttagttcaaaagactggtcttcaagctctgaaattattttttctactttgcccagtccattgata

SEQ ID NO: 204635 - DNA, 600 bp, Homo sapiens
ttggcttacagtaggcaatgaattaaaatttgttgaatgtattcatgttaatgttaattttattaggtagatactaaaagcacaaatttcttgtatccctcattattaattggtacctaaggtacaagaatattcaaatgtataaagaaaaaaacagaccctcttataaatgtagtgtaatacaaatctcataatgttttgccgtgtgtcatattggcctagaagtatttgacttcctgtcactatgaacaaaggattagaattagtatcaatttgttattggyattaactcacttctctgaagttattcttgaaattagttgtctttaatttctttaagttaattatatttatttaatgtggctcatccaaatttaagcttcttgaatgtaagaaggatgctttattgttaaaaatttttggaactgcattttgccaaagttccaaatgcagtgctggagatacaggtattgccaataatagcttcttatttgactaaatctatttctaaattacaatttgtttagtgtattctaaaatgtgatttttttcatcaaaagagtagctggttctgcaccttattttaaggaaattatatga

SEQ ID NO: 204636 - DNA, 560 bp, Homo sapiens
aagccagaagagattgaggaccaatatacaatattcttaaagaaaaaaaattccaacccagaattttatatccagccaaactaagcttcctaagtgaagggaaaatgagatccttttcagacaagcaaatgctgagggaatttattacccccggatctgaaagaagctctcaaaggaagcttcaagagcaccttaaggaagcactaaatgtggaaaggaaagaccattactagccattacaaaaacacactgaatacacagaccagggacactatgaagcaaccacataaacaagtctgcaaaataaccagctaacatgatkacaggatcaaatctacacatattaatactagccttgaatgtaaatgtcctaaatgccccaattaaaaggcacagagtggcaagctggatgaggaaccaagacctgttggtatgctatctttaaagacccttctcacatgcaatgacatacatagccttaaaataaagagatggagaaaaatctaccaagcaaatggaaaacagaaaaaagcaggggttgcaattctagtttctgacaa

SEQ ID NO: 204637 - DNA, 535 bp, Homo sapiens
  misc_feature (1)...(535): n = A,T,C or G
ttgtatatattatgaaatacaataaaattcttttagaaagaataagacagatagacgtgtactgatacaaaaaatttcccagacatattaagaagtaaataaagcaaattgcacagcaatgcatatggtttcatttattttttaaaaaagattaatgtgtgtatatacatatataaaatacatatgcacagaaaaaaagctttgtgamagcacagactcaatgaaaatagtggttacctatggtgaaaagagtggtattgtgggatgggcagataaagagaaaattttacattttacatatttctatattatttgactcttacagtaatttatttccgcattattacaaaatttaaaatgtttaaacagaaaagtttcccagggcggctntcatttcttgcatcctagctagctccctctcccagcactgtctgattactagagccatccctgtgtctcagctggagctcagncagatgtctccatctcagcatcttcatatagcggnaaatcttgacattcacatgntgagctc

SEQ ID NO: 204638 - DNA, 371 bp, Homo sapiens
gcctacgatatgtagcaagactaacataattttcctgttagaacttcaagaattaagattcagtgttgctaatccttgatttgttttctgcgatacagaagacaggccctgagactctggtgacttggtggtataaagtgaagagcactggactgcaaataaggaatcctgtactcagaaccctgcatcacagaatagccttgcaaatgagcaagcccgtctccttacctttacctactctacaaaacagaaaataaagcggatgaaaatcatagaggtactaggtaatgtgcctggcgccatgtgtgttatgcagaatgaacyactcaacattctaccagcctaccgtttaccatctcagagagtgagcc

SEQ ID NO: 204639 - DNA, 266 bp, Homo sapiens
agactatgacagatgtccctaaacctagacattcagagactaggaaaactaaaaacaaaaaatcaaaataagttttgttttctttttaatttrcaacttcagagaaaaagcatcctgaaagcttctgaaaagagcacaaaatggcttgtaaaactacgttgttatacagcagtgctcatgttattactgcctcccaggacctgactcctgggaatatgctgccatgtcagaggcaatttggaaagtcttaattgaggagagccaca

SEQ ID NO: 204640 - DNA, 495 bp, Homo sapiens
aaacacacttttattgcatttagttttatattggtgtctatgtttatacatgaacatgaatgtgagaaaggcaaagaaatcaccactactaaacatgggagggccaaatgtgtgcttgatcctcatggagcatgaaataagacttaatctttgcccagaaggaaaatcttcctgaacaagtataatgattgatttttttttctttagcagttctttatctcttctccttttttaaggacagttagcacaactgaacaattacttgggaggtacaatacaaagctttgagcgtagctctttatacacttatcaaatgagtataatttgctataattcttcctcctgattatatacagtagctatttcattctctaaataatatcttatacttttttttagaagttggttaaattgcttaggaggagaatattaggctcagtttctttgaagggtaatatagtgggagtgactgwataattatctctagcgggcttt

SEQ ID NO: 204641 - DNA, 594 bp, Homo sapiens
tgagatgctgattttttgagacaatttccactcctcaaaacacgagraatggagcctcttagaggctcagtagcattgtgtgtatttcccttgcacacacacgttcatttctcacatggttcggaacgccttgtctgagcatgtcaaaataatctgaataagcctgttctcacaatatttgtggacagactagaaccaaacgtactggtaacctcttgagaacaagctgtctcgtgagatttatgccccacagttcaaaggaaaggaacttagaaacatatccaaactctcagtatttatttagatgcaacgacaagctttctaagctgtccccactgatgcccaagaagcactatcacaaaatagaacctttcagacaatgcagcatgtgagttagagacttctgaatgcctagaggcatcagaaatctaatcgttctcctaaatgtctatgagattaatatcaaacacaaaatacatattttaataatataatttaaacatggagcccataaagtttgcaactcacaacaagaattattttactctagttgtaactcttctgccatgtcccacattagggagatggagtggt

SEQ ID NO: 204642 - DNA, 624 bp, Homo sapiens
ttttcttctaagatttttatagatttaggtcttacgtttaagtcttttaatccatcttgagttgacaaatgttgamtatcaatggttgtaggtgtgcagcatgattactaggtttctctagcttctttcattggtttatgtgtctgtttttgtcccagtaccatgaagttttagttactgcagtcttgcagtttaatttgaagtcaggtactgtgatgactctggctttgtcctttctgcttagcattgttttgcctatttgggctctttgtggttccatatgaattttacaatattttttttttctaattctgtgaaagataatattggtagtttgacaggaatatcactgaatctataaattgcttcggccagtatgactgccccaaattttaacaatattgatttttttcctatctatgaacatgaaatgattttccatatatttgtttcatctctgatttatttcagctgtgttttataattctcattatagagatctttcacctccctggttagctgtattcctaggtatcttattctttctgtggctactgtgaatgggattgtgttcctgatttgggtctcagtttggacattattggtatatagaaaggcaactga

SEQ ID NO: 204643 - DNA, 542 bp, Homo sapiens
gaattccaataaaactttatttacaaacacagcagtgcactggattttgcctatgrattatagtttgctggactttttttctggacatataatacaagtcccttcttttctatttccaagtcactcagataatgtaaaatcctaataatcaaatgccctattgctctgccaaccaattttaaattgcaaccaaatgcttattatttgtgaacatccttgtggaatctgatttgtagtctctcatcttctgacagcacttggtataggtccattagaatgcaaccaacaaggacagaagatagcagaaaaaacaagcagcggagcaagtgtccacaacctttgactctgatgggcacaagcataggtctaatcaccaagaaaagaggtttagaaacaatgtctcatgatatcagaagatgttatgtccccgctttatgctagcacatcatctgatacagaataaaacgcagtaaatcagggaataaatgatgagtacaggggattctggctcacaaaaaaatcattttcagcatggactgcct

SEQ ID NO: 204644 - DNA, 607 bp, Homo sapiens
gaattccaataaaactttatttacaaacacagcagtgcactggattttgcctatgaattatagtttgctggactttttttctggacatataatacaagtcccttcttttctatttccaagtcactcagataatgtaaaatcctaataatcaaatgccctattgctctgccaaccaattttaaattgcaaccaaatgcttattatttgtgaacatccttgtggaatctgatttgtagtctctcatcttctgacagcacttggtataggtccattagaatgcaaccaacaaggacagaagatagcagaaaaaacaagcagcggagcaagtgtccacaaccyttgactctgatgggcacaagcataggtctaatcaccaagaaaagaggtttagaaacaatgtctcatgatatcagaagatgttatgtccccgctttatgctagcacatcatctgatacagaataaaacgcagtaaatcagggaataaatgatgagtacaggggattctggctcacaaaaaaatcattttcagcatggactgcctgagtttatgataatattgacatcaccttcaagaaattctccctgttttttttctttaactcatct

SEQ ID NO: 204645 - DNA, 615 bp, Homo sapiens
gaattcactgaggccaaaaatggtaactttttacccagtagctggcaacattcctggtaattagaaagtgatcagtaaatgctcaatgactatctgaatgattgcatttttcaaaaagaaatctgaagtctaaattttgagccaactaaacatcatatttctttggttttgggtggtttgggaaaaatccaatgtgttctctgaaaggaaaacatatttggagatatgattatttttttctgtaaataaagttactttgttgtaaatataaatatacatgctcattttataaaagaaaatgaaaggagaaaaaagagcaaaatatctgtattgacaccactcataattaccactcataatttttgttttgtttttcttattcacatataggacttttatcatgatatatgtatgaatttatatcctgttatttttctgaaacattatagcrtaacaggattaagtatcctattacctctacagttcctgatatttataaagataaattatgaaaataatgtttgaatgagaaggtttttctgtttatatgctgttccaaagaaccttaggtatcagaatttatctgagcccaaaaacgtcccttaggtaccttaa

SEQ ID NO: 204646 - DNA, 400 bp, Homo sapiens
gatttcaccttcatcacaatggcattttatccagtgctggacacatgcatgctaagaactgagtgtactgtatgggtatttataatacccatattcattctaggaaataattatacatggctgggtatttacataaacaggagccttggagacctctcaagttcaaaaccgatggcattctatctcatttgaaagtcaytggggtgggagaggacactccttaaaatattggatttcttagttttaatctgatgatatgctagctttatgaagatgtgagtgcaggccctcacctggatcgttgcttctctttttaataggaactagaaaatgaagattttcaaggtagcatctgggtgctcctaattgacttgattttatgtttgagaaaactaccttg

SEQ ID NO: 204647 - DNA, 633 bp, Homo sapiens
cttacttaattgggctgtctttttcttaatgagttgtaagaatcttaatatattccagatataagccccttaacagatacatgatttgcaaattccayggattgtttgttcactttcttgatggtgtcatttgaagcacaaatttggttaattctgaggaagtccaactcatctattttttcttcagttgtttgtgctttgatgtcatgtttaagaaaccactgactaacccaatttcatgaacctcacttctatattttcttctacaagttgtatagttttatcctttacatttgtgtcttacactatgaggtagggagtccagctttactctttgtagatatctggtggttccagcatcatttgttgagaaaactattttttccctgtttgaacgtcacaacaccctgttgaaaatcaattgtccataaacataatggtttatttctggactctcaattctactccattgatctttatgtatatcttaggccaatatcacactgcttgattgctgtcatttgaaagaaagttttgaaactaggaagtgtgtgtcggaaacttcctcatctttttcaagatgattttggcaattctgggtctcttgaacatccgtgaatttaaggatgtttg

SEQ ID NO: 204648 - DNA, 507 bp, Homo sapiens
tgtatttgcatatttcatgagtttctctgttccacaaagatgaggatactaagacgagtcagccattcctatcattaaggtctaatgagggaggaaatataattatataacaataagtaaagtggataaatcaatatatgtactaatgcagctgagagggttggtggtattcagggaggggcacctaggtcagcttaaaatgatgagtaggagttagccaagcaaagggagcataagcccgagaagggcattctaggcttagcacacagcttgaacacaggtgcagaggttagaagcaggaggaagagcaggaaactccaaaagtactatcttgctgcattttgagcaggggrgggaatgcagaggaaaggcatgaagaagcctggatttcatcctgtgggtaatggggagctgttgtacggttttaaatagaaagtggcaagggcagttctgtggttgagagagagaaccttgataacactttagaggatgtatttgagtgagaag

SEQ ID NO: 204649 - DNA, 627 bp, Homo sapiens
ttacttcaatagatgctagtaacagcatttgataaaattcaacattcccttcatgataaaaagacgaaaaaaaaaaactgggtgtagagggcacaggcctgaacttgataaaagccatttatataatatccacagttartatcatattgaaaggggactttcagtatgaaactgaacacctttcctctaaggcctgaaacatgacaaagttacccactttcagccaggtgtagtggcttacacctgtaatcccagcactttgggaggccaaggtgggtggatcacttgaggccagaagttcaagaccagcctgtccaatatggtgaaaccccatctctactaaaaatacaaaaattaggcaggtgtggtggctcacacctgtaatcccagccactcagtaggctgaggcacgagaattgcttgaacccaggaggcaaagtttgcagtgagctaagagcatgtcaatgcattccagcttgggcaacagaacaagactctgtctcaaaaaaaaaaaaaaaaaaagatgcctactttcaccacttttattcaacatagtactagaagccctagtcagagcaaataaacaacagaaaggaacaaagggcatccaaattagaaaggaagaaa

SEQ ID NO: 204650 - DNA, 627 bp, Homo sapiens
ttacttcaatagatgctagtaacagcatttgataaaattcaacattcccttcatgataaaaagacgaaaaaaaaaaactgggtgtagagggcacaggcctgaacttgataaaagccatttatataatatccacagttaatatcatattgaaaggggactttcagtatgaaactgaacacctttcctctaagrcctgaaacatgacaaagttacccactttcagccaggtgtagtggcttacacctgtaatcccagcactttgggaggccaaggtgggtggatcacttgaggccagaagttcaagaccagcctgtccaatatggtgaaaccccatctctactaaaaatacaaaaattaggcaggtgtggtggctcacacctgtaatcccagccactcagtaggctgaggcacgagaattgcttgaacccaggaggcaaagtttgcagtgagctaagagcatgtcaatgcattccagcttgggcaacagaacaagactctgtctcaaaaaaaaaaaaaaaaaaagatgcctactttcaccacttttattcaacatagtactagaagccctagtcagagcaaataaacaacagaaaggaacaaagggcatccaaattagaaaggaagaaa

SEQ ID NO: 204651 - DNA, 602 bp, Homo sapiens
agaatacttgagagttaagtttttgagaccagtaaaaatttaagtttagaacatgttttgcttgaaatgcctgtaatacagccaaatgggggtgcttgaatattcagatggtgcttgaatataaaaggtggagcttgaggggaaagatctgagaatgtagacataaatatgggaatcattagtatattgattacttaaagtcagaaggggatacttaatggacaaggaaaagaaaatgtgcaattcttttttaaaaaagtaaaggggatagaacctttggaaatactgtttttaggcagtgagttgagtaataagagattgggaaagaaaaatcagggggatggggtaaaatctgaagagtatgatgtaggaggatccagaggaaaagagagagttgattcctataacracttttggagaagtgagactaggtaatactattattattatctactttccacaaaggctagatgtcttcttggggctaatacaattgtaaacattaaaactggattgctaatgcctgatcttctagcttcaattctaacagaactggattttatgattcaggtaattaaagaaagagagtataaaagaatagc

SEQ ID NO: 204652 - DNA, 424 bp, Homo sapiens
ctgagttccagctgttttatttaccagctgactaaagtggcctggggccagaaatgaatttgagtggtagtcaggctacaaggaccgccrttctagggcaagccatggtgttgcactgatcccagaggcagtgtacttggggtgcatgcagctatgagacactggccatggtagtcaagggaatgcctgcatctccactcccccaaatccaggcagtgctccttccacttgggggaaggagaaagaagagtgcagtggactgtgcctcacaatttcgataccagctcagccacagtaaaatagagcaccagatttctgaagcaccaaatttcaggcatttggtgctggatagcatttctagatgcaccctgggccagaaggggaactgctggcttcctggcacggatccatcctgacagaattc

SEQ ID NO: 204653 - DNA, 424 bp, Homo sapiens
ctgagttccagctgttttatttaccagctgactaaagtggcctggggccagaaatgaatttgagtggtagtcaggctacaaggaccgccgttctagggcaagccatggtgttgcactgatcccagaggcagtgtacttggggtgcatgcagcyatgagacactggccatggtagtcaagggaatgcctgcatctccactcccccaaatccaggcagtgctccttccacttgggggaaggagaaagaagagtgcagtggactgtgcctcacaatttcgataccagctcagccacagtaaaatagagcaccagatttctgaagcaccaaatttcaggcatttggtgctggatagcatttctagatgcaccctgggccagaaggggaactgctggcttcctggcacggatccatcctgacagaattc

SEQ ID NO: 204654 - DNA, 216 bp, Homo sapiens
ccaggcagtgctccttccacttgggggaaggagaaagaagagtgcagtggactgtgcctcacaatttcgataccagctcagccacagtaaaatagagcaccagatttctgaagcaccaaatttcaggcatttggtgctggatagcatttctagatgcaccctgggccagaaggggaactgctggcttcmtggcacggatccatcctgacagaattc

SEQ ID NO: 204655 - DNA, 216 bp, Homo sapiens
ccaggcagtgctccttccacttgggggaaggagaaagaagagtgcagtggactgtgcctcacaatttcgataccagctcagccacagtaaaatagagcaccagatttctgaagcaccaaatttcaggcatttggtgctggatagcatttctagatgcaccctgggccagaaggggaactgctggcttcctggcayggatccatcctgacagaattc

SEQ ID NO: 204656 - DNA, 351 bp, Homo sapiens
ttgtgctggttactacaggagctacagggaagcattggatttcaaccccacaatcatagctccttatttattctttagttacagctaaaatatagtagacattttatttgccataatccacgtgttgattttwggggaaaacagctagaggggtaaaggtatgagagaatataaagagaaaacaccaaggtaaaataggaaggaattgggtgttcctagggtagtaaatgcagggaagaacaaatagggagaaataaagctgaagaagctggcaggttgtcaggggccatgcatgccttctgagattttatgcagcaggcaacaaaacgccttcagaaaggatcaacatgg

SEQ ID NO: 204657 - DNA, 595 bp, Homo sapiens
gccaggcacttcaacaaagaagatataaatggcaaataagcacatgaaaatatactcaatgtcatttgctattagggaatgmaaattaaaaccacaaggagacacccaaaggaaatattatttttaaaatgaaaagaaaatctgacaaaaccaagtgctggtgaggatgtgagagtaactggaaatctcatgtattgctgatgggaaagcaaaatggtacagaaattttggaaaataatttggctgtttcttatgaagttaaaccccatatggcccagcaatctgatcagtaggtatttaagtaaagtaaaacttaaatttacacaaacatacgtatacaaatatttataggagctttattcatgaccacccccaaatattcctcaactagtgaatagataaactgtggtatatgcacacaaatagaacattactcagcaataaacaggactgaactcctgataaacaccacagcaatgtgaatctcatatgtaatatgctgaatgaaagaagtctgattcaaaagactacatgctatataattccatttatttgacctttggaaaagataacactaaagggacaaaaaacacat

SEQ ID NO: 204658 - DNA, 595 bp, Homo sapiens
gccaggcacttcaacaaagaagatataaatggcaaataagcacatgaaaatatactcaatgtcatttgctattagggaatgaaaattaaaaccacaaggagacacccaaaggaaatattatttttaaaatgaaaagaaaatctgacaaaaccaagtgctggtgaggatgtgagagtaactggaaatctcatgtattgctgatgggaaagcaaaatggtacagaaattttggaaaataatttggctgtttcttatgaagttaaaccccatatggcccagcaatctgatcagtaggtatttaagtaaagtaaaacttaaatttacacaaacatacrtatacaaatatttataggagctttattcatgaccacccccaaatattcctcaactagtgaatagataaactgtggtatatgcacacaaatagaacattactcagcaataaacaggactgaactcctgataaacaccacagcaatgtgaatctcatatgtaatatgctgaatgaaagaagtctgattcaaaagactacatgctatataattccatttatttgacctttggaaaagataacactaaagggacaaaaaacacat

SEQ ID NO: 204659 - DNA, 595 bp, Homo sapiens
gccaggcacttcaacaaagaagatataaatggcaaataagcacatgaaaatatactcaatgtcatttgctattagggaatgaaaattaaaaccacaaggagacacccaaaggaaatattatttttaaaatgaaaagaaaatctgacaaaaccaagtgctggtgaggatgtgagagtaactggaaatctcatgtattgctgatgggaaagcaaaatggtacagaaattttggaaaataatttggctgtttcttatgaagttaaaccccatatggcccagcaatctgatcagtaggtatttaagtaaagtaaaacttaaatttacacaaacatacgtatacaaatatttataggagctttattcatgaccacccccaaatattcctcaactagtgaatagataaactgtggtatatgcacacaaatagaacattactcagcaataaacaggactgaactcctgataaacaccacagcaatgtgaatctcatatgtaatatgctgaatgaaagaagtctgattcaaaagrctacatgctatataattccatttatttgacctttggaaaagataacactaaagggacaaaaaacacat

SEQ ID NO: 204660 - DNA, 633 bp, Homo sapiens
tcgttcatgatttggcagtacatcaacacatgttttaaagtgttagaaaaacaatagctctgtaagtgaaacctacatctataaaaccaattctaaagtccaccaagatctcttaaattatctcagtgtatgctatatactgatacttgtatttgtgaggttgaacaaggcaactctgaaaaatttcagtaaaattgatcatttttttgccttccaaaactaaatgaaaatactagcatcaggtagaatgtgaacaatttagtgacagtgcaattttgctgattgtaacaaattcccataggcctcaatatttcagattttaagcatcttgcaccaggtgaactttaaaaatgatgtcatgcactgaatttsgattgaatgtttaccatgcaaaacttaacatctttccttttggtttggtgatttatcatttttaaaaggctttcctatttgatttttgtaatcagagaatgttttctaatcagagaatgttatcctccacttgacacatagggaaagtgagctttggacaactttagcatccaggttgcctatcaaaatccccaagaaagcaccatctataatgtctaatcatcaaaatccccaagaaagcaccatctataatgtctaatc

SEQ ID NO: 204661 - DNA, 633 bp, Homo sapiens
tcgttcatgatttggcagtacatcaacacatgttttaaagtgttagaaaaacaatagctctgtaagtgaaacctacatctataaaaccaattctaaagtccaccaagatctcttaaattatctcagtgtatgctatatactgatacttgtatttgtgaggttgaacaaggcaactctgaaaaatttcagtaaaattgatcatttttttgccttccaaaactaaatgaaaatactagcatcaggtagaatgtgaacaatttagtgacagtgcaattttgctgattgtaacaaattcccataggcctcaatatttcagattttaagcatcttgcaccaggtgaactttaaaaatgatgtcatgcactgaatttcgattgaatgtttaccatgcaaaacttaacatctttccttttggtttggtgatttatcatttttaaaaggctttcctatttgatttttgtaatcagagaatgttttctaatcagagaatgttatcctccacttgacacatagggaaagtgagcttyggacaactttagcatccaggttgcctatcaaaatccccaagaaagcaccatctataatgtctaatcatcaaaatccccaagaaagcaccatctataatgtctaatc

SEQ ID NO: 204662 - DNA, 300 bp, Homo sapiens
aagatctgatgctacatattgaatgaatatgttttatctcgggaaataatagttacagtggctcaaargcaaggggaaactccattgaggatataaggaaaaaatatgagcttacttaagagtgagaaaaatcagtctgactttttacctcacagcaatattcattgccaacatatggctaatcaatgcttattaagtttgtgaggaaaaaatgtgacatgtattttatacaccattagctgttatccaaatataacatggtggcaaattaaccactttttaaaaagttgctggaaatat

SEQ ID NO: 204663 - DNA, 584 bp, Homo sapiens
aagctttatagttttcagcatataaggctttgtgttcttaattaagtttattcataagtattttattattttgatgcctttttttattttgatgttatttaaaatgggattattttcttaatttccttttagggttattcattgtttagtgtacagaaacacaactgatttttgtatgttaattttatgccctgcaactttactaaatttacttattagttctaacagttttctttggtgtgaagtacrtatggttttctacatattagaccatgtcatctagaaacagagataattttactttctcctttccaatatgaatgtctttttatttcttttttttaaacctaatttctttggtcagaacttccagtatttattttcatggttgcaaaatcttccactgttttcctcattcccctaaatgtaaattagatcatagcctccatcagttcttctttcattgtttttctggcacccatttgctttggatcccactttagtcacccttttatcctcatatcttgaatattaatctacattgctgcttcagtttataccttctgaagtcactaaatgtagca

SEQ ID NO: 204664 - DNA, 507 bp, Homo sapiens
tggaaattgtttaggagaaaaatcgtgtgatagaacaaaaacaaaataggtaataagagtaacaaagatgctacataatattccttaggccacatctaacagaaaaattataaatttaaaatcagacaacaaagtgtctaagacttaccctaggctctagggagtcttaaataatacacagaaaaaatactcttgagataccatcttttcctatatcactaagaatatgtcaggaattgaaaagaaaaaaatgcatggttaattaattgatagaatgagttaaaatactgttgtttctgaattgtaacagaaggtttttaaatgggttacacatgtccattgaaataatattaatactttgtaaaataacctaactacttactaaaaatamatcacaatgaataaaattactgttaaaataaagtgattaaatgattaagaatctgtttactttcttttcccccttttattcaaactcaataattgctcccccccttttttggaaaa

SEQ ID NO: 204665 - DNA, 568 bp, Homo sapiens
attcttcttatttaattccattacttgtcatggcagcaggtggctgaatggttagaatatagattttgtgctcagacatacaaaactttgtttgaattctggcagtatcgttgactagctgtgtgaccttggtgatatggtttggatgcttgtcccctccaaatctcatgttgaaacgtgattcccagtatgggggtgggcctaatgggggtgtttgggtcatgaaggcaggtccctcrtgaatagattaatgccctttggtaggtaggggtggtgggtgagttctcattctattatttcccagaagagctggttgttactaagagtctggcaggtgactggatcacaggagcagacgcctcatgaacggcttagcatcatccccttggtgatgagtgagttctcagtctggcagttcacatgtgatctgattgtttaaaagagcgtggcacctcctttcttactctcttttgccctcactgtctcttgctcctgctccctcttgctcccactgtcttgcctggtgacacactggctcccctttaccttccactgtgattgtaagctt

SEQ ID NO: 204666 - DNA, 615 bp, Homo sapiens
ttgcagtgagcggaaattgccccagcgtgggtgacagagcgagactgtatctaaaaaaaaaaaaaacctgaccaaacaaacaacaaaaaaaaaaaccttatgtatgctctcacattttttgtatgcggataaaagtaaatgaatatatatcttctctccctctctgcttattttacacaaagagttaagaccagtcagtttaggttatttgcttttgcaagacttggctacttctttagtgtgaagtatcttacaaagtgcacctctgattgaattaattatctctcatcttggagggattcaccatgcagagagttcaatttgtttagatggtaatttcatattgaaattgattttgggccaaagtccagcactgccaagtcttatgtaaccagcagaagctgagctttcaaccagctgccatatgttatgaggaacaaagccagaggaccagtgcagatggttctcaagaaataagttatcactctcaaagtctctagaaagacatattatcaaaaggttatcatgtgtggcatrcttcttaagaaaacaccgcatttcccttcctagagtgattagtaaaatatataccaaaatagttcatttaaggtgttc

SEQ ID NO: 204667 - DNA, 592 bp, Homo sapiens
atgagggtggagacagactcttcgtatgataaattttaccctgtgtgttaggcaggaccctgaccttgcagagagaagacccagattgaatctttgctctatcattcacttgctgcatgaacttaaacagataccagaatggctttgcgtctcagttttctcatctgtacaatgaaaataataatttttacctctgggttattctgaagattaaaatgagataatttatatacatggcagtgcctaacacartgcttatttaagggacattcagatatattaatttctcccacctcatttgtctgccatagtgatatggtacccctccttgatagggacaatgttggcccaatgcattgttcatgctgcctgttgagtaagagggataatggtgatgtcacagaaacatgattatttctgggaggtgaaattgaacttggaaacatggcgtgtgctttttttcttttccaaattgcaggacctctgcaggctagtctgtgaattgccctgaaagtcactgtgaaaaattagcttgcagtattaagtaagtacatattttttgggacaaggaagcacttcagaggtggtttag

SEQ ID NO: 204668 - DNA, 592 bp, Homo sapiens
atgagggtggagacagactcttcgtatgataaattttaccctgtgtgttaggcaggaccctgaccttgcagagagaagacccagattgaatctttgctctatcattcacttgctgcatgaacttaaacagataccagaatggctttgcgtctcagttttctcatctgtacaatgaaaataataatttttacctctgggttattctgaagattaaaatgagataatttatatacatggcagtgcctaacacaatgcttatttaakggacattcagatatattaatttctcccacctcatttgtctgccatagtgatatggtacccctccttgatagggacaatgttggcccaatgcattgttcatgctgcctgttgagtaagagggataatggtgatgtcacagaaacatgattatttctgggaggtgaaattgaacttggaaacatggcgtgtgctttttttcttttccaaattgcaggacctctgcaggctagtctgtgaattgccctgaaagtcactgtgaaaaattagcttgcagtattaagtaagtacatattttttgggacaaggaagcacttcagaggtggtttag

SEQ ID NO: 204669 - DNA, 526 bp, Homo sapiens
atggaagtggatgacttgaccaaggccaaatcactagttggttatatctgtaaatcagttagattacctagctgcagatagcagaatcatcattatgtagtgtaagtagaaaaggaattttctaaatagcattaagcagcagagagcacctccagaaggactggagactcagggttggagtctgcacaatcagaagccattcccaagtaacagttgtggagagctctactgaagagccagctgctgctgccattggccacaggcattccagatcagcacacaggatgctagtgctgggcctgtcctattgctatctctgggagctagaagactttctgccatgcttccatcccctgtcaggatggattccacatggcgacttccttctgcttatctctgtcttctcacttgaaatatatgtcattggacaaacggatctaatggcccaagcytaggctgtgggcctagacctagcaccaagggggccaagaaaataggtttatgtcttctgccttggcaaggtggg

SEQ ID NO: 204670 - DNA, 568 bp, Homo sapiens
aagcttgttaagaaaaacttatcagagctgaagtcaggctgttggcctgggctcaagaactcagaggtcaagatttaggaagaaatcgaggcagcaaacaagaatgtaaatgagaaaggtaattgatgagaatcacattgtcaaatcaacatcaggtacactatggaatgaggcttgatagaaaaagtcaagctcaggcacaatataaatcagagtgtaggtgacaaagaaaacagcaggctgaaaccartgatatcagagatgcagaataagaccagagaaagtagaaccatgggccgttatgcctattggccactgagggaatccttccacacctcactctggttcacacactaacctcatcttctcagaactctctacctcccgccaggttctgacaactctattttataagtagaagaaactcatttatgtacgtagataatgtcctaactttccagaggcctcacttataatcagtgatagaaatcgaatgtattctttgctgcttttctaaaatcaaagatgaaactatcccaatactaagagaaatcatatcttctgttct

SEQ ID NO: 204671 - DNA, 299 bp, Homo sapiens
ctctcctcctacaatcagtcaccaggacaagacccctgcattctattccacagcatttcttcaatccatcctctccctggctaagcycactctgcaactgcctaaattccagctctcttggtatctctcctgggctacctcattggtttcctagcttattttccaagtgccaagctggctcctttctaactctttctccattttgctgcctgaatgctcattcttaaatatatctgatattgctactctctagcttaaaactcatcactgactagaaaaaggacaaacattttattata

SEQ ID NO: 204672 - DNA, 505 bp, Homo sapiens
cactacccttcttccaggcactggagttcaaaaccttaagagtaatcttttccttttgtctttattccatacttggtttttcatgcatttatgaatgaatgaatgaaactactactcatcatgsctttcccctcttctaaaacatttaacaaactctcctttaccctcaaagtaaggcaaaattttaacctagacttaagattctccaaaatctctccccttattcaatcccagctacctatactatccactctcaccacatgtatatagcatgcgatggttttcaaagtgtctacccaaagaatttttgtgaacattatctctttttatctaccacaagactgataagatagtcagggaagacattattattcttcttttttggaagataaaaccaagactctgagaagcagattctatcaggtcttctgattcttaagccacggttccttcccacgatgccacatcatgtgttatgttttgatttgttatataagtgcaaaat

SEQ ID NO: 204673 - DNA, 529 bp, Homo sapiens
cataaatgagttttcagtgttctttatcaaaaattattataatttcttcatagctgctagaagacaggaagcaattaatgtctccatcacatagaataccagaagtcaatgaaagaattaggatgtttaaagaagaattagatgttcacagcatgttatattgcagataaaaaaaaatcatattgctaccttctagtttgatgttctggcccatgtaattagaacctctcctcccccagaattattctccctttatcatgacatcacttcattgagggaaccttccttggtgtctttatgctggaytacatgcccctcttaaacattccaataacctcctatatatcctaactatggcaattagcatattcattataatcatatatttaattatctgtcttttttctcaaaactctgaaaaggtattgattctacactcttcttggttttagtttcaggtcctaccatattggctagcatgttattaggattaaatacattatgaaaagaaaataattactgtgtttag

SEQ ID NO: 204674 - DNA, 551 bp, Homo sapiens
aattatagctattatttttttctaggcttactttatagcttcatctttctattttcttatatgaattgtcaaataatttgataagatttttaaaagtattgttaattactgcaagcaattaacttgaattgatgtcttccaatcaacgtggtaaagaagagaaaggagaggaataactatgaaagaactggattggaaacgagcaatgtaraaaataaaaacaaatcatttactacacttagaaaacattgtttttgaggaaattaatagtataaaacttgccaataccagagagtctcaagaaggaacataaagattctgcatgacaagttttggagtactatctatcttatttgttccttaaaccctttagttccattcataaggtgcttatggctgcgtgtgtggcaggcacgtggggtgctatagagatacaggggaaagagtttgagtagtgcaatatactgttcatttttcttttcagaatgcccttgacaaattaacattctcagatcagttgacttgtttgaatgcaccacattggcattcta

SEQ ID NO: 204675 - DNA, 551 bp, Homo sapiens
aattatagctattatttttttctaggcttactttatagcttcatctttctattttcttatatgaattgtcaaataatttgataagatttttaaaagtattgttaattactgcaagcaattaacttgaattgatgtcttccaatcaacgtggtaaagaagagaaaggagaggaataactatgaaagaactggattggaaacgagcaatgtagaaaataaaaacaaatcatttactacacttagaaaacaytgtttttgaggaaattaatagtataaaacttgccaataccagagagtctcaagaaggaacataaagattctgcatgacaagttttggagtactatctatcttatttgttccttaaaccctttagttccattcataaggtgcttatggctgcgtgtgtggcaggcacgtggggtgctatagagatacaggggaaagagtttgagtagtgcaatatactgttcatttttcttttcagaatgcccttgacaaattaacattctcagatcagttgacttgtttgaatgcaccacattggcattcta

SEQ ID NO: 204676 - DNA, 630 bp, Homo sapiens
ttgcaatctcatactatagactaggccatatgctaagagattttaatrttatattatttaaatcttacaaccatgacatgcataaggtgtttcactcctcatttctcaacatgaggatactaaaggtcagattaattaagtaatgtgcttctgcacctacacttagtaggagatggagctgaaaaacaaacgtagaactctgatactaattacagtcattcagagcttaatgatggggataccttctcagaaatgtggtgttaggcaattttgtcatgcaaacatcagaggatgtacttacacaaacctgaatggtagagcctgctgcacatctaggctgtatggcatagcctattgctcctgggctacaaacctatagagcatgttattgtactgaatattgcaggcaattgtaacacgattgtaaatatttgtgcatttaaacatatttaagtatggaaaaggtaaagtaaaaaaaaatcatgttataattttatgggaccaccattgtatacgcagtccatcaatgactaaaacaccatgatatggtgcgcgaatgtactaacagtgggctctctgtatcagtgggttccagatttgtgaattcaacaaccgtggattaaaaaaaaa

SEQ ID NO: 204677 - DNA, 572 bp, Homo sapiens
  misc_feature (1)...(572): n = A,T,C or G
aacaggtattatggaaacaagtttaaaaacacattctttgcccctaactcatttctgggagaaacagccatgttatcacaaagtcatcatagaatacaatgagaattaaagttagtaaagggtattctgggagctcctaatacacacttagaggttattgtccactggagaagataatgctcaacctggtttcttaatgttaaaatcaagatacccgggtcaagagaataagcgaggctcttgngaaagatggggcattagaaagctccatgtanatatggttcctatcttnacagttatcaatagacgaatttaagcccagttaatcaaggataggataacatttcctctatttgacctatgtgctttcatgtatcttacactatacctcttatacaaaaagattttgtgattaaaacagaatggaarattgaaattatatgatgactataaactacagagttcattaaaatcggactggaaatgaatatctgtggcccttattgtattttgatatcatgcttatcagtgtttaagcactgtatgtgaattgtctcatttaatttcacaaa

SEQ ID NO: 204678 - DNA, 590 bp, Homo sapiens
attaataaaagtaaaatattttacacatgtgtattattctatctctataagagttacgactttacctttttcttcaaattatcttttgccacttatcatagtaaaattatgtactgtcaataaaatgataaaataatatcaacacaataacaaaattaaacattgaatttcaaaatttagatatgaagttcataaaaggacaaaataataattataaaataataagttaaaaaataataaataaataaaaagctgatttttttgaaaaagacaaaccaaayagccaatataataaaaataaagattggagtacattgggaagaaagtacaaatatacaaaaaacaaaattgcaaggaagaaacagcaattgaaacagaaaaatttataagcaaaggattgtcttgcataaaatatgttaatacattggaaacattgataaacggataaatttatagcaaaagcataaggatgtctgattgtctttaaaattattttcacaaaaatatcaacagaattcttttctgaagatagagaagttgattatgaagttaatctgaaaaaaaaagtaaagatagcaagaaagctgcga

SEQ ID NO: 204679 - DNA, 432 bp, Homo sapiens
atattcaggaattttttaaaagagtttcatttacttttcagttttagaatttcaatttgttcctttaattttttggttttaaatttccattttgttgcaaagratccctttcagtatactaattaatgttatatatttctgtaattctttgaacatcttgtccttgaattcttagaaagtatttataatagctcctttagcatctttgttaaagttgacattatgcctattacagggctgatttctattaactgctttattgcattagtatcacattttcctatttctttgaatatctcacaaattattactgtgtactacacattttggataatggattgtaaagaatataaattattctgtcttactctaagtgtcctggtgttcattctagcaaaaaaggtaattatttgttaaatggcttgaatttgt

SEQ ID NO: 204680 - DNA, 432 bp, Homo sapiens
atattcaggaattttttaaaagagtttcatttacttttcagttttagaatttcaatttgttcctttaattttttggttttaaatttccattttgttgcaaaggatccctttcagtatactaattaatgttatatatttctgtaattctttgaacatcttgtccttgaattcttagaaagtatttataatagctcctttagcatctttgttaaagttgacattatgcctattacagkgctgatttctattaactgctttattgcattagtatcacattttcctatttctttgaatatctcacaaattattactgtgtactacacattttggataatggattgtaaagaatataaattattctgtcttactctaagtgtcctggtgttcattctagcaaaaaaggtaattatttgttaaatggcttgaatttgt

SEQ ID NO: 204681 - DNA, 502 bp, Homo sapiens
ctcttttgtaatcactattatgtgaggcttcctcaacagtaagcccacctccttttagtgaggaaaagtgcatatgagcatccctgctgtaggttcttatcttgaagataacttttctcttccatacccaaattgctagtgttatacagtccgaggatgaggtatgggaacccaaacatgaagttgtcagtgtgtcttacaggaaaagtactaagtgaatgattctgtctattctgtggaggccaagygatgtaatctttagaaaaaatagacatgatgtgatattatttgggggattttgtaaaccttaaggatatatggtagcgatagtggacaatgtttctcagagacatctttcctcagtactagttttgagagctctcctacagaaagatgtgggtccacaggccaaggatacactctaccccagtcctaactctattgtcagatcatgaattatccatgcaggaatatgtctttcaagtacattgttttggattcc

SEQ ID NO: 204682 - DNA, 502 bp, Homo sapiens
ctcttttgtaatcactattatgtgaggcttcctcaacagtaagcccacctccttttagtgaggaaaagtgcatatgagcatccctgctgtaggttcttatcttgaagataacttttctcttccatacccaaattgctagtgttatacagtccgaggatgaggtatgggaacccaaacatgaagttgtcagtgtgtcttacaggaaaagtactaagtgaatgattctgtctattctgtggaggccaagcgatgtaatctttagaaaaaatagacatgatgtgatattatttgggggattttgtaaaccttaaggatatatggtagcgatagtggacaatgtttctcagagacatctttcctcagtactagttttgagagctctcctacagaaaratgtgggtccacaggccaaggatacactctaccccagtcctaactctattgtcagatcatgaattatccatgcaggaatatgtctttcaagtacattgttttggattcc

SEQ ID NO: 204683 - DNA, 398 bp, Homo sapiens
gtgtatcatcagaaaaaaaaatacttatatcaaagggcagaggaatttgatcctgtgagtgatcgttgytatgggaccattttatgcaaattaatctgtaaacatttagcagttagacaactgatgggagggggaagagtgaagaaaattagtcaggtggatagcaagaaaattactccatctgattagaaaaggataataatggtgttttcacgcagaccagcagcatcgtggtgtttcttcatttcatttatctttcatttctgcttgctttgaggtgagggtggggagtctgaggactgtgggatggctacatagtgtggtaaagctgatcagaaagagtaaggcaatggaatacatttcagattaagacatggctattcaggtctctcattaaa

SEQ ID NO: 204684 - DNA, 636 bp, Homo sapiens
ctaatttaaacctagtgaagtcttgagaaattcttaaaaataattgttgatctgaggtaatttgttttacaggagtagacttccaacgtaaagcacattatttctgcatctgttacagacatcatatttgtttaaaagcatttaggcagtaacagttttgctaaataaggcgagtacctaagaagcaaagcttcagagacggtaatgacaatgattttgttttaaaagctgtctcagagagggagtcgtatctccagtctgctttcctgtgaggtttaaaggaaagagcatgggcttagatgttagtggcaaaactggaacaggcacccagggaaataactcaggttggttcagtttactcatctgcagaatgaagaactactatcatcattcactgaatggtcaacaacatgtttgaccacccagtataacagatagcatgtactggacacttactgtctgtcaggttctgtactaagtcatgaatctcatttgattctcccaattattagaatccccattttaaataggaggacattgagcattgagggtcacagakgtcctagttcatattaaggctaagtagtggaaaagagattgaaacatatgtattttcaattccaaagcccttatgct

SEQ ID NO: 204685 - DNA, 525 bp, Homo sapiens
tacccaaggtggccactttatgtgaacttaaaggttcccacaggccagaagtggtgaytcatgactgtaatcccagcactttgggaggccgaggcaggaggatcgcttgggcccaggagtttaagaccagcctgggcaacatagggagaccttgtctctacaaaaaaaaaaaaaagaaaaaattttaaaagaaattagctgggcatgtggtgcacacctgtaggtccagctacttaggaggctgaggtgggaggattgtttgacactgggaggtcaaggctgcagtgagctgtgatcataccacctcattctagcactccagcctcggtgataaagaccctcattcccacagctcaaatattctgatagtagctttcaatccctgttccctgaaccttgggggtgggggctcacagctactataagacatgccagtccacatatgtacaaggtgaaatttgtatactgggtaacattatacacaacgcagagccaatcaaggaaatcataaaatcataaaagaga

SEQ ID NO: 204686 - DNA, 525 bp, Homo sapiens
tacccaaggtggccactttatgtgaacttaaaggttcccacaggccagaagtggtgactcatgactgtaatcccagcactttgggaggccgaggcaggaggatcrcttgggcccaggagtttaagaccagcctgggcaacatagggagaccttgtctctacaaaaaaaaaaaaaagaaaaaattttaaaagaaattagctgggcatgtggtgcacacctgtaggtccagctacttaggaggctgaggtgggaggattgtttgacactgggaggtcaaggctgcagtgagctgtgatcataccacctcattctagcactccagcctcggtgataaagaccctcattcccacagctcaaatattctgatagtagctttcaatccctgttccctgaaccttgggggtgggggctcacagctactataagacatgccagtccacatatgtacaaggtgaaatttgtatactgggtaacattatacacaacgcagagccaatcaaggaaatcataaaatcataaaagaga

SEQ ID NO: 204687 - DNA, 525 bp, Homo sapiens
tacccaaggtggccactttatgtgaacttaaaggttcccacaggccagaagtggtgactcatgactgtaatcccagcactttgggaggccgaggcaggaggatcgcttgggcccaggagtttaagaccagcctgggcaacatagggagaccttgtctctacaaaaaaaaaaaaaagaaaaaattttaaaagaaattagctgggcatgtggtgcacacctgtaggtccagctacttargaggctgaggtgggaggattgtttgacactgggaggtcaaggctgcagtgagctgtgatcataccacctcattctagcactccagcctcggtgataaagaccctcattcccacagctcaaatattctgatagtagctttcaatccctgttccctgaaccttgggggtgggggctcacagctactataagacatgccagtccacatatgtacaaggtgaaatttgtatactgggtaacattatacacaacgcagagccaatcaaggaaatcataaaatcataaaagaga

SEQ ID NO: 204688 - DNA, 393 bp, Homo sapiens
atttatatttccctgatgattaacaatgtggagaaccttttcatataccttctggctattttcatgtcctctttggagaaatgtccattcacctgctctgctcattctttaaatcaggtttttttgtgtgttatgagattgtacaagttccttatatattttggatattatccccttattagatgtatagtttgcaaacattttgtcccattccatagattgtgcaatctatggaatatttcccttgctgtgcagaaacatttaaatttgatgaaatacacttgtctgttttttgcatttgttgcctatgcttttggtgttatatccaaaatattatttcaagaccartgttgagaaactcttttcctgttttctggtaggattttaaagttt

SEQ ID NO: 204689 - DNA, 572 bp, Homo sapiens
aatgtacttccttacctttagctgatatcaagaatgtgtctcccaacacagggctcagtattgagagggcagacttcatctacttacagagatcactgacccctgttgcattaggcagcttattttagactaaatctttctcaatacagatgctcctcaatttccaatggtgttatgtctcaaaaaacttatcataaataaaaaaaatcacaggtcaacaatgcatttaatggcctgataaacccatcttaaagtcaaaaattgtaaatgtaaccatcataagttggagaccctctgtatttgtgaaagtargaataggatgttgagagcaggaaggagaaaattaaaaaaaaaacaaaacaggtaaacattttaaacaattattttattaaacgatcatcttttacatgtcatcagaccttacccctgaagtgcaaaaaacagtttgaggtattaaaactgaagaaacatttgcacatattttgtaaggtttttcacactataataactgtaaaattcagtataactaaatactccatataactgcagatttataagaacaaagttgtaaa

SEQ ID NO: 204690 - DNA, 588 bp, Homo sapiens
gccatcagaaaatggatatcaatagaattagtatatcttgttttagaaaaaatccataatgtataaagagcactcagatcttgtagattgacctgatctgaaataaagtgccgaggttgagtcacagtgtcacaggccaggtgacttagctaacccattacttctgtctcttcactcaagacttcagtgagtcctaagtctcatttcaggacaggagcccgtgggggtacaagaactttgcccttgtacccttgaactctctgggcaaatgaatactcccatgtattagtccattttcatgctgctgataaagacacagcagagactgggcaatttacaaaagaaagaagtttaatggactcacagttccacatggctggggaggcctcacaatcatggtgaaaggtgaaaggcacgtcttacatggctgcagaattgagaagagaacttgtgtagggaaactcycctttataaaaccatcagatctcatgagacttaatcagtatcacaagaatagcatgggaaagagccacccctatgattcaatcatctcccactgggtccctcccacaactcgtgggaattgtg

SEQ ID NO: 204691 - DNA, 561 bp, Homo sapiens
ttaatttattctttcataaatatgttcttgagtacttttactctgtgcttgggcccattcacatagaagacataaaaacgtttggcagaaggaaatacatgagctaatgtatttttgaattatattgaccatagaattttcttcataagtagttggtatttctcttacaaatgttctactctagaaaagaataaatttctattaagaaaatgaaagaacaaataaaaaagaattagaccagtttggatgatttactagcatgttactttttaaaatacatagttgggtgtccctaaccccgctacccatgatcctccagtctttgtgaaaccagtccttagggggctgggtggtacactcttggtactctgggacagaatgcagaattgcaagattaagagaaaattcgaaggtcatttgattttgccccctatgcaacaatttaacacttaaatcccctctggaacatacctatcaagtggtctttctcattttgtgtaacacgccccaacccccaccaacaacctcaaaatggaatarcaggcagtatttatttaaaga

SEQ ID NO: 204692 - DNA, 357 bp, Homo sapiens
aaaaaaagagctagaaaagtgtgcaagtcacttcatacctgaattcttgacatttgactggaattgttctgattagaccatggtcctcaaggcatttcacagktttttttaagtctgcgctgccttaggggattttatccttgagacatccactggcttaactcaagtttccttcaaaatatgtagctaaatacagctgttcagctaatagctcagaggttctttggagaacaaatggaatgttatttactaatattacttgtggcatgttagcacttttgtgttctgccaagtgcttttgggtccattctcaaagccgccatggctaagctggtagtacgttggcgatggcccata

SEQ ID NO: 204693 - DNA, 357 bp, Homo sapiens
aaaaaaagagctagaaaagtgtgcaagtcacttcatacctgaattcttgacatttgactggaattgttctgattagaccatggtcctcaaggcatttcacagttttttttaagtctgcgctgccttaggggattttatccttgagacatccactggcttaactcaagtttccttcaaaatatgtagctaaatacagctgttcagctaatagctcagaggttctttggagaacaaatggaatgttatttactaatrttacttgtggcatgttagcacttttgtgttctgccaagtgcttttgggtccattctcaaagccgccatggctaagctggtagtacgttggcgatggcccata

SEQ ID NO: 204694 - DNA, 499 bp, Homo sapiens
ctatttgaattggtttgggtctcttcctcatattagaagtttatatccataaaaatataccatcagagctacaaaaccatcttagaaaacatctaactaacaaatgtaaaatgcgtgcattgtacttctgtaaaaggctccactcactagtatccaacaaaccatttcacttcccctttctccttttgtcccttctgatgatgctctccctatctccacccctaaactcaaagtgtctaagatgacaattacacttaggttgggggagtggtgagagaaaagagtctataaaaccttaaaagattgttcccagaggcattcttatacctactaaccccatgtctaccatgcttgtgcaaggagaaacattataactgaaatccatgccgtgctaggtaagaaatcagttctgaaatatgaatgcattgtggaaacttayacaaatggtcgtatatttaattgctttttgaagagaaaaccagactgcaagaagtctata

SEQ ID NO: 204695 - DNA, 628 bp, Homo sapiens
actcccacatacaaaacaaaatgaatctagacacagaccttatacttttcacaaaaattcgctcagaatggatcataaagccaaatctaaaatgcaaaactggaaaactcctgggaaacaatgtagaaaatccagtttacattcggtttggtgataatcttttttgtacagcaccagaaacataagctataaaagaaaagattgataagttggacttcatgaaaatttaaagctgctctgtgaaaaacatgtccagagaatgaaactataatccatagacttagagaaaatatttgcataagatttatctccaaaggactggtatacaacatatagaaagatatcttcaaactcaacaataagaaaacaaacaactcaaatataaaattgtcataatatatgaacagtcatctcaccaaactaggtatataagtggcakgtaataatatgaaaagatgctaaatatcatatgccattaggaaattaaaatgagataccactacatacctgttaaaatggtttaaatcccaaacactaacaacattaagtgctggtaagaatgtggagcaacaagaactctcattcattattgatggggatgtcaatagtacagccactctggttgata

SEQ ID NO: 204696 - DNA, 328 bp, Homo sapiens
cgatgaattcacgtcagctatttctgatagtagctactcctctgcttttcagaaggaagctcagtccttcagggctttcacactacccacttgaataatacctcccttgcaagtgaatacaataaaacttactctttaactggtatttattaagattttcacagcattcattaaactgctttccgaaggctatctcattccactccaccccaaaacaccaactttctgaactctcattttctccgaaggctcartcctttagaacccaagaaatcattcagttcaaatgcaacacttttcagctgaggacactgtgatgcaatgagag

SEQ ID NO: 204697 - DNA, 504 bp, Homo sapiens
gaacaagataactatgtcttaaaagcatgaataagggtggctgcttcctcttttatttcactcaagccatgaagtaaaatttcctgctcttcttattcccatatggkgagtcatcctgagcaaaatctggggtggttctgggtctgtgcagcagacctagagttgggtccatgcatctgggctggtgaacagtttcatcgtctgttcttcacacccacttgtatccctcaaggaactgtcaatatccatgccccaaagtttgttcttcacgcccacttgtatccctcaaggaactatcaatatccatgtcccaaagtttgttcttcacgcccacttatatccctcaaggaaccatcaatatccatgccccaaagtttgttcttcacgcccacttctatccctcaaggaactatcaatatccatgtcccaaagtttagattcagggcacagtcctttcccagatgggcctgctctgggagacagaggatttgcagagataaatgg

SEQ ID NO: 204698 - DNA, 504 bp, Homo sapiens
gaacaagataactatgtcttaaaagcatgaataagggtggctgcttcctcttttatttcactcaagccatgaagtaaaatttcctgctcttcttattcccatatggggagtcatcctgagcaaaatctggggtggttctgggtctgtgcagcagacctagagttgggtccatgcatctgggctggtgaacagtttcatcgtctgttcttcacacccacttgtatccctcaaggaactrtcaatatccatgccccaaagtttgttcttcacgcccacttgtatccctcaaggaactatcaatatccatgtcccaaagtttgttcttcacgcccacttatatccctcaaggaaccatcaatatccatgccccaaagtttgttcttcacgcccacttctatccctcaaggaactatcaatatccatgtcccaaagtttagattcagggcacagtcctttcccagatgggcctgctctgggagacagaggatttgcagagataaatgg

SEQ ID NO: 204699 - DNA, 504 bp, Homo sapiens
aagttgacactcaacattaagcatcacactgaccctgcttattagccggaaggtaatgaaggaggctgactttgagaacaactcacatcttgagaggcacccttgcaagagcttcaagtaaggtcttctttatattaatactatgtccttataagaggagactgtttctcttttaagggaaaagargcttctttgtcagtcagagggttttaggagaatttgagattttaagattctcaagctcatctatccaaatatccctatcctaggtctcatagtcttactctttacctatcatggcccagactttaatataagagacctgtcaagattatatatagtttcctttgaaactatgtctttttaaacaatcagatcctgggctttgttttcagcaaagtctgccctgtgacagcaggagatgaaattatcctttaaaactgccagggagacttagtccatttatgttgctaaaaagaaatacttaaggctaggtcatttata

SEQ ID NO: 204700 - DNA, 537 bp, Homo sapiens
cagcattatttgtaataataaaatataagaaattacctaaatatccatcgactgccattggtagtatggttatacaatggaattctacacagcaatgaaaaggagctagagctacatgcaacaacatggatacaactcacaaacgtaagacttagtggaaaaagctagacacaaagttaacaccttctatatgtggttccagttatataaaaccaaaaacagacaaagaaaaagtatagcatttaggaatgaatacttagggaatgaaagcatacaataaggtaggaaagtgatgagcataaaagtcagaatagagattgcttttgggggagagtctgggcttgagtagaaagggacagtgcagcacctcccaagtactggcaatggtcttgctcctggtggtgacacagttgttctctttacrgtaattcagctgtacattgtgttacgctttctgagttataatacaccataaaaaatgatattaaggcaacccaacaaaaacattaatgcctgggccccactccagaccagtga

SEQ ID NO: 204701 - DNA, 537 bp, Homo sapiens
cagcattatttgtaataataaaatataagaaattacctaaatatccatcgactgccattggtagtatggttatacaatggaattctacacagcaatgaaaaggagctagagctacatgcaacaacatggatacaactcacaaacgtaagacttagtggaaaaagctagacacaaagttaacaccttctatatgtggttccagttatataaaaccaaaaacagacaaagaaaaagtatagcatttaggaatgaatacttagggaatgaaagcatacaataaggtaggaaagtgatgagcataaaagtcagaatagagattgcttttgggggagagtctgggcttgagtagaaagggacagtgcagcacctcccaagtactggcaatggtcttgctcctggtggtgacacagttgttctctttacggtaattcagctgtacattgtgttacgctttctgagttataatacaccataaaaaatgatattaargcaacccaacaaaaacattaatgcctgggccccactccagaccagtga

SEQ ID NO: 204702 - DNA, 490 bp, Homo sapiens
gcatttctgctaataaatattctaaagtttctcatgtattaaatatttatgttccaaactaattattgagagagaattcttcatggatctttcatatttctacatgtcttgcaagcccaggcattgattgactttcttctgggactatcttttcaatgattttttttaataacatgcagctttgaaaagagagagatagcatcttcctttggagcaaggagcaagtttctttactgtgcagtgttataatggtaatgtcttcaatcatgacaaagctcagacaagcttttggacaattatgaatgagttacttaagctaytggctctttctctgtaattaaacttaatatatatgcatgcatatcgcctagcattaggacccgaggtactggtgccaacattgataatccacagatacaaagctattgctgtgagtagtaacattctctgtttctcacccagcagtgtgtgtcttctgccagcattcatg

SEQ ID NO: 204703 - DNA, 479 bp, Homo sapiens
ctaaagtttctcatgtattaaatatttatgttccaaactaattattgagagagaattcttcatggatctttcatatttctacatgtcttgcaagcccaggcattgattgactttcttctgggactatcttttcaatgattttttttaataacatgcagctttgaaaagagagagatagcatcttcctttggagcaaggagcaagtttctttactgtgcagtgttataatggtaatgtcttcaatcatgacaaagctcagacaagcttttggacaattatgaatgagttacttaagctactggctctttctctgtaattaaacttaatatatatgcatgcatatcgcctagcattaggacccgaggtactggtgccaacattgataatccacagayacaaagctattgctgtgagtagtaacattctctgtttctcacccagcagtgtgtgtcttctgccagcattcatgaaattgtagc

SEQ ID NO: 204704 - DNA, 615 bp, Homo sapiens
tacaatgaaatctataaaacactgatgaaagatattgatgagaacacaaaaacacaagaaggtattcgatgttcatagattagaagaatcaatattgttaaaaggtccatacccccaaaacaatctacagatttaatgtgatctctatcaaaataccaatgacattgtccacagaaatagaaaaataaatcctaaaatttatatgaaatcacaaaagacccagagtagccaaagctatccaaaggaaaaagaacaaaactggatgaatgacattacctgacatcaaattatactacaaagctataggaatcaaaacagcatggtactgtcataaaaacaggcgcaaaatccaatggaacagaatattgaacccagaaacccattcatacatgtacaataaatcmatttttgacaaaggtgccaatagcatacattggggaaaagacagtctcttcaataaatggtgctgagaaaactcaatatccatatgtagaagaatgaaactagacctctatctctcactatatataaaaatcaaatcaacaaccccaatgttaattaactgatgagtggataaatacaatatggtatatcatatatcatatatatgatatc

SEQ ID NO: 204705 - DNA, 430 bp, Homo sapiens
gagtttttttaccttcagattatttcttcttgctcattaacatccttttctttctgactggataactccttttaccaattcttgtaggacaggtctggtgttgatgaattcctcaggttttgtttgtctggcaatgtttatttctccttcattcttgaaagatacttttgttgtatatactattctagggtaagagttttcatctttcagcaacttaaatatgccatgccattctctcttggcctataaggattctactgaaaaatatgctgtcaggtgcactggagctgcattgtatattatctgtttcctttctattgctacttttgggttattktgtttattcttgacctttttggagtttcattattaaacgcctagaagtagtcttctttgggttaaatctgcttggtgttctacaaccttcttg

SEQ ID NO: 204706 - DNA, 449 bp, Homo sapiens
atatgaaaatatgccttggtctaccgatgtaatagatacctcaaagtttaaaaactaaggggtagactcacaagaatatttgtttcctttgatgataattacgaatttacttatttcctttcttgacggctctcctcccggtttacttgtgtgtagaaagaattacactttggatagagttgaartagaacagcctagcaaattcagactcagacaagcacatctaatttaccttttgatttggttgttgcttctcttcttgtactatggtgctcaatttggttttcacgtagcacaaagtgttttaactgtcagtcatacaaacaagagtcaggaagggcctattaggtcatccagtcgattttttcagcagagtaggatagattactgatgttaaattgttttccttctgttttccctccggctagaattgaacatgattcttgcta

SEQ ID NO: 204707 - DNA, 449 bp, Homo sapiens
atatgaaaatatgccttggtctaccgatgtaatagatacctcaaagtttaaaaactaaggggtagactcacaagaatatttgtttcctttgatgataattacgaatttacttatttcctttcttgacggctctcctcccggtttacttgtgtgtagaaagaattacactttggatagagttgaaatagaacagcctagcaaattcagactcagacaagcacatctaatttaccttttgatttggttgttgcttctcttcttgtactatggtgctcaatttggttttcacgtagcacaaagtgttttaactgtcagtcatacaaacaagagtcaggaagggcctattaggtcatccagtcgattttttcagcagagtaggatagattactgatgttaaattkttttccttctgttttccctccggctagaattgaacatgattcttgcta

SEQ ID NO: 204708 - DNA, 562 bp, Homo sapiens
tattttcaataatcatttaagttcatagagaaatattcttcatattgcattcaaaaaaatcatcagtataaacatattttaatatataaaatatgtatacatacataggtgtttgtatgatattttccccttgcccatcatgtgggtacttatgaatccttccaaagcctattagaggtcactgaccctgtgaagccttcccctgggtstagcagcagtgacagatccaccaagttctaatcaagatcattgtgttgactgatatgataggtcacccaactcatacattaagatgattgaaattactgaaaattggatggacttgaccataaatatattgatttaatgccatacatataataacatgcggtttttctttctgtaattttcttcttttgattgttattactccattccatagatccagtgtctgtggactatttctttaaattgcttttcacgtaaaggaaattggggcaataagtttattaattcatttttcactgaatgttagatttttttatttaattcatatgaaatgagaattgatgactgaagaaaa

SEQ ID NO: 204709 - DNA, 550 bp, Homo sapiens
tattataaggatacaaaaatctaccaccctaaaaaataaaattcacaatatatgatattcaatacaaataataggcatgtgaagaagcaatcaattaaaacagatccataggggacaaggttgttagaattagcagacaaataaatcaagacaattattagaactatattctatatgttcaaaaagttgagacataacaaatatwttagaagttaactttctaaggatggaaactaaatctgtgataaaaatacaatagacagaattaatggcagattagaaattgcagaagagttagtgaacttgaataaataggaacagaaattgtactaaagaaatacagaataagagaataataataatgaataaaatatcagttaacagtgataaagtcataagtggcataatttacatgtaatcagagttcccaaagtagataaggggagagaatagaaaaatattaaagaaattatgattaaaatttttcaaaatttgataaaaatcataaatctaaaatagaagaatctcaatgtgcttcaaacaaaaaaat

SEQ ID NO: 204710 - DNA, 607 bp, Homo sapiens
gattcccaattcattatcaatcaacttatatttgttatatttaggtgacattaggcattgcaactaatcccagtggcttaacataacaagtgcttatttctcactcacatattatccattgtcagtggccagagttttcctccatgtggtgaacatatagggacctataactctccaatttaatgttgctgtcttaacacttggttcccaatacagaaaactgtaggaatacagcagacatagaaaccttaagctatcttgggccacaaatggcatatgtcgcttttgttcacagtgcattgattataactagtcatatgaacttcatataacatcatgagagaatgagacatgcacgagaaagcatgggatatatgatgagtactgtktctttatagcacacaatttaaaattagtgtgttatggcacacagtctaaaattaatgtgcttaattttctctatttataatttgaacaatgccaccaactaaacttatttttcattaattcccagaaagatgtcttcgttctttttctgtctccatacttctcccataaactcactatgctacttttgctcatttcatatttaattcttaccagctac

SEQ ID NO: 204711 - DNA, 544 bp, Homo sapiens
ctccagaacaaaggctggctgttaaagagtcttgcttggaaaatatccaggccctagtagtcccacagtgttcagccattggctacgagctgccacaaaagagcctggcctcccttggaaactgaggcagaggctgatgtgctaataggtggaggctgctagctaactgcactccttgtggctgaagggcaagttatttctttttttattgtttaagtttctttagagacagggtctcrctctgtcactcaggctggagtgcagaggtgcaatcatagctcactgcagcctggaactcttgggctcaagtaatcctcctattgtggcctcccaaagttctgagattataggtgtgagccatgggctcagccagaagttctttctttacaggagatgagaggtccagttgcacagcaatcaaactatcctagtatggacaggagaatggaatggttcaagaatgggaatgatacaccgaagtcaccctgaagctgctgggaaatgacagcaaaacttctgtctcagggtctcagagctgagatct

SEQ ID NO: 204712 - DNA, 539 bp, Homo sapiens
cctcctgacagcacctggccgggccagtaaatgacggagtagcgaatcgaacctccatctgtcgtctctccatcttattacactaaatggacgagtgaaatcctgcacgggagagcaccaaccgtgttgaccagaacaaggagtcagctggctttgggttcgaattctgatcctgctcctaactggatacgaggctttggtctgagccccaactgcatctataaaatgggcgaagcattgctgttgaaatgaaggctgggaggagtgaaatttctatgaggggtggagcgctcaggagttgggggtgtcttgctctctccgcgcactgcggacctctggcgccccctgttggccaaaggaggatgtcgcagacactttctggtgaaaagttgttcttgggtggggagtgccgtcactgtcactggtcccttggcagggccacggcgttccctcttcctattcttttcttccctaccttcccccacatccctcctttaaggtggccaagaagagtgrgagatgggaaaattcagaactca

SEQ ID NO: 204713 - DNA, 551 bp, Homo sapiens
tgtccctgcctagagtctctggccttagcagagaatggaacctatgaaccctttgaacatgaagtcataattgtggtctcatttgtgttctaactgcaaaggtcagtacaggaataaagggggtttcatggatgatcataaatgcctcctaakgatttagctgtgctctatctaatccaagaagcctgtactaaccacatccctacattttctgctgggtaactgaactcctttggagattgtatgctgcaggacattgcacaattaaagctgaattattattatttgcaagcagttttccacctacagtcctattgagtcacttagctgactctatttctctctccctaggagactgcccaattgtctccaacagcacttttttttccttttttgtctttccaggcaacaatcacataggagtggtaggactcagagaatggtattaatacacctaagcacaccacccaaaatgagaaggcatctggactttcggatgcctataggatatgtaagctcctataaggctgcacacttagactcgagatcat

SEQ ID NO: 204714 - DNA, 614 bp, Homo sapiens
cgctttctcctcgtgaaatatttacaggaaacatacatttaaaatggaatgaaagcagaaacatacagtaatccaagcaaaactcaacaacgtccgttctttattttgcacaagacggtctgcattacccttgccattaaaaaaagactgaaaatctggggctgaagtaaaacacccatgacatgccacctggagctaggaatgtagctttgtgtcagcaggagaccaagtgtgagtggtggttctggcttgctaagtggataccagagctttcgttcccatttatgagcttcctaggttcataaaacggacagaacaaagaagtctgtcctatgtttatttttcagagtagtgtaacatatgtttctcaagaatggtctgcatctttagcatcagaatcgccagagaaatttgtttaaatagagattaaagggatataggtcagatcaaaatctctggtagttggggacccaggaatcttcattttaaaacktaaaccaagtgattcttacgctcaacaaagtgtgcaggaattggcccgtgatcttggctttttaaccacaccatgcctcaatttcccccttctgcacaagacaacaagagttcctggatat

SEQ ID NO: 204715 - DNA, 396 bp, Homo sapiens
gaattcctggtcgtattgttaccggtggcaggtgtcctggttcttggcattttgaacaaagaattggacaaaacacacaaacaaagcaaggaaagaatgaagtaacaaaaacagagatttattgaaaacaaaagcacactccacagggtgggagccggcttgagcaagcggctcaagagcactggttagagaattttctagggtttaaataccctttagagatttcccattggttacttggtgtatgccctatgtaaatgaagaggatgaagtgaagttacaaagttatttacttggtgtacgtcctatgcaaatgaagaggatgtttgctaccgtagctgaagtgaagttacaaagctctttattaayacttgggtttagaaggttggggttttt

SEQ ID NO: 204716 - DNA, 571 bp, Homo sapiens
ttgggtttgtttttttttttttttagagacgagtctcggcatgttgccctgcctggactcaaattcctgggctcaagccatccttctgcctcagcctccccagtagctgggactgcaggtgtgcaccaccagagacttgctttttaactctatatcctcaatgtcccaaagcctaacatatagttagtgctcaaaaaatctttattcattgaatgaaaggatgaatgaatgcacctgtggatgattgtcaagatgttgattgggtctctcctgagcctatttctatggacagcaaggagatacactgttttactcagaatgggaataacttttctcaattcctgggggatcatttagcaattttgggataggatttaataattgctccccacagacttgaagcagttaagtggcagtaawttgagagagatggaggtaattacatacctggaaacagctatggaatggagagagagagcccagtaatgatggtgacaggggtggtgttgatggctctggtcctagaggtgaccaaagtacatagcatatgtaccccctgtgcaacatatta

SEQ ID NO: 204717 - DNA, 389 bp, Homo sapiens
tcaaatatgagagtgattatcaaccaaagttagataccccagccctggcagtcaaactcaaaagcaagcttgcacgccgtctctcaagtctctcagcattctccccaaacaagaaatcaagtgccagagcttatacacttaatatttgagaccaaaaaagaaaactccaaacragagatttactcaaatgtgcttgtctcccagttactttataagaagtaaatccatgtcagaagaaaagatgcccatgtcttgttctgcatgggaaataagtgccatgtactaaaagaagcctaaaaatggtggcacaagtttctttaaatggctaaaatccctcaaaatactgaacatctcatcagaccatcaagagttatgttttttgtcacaca

SEQ ID NO: 204718 - DNA, 446 bp, Homo sapiens
attctcctgggtggggaaaaagaacactgaaattcttctgggtcggggaaaagaacactgaaatttgcattattacagtcaatatgagtgactagaacctacgggctgatgaattccaaggaaattgactgcacacatttccataaagtccagattagtttgatctcctaggatatgcttcatttaccaaaaaaaacacggggttttctttttcttttttttttttttttttggktttggttttgttttctgatttactcctcccactcctaaattcccttgccttattcacagaccctgacctcttttgctagatgccaagggaaggatttagttagtatgtccttggatgattgtgacagtagaaaatatctttttctttgttaaatctttgctactgagacaaaatagcaacttattcttgagagatagaggacctctttcag

SEQ ID NO: 204719 - DNA, 446 bp, Homo sapiens
attctcctgggtggggaaaaagaacactgaaattcttctgggtcggggaaaagaacactgaaatttgcattattacagtcaatatgagtgactagaacctacgggctgatgaattccaaggaaattgactgcacacatttccataaagtccagattagtttgatctcctaggatatgcttcatttaccaaaaaaaacacggggttttctttttcttttttttttttttttttggttttggttttgttttctgatttactcctcccactcctaaattyccttgccttattcacagaccctgacctcttttgctagatgccaagggaaggatttagttagtatgtccttggatgattgtgacagtagaaaatatctttttctttgttaaatctttgctactgagacaaaatagcaacttattcttgagagatagaggacctctttcag

SEQ ID NO: 204720 - DNA, 518 bp, Homo sapiens
acttctagctttgtttttcacttcattgtgaggttaatgtttttgacatttctctccaaaaggcttgaatgaagtccaaatatttcacttcatcatttaaagtcttccatgatctgactgcaaatttattagcagccatatttcccttcagccatcatgaaccatgtcacatttcttgttcatgtctcttcracttcacatggccttgctactcatcactcaagtataggcaccatgaaagctgatctccagagactaaagcaatgggaagactttgaaatgaagaaaagcactcattcatcttagcgcatagtaaatgcttagcaattgttctttggacccaatttaattaattaatttaatcaattaataagtaaagttaaaaaccaccttggaggtgttttatggtttgaaaactcatgttaaaatttaagtaccattgacttgtaagagttaggtcacgagggttcccgaatcatgggtgggatcagtaccaccataaaagggcaagttcagcc

SEQ ID NO: 204721 - DNA, 600 bp, Homo sapiens
aattgtatttgtctgtcaaagtccagcaaacagaacaagacataacttaagccaaattaagcctttaaataagatcccatggacatccgaacacaggatattgctgaagtaaaggattcagtgtaacatcccatctccccatttgctccttctcaaccctcatggaatttaatctggttagttggcaattccccatatatatgtaaacataatctaatttcagacctccaaggcctaatccctgataatcagagaagacagacttaaattttacttcctaaaatgactctggacagaatcataggtttataagcagctgtggcctatgcatagaatagagatataatttatcaccaaaccaagctatttttgagagtgtaaaggggctcagtatagttactgtattagttacctattatttctgtacacaaatttagtgacttaaaacaccacaaatgtattatcttacagttctagaggtcagaagtccaaaacragtttcactaggccaaagttaaggtgcctggaagactagcttcttctgaagcctgtaaagggagaaactgttctcttgcctttttcagcttctagaagctatct

SEQ ID NO: 204722 - DNA, 563 bp, Homo sapiens
gacagagcaagcattagaaccagagtcagctatgacaggtatgttgcaattatccaaccaggaatgcaaaacaactatgattaatatgctaagggctctactggaagaagtacacaacatgcaagaacagatagtgcagagagatggaaattctaagaaagaatcaaaagaaagcctagaggtcaaaaacacttacaaatgaagaatgcctttgatggactcattagtagattggacacaactgaggaaagaacctctgagcttaaagatatgaatagacatttccaaaacttaaaagtgaagagaaaaataaaattgaaaaaaaaagagaacaaaatatccaagaactctgggacaactaaaaaagatataccatgaacrtaataggaatgccagaagaaaaagacataaagaaaggggaagaagcaatatttaaagcaataacgactgggaatttcctccaaattaatgtcagacagcaaaccacagatacagaaaactcaaaagatcagcgagcaggataaatgcaaaaaagcaaaacagaaaaacaaaatgaaaacccc

SEQ ID NO: 204723 - DNA, 508 bp, Homo sapiens
cttcttctctctcaattttcaaacatcacctctcatatcttatgagataaggtgatcttatctactctcatatcttcaaatgtcatctaaagtcagtggttttcaaaattatatctccagcctagactactcttctgagtgagagacttataggtccaaatgtttatagtatttccattttggatacttggatgtgttagaagaatttcaaatacagcatgccccaaaataaatgtattatatttaaccatcttgccctaaaactgcttctcctctagagctccctaacataataagtggtacccacatcctcccagatgctccagccagaagcctgtgatccaaccataaccgatatctcccttcaytatctacccccaaaaaatcagccaccaaacctagtttaccccaccttctaaatctatctgttttccagttaacgtcaccatcttgtctcaaccagactactccagttactttctggctagttatctctaacccacttttc

SEQ ID NO: 204724 - DNA, 591 bp, Homo sapiens
gtgatactccatctcaaataaataaaataaaataaaataaaatgcataattctaaacctaacagtaattaaacataaaagaattattagtactgttggaggatataaataataaattttaaaaagaggtaaatggctattaaacagagcaattaaatgtttgagaattaggaaacagaggcaactataaaagcaggctccaaaaaatttatattgaaatggttaatatcgaaaataatggaactttaagaaagtatgcatatgttataagaaaatatccaactcgggaattcagatatctaaccacctaaaatatcttgttgtaccgaaaagaaccagttttccctcaattcatagtcacatttagcagttatttgtacatttttaatgtttaatatatttttaattaaaaatattaatgtgttgttcgatcagtatttactgagcatttaactaccagmaattaccgttctggctccgtacaagtacaaaactgcatgggtcatggtttttgccctcaagcaaagacatacattataatatgattttaactgactgtataaaaagctgtgtgatcatagggccatgcaag

SEQ ID NO: 204725 - DNA, 471 bp, Homo sapiens
catggtttacaaatattttctcctggtctgtagtttaagttttatcctctttacaggatctttctaaaagcaaatgtttttagctttgatgtggtctgaattatcactttttaaaaaactgaattgtgtttgcgatgttaatctaaaaactccaccaagtctcaaatcctgaagattttctcctacttttttttaaagagaagttttgtatttctacagttttcatttaagtccatgatctgttttaagttaaattttgtacaagatgtgagacttagattgatttttacgatggcctgtgaacgtccacttgctctagtaccttttgctgaaaaggctatcttttctccatccartctctttttcactttgtcaaaatcagtgaggcatatttttgtgggtctatttattgttttcaaaatttttatttcattgatttatgtgcctttccctctaataccacacagtttg

SEQ ID NO: 204726 - DNA, 582 bp, Homo sapiens
cagctgtgaattttgttgggtgaatgaatacattctgtaaatagcagcaggaagcatggaggtaaaacccagggcatcccctggtgaaggaagagaaaaaaagcgcagcatttggagtcagtgagtctgggtttggggtctaactccagcacttactagttgtatgactttggaaaagtcatttatcatttgtaagccctgttttccatatctgtaaaatagagatgacaataaataccttgctgtattagtccgttctcacacagctgataaagtcatacccaagactgggtaatttataaagaaaaagaggtttaatggacttacagttccagtggctcgggaggcctcacactactggcagaaggcaaagacgcatcttacatggtagcagacaagagagaaaatgagagtcaagcaaaagggatttccccttataaagccatcagatacttattgatggtttgatctccctgcaaaacagaacckgctgtgaggagtgtagttagctgacagcctccagctgctgcacctccgagatccactgcagtagtgttctcactgaggctgtggccaatgaag

SEQ ID NO: 204727 - DNA, 592 bp, Homo sapiens
ccatcgcataaaattagatgtggaattgcctacttatggcatcatgtaggtgcacaaaaagttgattttggagcattttggattttagatttttggattatggatgctcaacctgtactgagtgttttgtgtgtgtgttggtgggggggcttacataagttcagataacttgcttttgctttaacttgtttaccagcagccacatctggtcttgatgaagaaggttgcacatctaaccagaagactggaactttgagctagatggggtaaatagatgaggctttgggttggctgccttgggaaggggcatgaatgtgctttatttttggaagatttaaggggctgttgtggatagttgttacatctacytgcccagcatcttttttccttttcaatgcaggaataaatgtctcccactgatacattgcttaatcatttggtccctcattgcctgctgcagaaatgcactgctgacccaggctggcccttctaaatatatcatcatcctggacccagtaatgagttcatcgtcaagcacctgtcccaaacagggccaacaacatcctcacttagggatttatatggatgccaa

SEQ ID NO: 204728 - DNA, 493 bp, Homo sapiens
aatcgaccattctgcctctgccactagcctcatttaacttatcctcgggactttagtctcctgtaaaatgaaagggttgggtgagattgaaagtcagcaaatgcaaactcattttattggaagcggttgagatgcygtgagcggtggtagtaacaggatgaataaactcagcctctgccttcttcctgtagctgggacagccatgaaagcctccagtccaaatgcaaaggcaagtgggtaggacaggccttctgtggtcctcagtcagcctccttccttggccactcctgccagtgtgcagtggactcctgggcagaggccttctcagtaaggcaggagacccagtccagaagccagcctaagggaaaaccctaatagatatgcttccaagtaaaaaaataataataattctgtccagccaaatgacaagagactaggacaaaaatatttaaaattcacatggcagatacatttttataacaaaaaattggat

SEQ ID NO: 204729 - DNA, 493 bp, Homo sapiens
aatcgaccattctgcctctgccactagcctcatttaacttatcctcgggactttagtctcctgtaaaatgaaagggttgggtgagattgaaagtcagcaaatgcaaactcattttattggaagcggttgagatgccgtgagcggtggtagtaacaggatgaataaactcagcctctgccttcttcctgtagctgggacagccatgaaagcctccagtccaaatgcaaaggcaagtgggtaggacaggccttctgtggtcctcagtcagcctccttccttggccactcctgccaktgtgcagtggactcctgggcagaggccttctcagtaaggcaggagacccagtccagaagccagcctaagggaaaaccctaatagatatgcttccaagtaaaaaaataataataattctgtccagccaaatgacaagagactaggacaaaaatatttaaaattcacatggcagatacatttttataacaaaaaattggat

SEQ ID NO: 204730 - DNA, 612 bp, Homo sapiens
ctcttcctttcccaagttagctgctccttctagaatcaaatcccttgggcttttcatgaagagtaggaattctcaacttcagcaccaattaatattctaggctggatcactctgtggtaggggctgtcctgtgcattgtaggatgtatagcggcatccctggcctctactcactgaataccactttcactgtccccctctccccagtaatgacaataaatatatctccaaacaatgtcaaatatggtctgggagacaaaactggtcccagttgagaaccacggacatagagggcattgttgaactgattgtgccagtgccagaaagtaatattgatagaagatgacctgatattttctatccttgggaaaagcctaaggggatacatacatatatcaagagtttctccttagtatgagccagtcacctagacatgaacctcagtgtccttgttccccctttatctcacaccccgtccyaaaccatttctcataacaaccattccaacttgtaaatatctcttctgccttctcatattgataagaccaaaatactcactttaagctcccagagtctagctagaatcgacaaatcagcatttgttgtgggtctg

SEQ ID NO: 204731 - DNA, 615 bp, Homo sapiens
tgcctgcaatcccagcactttgggaggcaaatgcaggaggaccgcttgaagccagaagttcaagaccagggcaacatagtgagaccccatctctacaaaaaaaaaaattagctgggtgtggtggtgtgaacctatagtcccagctactcaggaggctgaggcagggcaatcccttaggcccaggagttagagggtatagtgagctatgaacacaacactccagtctgggtgatagagtgagattctgcctcttaaaaaacatttgaaaatatttttaaaaagaaaacttawaaggaaagcacatttctgttctaggtttgctctcacattccccctgaaattcggtgaagaggggaataaactgctgaatgggtgtagcatcaactctgtgatcaaggcctatatccacacatctccttatcctgctactttgacgggctaatgtaatttgcccaaagtcacacaaacagcaagtggcaaggaggaattcagaaaacatctgttttgctccaaattttctcctgcgtttgtgaagggaactgtgaggggcccaggtctgcctgtgtgcatgtgtgtgaagggctttctgcatatctccatcacaccccatgagga

SEQ ID NO: 204732 - DNA, 615 bp, Homo sapiens
tgcctgcaatcccagcactttgggaggcaaatgcaggaggaccgcttgaagccagaagttcaagaccagggcaacatagtgagaccccatctctacaaaaaaaaaaattagctgggtgtggtggtgtgaacctatagtcccagctactcaggaggctgaggcagggcaatcccttaggcccaggagttagagggtatagtgagctatgaacacaacactccagtctgggtgatagagtgagattctgcctcttaaaaaacatttgaaaatatttttaaaaagaaaacttataaggaaagcacatttctgttctaggtttgctctcacattccccctgaaattcggtgaagaggggaataaactgctgaatgggtgtagcatcaactctgtgatcaaggcctatatccacacatctccttatcctgctactttgacgggctaatgtaatttgcccaaagtcacacaaacagcaagtggcaaggaggaattcagaaaacatcygttttgctccaaattttctcctgcgtttgtgaagggaactgtgaggggcccaggtctgcctgtgtgcatgtgtgtgaagggctttctgcatatctccatcacaccccatgagga

SEQ ID NO: 204733 - DNA, 602 bp, Homo sapiens
aaaggaatctctaaatcagcagaggccttcctgaggcctggcttcaaggtctagcctttgataattaagtgggttaaggtctctaagacatgttaatattaggtaatcatctaatgaaagtcacaaaactttttggagtctcagatttgcattaaagtcagccctatgtgtctgtgggttctgcatttatgaattcaaccagccacagatggaaattttttttaaaaaaaggttagttgtagctgtactgaacatgtacagctacatgtcattatttcctaaacaatacagtataactatttacataacatttacattgtatcaggtattataagtaatctagagatgatttaaagtatataggaggttgtgtacaggttatatgcaaatactacrctattttatagaatggacttgagcatctgtggattttggtatcatggtgttggggggtggttctgggccaatccgtcatgaggatactgagggacaactgcatttcatagagaaagaagatatgctgtattgttctcaaatgccatgaaatcttcagggaaacatgcttcagtctgtgtgaatatcagattaacaagatatgtacc

SEQ ID NO: 204734 - DNA, 451 bp, Homo sapiens
ggatgaacagtaatgttggggccatctttggaaaatataagctgccacaatatgctcagcgtatttgaggagctcactaactagcaatgaaggcagatgtgaaacggatagaatacagtttgaaaagttctatggaagccctggggaattycatactctgcagagatttcaggaaggttaagagaggtgacctgggacttaaaggatgattagatattcaccaagtcagaaagtagaagggcatggcattccagatgggaaacaacataaacgatggcatgatagactttgaattgaggccttagggctcctctgtgcacctctgcttcccagacagagtgtgaatcccatgaggactgcacggatttctccctagtccacagtgcctggctcatcatgtcatcttgactttcacattatatatgctcgcttagcaatttcccatgaacat

SEQ ID NO: 204735 - DNA, 542 bp, Homo sapiens
tacactttttaatcaaacttatcatagtgccaggtagtataagagaaatatatatatatayacacacacacatacacatatatctttatataaaacataaagatacatatatctttatataaaacaaatatatatatctttatatatatatatataacaaaaatatgtatagcataaaccacctttgaaggagacaagaaagtgtgagctcatgacataagacagtgtataactaggcacactgaaagtgcaggggctcccaaggctgtgagtattcagaggagggagtttaaaccatggcataatgagggattggaactttgccttgaaaagagacaacctgtcttggtttgactacgtttcataggtacaaatagaggcagattcttcttcctcaaatgaatgggcatttcacccaaacataccgacaagggaatggcagttgcacaagcagctaatttcttcttctcttcctattgagtactataatggaagaaaggagaggattattagccaaaaaagggaatattatagtgtgaata

SEQ ID NO: 204736 - DNA, 504 bp, Homo sapiens
tggtttgactacgtttcataggtacaaatagaggcagattcttcttcctcaaatgaatgggcatttcacccaaacataccgacaagggaatggcagttgcacaagcagctaatttcttcttctcttcctmttgagtactataatggaagaaaggagaggattattagccaaaaaagggaatattatagtgtgaatatttatgttcccccaaattcatatgttgaaatcctattctttaaggtgaaggtattagtaaggggggcctctggaaagtgattagggcatgagagcaaagccatcatggttggattattgtacttataaaagagaccccagagagctaactacctctcccaccatgtaagggcacagctggcaggtgccatctaagaaccagaaagcaaccctcaccagacaccaaatctgctggtgccttgatcttatatttcccagtctccagaccagtaagaaataaatttctattgtttagaagctacccagttt

SEQ ID NO: 204737 - DNA, 504 bp, Homo sapiens
tggtttgactacgtttcataggtacaaatagaggcagattcttcttcctcaaatgaatgggcatttcacccaaacataccgacaagggaatggcagttgcacaagcagctaatttcttcttctcttcctattgagtactataatggaagaaaggagaggattattagccaaaaaagggaatattatagtgtgaatatttatgttcccccaaattcatatgttgaaatcctattctttaaggtgaaggtattagtaaggggggcctctggaaagtgattagggcatgagagcaaagccatcatggttggattattgtacttataaaagagaccccagagrgctaactacctctcccaccatgtaagggcacagctggcaggtgccatctaagaaccagaaagcaaccctcaccagacaccaaatctgctggtgccttgatcttatatttcccagtctccagaccagtaagaaataaatttctattgtttagaagctacccagttt

SEQ ID NO: 204738 - DNA, 424 bp, Homo sapiens
atcctataggaattagaaagaagataagagaatattataamcaaatttatgccaataaattcacaaattgactctttcaaaggcaaaaaaaaaaaaaaaaaaaaaaaaaaaaaaaaggataccctgggacaaccttccatccattaaatgactaagattgcattaaaagccttcctgcaaaaaaaactccaggcccaggtggcatcactggtacaatttaccaaacattcaagatggaaataacaccatttctactttctagaagaaagtacgtttcctaactcactttatgaggccaacatcacctcaataacaaaaagacactagaagtaaaaagttacaggccaataaccctcatgaagatagatggaaaaatcctgaaagtattttagcaaatcaaatattgcaacactcataaaaggta

SEQ ID NO: 204739 - DNA, 424 bp, Homo sapiens
atcctataggaattagaaagaagataagagaatattataaacaaatttatgccaataaattcacaaattgactctttcaaaggcaaaaaaaaaaaaaaaaaaaaaaaaaaaaaaaaggataccctgggacaaccttccatccattaaatgactaagattgcattaaaagccttcctgcaaaraaaactccaggcccaggtggcatcactggtacaatttaccaaacattcaagatggaaataacaccatttctactttctagaagaaagtacgtttcctaactcactttatgaggccaacatcacctcaataacaaaaagacactagaagtaaaaagttacaggccaataaccctcatgaagatagatggaaaaatcctgaaagtattttagcaaatcaaatattgcaacactcataaaaggta

SEQ ID NO: 204740 - DNA, 603 bp, Homo sapiens
ccttttgctttctttcttttctttctccctacattcatagtcaaatgcaattttgaaaatctaagtcatcatctgagggcctgaaattataatagtctcattatcttttattcaaaagggtagaggttactgttattgttgctttaatcaatatggagaactagcaactacaacattagctgtgggcggggcrtggtggctcacacctgtaatcccagaacttcgggaggccaaggtggacagatggctcgagcttaggagttcaggaccagcctgggtaacatgaagagaccccctctctacaaaacatacaaaaattagcagggtgtattggcacacgcctagagttctagctcctcaggaagctgagatgggaggatggtttgaccctgggaagtcaaggctacagtgagccgagatcacaccactgcactccagcctgggtaacagagcaagactctgtctcaaaaaaaaaaaaaaaaaaattagctatagtcaaaatccacatttcattatgattggatttcaatctaactctgcttttggaaggaaacgaaggaaaaaaacacaacttttcctctctacttatgtcccactcaaaac

SEQ ID NO: 204741 - DNA, 420 bp, Homo sapiens
ttgggtgacttctctcaaagtcttggggattagcttccaatgtgtttctatgaaagggaaatgttgagaaataaaataaagtggtgaaaggttaggattaaagaggattttgttcaatgttgagcccygtgaaaatatcacatgttcagatgaatttgaaaaagtccagtagactcttagataaaaaagaagtatgtgtagatagaggtggctggtcaaatggaagcattaatactgctgagatagatggtgactgattaaatggaagcagccacacatccattcatttctctgaaaattagcagctgttggctgatagacacctttccttcacatgctcttgctgaagtgataagaagtgaaaagagcttgaggcaggactattttgagttccaggcgatctgtgttgctatgagatct

SEQ ID NO: 204742 - DNA, 633 bp, Homo sapiens
ccagcgctgccagcaggatcttattctttgtatctgcacctcccaarcaattcttccggggcagctttgtctgtgcccctctgctgggctgaagggctggtgcttagggatgcatgcatcccgccctttgccctcatgtctgagctgttcgaatctgatttccagggcaattgcagtttggcggctccccggggcatcctcttgagtggctgctctgctgttactgtttgggaggcctcggaaactccccttgggtagtttgtcagatggtctgatgagaatagcaggagcctgttttccatagtcagattgtcattttcatcatcatttttgttgttgagtttccctttttaaaaaataaaatcataaaacagacatactcttttctaaacaagtgtagacttttaccatgagggttggaaggggcctcactgagtaaatacctcttctctcaccctcgtgtgatggcttctttgttttgaacttgggtgtgcccaagtggttttacaacctcccttgggtatcaacagtccttatcctctcaccatctgatctctcttcctgcttctggtcctcagagggtggtcagacagtgctcccaagaatgggttgaggttctgaaggtatgtgggc

SEQ ID NO: 204743 - DNA, 633 bp, Homo sapiens
ccagcgctgccagcaggatcttattctttgtatctgcacctcccaaacaattcttccggggcagctttgtctgtgcccctctgctgggctgaagggctggtgcttagggatgcatgcatcccgccctttgccctcatgtctgagctgttcgaatctgatttccagggcaattgcagtttggcggctccccggggcatcctcttgagtggctgctctgctgttactgtttgggaggcctcggaaactccccttgggtagtttgtcagrtggtctgatgagaatagcaggagcctgttttccatagtcagattgtcattttcatcatcatttttgttgttgagtttccctttttaaaaaataaaatcataaaacagacatactcttttctaaacaagtgtagacttttaccatgagggttggaaggggcctcactgagtaaatacctcttctctcaccctcgtgtgatggcttctttgttttgaacttgggtgtgcccaagtggttttacaacctcccttgggtatcaacagtccttatcctctcaccatctgatctctcttcctgcttctggtcctcagagggtggtcagacagtgctcccaagaatgggttgaggttctgaaggtatgtgggc

SEQ ID NO: 204744 - DNA, 585 bp, Homo sapiens
agatctttataataatcctctgagtttgccaggcaggtgatattagtctcataaatgaagaaggtgaatgagactcaaagaatataaatgactcccaagggcatatgactaaacaagtggtagggtcaagactcaaatcagaaggcttctgactactaatcgagagtttttcccacccgttttgatgtcaaagatggctgagattttggggaggggctttgggagttcagaggtgaccctttagccactgctgaagctgatagagatgcargatcagtaaacatatcttattctttgtttgtttttccataggttggctaggctttctagtgattaaaaaaagcaatgtagacacttgtaaagtgttttaatttattgtcctggactctgtctcacttgttgcaagagtcatttgacatgacgccttgctaagaaatccacacgtaggtctcaaattcagtcctggttgatttcctagggtctatgctccatgagggcagggacagtactagatatttgtgtccacaaacatctagaggcatccaattcttatctgttcataaatatatgatagaatcaaccatc

SEQ ID NO: 204745 - DNA, 606 bp, Homo sapiens
tcactgcacctggccccttttttcctttcaatcatcttcatctctgagattcaggctataaagtctctactaatctattttcaagttcatttttaccgccttctaaagtgtaaaatcttctcctattagtttggatccactgagaatcagatgcaaagatggggttagacttccaaaagatatatttgggaaatgtctgtgaaggataaaagatgaggaaacagaagaaagtagagagaaccgtcaggccatgattaaagtttcatacctataggagagaagggaaaggaaggaggattgtrttgataaggtctaggaatgctgcaaagatctaaaaacagttttgccagactgatgggaatttcttaatcaaagtcacccactggagacatccaacagctcacaggaatgggcttgcattaatggctctatcattcttagctactggctggattagcctatagaggcttgtcttggtgtgaatgctacagtagatccatagaaataatagctgagctatcagtcaatttttctccccagagtaggagatctgaacagtacatatttatggctaacctactgttcttaagtttctttaataaataa

SEQ ID NO: 204746 - DNA, 563 bp, Homo sapiens
ctatttttaatatctggttaattaatctatctgggaaacttgttttcttgcatggatatattaatatggagctttgttaaacacagctcaagtgtgccgttataaatctttcagtgatgatcaaatatatacctttaacttatatggtgatttgataattgcatttggtctttctcttgagatctaaatattgttcattttgttaatgaatgttatcacattgtgagagaaaaacttaacctgacttttttttttttttttttttgagacggagtctcgttctgtctcccaggctggagtgcagtggcgcaatctcagytcactgcaacctgcacctcctgggttcaagcgattctcttgtgtcagcctcccgagtagctgggattacaggcacccaccacaacacctggctaatttttgtatttttagtagagacggggttacaccatgttagccaggctggtctcaaactcctgacctcaaagcattttgcctgtcttgccctcccaaagtgctggggattacagacataagccactgcgcctggccttaaccatgcctgc

SEQ ID NO: 204747 - DNA, 574 bp, Homo sapiens
tggtctttttaaactggcttcttttacttggcataatgttttaaaggttcatccatgttgtagcatatgtyagcacttcatttctttttatttctggataatagtttattccattatatggatattaccacattttatttatccattcatcagttgatgaagatttgggttgatttcactttttgtctctgatgaatgatgttgctgtgaacattcacatatatgtttttatgtggaaatttatgttaaatttcatttatcttgggtatatacctatgagtggaattgctgggtcatatggtaactattttttaaccctttgaggaactgccagactattttccaaagcagctgcacaattttacattcctaccagcaatgtatgaggttactgatttgtcaacatccttgccagcactcatgatcttttttattctagtcattctagtagatgtgagtgacatttgtggttttgatttgcatctctctggtggctaatcttgggcatctttcaatatgcttactgggtatttgtacatcttctttggagaaatgtctattcaaattctttctc

SEQ ID NO: 204748 - DNA, 574 bp, Homo sapiens
tggtctttttaaactggcttcttttacttggcataatgttttaaaggttcatccatgttgtagcatatgttagcacttcatttctttttatttctggataatagtttattccattatatggatattaccacattttatttatccattcatcagttgatgaagatttgggttgatttcactttttgtctctgatgaatgatgttgctgtgaacattcacatatatgtttttatgtggaaatttatgttaaatttcatttatcttgggtatatacctatgagtggaattgctgggtcatatggtaaytattttttaaccctttgaggaactgccagactattttccaaagcagctgcacaattttacattcctaccagcaatgtatgaggttactgatttgtcaacatccttgccagcactcatgatcttttttattctagtcattctagtagatgtgagtgacatttgtggttttgatttgcatctctctggtggctaatcttgggcatctttcaatatgcttactgggtatttgtacatcttctttggagaaatgtctattcaaattctttctc

SEQ ID NO: 204749 - DNA, 604 bp, Homo sapiens
ttggcaatttgttactatttattaaggagtccagctccaggtcaaaatcctatgtgtgatctttcaggcctgatcataagcaattactgggctttgcctggcaggcctgattgaggagaagctgcctccccataccacacttgcactggcagtgcgttgtacttttctgaagggagttgcagtcaagaactcggcccttcttctccctaccccaaccagccatgcatattcayaatcctggccctggtcccttcattcactggcctccttactgggggccttgctgaggcacttcttttttccactttgactcagtacctttctactcctagaccttcccactctctctctctccccctgtctctcaggtctataaagaggcaggagtcttttgttctgggctctttaacagtgagacgattccctccatgtgtacagcactcatctgaaaagttttcaaagtacgtacattaacaacctaaatgctcagcaataaggattgtgcaaataaattttggtacatttataaaagactatgcagatattttaaatgataatgacataaaaagattgattataggcagtttaaagcaacatgtgctct

SEQ ID NO: 204750 - DNA, 604 bp, Homo sapiens
ttggcaatttgttactatttattaaggagtccagctccaggtcaaaatcctatgtgtgatctttcaggcctgatcataagcaattactgggctttgcctggcaggcctgattgaggagaagctgcctccccataccacacttgcactggcagtgcgttgtacttttctgaagggagttgcagtcaagaactcggcccttcttctccctaccccaaccagccatgcatattcataatcctggccctggtcccttcattcactggcctccttactgggggccttgctgaggcacttcttttttccactttgactcagtacctttctactcctagaccttcccactctctctctctccccctgtctctcargtctataaagaggcaggagtcttttgttctgggctctttaacagtgagacgattccctccatgtgtacagcactcatctgaaaagttttcaaagtacgtacattaacaacctaaatgctcagcaataaggattgtgcaaataaattttggtacatttataaaagactatgcagatattttaaatgataatgacataaaaagattgattataggcagtttaaagcaacatgtgctct

SEQ ID NO: 204751 - DNA, 412 bp, Homo sapiens
cttctttaataatagtctatgaccttaaagtataggttctgtaaatccttcatattttgataatctgaaattatatgttttataatttcaacgtttgagcctcatgatatcccagtgaaggagggcttcttgtcccccttttacggatgggaagacaggctcagaaaagttgaataactarctcaagtccatttgagtagtaagtgattgagccagggctcaaatacagcccaagaaagaagtgatggagctgagtttttttttgtttgttttgttttttgtttttttttgtttttgtttttgttttgttttgtttttgttttttttttttttttttttttttgagacggagtctcgctctgtcgcccaggctggagtgcagtggcgggatctcggctcactgcaagctgat

SEQ ID NO: 204752 - DNA, 529 bp, Homo sapiens
gttttgcatccagtagaaacagagcttttctcacattatttcctcttaccatgttgctcttctttaactccaaactcttaaactgaatatttatccctgaaatattaaaattcaggtaacattaatttcaaagaaaccttttctgaagcccctttctctcaatacctattatgccacacttcacattcaatttaattttaattgggaatgaagtgagatatgagttatcaagagaattttctcacaaattctgttaacagatttttttgattgccatatatctgaatgaygtttctaaaaatttttacattccaatttatgttcttctaaattagaaaattggaatgtgtgacaacatagcttgatatatgctaaaagcacaggtgtcagaaagatgaaaggtgatggttaaataacatgaaggttaatagtcaaggaatttgatagctttataagtaacacatattgaataaattgaacgtgggttaatcaatcattcaacatattctaagtgtgtagtatgtgcatg

SEQ ID NO: 204753 - DNA, 495 bp, Homo sapiens
  misc_feature (1)...(495): n = A,T,C or G
atacttaagtatttaatatttgctaattgtgagataaagacactgctgatgatgcagggcagatgagcaccaaaattggggcttagtctgggaggattcttggcttcactcaggaaacaattcaagagtgagtcagtggtggaagaaagcatgtccattgaagcagcagcagcgtacagcagagtgactacttcttgcagagcagggctaacccataggcagtgtgcccaaagtataggctgtgtataggctgttggccaacaataattatacccatttttaattctgtgcaaattaagggatgggttattcagaattctctagaaaagaaacagcaacttccaggtgttgccgtggcatttgtaaactstcatggtgctggtggaagtgtcttatgctgatacacatcagggaaactagaaattgctttcagagcaatttgccacttctggctgttttctcattttatcctggcaggaccaanaaagaagccct

SEQ ID NO: 204754 - DNA, 603 bp, Homo sapiens
ccttctaaaaggacaaaattttagggtgtattttactaaagtaaaatgaatcaaaataatcatgattttatggaagtattatgtaagcataatttaaaagtcacataggctggccaggtgctgtggctcacacctgtaatcccagcactttgggaggcctaggtgggtggatcacttgaggccaggcgtttgagaccagcctggccaacaygacaaaaccctgtctctactaaaaatataaaaatgtgccgagcgtggtggcgtgcacctgtaatcccagctacctggttggctgagacatgagaatcactagagcccagggggcagaggttgcagtgagctgagatcatgccaaagcactccagcctgggtgacaagagtgagactctgtctccaaaaaaaaaaaaagaaaagaaaggcttaaaatgaaacaaaacaaaacaaaaaaccccagcaaccctccaatacttctctcattcttcccaccccaatccagtccttcttctaagaggcaaccatttccaactgttccagttttttcttttgatagctctatgcttataaagttatttcttgatttttaaatggtttatattacccact

SEQ ID NO: 204755 - DNA, 610 bp, Homo sapiens
gaaagtacagtgtcagcttagagatagccaaatagatcaatgtaacaaaagagagattccaacgaaagacccacatatacakgaacaactgatttctttaccaattaaaaaaaagacaatttagtggaaaatgtatagtcttttcaataactgatgctgaaacaattaaaaatccatacacaaaaagaaaaggcaagttgacccataatttaatacataaaaaatattcaaaatggatcacagatctaaacttaaaactgtaaaacttttagaataatacatacaagaaaagctttgtgtgcttgggatagggataggcagagctgtcttagtataataccataaaggaacactctataaaagaacaaagtggaaaactgaattgcatcaaaattaaatacttctgctatttaaatgacactgttaaaacaatgaaaagacaagtcacaggataggagaatatatttgcaaattatgtatctgataacttgtatccaaaatgtaggaggaacccttatatctcaacaacataaagaactttcaaaacttaacaaaaacccaattgaaaatctgataacagatttaaacagacatttcatcaaagaagatg

SEQ ID NO: 204756 - DNA, 517 bp, Homo sapiens
tgaaccattattattgcttctaataaaactctcattaatatcttttatatgttgaatgtgtttgtcttgcaggtggtaggtgatggagacagagaaagagagataaagaaatacagagagataccttgttaactcagagatattctaacaaatttttataatgtcatcagagatttttctactctgaataattcaaatcattgagcttttgccttaaaaaaatgcagaatacaaagagatttatcatgtgagtgcaactacttctgctttctcaaaaggttgaccaggcttatggtctttgaaagggcaactgagataaccatgtgctcaatacaattagaatatatctaaactttttaatggtttacctatcttctttttcacacatcaagtcaaatgggtagggaaagaggcttataaacaagagaaaacctaactaactattgaacgaattcaatctggctaaaacatggaatataaagaggaayggcaagagatgaagttaaataggccagat

SEQ ID NO: 204757 - DNA, 610 bp, Homo sapiens
ctctgattttatgtatttgggccttctctctttttttcttagtctggctataagtttatcaattttgtttaacttttcacaaaaccaacttttaatttcatttatcttttatgtattttttccaattttattaatttttttcttctactaattttgggtttggtttgttcttgcttttctagttctttaagaygcattgttaggttgtttatttgaagtttttttcttattctatgtaggcacttatagctataaacagccctcttagtactgattttgctgtattccataggtttttgtgtattgtatttccattatcatttgtttcaagaattttttaaaaattttttctctactggccattcaggagtgtattatttaatttccatgtatttgcattgtttctaaaattccttttgttattcatttctacttttattccattgtggtcaaagaagatgcatgatattatttcagattttatgagtgttttaacattgttttgtgaccttacatatggtctatccttgaggatggtccaagtgctgtggaaaagagtgtctatcctacagccatgcgataaaatgttctataaatatatattaggttt

SEQ ID NO: 204758 - DNA, 563 bp, Homo sapiens
attgatttttatatccacaaattttaggaaaacaaaacacgataaatataaagaataccatacctaggcatatcgtaagctaactcctgaaaagcaaatgtaaagagaaaatattgaaaatcattacattatatatagagaaaagatgatagaagttatcactgactttttatcagaaacaaaggagatcagcagacaatgggacaacacatttaaagtgatttaagaaaaaaacagtcaacctcaaattctgcatccattaaaattattcttcaactttaagctgaaagcaagatatgtttacttaaaagagactgaatgaattttggaagggtagatttatagtacaagaaatgttaaaggaaattcttcatgctgagggaaattgacaacagatggtaactttgatgtaygggaaggaacagagagtggcagaaatggtacctgtgcaagtaattatataaaaatttcttaatttctttaacagtcatataaaaacataggaggattctattcataatttgggtatactcaggaaactccatcaatataaattatatgaa

SEQ ID NO: 204759 - DNA, 503 bp, Homo sapiens
agagaatgaaaatttacttttctaacaagtttccaagtgatccttctagtctcagaactgcacctcaagaatatgctgctctaacttcttgagttcctcttttacttcctgtccttaactggtarcttggtctgtaatttaactcttcttgctaagtacattgtttctaaatgaatacatttcttttcatggttttgatggcttataccatctgacactaaaaatgtttatctcttgtgacgtcatggccaatttagattaggatatccaactatatgctagacatcttttattaatgtcccaaaggaatgccttgcccatggccagtcagtgatggaggtgaaatttgaatcctgactgtttgacttgaatgcgcctgattttaaccattaacttctattgggctctcatcctttttatgatttctctagttcagaccttctttgtctctgggaagatgaagctttctgttttggaggcatccaacactatcccaagttcag

SEQ ID NO: 204760 - DNA, 503 bp, Homo sapiens
agagaatgaaaatttacttttctaacaagtttccaagtgatccttctagtctcagaactgcacctcaagaatatgctgctctaacttcttgagttcctcttttacttcctgtccttaactggtagcttggtctgtaatttaactcttcttgctaagtacattgtttctaaatgaatacatttcttttcatggttttgatggcttataccatctgacactaaaaatgtttatctcttgtgacgtcatggccaatttagattaggatatccaactatatgctagacatcttttattaatgtcccaaaggaatgccttgcccatggccagtcagtgatggaggtgaaatttgaatcctgactgtttgacttgaatgcscctgattttaaccattaacttctattgggctctcatcctttttatgatttctctagttcagaccttctttgtctctgggaagatgaagctttctgttttggaggcatccaacactatcccaagttcag

SEQ ID NO: 204761 - DNA, 622 bp, Homo sapiens
atatccaactatatgctagacatcttttattaatgtcccaaaggaatgccttgcccatggccagtcagtgatggaggtgaaatttgaatcctgactgtttgacttgaatgcgcctgattttaaccattaacttctattgggctctcatcctttttatgatttctctagttcagaccttctttgtctctgggaagatgaagctttctgttttggaggcatccaacactatcccaagttcagtgtttctctagcaggattcacaggactctacatagtggtgttttatttatggccataatttactatagtgaaaggatacaaaacaaaatcaatgtatgcaaaaggtgcattgggcagagtctggaagaaaccaagtgtaagagtctactctgagtggattcatacagcacatgcttaattctttcagcaatgagttgtaacaacaggagtctagtagggaagctcgttagagattttgcccagggttgtcattgtaggatgatcacataggtacccattgcctaacacatagcaacattttagtctcccagaaggaaagcaggtgttcaacrtaaactatatcgtttgcatacacagttcaggcatagtaaactatttttat

SEQ ID NO: 204762 - DNA, 534 bp, Homo sapiens
aatggtgagacactgagttggactcagtgcagccctgttttagaagaaagcaaaactagaccgaactcaactgatgctcacccatggaagaagcatttgaaccagccctacccaggtgggaatcacccatcccagtggttggaacttcagttcttgcaagcctcgccaccacaagacaaagtgccctggagttctaaataaacttgaaaggtagtcaaggctacaaggatacaaaaactgcaactcctaggagagtactaatgcacagctgggctcasagccagtaaacagggggaggggaacatttcaactatactagctggggcagctatgggaatgctggtgctaaccctccccaaacccaaggctgaactgctcacaactctaaaaaaggccctttccttctgtttgaggagaggaaagcgaaagtgaagaggactttgtctcctattttagatactagctctgctatagcaggataggacatcagtcagagtcctgagaccccctttctaggaataaactcccacatga

SEQ ID NO: 204763 - DNA, 534 bp, Homo sapiens
aatggtgagacactgagttggactcagtgcagccctgttttagaagaaagcaaaactagaccgaactcaactgatgctcacccatggaagaagcatttgaaccagccctacccaggtgggaatcacccatcccagtggttggaacttcagttcttgcaagcctcgccaccacaagacaaagtgccctggagttctaaataaacttgaaaggtagtcaaggctacaaggatacaaaaactgcaactcctaggagagtactaatgcacagctgggctcagagccagtaaacagggggaggggaacatttcaactayactagctggggcagctatgggaatgctggtgctaaccctccccaaacccaaggctgaactgctcacaactctaaaaaaggccctttccttctgtttgaggagaggaaagcgaaagtgaagaggactttgtctcctattttagatactagctctgctatagcaggataggacatcagtcagagtcctgagaccccctttctaggaataaactcccacatga

SEQ ID NO: 204764 - DNA, 561 bp, Homo sapiens
atcctagccccataattgactaaccccataaacttgggcaggttgctttaactttgtatgccccagtatcctcatctttaaaattccaataatattttttctcataacattattatgaggattaaataaaaaatatgtaattcttggcataaagttgtgttcaatgagkgttggctattcctgtcaataactttgggtgtccaaatgttacaggttagtaattttaataaaaaattaaattaaaatatggcatgaccttttaatgaactgatgatagctgtatcagtgcttccttttatatgatctcacaaatcatctaaataataatttttaaaagaatgtgttctacagattttctaggaaattacatgactgtctccattctctattttctatactccttgagaagcaagatttatttttccatgtcatccttctgtcatagtcagtgatcatatctgtacttcatcagaaaattctgggttataatttgtctaggactgaggagttataattattcatgtaagacagacatgtacactttctttccatctatcttag

SEQ ID NO: 204765 - DNA, 561 bp, Homo sapiens
atcctagccccataattgactaaccccataaacttgggcaggttgctttaactttgtatgccccagtatcctcatctttaaaattccaataatattttttctcataacattattatgaggattaaataaaaaatatgtaattcttggcataaagttgtgttcaatgagtgttggctattcctgtcaataactttgggtgtccaaatgttacaggttagtaattttaataaaaaattaaattaaaatatggcatgaccttttaatgaactgatgatagctgtatcagtgcttccttttatatgatctcacaaatcatctaaataataatttttaaaagaatgtgttctacagattttctaggaaattacatgactgtctccattctctattttctatactccttgagaagcaagatttatttttccatgtcatccttctgtcatagtcagtgatcatatctrtacttcatcagaaaattctgggttataatttgtctaggactgaggagttataattattcatgtaagacagacatgtacactttctttccatctatcttag

SEQ ID NO: 204766 - DNA, 547 bp, Homo sapiens
tgaagttagaacatttggctagccatgtcatggtgattgttacatgatgtacaaaaaaaattatacaaatcagataaaaataaatcagttaatattactggttaatatatttgattttattatactgcaayataataaattattatattattatatttattgcaatataataaaaccaaagcaaatacaatatattgctttacagacatatgaagtgaaatgacccattttatgaatacatgaaatgacaacatctttgggggttagagttagatttggattctttagacatgataaaatttttatttttgttattcgtctcttcaaactgacaaaatatttcacaagttaaggaaaacactgaaagtgtaatgaaaacacaatgcccaagactgcataaatgcatctcattttgtttacatttgtagactttgcaaagctaaattattggatttcttcattgttttgacagagccagcctgaaaagtaatctaatacttcttttaaattgcttttaagagttgaaactattaagactacagggata

SEQ ID NO: 204767 - DNA, 547 bp, Homo sapiens
tgaagttagaacatttggctagccatgtcatggtgattgttacatgatgtacaaaaaaaattatacaaatcagataaaaataaatcagttaatattactggttaatatatttgattttattatactgcaacataataaattattatattattatatttattgcaatataataaaaccaaagcaaatacaatatattgctttacagacatatraagtgaaatgacccattttatgaatacatgaaatgacaacatctttgggggttagagttagatttggattctttagacatgataaaatttttatttttgttattcgtctcttcaaactgacaaaatatttcacaagttaaggaaaacactgaaagtgtaatgaaaacacaatgcccaagactgcataaatgcatctcattttgtttacatttgtagactttgcaaagctaaattattggatttcttcattgttttgacagagccagcctgaaaagtaatctaatacttcttttaaattgcttttaagagttgaaactattaagactacagggata

SEQ ID NO: 204768 - DNA, 504 bp, Homo sapiens
ctaaagtgcagtctgacagagaatgtggcaaaaatcaaacattaggatgttgtgcactctagagagtaattctaaaaggtgttaaaggaattaaaaaatacagggatgccatcagtccagttctgaatggcagctaatatatgaaattatggaggaatatgtaagatggaatagccatatagtctgggaatagtgagaacaaaaataatgctgagacacaggagagtatgaaagctgtgtgtgctgacctaaagtgacagcagtcatgcagattcttactagagagaaggacaggtgacagagagtgaatggaaagaaggatgggtcttgagaagtctattcagtaatagaggccttggagagaccaaagtggctctcaggcctgttaaagtatagaaatagagaggagaaggtatccttggaataaagacaatatcccacaarctaaaaaacttttctctttcctattgttagttaattgagaggtgtgaacccaactcaaca

SEQ ID NO: 204769 - DNA, 504 bp, Homo sapiens
ctaaagtgcagtctgacagagaatgtggcaaaaatcaaacattaggatgttgtgcactctagagagtaattctaaaaggtgttaaaggaattaaaaaatacagggatgccatcagtccagttctgaatggcagctaatatatgaaattatggaggaatatgtaagatggaatagccatatagtctgggaatagtgagaacaaaaataatgctgagacacaggagagtatgaaagctgtgtgtgctgacctaaagtgacagcagtcatgcagattcttactagagagaaggacaggtgacagagagtgaatggaaagaaggatgggtcttgagaagtctattcagtaatagaggccttggagagaccaaagtggctctcaggcctgttaaagtatagaaatagagaggagaaggtatccttggaataaagacaatatcccacaaactaaaaaacttttctctttcctrttgttagttaattgagaggtgtgaacccaactcaaca

SEQ ID NO: 204770 - DNA, 343 bp, Homo sapiens
aacataaagagaaataaatcagataggaagtgagaagtaaaagagttgatgatacaaatgtttcatgtgttcaggagaggtaatattgagcaccctggtgacagtcatgattttgtmgaggagtaatgggaacttacagtggagaaataggcagaccttgtgcaagggaggatggtttgtgccaggctgtagcagacagagacttttcaggtctttgcaagatgaaatgggaatgcttctttccttcattgatgtaaatataaaggaatactccacgtgttcatgtattacttaatacaagatttttatgccccaggagacagtacaagatcatgtttctttt

SEQ ID NO: 204771 - DNA, 607 bp, Homo sapiens
attggttttcttgactttctagcttctaggggccaccttctagtggcctctttttwaaaaaaaaaaaaaaaatgtaatttatttttaagttctagcatacatgtgcaggacatacaggttccttacataggtaaacatgtgccatagtggtttgctgcacctaccaacccatcacctaggtattatgccctgtatgtattagccatttatcctaatgctctccctccctccacccccatgacagacccaagtgtgtgttgttcccctccctgtgtctatgtgttctcattgttgggctcccacttataagtgagaacatgtggtgtttggttttctgttcctgtgttagtttgctgaggataatggcttccagctccatccacgtccttgcaaagaacattatcttgttcccttttacggctgcatagtattccatggtgtaaatataccatattttcttcatccaatgcatcattgatgggcatttgggttgagtctatgtctttgctgttgtgaatagtgctgcaatgaacatgcacatgcatgtatctttataatagaatgatttaatattcttttgattatataccctataatggaattgctg

SEQ ID NO: 204772 - DNA, 517 bp, Homo sapiens
ttagtggattcctatggatttttttatatgcaagatkatgtcatatgcaaataccaattatttttcttaagccaggagtggtggctcacgcctgtaatcctagaactttgggaggctgaggcgggtggatcacctgaggtcagaagttcaagaccagcctggtcaatatggtgaaaccctgcctgtactaaaaatacaaaaattacttgggcatggtggcacatgcttgtaatctcagttatttgtgaggctgaggcaggagaattgcttgaacctgggaggcggaggttgcattgagccatgatcgtgccactgcactccagcctgggcgacagagcaagactctgtctcaaaaaaaaaaaaaaaattattttgtgtgttgttttgctttgtggatgcattgttttttcttgcctagttgttctggctagaacctctagtacaatgttgaatagaagtgaagagtggacatctgatatggtttggctgtgtccctacccaaatctctttttgaatt

SEQ ID NO: 204773 - DNA, 606 bp, Homo sapiens
aagcccaaattaagttactatgtggtatcccttcatgtgtagaatgttatattttgtttgctaaagatacttggcttttgaatttgtatattggtacattatcygtaaaaatattgaaattctgcagtgttttcagacttgtggaaatttatcaatggcaaatgaataatttggtatttcaagtctcttaactattaaatcacacacaaattaaaatttccacatacaggtatcatttgccatgaacaaattcactatgaagagttgatgcttaggaaataataaataaaatatgaattcctttttcacaatataaaaattgaagtctaaaaacatatttaaacaaggcctccctatatccaattaaacacttctgcacaaaatgtcatatgggtgttcagttccactagtgggttatgcccagatgaaaatggtcaaatgtagcaaacaggaaaagaaggcaaaactgttgactacattttctcatgaactttgaagtacaatttaaagaattttagaatattcctctttatgaaaatatgtgaactagatatagcattgaatatatattgcatcatagacatggtaaaatgctgccaaaaagtc

SEQ ID NO: 204774 - DNA, 465 bp, Homo sapiens
aatatgcagtcagatatagaaacagtactggggatatatacgcaggctccatatgctttggaggtatactggatctatttttcttgtggttgttagaacgtagcaggagcttttactraaaggaaccacgctatgtaaaactaacagaaaagtagacaataaaacttttgtataaagtattcagatatggcctaagataatataggcaagaatctagggcactatgttccatatcaatatgttcggattttaccaatttcactttgtaatagcacagtaaaaagctttgttgaacactgacttttctatagtgaccaaatgcttataaagctgctaagaatttgggggcaagcctttctaataacttggtttatacaaatttttttcatggcatcatatttaagaaagtggcctcatatataacttcaaaaaaacacactgaaaaatggactgacttttttttta

SEQ ID NO: 204775 - DNA, 465 bp, Homo sapiens
aatatgcagtcagatatagaaacagtactggggatatatacgcaggctccatatgctttggaggtatactggatctatttttcttgtggttgttagaacgtagcaggagcttttactgaaaggaaccaygctatgtaaaactaacagaaaagtagacaataaaacttttgtataaagtattcagatatggcctaagataatataggcaagaatctagggcactatgttccatatcaatatgttcggattttaccaatttcactttgtaatagcacagtaaaaagctttgttgaacactgacttttctatagtgaccaaatgcttataaagctgctaagaatttgggggcaagcctttctaataacttggtttatacaaatttttttcatggcatcatatttaagaaagtggcctcatatataacttcaaaaaaacacactgaaaaatggactgacttttttttta

SEQ ID NO: 204776 - DNA, 465 bp, Homo sapiens
aatatgcagtcagatatagaaacagtactggggatatatacgcaggctccatatgctttggaggtatactggatctatttttcttgtggttgttagaacgtagcaggagcttttactgaaaggaaccacgctatgtaaaactaacagaaaagtagacaataaaacttttgtataaagtaytcagatatggcctaagataatataggcaagaatctagggcactatgttccatatcaatatgttcggattttaccaatttcactttgtaatagcacagtaaaaagctttgttgaacactgacttttctatagtgaccaaatgcttataaagctgctaagaatttgggggcaagcctttctaataacttggtttatacaaatttttttcatggcatcatatttaagaaagtggcctcatatataacttcaaaaaaacacactgaaaaatggactgacttttttttta

SEQ ID NO: 204777 - DNA, 641 bp, Homo sapiens
cattccagtgagacaagatgcatgggtggaagacagtaatactgatgatgctgatctcgtataggcctaggctaatgtgtgtatttgtgtcttcatttttaacaaaaagtttaaagagtaaataaaggcaattaaaaattttaaaaatagaaatargcttatagaataaagatataaagaaaaaaattttcatacagctctacaatatatttatgttttaagctaagtatttttacaaaagaatcaaaaaagtaaagacattaaaaagtttataaactaaaaatgttataagctaattttttattgaataaagaaaaacattttaaatatatttagtgtagcccaaatgtacagtatttatattataaagtatacagtaatatcctaggcctttttcttcactcaccgctcactcactgactcaccagaacaacttccagtcccgcaagacccattcatgttatgtgtcctatacaggtgtactgttctcttcttttccagtggtattcaatcttttggcttccctggtccacattggaagaagaagaattgtcttgggtcacacacaaaatacagtaacattaatgatagctgataagctaaaaaaaacacaaaaaatctcataatgttttaagaaagtt

SEQ ID NO: 204778 - DNA, 429 bp, Homo sapiens
gagcaactctcctctcaccatttcccaacactcaagaggttcatgactaattagaagagcccttcgcaaactataatatagaggagaactacctggagattttcatctagggtatggcctggaattctacatttctaacaagctccccggtgatgttcatactgctgattcccagactattctgaagaggcaagggattccgaggttgaatgggataacagaaaaggaaaatggaagatgatccatgacaagcagaagtgacccattkctcaaactggtaaaaaaaaaaaaaggtgaagcggggggtagagggggatttaggcagtagttcatgaaacaattggtattcttgtggctcttgatggctgagggctatttcaattaacagagatgatagaaaagggcaatccaggcatagcaaaaagacta

SEQ ID NO: 204779 - DNA, 503 bp, Homo sapiens
ccaagctggtatctaagctggaagacaatgtcctattcacatttccctctgcttttctaaagtctctccctgtagccaccaacactggaaaagttgtaggtcacacctgaagccagcacttctcagagtctcactcaaggatcatggcgagtagccagcaaacraggaatgctgccagaactgggttcttccctttaaggtaggaggtccccttctggcccagtgtgtgtccagaaatgtccaggatctacagcctggaatgggggtatcaggtttctgattggagtcctatccttttgtgattgagctactatccaagttgcaagaccaagtcttctttactcttccctctcctctgcaggcagagggaaggtgtctttctcagagctgtgggctatgctgccttgggttgggggtgagttagtacaagcactctcttggccaccccagctgacgtctcactaggtcatgtggcccccaagtctactggcttcaagcctaac

SEQ ID NO: 204780 - DNA, 449 bp, Homo sapiens
ctccttgcacttctgttaattgaaaatgctattaaagttctgtaggctgggaaggaagagtcacatactggttagtcctctttgtggcatcacaaagatttcaaggcactcacagtcatggtttctgatgatgaatacagagatatttttcccaccacagaaagtaagcatgcacaccaaaccagtataacaggttggagtacaaagtactactaccctcaggctgcaacttggaagcatagacactaaggctcctcctgcctagagttkttttttttttcttttacttattttaaatagaattagtgccatttctaaacaatgactctattatgaagaaacattccatacatgtgcctatgaacttacaagccaacttctcctagctgtaatgaaaattaactaaatgtcttacaagctaatgtaacttttgtttagtaaagagaaaa

SEQ ID NO: 204781 - DNA, 537 bp, Homo sapiens
acaactgaactaccatcggttctttttaaccctcacttgattaataggtgctcttaagaatcttgatgcaaatataactggtagggaagcacttcaatactccaagaagatagatctgaaatatttacagacctaccaaggatacatttaaacatgaataagatcagaagagaataaatattttattgaaaagttttcagagtatacaaacaaaaactccctagyatataactgatttcacaagttttacccaactacaaaaggcttaaagattaggcacactgttcttgaacttaaagcacaccattcaaattatttactatatcacttgtgttgaattttgtgcatggttttctgattaataattctgaaaataattgtagttttatacatatatatggataggggaaagggaaggctatccttacacagtgaaacatatgtattaccagaaacataatatacataaaaagcaccagagaaaaagaaagaaacaacaacaaaatgtatacacaatctgggattcaattaaaaaaa

SEQ ID NO: 204782 - DNA, 573 bp, Homo sapiens
gccttttaccttactgtttttcttcaatagaatttattacatgacttttgaaattaatcttttaaattaaaaatgctttatagtagcattttacacagtatttcaagaaagatttttaggaaatatacagagataaaaaaagatacggggattcttaagcaggctatgtagagaaaagattaaagaaatgaaagaaaaatataatttaactataaaataggtgatatatttttaggatcatgcagatctatgtgatctcatggtattctagaagtctataacaaatattgattaggcccaatatctactttctttttcttctttaagaaataacttttgttacccaaaaatgtgaaatgtgrgcgaccttaaatttgtttcggtgaacaagcctctaaccagagatgcctagtcaagccaatgtcaacaaagccagtcctttcaaaggacaaaggtatctgattaagcaacacctgtgaaataaatcacagcctcctaactgataggctcgcccatgttcccctgttttctacctttaaaaaagggtatattaattacagggaaactgagctg

SEQ ID NO: 204783 - DNA, 628 bp, Homo sapiens
ctgaaagtcattcaggaacaggttgtttaatttctatttaattttatagttttgagagatcttgttattgatatctatttttattacgctgtggtcttagagtgtggttgatatgcgtgttagtccattcttgcattgctgttaaaatacttgagactggataatttataaagaaaagaggcttaataggcttatggttctgcaggctgtacaggaagcatagcaccggcatctgcttctggggaggcctctggaagcttacaatcatggaggaaggcaaagtgggaggttgaacatcacacagcaagtcaggagcaatagtgaaagagtgcaggtgctacgcacttttaaactgccagatcttatgagaactcgctcagtattgacaggacagtactaaaagagctgatgctaaagcattcatgagaaatctgcccccatgatttaatctcctcctttcaaacccctcctcccacattgrggttacattccaatgtgagattcagtcagagacgcacatccaaattatatcagtatgatttaggttttggtttttttatttgagagaattgtttaatggctgagaatgtagttgattttatagtatgtgccatgtgcacatgaggag

SEQ ID NO: 204784 - DNA, 473 bp, Homo sapiens
atttcttttgctagctgtcattgaataacaatattccttcaggaatcatggtgtccattctcaaatttgtaaactggataagaggaatttattatatgttttccaaataaagattcaactttatacattgttaattttcaaatatatttctactaatagtgcataacatatgcctagagataccctgaatatcacctaatgatttgcctagttttgttcttttgtgaaaaagtggtaaactgcatggtggaaagtaatatctgaattgatatataattaagatgtcttrtcttttctttttcctaaggaatctaccagcatctcccaagaagtaagtcataactactaaaattaaataaaaatttaaagttatcttttattacataaattttaaaaagttatttttatttcataatggttatgatataactgtgccaaaatgctgggattacaggcataagccaccacgccca

SEQ ID NO: 204785 - DNA, 481 bp, Homo sapiens
agaattctaccattgtatcagttgtatatcatagtcatggatccagtcaacacttactgtatgttcataaaaactggaaattatcttgtgtaaagttgccattttaattccatctttattacctacaataatttataataaggtttatgaagaatgcttaaagaaagaagttggatgtagrgagcatccattgtacataaaagaagtgatcagcactaatcagaatgctctctatatattaacttaaataattctgcaatgcaaatgatgctcagagagcttaagcaacaagaccgctatcatagattccagtgagtaaaatcacaaaaaattatgctgagcctctctgactctaaggattatatacagaacaataaataataaactgagacacatatctgtaattcaaataattttcctcttggcttcttacatataaatttatttttttctcttagacatctttgtgtgagtgtcagaa

SEQ ID NO: 204786 - DNA, 595 bp, Homo sapiens
ttgggtaatagacgggatggtctatctctatttcaattctcctgcaaaatgtttttcttcaacagtaagatgccagcacatcaatctgtacagcagtatttctaaagaaggaccatgccaggtcatttcataatcttttcagtcaatgtttactgaggaaggagagacatgcaaattttgggtagtcaatgtttactgaggaaggagagacatgcaaattttgggtagttaatcaatgcacacatacgcacaaaaatcatcacaattttttcaactttgaaattatttttaatcaaataaatgctgatgtctgaagcctgcaagcaaaccctgaaattccaaataaaatcttatcttttgttttagctttattcacgatggacactaattctctcatatattgtatttgaaaagaaaaacttcaattatataatggctatgtatatttgtaaataaaatttccatrgattatatcacattacaatgataatggcagagaaaaatattaactagaagtcagagagccagctccctttgagaaaaacagtcagaaacagtcagagctggaaatcaaattctacactgcagaaggtca

SEQ ID NO: 204787 - DNA, 442 bp, Homo sapiens
tctacccagcttgggggtagatagggtggagacctcggcagtgccgatggcagaaggtttttcatttgtgtcttggggcttcacctctgaaaacacagggctactgccagtcagaatgatgagcctggaatgggacagctgtgttgtaggccctagytggggggttctgcctggtgatgagcagaaaggtagagaggactcatagggaagagagactggactcctctccatatgatagctgtagtattctggaggtgccagtaaagcagtcaggctctttgtcccttccccaacccaaggacagcaaggaaggtactcatgcagtagcaacagcagaaggctagaagttgcctctgggagctccaacccagagagagagctgctatcaatggaaacattcagctagggattgggtggctgcactgtaggaccacgcctgggc

SEQ ID NO: 204788 - DNA, 470 bp, Homo sapiens
cacctgtttataccaaaaactgtgtactctcatgtccttcagctgcccctgtggaagtgtgtataggaaaatttggccctccactgcagggtttcgcatgcrcaaatactctggatatggttgaaaaaaatccacatataagtaaacccacgcagttcaaacctatgctgttcaagggccaagtgtttagagaaatatttgttttctcaaaaatcttatctatcttctcacaatagaatttacattctgtggttttcaaatagttgtcactaaaattaagtacttcatgtggtgataaaaattccttagcacaaattcattttcaatgtgacaaattaagcagtttagtttctgaagcatagcctgtgggaataactcaaagaaaatagtattcccaaaaaattatagaagatgcaaataatttcctggtttcataacttcggagcctaatgtaagaactagaaaagttc

SEQ ID NO: 204789 - DNA, 458 bp, Homo sapiens
ttataatttagtctgtcatattttatatgttacaaacatggtactcaaactcacttattattagagctatttatgccaagatttgatttgcccatggtttcctttgccacaccacagttgctaagcctccaaagcactcacattttttatctcagtccctgtaggtcagaagataaccaccatgtcactctacagcagtatgtaggcactctgcatgtaaaccatctaatgccctccattagtttttcagcaatgacttttattcaagaaatatttattgaatgaccccagctgtcaggtcctcttctagatgctgcagacaaagagagacaaaagtcctgtctttggagagtttacattgtagttgggagatgcagatacaaagtaaataaatagtacatatmttaggcaatgataagtgtgctaaagaagtataagcatgtctagggcacagaaac

SEQ ID NO: 204790 - DNA, 565 bp, Homo sapiens
tttgacaactcaagcatatccaaagcagtgtttacccttcagtcagacatatttcaagttactgaactatgtatctctttcccattaaaaagtgatgagagtttgtattattttgagcacaagaagagaccttgtatctccagtgcttagaataaatctattttaaattgagttatttatttgccttaagaaataatttatgtttttgtatttatccagagaataaccattattyccaataggactgttcaattataacatagaagctttaccttataaatattttcctaataaatctgacacattaagccacaagttctatttgtgggatgaagtctaaggacaaataatgcatttgtgagttaattatgtgttttttcaaactttacagtacagaaagtatcacctagagatactgttaaaatgcaagtttctggtgtacccccaagattctgattcagcaagtttggaaagtgagactaagaattttcattataataggctccagctgatgctgattctcatggttccatgtggcacacacagaaacaatggattaggcttt

SEQ ID NO: 204791 - DNA, 597 bp, Homo sapiens
tccatgtgttgctgatgtttagctcccacttaaaaaagtgagaacaagtagtatttggttttctgttactgcattaatttgctcagggtagcctccagttccatccatgttgctgctaaggacatgatatcattcttctttatagctgcatagtattaatattatatggtgtatctgcacaatattttctttatccagtccaccactgatgggcttctaggttgattccatgtctttgctattattaatattgctgcaatgaacatacatatgcatatgtctttatggcagagtgatttgtattgctttgggaatatagccagtaatcagactacyggattaaatggagctatattttaagttatttaagaactctccaaaatgctttccacagggtctgaactaatttacattcctaccagcagagtataagcattccattttctctacaacctcaccagcatcggttattttttggctttttaacaatagccattctgactggtgtgagatgataacttattgtggttttgatttgcatttccctaatgattagtaatgttgagcattgtttcatatgattgctggccacacgtg

SEQ ID NO: 204792 - DNA, 472 bp, Homo sapiens
tcccaccccacaatagtccccgatgtgtgatgttccccttcctgtgtccatgtgttctcattgttcaattcccacctatgagtgagaacatgcagtattttcatcacaggagattcggagaataaggaggaggaggagaagcagaaaatggaggaagaggagcccagagaagaagaggagaaagaggaggagggggagaagcagaagaaggtgaagaaggaggataaaaacccagcataaatatcactataaaaacccattcatggattgtatccataagcaaccagtgtattgccacaactgtgataagacagtggctctttgttgatacttcccttgtaattgaaaggcatggccttttcaaagaacrtgatgtttgcttatagaagacaagatatctgttttacttaattataaaatatgaagccatgttctggtccatcagtcttctaaaatggcttactgttcctgg

SEQ ID NO: 204793 - DNA, 435 bp, Homo sapiens
agatcttttgagacatcattaaacgatgtctgggacatctttccctctccctctgggaaatattttcctttcaggcaaggcacagccatgcctgactaggagagctcttttgggtttgaatctgtgcaaatacccagggatgactctggggacctcttgctctccttaccaagccccctgccttctcagcttttctcacctcttgctttctttaccaagctccctacctccccacccaagtacggcatgggtttaggtatctcccagggtacattaaacatctcyagccagcctgcctgatgatccaagtgggtatcatttattcagaagcatcactgagagtttttgatttattggtgataggtcagctatgttcttcaggcagctgatggtcatgccattaattttcagagattaagagcatgatggggaaga

SEQ ID NO: 204794 - DNA, 453 bp, Homo sapiens
ctagaatcctaaaagtcattgctagagaggctttaggatcaaggggtctcacaccctcatcttacaggaaaagggaagtggctcagtgcagctgasagcttaagcctcactcagttacagcaaatccacatgtgaatcccagcttggcccttcccatgctatgtaatcttggattactaaatcacagactcctcgtctgtaaagggggtcaatgtaaagatttcatgagatcatatacgtagggtgcatagggtgaccagttgtcctggtttgccagaaaccaaggggtgtcctgggatgcagaatgtaaagtgctcaaactggaatgtcccagccaatcagggcccgctggtcactctatgaacatgaagagactggctcaaacaaacatgccctttggctgttatgtttaaagagagctatgtctggagtcagctatcagtgagtttgaaa

SEQ ID NO: 204795 - DNA, 410 bp, Homo sapiens
cacaccctcatcttacaggaaaagggaagtggctcagtgcagctgacagcttaagcctcactcagttacagcaaatccacatgtgaatcccagcttggcccttcccatgctatgtaatcttggrttactaaatcacagactcctcgtctgtaaagggggtcaatgtaaagatttcatgagatcatatacgtagggtgcatagggtgaccagttgtcctggtttgccagaaaccaaggggtgtcctgggatgcagaatgtaaagtgctcaaactggaatgtcccagccaatcagggcccgctggtcactctatgaacatgaagagactggctcaaacaaacatgccctttggctgttatgtttaaagagagctatgtctggagtcagctatcagtgagtttgaaaccccca

SEQ ID NO: 204796 - DNA, 432 bp, Homo sapiens
cagcttccttcaatccgggctcatgagctgtgggtccctgggcaagtgacatggcctctctgagccttgatttatctcattggtaaaatgaagatgaatcttgctgcttactgttgggtgagtgaggagcagacgcaggaccagcacttggaccctgcgcctcagcccagctcttacagctctaagaggaggggatgtgttccccccaggaagttcataatcctcagcagaaacagtgcatacttcatggagtcactgcaaaatgaaaatgcagccccttattcaaaaattactgagaattcaggacagcaactgccaagtgttaaacaaagcrcaggccttctgagccctgtgtggctgcactggtcgccagcctgagatgctggccctgcccctcagctctagggaatttgagggaagagccctcttcac

SEQ ID NO: 204797 - DNA, 537 bp, Homo sapiens
agagaagatgccagtcaggctggaggagggagtctctgcagaaaacagagcagccacctgccaatggcaggtttccagtgtggtccctgatcccatagcagccrgagcccaagcccacaaggagccatgttctggaggtgcctttggtggccccaagcagccctgagaactgccaagttgaagctgctttttattctgttttaaaataaaatagtgatcacattcccaaggtgtggagacacccctcccctccacgaattagtctcagctttcccagccactcaggaaaggatccaaaggaattttccacccatgccttatgcagagcaaatcctggtggacaacagggtgcctgcctcacttccaggcaagagtcctcatctccctctttgtagcactcacatcttcccaacttgcctcccctagggccccaaggtgctgacaaggagcctttgtctccctcttcctggcctccatgccctttgccaagaaccctggccatgacgtctctgctgatgcaggtttccaaggctcatt

SEQ ID NO: 204798 - DNA, 557 bp, Homo sapiens
ctgttctctgtgggttcccagagaagatgccagtcaggctggaggagggagtctctgcagaaaacagagcagccacctgccaatggcaggtttccagtgtggtccctgatcccatagcagccagagccyaagcccacaaggagccatgttctggaggtgcctttggtggccccaagcagccctgagaactgccaagttgaagctgctttttattctgttttaaaataaaatagtgatcacattcccaaggtgtggagacacccctcccctccacgaattagtctcagctttcccagccactcaggaaaggatccaaaggaattttccacccatgccttatgcagagcaaatcctggtggacaacagggtgcctgcctcacttccaggcaagagtcctcatctccctctttgtagcactcacatcttcccaacttgcctcccctagggccccaaggtgctgacaaggagcctttgtctccctcttcctggcctccatgccctttgccaagaaccctggccatgacgtctctgctgatgcaggtttccaaggctcattt

SEQ ID NO: 204799 - DNA, 557 bp, Homo sapiens
ctgttctctgtgggttcccagagaagatgccagtcaggctggaggagggagtctctgcagaaaacagagcagccacctgccaatggcaggtttccagtgtggtccctgatcccatagcagccagagcccaagcccacaaggagccatgttctggaggtgcctttggtggccccaagcagccctgagaactgccaagttgaagctgctttttattctgttttaaaataaaatagtgatcacattcccaaggtgtggagacacccctcccctccacgaattagtctcagctttcccagccactcaggaaaggatccaaaggaattttccacccatgccttatgcagagcaaatcctggtggacaacagggtgcctgcctmacttccaggcaagagtcctcatctccctctttgtagcactcacatcttcccaacttgcctcccctagggccccaaggtgctgacaaggagcctttgtctccctcttcctggcctccatgccctttgccaagaaccctggccatgacgtctctgctgatgcaggtttccaaggctcattt

SEQ ID NO: 204800 - DNA, 264 bp, Homo sapiens
ctctacttactatctgggaggccctaggaaattgattttacctttctgagctcaagctccctcatttgtaaaatcgaaataataataccaataatttcatagggttctggaggagaagggaactacataagattctgatagaaggtaagcttcatgacagcaggtcctgagattgtgttatgattgtaaggacatgtgttccttctataaatattgrttgagttcataatcttatgagtgagtgcatatgtgaataaataatga

SEQ ID NO: 204801 - DNA, 553 bp, Homo sapiens
cttatgttcatttctttttgtaagacatagcaggtagtgtrctttttgtgatattagcagctattgatgctcaatgcctaaatctattaattttgtagggtttgtaaaagggtgatactctttctataattccatatttatttattacctataatacatctataatgtattatcaaatttgggtagcctgaggtacagttctttgaggaaaggcagaataaatgcatgctcctttccctttatttactaattttcacaatagtttgttcactagtatcctccacccatgatcggtgaatttcctttcgattatcataatgaagtcaaggatttaagcatctcgattccaaacccagatcttctatattctagttatagaacaacggtgcccaaatttttgctcaccaagaatcctgttgttttatccccaggactccttaattgaaaatatcttgctcactaaatccactgcataaaataggaattaattagttgcccaaattttaataagttaaagataatcatgagtcaaataaggttctgattgcaatag

SEQ ID NO: 204802 - DNA, 556 bp, Homo sapiens
agacttatgttcatttctttttgtaagacatagcaggtagtgtactttttgtgatattagcagctattgatgctcaatgcctaaatctattaattttgtagggtttgtaaaagggtgatactctttctataattccatatttatttattacctataatacatctataatgtattatcaaatttgggtagcctgaggtacagttctttgaggaaaggcagaataaatgcatgctcctttccctttatttactaattttyacaatagtttgttcactagtatcctccacccatgatcggtgaatttcctttcgattatcataatgaagtcaaggatttaagcatctcgattccaaacccagatcttctatattctagttatagaacaacggtgcccaaatttttgctcaccaagaatcctgttgttttatccccaggactccttaattgaaaatatcttgctcactaaatccactgcataaaataggaattaattagttgcccaaattttaataagttaaagataatcatgagtcaaataaggttctgattgcaatag

SEQ ID NO: 204803 - DNA, 596 bp, Homo sapiens
taactgcctttatttgagtacttactgtataccatatatatgcaaagcattttgcagacattatctcattcagaacacacagtgcaacaacatatacaaactgagcctcagagcagcaaagtgatttgtcctttactccacagccagcaagtggcagagctgcaaaacccattgaagaagattcactgggaggtgaagacttcccactgggaggctggacaatgacttggcagggagttggtcagttaagtccactctcattctaatratctgtgaactcaaagtcctgtgatattggaagcaagggttttttgtgtacttctccactttatttccagccttctgcttatgaaacatgggacacagtattatcaagctcttggctattttgaacaaaagtgaattggtaagaatatctcatgggaccaaatgtagctgaatgacagtccctaggaatgaaaggactttggcaccctggggaaccaggtggctgtggaaaccagtggtttcggggcttggtgacaatgattggtcagctccacctatttctagtctgtctttgctgtgcttaagatttcactcctaggagagagctg

SEQ ID NO: 204804 - DNA, 362 bp, Homo sapiens
aggtcactggcttgatgcactgtaaattggcaggtgtcaggggaatctatgtggtttttcttttttctatttttttttttttttttgagacagggtcrtactctgtcacccagaatggagtgcagtggcacgatctcagctcatggtaacatccgcctcccaggctcaagcgattctcctgcctcagcctcccgagtagctgagattacagcacgtgccactaccacccagctaatttctgtatttttagtagaaatggggtttcaccatgttggccaggctagtctcaaactcttgacctcaagtgatccacccgcctcagcctcccaaagagctgggattacaggagtgaaccactgtgc

SEQ ID NO: 204805 - DNA, 442 bp, Homo sapiens
tccagcctgggcaacagattgagggagactcagtctcaaaagaattttttaaaaaagtaaataaataaataaaatgaattctccagcaggccagcttcctgagcatagggcatggctgtcttgttcaccagcctgtgcctgccacagagatggggtccagtaagcatctattgagcactgaatgaaccagagaasgtatatgagtcccccaaggtcacacagcccatctttggctgaaatagaggagctctcattcccatgtggcctgtctatgccttaaagaaagtccaaagtaggcagagtttggacttagagaggatccttcatgtggcaggatgcatctttgaagacctcctttggttgggagcctctctgctgagcctagtttagccactgatgatcagggaggctggggaaaccgttcagctttaagtagagtgtt

SEQ ID NO: 204806 - DNA, 609 bp, Homo sapiens
atgaaccagagaaggtatatgagtcccccaaggtcacacagcccatctttggctgaaatagaggagctctcattcccatgtggcctgtctatgccttaaagaaagtccaaagtaggcagagtttggacttagagaggatccttcatgtggcaggatgcatctttgaagacctcctttggttgggagcctctctgctgagcctagtttagccactgatgatcagggaggctggggaaaccgttcagctttaagtagagtgttaggaatctgtgaacactaaagatctgccggaaggagctacccagtggcttgggaatgagatataagctccattacactaggcacagccagtaccaggagagggagtggtaggggtggaaccagtccctgctgaaccagtccaccctgcgccaatgggacagagtttagttggaggacagcatgggatgagaaaggcaaccctcctcccactccaggtccagggcaggcattgctcwcggatcactgagttccttgcagccaggccaggatgtggcctcagattccctttaacacagagctccaggaatcaagaaccagtcaacccgagctggacctcaaaaggaagct

SEQ ID NO: 204807 - DNA, 549 bp, Homo sapiens
ggagcaccctttatatatcagggaaaatcactttatgacaaagaattgtattctgtgaagatgtcartattacatcaggcattaatttaatgaggctgactctttcaaatataacatgcaagtgacaaaaggtaaggatctcttagagtggaaacagaaggaaaaaaatagcagagaaagaaaacacagttgctggaaattcctatttcacgtgaaataaaaagagtttctaaaggaaacatggtcttaacatgaaaattaacaacgtaatgtcttggcttgcttttattcagagttcactgctctagaactcaatagttgaataatatgattgtttaattaaattgatagctatgaaatggagaggagatgaaagccttaacatttcagagttatcatttgctaatactttgaagattaaattctcaccccattaaatttactgtgcctagtcacaacttagacttctaaagaaattattaagggttacccctcccagtgcacatgtgggcacccaggctgagccatcaccgggctaagctgccctgg

SEQ ID NO: 204808 - DNA, 489 bp, Homo sapiens
agatgtgacctggaaatggtcccaaaaattgaaatactttacagtgccaggaacaacatcatgtcaaacaaagaggaaaaggaactgttagcagaaagacatttcttcagtttgtatgtgcccttaagaggcaaattagtattaggatgtggagcaacagtatagtggagtccgaaatacacttttagcttatggtgaattttgaggctcaagagaacaaagcacataatttcggagtatattataacctggaagagctgagcccttcagatttgtcctctgagttcccaaagtgcattactttctctcaggggaaagattcatcaatgtgcaycagatggggttgaagggaatgactgatgttcaacattttgtgtgggtgttgatttgcaaacaaggagtgattttttaaactagcatctgtgtttgccaatttttttttaatcttggttttcattttagaacacaatctttcaagttttcataaaa

SEQ ID NO: 204809 - DNA, 561 bp, Homo sapiens
aagcttctgtcaatggaatcatacagcatgtgctcttctgtgtttggtttcttttggtcaacgctaagcgggcgacattcctttatgctgttgtgtgcagctcacccgttctcactgctgtgcggtgctgcactgatgattgtgccgcaactactctatccaatctactgttggggagcatttgtttcctctctttcttttttgccacggtgaaaaaagtttccgtgaacattcccgttcacgtctttgtttggccacatgtacacatttctgctgggtaygtgcccaggagtggaatgactgagtcacagggttggtgccaagtggggttttgagcctagacatgcctgctctaaactcaagagcggtgccatgccatagatcactgtgtggatgtggaggcctacagaggagacacctgaggtggcagtgggaatggagggggagggatgagaagcaggagctgcagagggaggcctcctgggcagatggcagtgctgtgttagtcaggcttgggggagtctctaggtgcctgtgtgacccccaggaggcactatccag

SEQ ID NO: 204810 - DNA, 561 bp, Homo sapiens
aagcttctgtcaatggaatcatacagcatgtgctcttctgtgtttggtttcttttggtcaacgctaagcgggcgacattcctttatgctgttgtgtgcagctcacccgttctcactgctgtgcggtgctgcactgatgattgtgccgcaactactctatccaatctactgttggggagcatttgtttcctctctttcttttttgccacggtgaaaaaagtttccgtgaacattcccgttcacgtctttgtttggccacatgtacacatttctgctgggtatgtgcccaggagtggaatgactgagtcacagggttggtgccargtggggttttgagcctagacatgcctgctctaaactcaagagcggtgccatgccatagatcactgtgtggatgtggaggcctacagaggagacacctgaggtggcagtgggaatggagggggagggatgagaagcaggagctgcagagggaggcctcctgggcagatggcagtgctgtgttagtcaggcttgggggagtctctaggtgcctgtgtgacccccaggaggcactatccag

SEQ ID NO: 204811 - DNA, 521 bp, Homo sapiens
catggtgttctcccctgcattggtgtctcaaactcccctctgcctttctcttttaagggcaccagttattggatttagggtccaccctaaatccaggatgctcacatcttgtgatccttaaattaacgacatctacaaagaccctttttccaaacaaggccacatttgtaagttccagagttgagacatggacatatctttctgggagtcactcactattcaactgactacaaccagggaaaaggctgatttcaaagtcargtcaaatcaattgcaaaggccaggtattcaccctgatattgtgtaagcctggagggggacttgcctgctgggtctaactaaattgagagctgagctgaggtggtgctggccttagagaggagaagaaccatgatcctagcccctgggaaccctggcactctgccttcctctcctcctcaccccgttagtgtagacaggctccatgctgggctcacagcagactgggagagcagggcaagcaggaccactgtgtggtgttg

SEQ ID NO: 204812 - DNA, 505 bp, Homo sapiens
cagcagcgggcgtgggagatacgggcatagaggatgcaaacgctgtcaggggttcagcctctcaggtgagtgatgtggactctccacagccagcatgtagcctggacacctcccacaggatgacccccaggactaatcagctgggcgtagccaaagttacctcctctctgttcttcctttcttctctgtagccccaaatcacaatgtttggttggtttcctcccctaagaacagcttttattgtctctgctccctatcctgacccttcattgctgaggcctgaggatctctgtcttttgttccctcacctgtctgcctgtctcctctcctttcctgcctggggggactgtccagaagacatcatcgtccagttcctctgcatttgaacagctgttcccccacccctcaataccgtttagagcagaagccagcaaatactatckgtcagggacagatagaaactattttcggcttcatgggccacacagtctcattgcagctcctc

SEQ ID NO: 204813 - DNA, 469 bp, Homo sapiens
aatccaagcagcctccttaagcctctgttatgagcggaagtgtggatccaccccaccccccatcattcatatgttgacatcctaacccccagtgactcaraatgtgactgtattggagacaaggtcttaacatcggtgattaaggttaagtgatgtcacatgatgggcctgaattcaatgactggtgtccttacaagggaaggaaattaggacccaggcacacgcagagggatgacccctgtgaggacacagggagaagacagcatctaccggccaaggtgagaggcctcagaaggaagctctgctgctggcaccttgacctgggatttccagcctccagagggggagaaaatcagtatctgccgttcaagccgcccagtctgtggggctttgttttggcaaatgtagcatctgctgtgtggggcgagggggcctgggtctctccgtcctgaacaagtgcctccccggg

SEQ ID NO: 204814 - DNA, 469 bp, Homo sapiens
aatccaagcagcctccttaagcctctgttatgagcggaagtgtggatccaccccaccccccatcattcatatgttgacatcctaacccccagtgactcagaatgtgactgtattggagacaaggtcttaacatcggtgattaaggttaagtgatgtcacatgatgggcctgaattcaatgactggtgtccttacaagggaaggaaattaggacccaggcacacgcagagggatgacccctgtgaggacacagggagaagacagcatctaccggccaaggtgagaggcctcagaaggaagctctgctgctggcaccttgacctgggatttccagcctccagagggggagaaaatcagtatctgccgttcaagccgcccagtctgtggggctttgtttyggcaaatgtagcatctgctgtgtggggcgagggggcctgggtctctccgtcctgaacaagtgcctccccggg

SEQ ID NO: 204815 - DNA, 469 bp, Homo sapiens
aatccaagcagcctccttaagcctctgttatgagcggaagtgtggatccaccccaccccccatcattcatatgttgacatcctaacccccagtgactcagaatgtgactgtattggagacaaggtcttaacatcggtgattaaggttaagtgatgtcacatgatgggcctgaattcaatgactggtgtccttacaagggaaggaaattaggacccaggcacacgcagagggatgacccctgtgaggacacagggagaagacagcatctaccggccaaggtgagaggcctcagaaggaagctctgctgctggcaccttgacctgggatttccagcctccagagggggagaaaatcagtatctgccgttcaagccgcccagtctgtggggctttgttttggcaaatgtagcatctgctgtgtggggcgagggggcctgggtctctscgtcctgaacaagtgcctccccggg

SEQ ID NO: 204816 - DNA, 641 bp, Homo sapiens
tagtactggggtgaaccttgacagcattccgttatgtgaaaaaaaaatcagacacaagaggctgttttttgtgtgattccacttatatgaaatgtccgaaataggcaaatctgtagagacagaaggcagattagtgcttgccagaggaggggataatgggaagtgagtgcttaatgggtacagagtggatttttgaagtaaagaaaatgtcctggcattagatcatggttatggttgtacaatatgtgactaaaagccagtttagcatataatttaaaatgattmaaattgtgaatttaatgttatatgaattttatctcaattaaaaagtgcatataaataaaaaaattatatggagataacaattttcacctaatactggcaaaaagcgaaagctttcattccacattgggttgatgaagacacactttcggctgggtgcggtggcttatgcctgtagtccaagcactttggaaggctgaggtagacagattgcctgagctcaggagttggagaccaccctgggcaacatggtgaaacccatctccactaaaatacaaaaaattagccgggcgtggtggcaggcacctgtagtctaccagctactcgggaggctgaggcacgagaattgcttgaaccca

SEQ ID NO: 204817 - DNA, 568 bp, Homo sapiens
atagacatgattatacatgaatatcattaatcattagtttgtagcaattactccttattccaatattataataatcctcgttctacaattatwacctaggaaaaaccaggctatacagagataggtgctgaagggacatagtgagaagtgaccagaagacgtgtgagccctctgtcatgcccagaaagggccactagagggctccttggtctagcggtaacgccagcatctgggaagacacccgttgccaagcagaccgtggtctagtggtagcgtcagtgccaaggaaaaacacccgctacttagcagaccaggaaagggagtctccgtttccctgggggagtttagagaagactactcctccacctcttgtggagggcctgactcatgtcaggcccacctgcagttatctggaggcctaaccgtctccctgtgatgctgtgcttcaatggtcaggctcctagtccgccttcatgttccatcttgtacacctgactctgccttttagatagcagtagcaaaattagtgaaagtactaaaattctctgataagcagaaataatggtgt

SEQ ID NO: 204818 - DNA, 517 bp, Homo sapiens
agttcactgcagccttgacctcccagactcaagtgactctcccacgtcatcctctctagtagctgggatsacaggctcatactaccaggccggagtaactttttgtttttatgtttaggagagatggggtcttgctatgttcccccaggctgatcttgaactcctgggttcaagcaatcctcccacctcgacctccaaagtgctttgactatgggcatgaggcactgtgcccagccacatttagttttaacaataaagtcatactatgttcatggaccagaagatcaaatatgaatatgtgagtcttactgtgtttctttaatgaatttaattaggtataatttacatgaaataaagcacacctacttgaagttcacatttgcatgagatttgacgagtatgtacagcctgtatactcaccacactgcagatatacagcatttctagtatgccaagggcttttcttcccaccttctatgctgggcaaccactgatatgtcctctttcattgtgagtt

SEQ ID NO: 204819 - DNA, 530 bp, Homo sapiens
gctgtgtggggttgttacaatagctccacagggtcatcagaaaaccaggctccccatgttgttgtcagygacatccccagatctctagctttcattctcacagttgtctcatagtcgccaggtggctgcaccatctccagcatcacgttcatcttccaggaagtaagaagaggaaggtgaggaggaggaaatgatggtgctagtgtcagaaaagcagaactcccaaaactctccagcagatagcctcttaagtttggtatttttaagtagacaagtctctcaaaatgtgcgctcagtaatctagtggagttaaagatttcttttatttatttatttatttatttatttatttatttatttatttatttttgagatggagtttcactcttgttgcccaggctggagtgcaatggtgcaatctcagctcactgcaacctccgcctcccgggttcaagcgattcttctgcctcagcctccccagtagctgggattacaggcgcgcctgccactacaccctctatatatatatt

SEQ ID NO: 204820 - DNA, 562 bp, Homo sapiens
tctcttctatactacatactagagtttctcacagagcagccagagtgactcccactaaaatgagtgtcagttcatgtcactcttctgctctaaacgcatcaataactatgatggacttaggatcctgcaatatttgcagctcctatgtctcttcaacctcatttcctacctaccattgttcagtccacactccacccccaacacgtaactctgccttatccacactgtcctactttgtttctctaaaacatcagatgtgttcyggcctcagagccatggtacttgctgcttccttgatgattctctactgctcatactgtactcactttctttctgcaggtgtttgcccaaaggccattctttggcccccaggactgtccaatccgttctcccatttcatttcctgccatagcacttatttcatgcctatttcatgtatatttgcactgcttatttgttcattattttcatccctttccccaataaatgttaagcccccgataggaggaatattttatatttgtaaactgtgtgtttataaaaatacagaatggcacaagga

SEQ ID NO: 204821 - DNA, 542 bp, Homo sapiens
aatctttcaggagtgtagagaagcagtgcatttcaaacttgggaatgatgggacaatgaccttttagggaggtgatgctaatgttctggagaggagaaatgggaggtgaggctgcagcagaataaggagtaagaggggctctcggctcaggagtggttgtgttaagccgtgttcagaggaagctcagacatgcatcgtagcatactggcacaggaagagatggaggactgggacaggagggggccatgtctctggttgggtaatggggacaagagtgccatcagcgagatggagaacccatcaggagaagtatgtttaggggtgtgtcaaccaagtgtttctgatgttttgacatctggggcattactgacccttgagagactgcctttcccaaggatagtagatttctagagctaataaaggacttgcatacaagtgcacctttcatgkgcaaaccagtcaatctaaagcccacactaccagctggatcctttattgagctcttacactccagaccacaatcctccttaataaacccaggg

SEQ ID NO: 204822 - DNA, 466 bp, Homo sapiens
catgaacttttgctccaagaactactgcaggaacataccaagaaagccaaaagaatccacagacccactgaaggaattggatcaccactgcaggctccctgagaccccaaaaacctgtgagtcagcttgcattctcagcagggaggcctgtggtctgaggcaagttctcagcctggtcactggctgcctggaaatagacgcaaggctgttagtggggcacagtgggagtgagatgggcctctaggactgtgggctgcatttgggagagggktgaggcctgtgactgttgactttcccccactttcctggtgacctgtgtgactcagcataggtagccataatcctctccttgggaatataactccattggacagggaaccacacccccatcccccacagcagctacagcaagccctgcccaaggagaggctgagctcagacatgcctatccctgctaccacctggt

SEQ ID NO: 204823 - DNA, 400 bp, Homo sapiens
gtatgattttaaaaaccttctattggtgctcccttccaccacactctcctttctccaattcatcttagatcctcagtggcatcatggaaaggatttggaatgtgagctgaatttagatcacagttaaaactttaccttcctatattacctgggcaagttagttaatstcttcacatataaatttgtttgtctgtaaaatgtaaataattttaccacccgtgtgattatattatatatttcgcatgtagtagatttcacatgtaatatggtttggcggtgtccccacctaaatctcatcttgaattgtagttcccataatccccacacatcatgggaggaacccggtgtgaggtaattgaatcatgggggcagttacccccatgctgctgttctcatcata

SEQ ID NO: 204824 - DNA, 402 bp, Homo sapiens
taaaaaccttctattggtgctcccttccaccacactctcctttctccaattcatcttagatcctcagtggcatcatggaaaggatttggaatgtgagctgaatttagatcacagttaaaactttaccttcctatattacctgggcaagttagttaatgtcttcacatataaatttgtttgtctgtaaaatgtaaataattttaccacccgtgtgattatattatatatttcgcatgtagtagatttcacatgtaatatggtttggyggtgtccccacctaaatctcatcttgaattgtagttcccataatccccacacatcatgggaggaacccggtgtgaggtaattgaatcatgggggcagttacccccatgctgctgttctcatcatagtgagtggatt

SEQ ID NO: 204825 - DNA, 259 bp, Homo sapiens
aaattttccagtttttcttcagctactgatttctagttttattctattgtgattggaaaagaggagaakgtatattctgctgctctttggtgaaatgttttgtatagatctgttagattaatttgttctatactgttgttcagatcctgtttccttattgatttttttcaaatgttatattattaaaagtgagatattgaagtctctcacaattatcatattatttatttcttttatcagttatgttacattttgcatt

SEQ ID NO: 204826 - DNA, 584 bp, Homo sapiens
aatttgttctatactgttgttcagatcctgtttccttattgatttttttcaaatgttatattattaaaagtgagatattgaagtctctcacaattatcatattatttatttcttttatcagttatgttrcattttgcattgtatatttaagtgctctgatgttggatgtgtatacattcatagttgttatatctttttggtgagttgatcattttatctttgtataatatccttctttgtctcatgacagtttttgacttaaagtctattttgtccaatataagtatagccagtctttcttttggttaaaatttgcagcatgattttttccatccctacacttttggcctatatgtgtccttaaatctaaacttaataagtttattaagtttattaataataataagttatgtaaacttaataagttgtcaaacttaagaagtttacataaattgatccaatataagttggatcttgttttttttcatccattcagctacattatgtcttttgattgaggagtttaatccctttatatttagagtaattaatgtacttccttttgatgggcgagtacttactat

SEQ ID NO: 204827 - DNA, 523 bp, Homo sapiens
tcggctactcagaaggctcaggcacaagaatcgcttgaacccaggaggcagaagttgcagtgagccaagattgtgccgctgcactccagcctgggcaacagaaaacagaaagagactctgtctcaaaaaaaaaaaaaaaagaaaagaaaagaaaagaaagaaagaaaatagaaggaaaaaaagacttttgttggtcacttcagatatatgattgagctctcgaacagctcataaattttttaaactggtcaggaaaacaaactctaagcayccaaaagatattttctgtggctgtttttgttgttttgtttgtttgtttattttttcccttttttgttagacacaaaacttaaaattgattttcccattttgctttcatccattaattgaacaaacatttgttaagtgcctactatatgtcagacctgtatcaggcactgtgaatacagcaatgaacaatcatttactctattcatggtaggttagctttacctaaaatctcacacatcatactggtgcagaa

SEQ ID NO: 204828 - DNA, 624 bp, Homo sapiens
cctggttacaggctgtcttaagattcctcggatagtaatggactttgaggacagtcgttcagggcaggagattaaaactgagaagaccacaccagtgtccaggaggaagtccacttcctggacctcaacagtcaaccttacctgggactctgtgtgggtgatggcatgagctggcacttgccccaggcacmttcagtcctgttgctgaatcatctggttgggtgcctctggtccagagggccttcatcctctggagcagtgcaccttccaaaccttcctttcaaaccttcttggcatattggacatgggcgaggggacagtttgttttttgttggacaatttttcttaaagtgtccttgcaaactgcactgataacaagccctactaagcgattggcctcctcttctcttggttccctctgagccaccaaggtctgcctgtctgagggccatgtctaaggctgcagcctttatcttatcttgcttgtcccttttggcctgttcctcttggtccctgttatagaataccaaggttgccaggtttaataatgtctccaaattttgttctgggcctaaagcagactatgccagacactgattgggtgataaatttatcctttaaaat

SEQ ID NO: 204829 - DNA, 572 bp, Homo sapiens
attgccaaatacccctctagaaggttataccagtttctactcccaccagcaatgtgtgaaagaggatcttttttcctaccacttcagtaacagtgtatattatcacacttttaaactttttccagtgtgataggagagaaatgatttctcagggttgttttaaattatacttatctaattgtgagcaagcttgaatagtttttatatatttaaggaacttctatctttttctstattataaattgttattattttttccaatttttatagagatttctttttcttcatcttctaatttttaagagttctttacatattagaaatattagttcttcatccattatatcctatgttacaaatatttttcagcatttatcagataccttttgatttttgtttatagtatttttttaccatgcacaattttttgtttataataaaaattatcaatctttttattaattgcatttgaatttttttaataatagttagaaatccagtttaaaatggaattcacccatgcttttttctaagtacttgtatggcttaattatttctattttgatcccagg

SEQ ID NO: 204830 - DNA, 572 bp, Homo sapiens
attgccaaatacccctctagaaggttataccagtttctactcccaccagcaatgtgtgaaagaggatcttttttcctaccacttcagtaacagtgtatattatcacacttttaaactttttccagtgtgataggagagaaatgatttctcagggttgttttaaattatacttatctaattgtgagcaagcttgaatagtttttatatatttaaggaacttctatctttttctctattataaattgttattattttttccaatttttatagagatttctttttcttcatcttctaatttttaagagttctttacatattagaaatattagttcttcatccattatatcctatgttacaaatatttttcagcatttatcagataccttttgatttttgtttatagtatttttttaccatgcacaatttttkgtttataataaaaattatcaatctttttattaattgcatttgaatttttttaataatagttagaaatccagtttaaaatggaattcacccatgcttttttctaagtacttgtatggcttaattatttctattttgatcccagg

SEQ ID NO: 204831 - DNA, 442 bp, Homo sapiens
ttacaaaaatcttataaccattgccaacctgtagttacaactgacaatataaatgttggttaacatttatatatactaatgagtaagataaaaattaaataactaaggtatatgctaaactcacttgtcaatgagtaattttttattgaattacacaatagttttcaaatatacaatttcctgtgcatctcttcccaagtctgcattcaatgatgtcacagtgctagctttaaatcagccatggtgggagtatttatagcatgcaagtcagaaaatgcgacaaattaggactcgtgatgtgcagcaacacaatattatatagtattttcaacatayagatacaatagatggaaataatctcaagaacatgagtaataacaaaatatattagaataattgggagtgatgagttttgagtatttattgcctttgtttttcatat

SEQ ID NO: 204832 - DNA, 569 bp, Homo sapiens
tatattgtgtttttagaatcatattttgtttacatttagatatatatatatcaaggtttaaaaaacattacctttaactggtagagtgtatatgttctttaaggtattcatggttttagtcttgctctagaaattacgataaaacttgattttaaaggtatttcccaaaatctgccttcttaacttgctgctcacattctaagaataagtcagttcttcttagaagtattatttattgctttttttggtcagtatctcaatcttcatatctgttctggttttttagcaagttggtatcccagcactcactattctttctaaaatcttctgatatttaaaaatccttcctcattatagttttttacctacatgaactatagayttgctgatttaagacaatatatttctgccttgtaatctgtaagaaggcaattatttgttttataaataaagaagggaggagttaactacaataataaatagtagatggaagctactaacagttggaatgctattagaagatcattacaatagccattctaacacatgtgaagtgatatctcactgtg

SEQ ID NO: 204833 - DNA, 427 bp, Homo sapiens
tgaattccattttggtaagagatggtttaaagtaatgattctcaaaatgagggctgcaagcagtttcaggggatctgtggtcaaaacccatcttacaaacagtttcagggggtctgtatggcccaagctattttaatgactatactaaggttttatttatcattttcaccatggtaacatttttactgaaggtactaaagcaatggtgggtaaaactgctggcartttaacaagaatcaaggctgtggcaacacattttcttggtagccactgtatatctaatcactgcacatatagagtaaaaaataaaccaacaatttcacttaagaatgtccttgatgaaggtgtgtattacgattatccccattttacagatgagaacattgagatgcacagatgttaagtatgtttttcaaggtcaaacagc

SEQ ID NO: 204834 - DNA, 489 bp, Homo sapiens
gttagttgcctggatgtagcccattcaataattcagcatcagaatgataacaaaccacatgaaagagatcagcacatgctgtggaaggctgcttgacagagcaaggcaacaccayggtatcaggttttcccctaaaattagtctccatacggtactcataacgctgtctggacttcaggcaaagaactggccggttggcagcatccatttacagaatacattcccacagcgtacctggaaaatcacattcacatctaacaccgaggatctggccagcccttccgtgggaagcgaagccaaggtgagagaaagtatctctgatggggcggaggagaacagatgggcacagggtctgtacacgccccagtgagtgaggaagggcagtccgtccagagggcaggtgaaaagcaatacctagaacattgatggaggcccttgtctgttccagggggagggggctcaaggggtcccggacccctttctctcgaa

SEQ ID NO: 204835 - DNA, 542 bp, Homo sapiens
agagctagggtgtgaccattgataaacagagatggtgaaaatgccgtaagaaagaaaggcagtaaagtttaggatgtgaggctagaggaaggtctagctcattgttctcctgcagccctgaacccacatcaacaatatcggttggcaagccactatcacatcacattgagaccacctgtaccactgtcaccatkaccagcagcactgcccggcactgtaaccatgatggtcttgactaagtcagcatctctgtgtactcacctcctgtcttcctctaagctcctctcaacagattctctttgtccagggttcttagccagcttggatgtgaagctgaggtgaggctgcttacagccgtaaatagggagcaaacactatgcccgcgcccgagccctggatgttgctgtatccacgctatgtgggcatgtgatggtgctgtccatctggaaatcttagaaaacggtgtttttacctgtgctcatggccgtgggcaaaaggcctcttacagactcttagaagaagataacataataaaagctaat

SEQ ID NO: 204836 - DNA, 434 bp, Homo sapiens
cccttggcagaaggctggggaatgccccccaacgcccaggagcagaaacaatggagaaggccaatgattggtccaactgcattgctgtgggaagagaacagtgactgcaccaccaagttaaagggcaaagtatycccacaccccagctctctgccctgaaaggatatgttcacccctaactcctgtgaacctgtgaaggtgactttatttggaaaagggtctttgcaaatgtaatgaagtaaaggatgccgaagtgaggtcatcttgaatatagggtggctcctaaatccaacaacgagtatgcctctaagaagaggggaggacagacgccacagagaagatggccacgtgataaagccacaagccaaggaactcctggagctgccagagcctggaggagtcaggaaggaagagcctgcagagggatcgtgacc

SEQ ID NO: 204837 - DNA, 437 bp, Homo sapiens
tggcagaaggctggggaatgccccccaacgcccaggagcagaaacaatggagaaggccaatgattggtccaactgcattgctgtgggaagagaacagtgactgcaccaccaagttaaagggcaaagtatccccasaccccagctctctgccctgaaaggatatgttcacccctaactcctgtgaacctgtgaaggtgactttatttggaaaagggtctttgcaaatgtaatgaagtaaaggatgccgaagtgaggtcatcttgaatatagggtggctcctaaatccaacaacgagtatgcctctaagaagaggggaggacagacgccacagagaagatggccacgtgataaagccacaagccaaggaactcctggagctgccagagcctggaggagtcaggaaggaagagcctgcagagggatcgtgacctgctgac

SEQ ID NO: 204838 - DNA, 400 bp, Homo sapiens
aacgcccaggagcagaaacaatggagaaggccaatgattggtccaactgcattgctgtgggaagagaacagtgactgcaccaccaagttaaagggcaaagtatccccacaccccagctctctgccctgaaaggatatgttcacccctaactcctgtgaacctgtgaaggtgactttatttggaaaagggtctttgcaaatgtaatgaagtaaaggatgccgaagtgaggtcatcttgaatatagggtggctcctaaatccaacaacgagtatgcctctaagaagaggggaggacagacgccacagagaagatggccacgtgataaagccacaagccaaggaactcctggagcygccagagcctggaggagtcaggaaggaagagcctgcagagggatcgt

SEQ ID NO: 204839 - DNA, 470 bp, Homo sapiens
aaggcaagtggacacataaaattaacagctgatttgtgtctgccagcatcctttcccccttttgcaaggaactcaactcacatggtccttaggaagcctcctctccttcacccaatccttggaaccatgtgtttgggtacacagactgaaccgtggatttcaggtgtagattakgagtcaggcctgatcagtcagcttgttccttttcacttcatgctcaccttcacttcttcctacaggccatagggattactttcagctttcaggatggacacataacccaggctggccaatcagagtattttttcttcttaccctctactcctggccagtgtggtagattcaggattggacggtaactcaagcagttcctatgagaccctactcaggtgaaattgtgtgaactgtaagaagaactgagaggctgggacaggaaagaggaaagcttgtgagtcctctaatccatttga

SEQ ID NO: 204840 - DNA, 509 bp, Homo sapiens
ttctcttttgaggtccagttttcaaaggaactgattgggcaactgcaaaatgagtatgtgaagacattaagtggaccaatttgtaattcgattattataattatctggatacctctttggctcaaaaggcaaatgttgatctgttttaagaacagagaatcataacgcrtagagccctaacctgccttcctagcctcacctgatgccttctcaaccctcatctagggcttattcctttcctttatgacttgccaggaacaagggaagaataggaaaagtcaaaataaataccctggcttctcttgccatttcatctcctgcttgctgctagcttccttctgacaagggagaagtaactgggattcacttttccattttcctagctggatgatccctccctgacaatccagaatgagatgatggtgcccgggcatggggggagtatccacgtgtgctgatacctcctcacctacccttccccagagtagatacacattgcccccaaagaa

SEQ ID NO: 204841 - DNA, 575 bp, Homo sapiens
ttaatggggtccactgggtagaaggtagagatgatgaaagacagacaggaggtttcaagggaaggaggcagaagctgatcagcctcacagttttgtggatagaagatcctagaaccaagttcaatttcttagtccttctcaatttgttggtggaaatsgctacatttggcatcttcaagacatcaagcaggaccaaccaaatggctgtggcttttggttttctgggtctgatctccaggactcggggatctattgctggggtctgaagaggcaggttgtttgtgctccctcaatccatctagggggctctcaaacttcagtaactcacatttcatcttcaagagttttgcctgattcaagtactgcttgcattattaattactactacttctttaactcactttttacaacttacattaacttataaatttattttaataagaaagttgatattactatcataaaaaactgttatcatttgctataaatgtcaggcatacactagtagatattaacataaattcacaacattagataaatctcatatagcattgctagcatcttatgtcccacca

SEQ ID NO: 204842 - DNA, 229 bp, Homo sapiens
tcttttgcagtggatattcagttttcccagcactatttgttgaaaagactgtcccttccttattgaacagttttggcacccctgttgaaaattatttgactatatatatgatagtttatttctgggctctctgttctattccactggtctatatgactgtctttatgccactaccacactgtttgattactgtarctttgcagtaagttttaaaatcaggaagtgtgag

SEQ ID NO: 204843 - DNA, 553 bp, Homo sapiens
tttgtctatttttgctttttctgcctatgcttttgaagtcttaaagaattcttgcccagcctaaagttgtgaagaatttcctctgttttcttctagcagtttaatcaatcttttcactttttatatgtctatttagattgtctattttttcttgagccagttttatgggtaatctttttattttcaccctttttgtgactttgaatagaaaaatgtgtattttgttgatagaagatagttagatccattatccattttgccaatctctgtgtaacagagtctgattccgttttgatgtttgactactggcaggttttaaactacactactcctgtcttcctttttgcctcatttataggccagctgataagaaagccttccttaacactggtggaaagtttaagccatacaagccctgatcattcawaggaaccaccacctcagtctcactccctaaccaccataaaatcctaatctccctgctgtcccaagctattattggacctgctcaagagcctgccaagctctcccaagaactcctcattatgtaaat

SEQ ID NO: 204844 - DNA, 501 bp, Homo sapiens
gaattcctgtactgttaatggtgcctggcacctactaggcttcagtaaaccgatttggggtgaataagtgagtgaatgggtacattttacttttcagcttaytttaagtgagaaggagggctgggcatgcagggatgcaggtctaccccctccacagtacattttcaacatgggaagaagttgctgcccttcccacagtgactgcatttcatgcctttctctctgcttactggcatgtccttatcagtgggagttctgaagagaagacacaattcttgttcatggagaaaagttatctttcttgagaacacatagaagttggagaacaacctaaggcaaaaggtttactgggatggatggaattgagggcaaacatgtttgggttagaccagtggtccccaagcactggccagctccatcagagtcccccaagaaagcttggaagcaattcacgtttagtagactgagctctggaaattcagagttgagaaacctgaagca

SEQ ID NO: 204845 - DNA, 502 bp, Homo sapiens
ggtgcctggcacctactaggcttcagtaaaccgatttggggtgaataagtgagtgaatgggtacattttacttttcagcttactttaagtgagaaggagggctgggcatgcagggatgcaggtctaccccctccacagtacattttcaacatgggaagaagttgctgcccttcccacagtgactgcatttcatgcctttctctstgcttactggcatgtccttatcagtgggagttctgaagagaagacacaattcttgttcatggagaaaagttatctttcttgagaacacatagaagttggagaacaacctaaggcaaaaggtttactgggatggatggaattgagggcaaacatgtttgggttagaccagtggtccccaagcactggccagctccatcagagtcccccaagaaagcttggaagcaattcacgtttagtagactgagctctggaaattcagagttgagaaacctgaagcagggctcaggaatctgaattc

SEQ ID NO: 204846 - DNA, 441 bp, Homo sapiens
gggtgggagaacttgcttctgttgctagcctcattacagttgtgttgggtgttccccctgtttccccagccatcacatgggtgttctggggaggaggctgtggaagcagtggggaaagagctaggcaagtttgaggcaaacccagccttgggctacctgcttcattctcctgagcctcagtttcctcatgcctgaaatggggaaaggatgcctacctgtggtgggctgttgtgagcattaggggcagtggatgtaccgtctctgaggtcagatctggcccacagcacacagtggatgctgagtacagagtcgttgttgcagtgaagtgaggccaagggagctcagcagggtgaaggggatttgcagacaactgctctatctccttcctctgccacsacttccttggtgaggtcagggaaagccctggaattccagtgaagg

SEQ ID NO: 204847 - DNA, 419 bp, Homo sapiens
cggtctcacaaagtgctgggattacaggcgtgagccaccgcgcccggctgtttcttagaactttaaaagctgaaatcaaaatatttttagagaatcccatggtactggaacacactggctaggaggtcagggaaataattctatattatttctgtattatttcaaggttctccagacagacagaaccactaggatatacagatcagtagatatatgacaggaggcttactaggggcgttgrctcatgggattatggatgccgagaagtcccacaacaggcagtctgcacgttggagacgtaggaaggctggtagtgtggtgggtccaagtctgaaggcctgggaacctgggaaacccgtggtgtaattctcagtctcaggcccaaaacctgagaacctggtggtgagcgggtgatggag

SEQ ID NO: 204848 - DNA, 605 bp, Homo sapiens
tacggcccaagacttctccccagttctttatacctgcaggctcaattctggcrcacaaagtggacagatcaggtaagaacaggtgtatttctgccttggtggactacatatcaggttagtgcaaaagtaattgcaatttttgccattacctttaatattatattaagtcccaattttgggaatgggttatatgttatcatatttagatagatgattgccttgttcccaaggcagctattaccgaatgcaaaaaggcagggtgatgatttggtatagccactgaaccaggaagcaagagaccttattctagatttaactctgtctctaactaactgtgtaaccatggcaagaacgtcctcagctccttatctgcatcaggctattttaagggcctttgcacacaaatattctacacaaatattcttcattcttcttaagaatgaagaagaaccataaaataaaagaaacatgatgctaattacaagcattgcctaattaaactaacagaatgatctctttttagatacttgctgtttgaggtttctatgtttatgagtatttaactctgatcaaactgtttcaacaaatatatacagaacttctac

SEQ ID NO: 204849 - DNA, 605 bp, Homo sapiens
tacggcccaagacttctccccagttctttatacctgcaggctcaattctggcgcacaaagtggacagatcaggtaagaacaggtgtatttctgccttggtggactacatatcaggttagtgcaaaagtaattgcaatttttgccattacctttaatattatattaagtcccaattttgggaatgggttatatgttatcatatttagatagatgattgccttgttcccaaggcagytattaccgaatgcaaaaaggcagggtgatgatttggtatagccactgaaccaggaagcaagagaccttattctagatttaactctgtctctaactaactgtgtaaccatggcaagaacgtcctcagctccttatctgcatcaggctattttaagggcctttgcacacaaatattctacacaaatattcttcattcttcttaagaatgaagaagaaccataaaataaaagaaacatgatgctaattacaagcattgcctaattaaactaacagaatgatctctttttagatacttgctgtttgaggtttctatgtttatgagtatttaactctgatcaaactgtttcaacaaatatatacagaacttctac

SEQ ID NO: 204850 - DNA, 581 bp, Homo sapiens
cttcttcctgagagacaccatctcatagagctgcctctcaatcaacccatccgctttcttctcatccagccagttgctacaagggaaggtctgctggataccagtgaaggggcacagaatcaccacctggggagagtggagcacagtgtctccggcattgagtctccagtagggtcctcttcgtgatgttcagcaggctcccagccccacatttagagacatctgtattaggactctcaaggaatggcaycttttctgttgcctatctcattaaatcttaaatcaagaaatgcaacctccaaggagtcttccaaagtaggtatcacccatcttccaattagctattcaaatctcaaacttttcctctatacacaacactctctttgaataccgtatttctttaagcacatcataaattctcagttaatctgaaccaaatgaactagactactaggttaattccctataattatcttgtaggaaaaaggtaagtcccatgcaagctaattaatatctggaatgtaatataaaaaccaacttctctcttttaggcttgatcctcattcaaccttctctcttat

SEQ ID NO: 204851 - DNA, 484 bp, Homo sapiens
atcaaaatagaagaaaaacttcaaataacctaatgatgcatcttagagaactagaaaagcaagagccaataaagcccaaaattagtagaagaaatgataaaaatcacagcagaaataaatgaaattgaatgaagaaaacgatacaraagataaatgaaataaaaagttggtattttgaaaagataaataacgttgacaaatgtttagccagactaagaaaaaaagagagaagacccaaataagtaaaattagcaatgaaaaaggagacatcatgatcaatactacaggaattcaaaggatcattagtggctactataagcaactatatcccaataaattggaaaatctggaagaaatggacaaatttctagatacatacaacctaccaagattgaactgggaggaaatccaaaacctgaacagaccaataacaagtaatgagatggaagctgtaatagagtcttccagtaaagaaaaccccggg

SEQ ID NO: 204852 - DNA, 524 bp, Homo sapiens
ggcccttttgaaggagtgtgatgggaatttgcattctgtaatgttaaatctcttgcttgcagcactttttttttttaagctacaatcctgtttcatagagtaagcaaaatttttaaatattgaaaacctaggaagtaatttagttatctgacattaggttttgagtaactatttagtatatctgcataaccagctgcctcatgcctgtttccccatgctacccttttccttcccagcaaatgttaaaaaaaaaaaggtccaagattctattgcattaatacaggaacaaaatagttcagtactattttgatttgagagtaaaggaatttgaacaaagtttaatattactaccaccaraaagaagaaaatggtcttacctatgtttgagtaagataccaaattttatgtcaacttcaggctgttattttcacttgcatttgacctttgtcgttttgccaaatcttacccagaaacaaaaaaagtcttaaattgggaatatatttacttggcattcttaaagaaag

SEQ ID NO: 204853 - DNA, 524 bp, Homo sapiens
ggcccttttgaaggagtgtgatgggaatttgcattctgtaatgttaaatctcttgcttgcagcactttttttttttaagctacaatcctgtttcatagagtaagcaaaatttttaaatattgaaaacctaggaagtaatttagttatctgacattaggttttgagtaactatttagtatatctgcataaccagctgcctcatgcctgtttccccatgctacccttttccttcccagcaaatgttaaaaaaaaaaaggtccaagattctattgcattaatacaggaacaaaatagttcagtactattttgatttgagagtaaaggaatttgaacaaagtttaatattactaccaccagaaagaaraaaatggtcttacctatgtttgagtaagataccaaattttatgtcaacttcaggctgttattttcacttgcatttgacctttgtcgttttgccaaatcttacccagaaacaaaaaaagtcttaaattgggaatatatttacttggcattcttaaagaaag

SEQ ID NO: 204854 - DNA, 619 bp, Homo sapiens
aagggtttgggcagaggttgaattcatgaagcacatgcattttcttagggcattgaaattattctgtataacatcataatggtggattcatactactttgcagttgtcaaaacctattgcacttgcagcacaggacatgaaagctgatatatgcaaattattaagaaataggaagtcaaggaatcccaggatgaaatgttgagtgtgrtaaaagaatctaactgtatttaccaatgtatgaagcaacctacctgaaggcaatgcacaaatggtgctgacctaagtaactttggagaagggtggattctgttaagactgaaggcaatgtaatctttacataaactctgcactgtacaagttcatatcttgtcccgacagggcatatgttaacaatcctgtacatgtacatttgagttgaataattgagtaaattgtatacttggtacatccactttggaaaatggttttacagtttctttcaaagctgaacagagtcttcttatacaatgcaggtttctcacttttacagtggaaggtaacaaaccagcaagatgagactactagaatgatatatgtggtattcaattagagttggagaaatcggtatcaattcgtgttt

SEQ ID NO: 204855 - DNA, 619 bp, Homo sapiens
aagggtttgggcagaggttgaattcatgaagcacatgcattttcttagggcattgaaattattctgtataacatcataatggtggattcatactactttgcagttgtcaaaacctattgcacttgcagcacaggacatgaaagctgatatatgcaaattattaagaaataggaagtcaaggaatcccaggatgaaatgttgagtgtgataaaagaatctaactgtatttaccaatgtatgaagcaacctacctgaaggcaatgcacaaatggtgctgacctaagtaactttggagaagggtggattctgttaagactgaaggcaatgtaatctttacataaactctgcactgtacragttcatatcttgtcccgacagggcatatgttaacaatcctgtacatgtacatttgagttgaataattgagtaaattgtatacttggtacatccactttggaaaatggttttacagtttctttcaaagctgaacagagtcttcttatacaatgcaggtttctcacttttacagtggaaggtaacaaaccagcaagatgagactactagaatgatatatgtggtattcaattagagttggagaaatcggtatcaattcgtgttt

SEQ ID NO: 204856 - DNA, 548 bp, Homo sapiens
gcaaaccatttcctgtagtcaagtgagaggagggaacttgatttttgaattcacctataaagatacttttgatcaatttgtataggcccctgagagaataggaggtgatgaagtggtgagaggggtacaggtaactactttcttaaaaatttttttttycaccaaggaaccaaaatgtaacaagtgatagtgggaagaggaaaataaatttaagagatcattaagtctaataacccaatgcttcatgtgtatgttatttccttagctttgttaaaaatgacattcgtacttgtgattctgttcatttttagagcttctaagttatttgggttctctgagaaaagaaagagaatgcaataactttattccctgaatttaaaactaaaagttgcatatgaaggaaacagatagaaacaccaacacctggatatagcaacttgataaaaagcttttatagcacaatttgatcattccatttatgctataattatgccaaatatatgttaatatgaattatatgtgaatcaaattaacatttaatttacatg

SEQ ID NO: 204857 - DNA, 624 bp, Homo sapiens
tttgtagggaaagtgcttttcctataaaggcatctatagtgtaaattggatagcatgtttttgctttgattctgggtaactgcagtaggtgtattctttatatgatttgttcagctataatcagcatcagtggtgttttgtgttcctcagtgtctaaggataaagatgttcttgctagtggaggctgtggttaggctttgctaggtatgaggamacaaagtgagtttgttcttaggccctagtcatagaggtggtggggcctccctttggccacttggtggcatacagtagcaccagtgttagaaagtctaggaagactgatttttgggcttccaggcagcttgtgctcaggtgctggctgtggcaatgatggactagataagcaggtgtgtcctaagaccctaagcattatgtgtggggtcagtgatgacactaagggtcctgggtcagcctccaggtaagtgggtggcactggcagtcttgttagcaggctgggtagaagctcagaccctcaggggaagtgaatgggtgccattggtagtaggtgggattgggaattcccagacctttccagatgatgtgtgcaggcaatggtaggggtggcaccagttgtggtgagcctgt

SEQ ID NO: 204858 - DNA, 565 bp, Homo sapiens
ggttcacatgtcagaaattctttcaccaggggccttttgatagccccattgaactggaagtagagaacaccatttggccttttggaatcctcatgcyactgaagcaataggcaaagaaggaggctacttctctggttattcgatcctgattatcaagaagaaattgggtttctcctacaccataggggcaaaatggattaatgtctgaaagacaaggggcttttatgagtgcttcttagtatatccatgcgcagtttaaaaatttccaggaaaattgtagcaacaaaaacaactactacaaaaatgcagaaccactgataattcaaaaactttggcaaagaaggtttgggtcgttctgtcaggtaaaatatcacaatcagttcatttcctgtaagagggcaaaggaaacatacagtaagtagtagaaaaagaaagtcagaggactagagcagcattaactcattttctcttctccttccctttattttttattcaaaatctgtggtgatagttagcatgatagttttctgcttaggtaacagaatattcacataggtttgggact

SEQ ID NO: 204859 - DNA, 565 bp, Homo sapiens
ggttcacatgtcagaaattctttcaccaggggccttttgatagccccattgaactggaagtagagaacaccatttggccttttggaatcctcatgctactgaagcaataggcaaagaaggaggctacttctctggttattcgatcctgattatcaagaagaaattgggtttctcctacaccataggggcaaaatggattaatgtctgraagacaaggggcttttatgagtgcttcttagtatatccatgcgcagtttaaaaatttccaggaaaattgtagcaacaaaaacaactactacaaaaatgcagaaccactgataattcaaaaactttggcaaagaaggtttgggtcgttctgtcaggtaaaatatcacaatcagttcatttcctgtaagagggcaaaggaaacatacagtaagtagtagaaaaagaaagtcagaggactagagcagcattaactcattttctcttctccttccctttattttttattcaaaatctgtggtgatagttagcatgatagttttctgcttaggtaacagaatattcacataggtttgggact

SEQ ID NO: 204860 - DNA, 557 bp, Homo sapiens
acatgtcagaaattctttcaccaggggccttttgatagccccattgaactggaagtagagaacaccatttggccttttggaatcctcatgctactgaagcaataggcaaagaaggaggctacttctctggttattcgatcctgattatcaagaagaaattgggtttctcctacaccataggggcaaaatggattaatgtctgaaagacaaggggcttttatgagtgcttcttagtatatccatgcgcagtttwaaaatttccaggaaaattgtagcaacaaaaacaactactacaaaaatgcagaaccactgataattcaaaaactttggcaaagaaggtttgggtcgttctgtcaggtaaaatatcacaatcagttcatttcctgtaagagggcaaaggaaacatacagtaagtagtagaaaaagaaagtcagaggactagagcagcattaactcattttctcttctccttccctttattttttattcaaaatctgtggtgatagttagcatgatagttttctgcttaggtaacagaatattcacataggtttggg

SEQ ID NO: 204861 - DNA, 545 bp, Homo sapiens
gccttttgatagccccattgaactggaagtagagaacaccatttggccttttggaatcctcatgctactgaagcaataggcaaagaaggaggctacttctctggttattcgatcctgattatcaagaagaaattgggtttctcctacaccataggggcaaaatggattaatgtctgaaagacaaggggcttttatgagtgcttcttagtatatccatgcgcagtttaaaaatttccaggaaaattgtagcaacaaaaacaactactacaaaaatgcagaaccactgataattcaaaaactttggcaaagaaggtttgggtcrttctgtcaggtaaaatatcacaatcagttcatttcctgtaagagggcaaaggaaacatacagtaagtagtagaaaaagaaagtcagaggactagagcagcattaactcattttctcttctccttccctttattttttattcaaaatctgtggtgatagttagcatgatagttttctgcttaggtaacagaatattcacataggtttgggactgaatttgaata

SEQ ID NO: 204862 - DNA, 580 bp, Homo sapiens
aggagattctttgactcagctgtagtagtgaacatttcattagaattgaaaatgagtataaaaatcatctcattttattaaagcaaagagcttctttcagaaagtggcaccgtgtgtgagcccagccttgctcctgctggtgagagggcaggctttgcagagtgtggtgagcacctggagctcaagctggggctcctggagtgttttcgtcyatgtaactgtgtggactgaatcatgtgcctcatatccacctgctgacatcctaatcccagtacctaacaatgtggctgtatttggagacagggtctctaaagaggtagttaaggtacattgaggtcattagggtggaccctcatccaatatgactggtggtgtttttatacaaagaggagattaggacacagacagagatgccagacaagtgcatacatggagagacacccctgcaacatttggggaaaggcagccacctgtgaggcaaggagagaggcctcaaagaaaccaaccttgatgacatcttgatcttaaacttcctgtctccaaaattgtgaaaaaatacatttctgttgtttaaggcacc

SEQ ID NO: 204863 - DNA, 580 bp, Homo sapiens
aggagattctttgactcagctgtagtagtgaacatttcattagaattgaaaatgagtataaaaatcatctcattttattaaagcaaagagcttctttcagaaagtggcaccgtgtgtgagcccagccttgctcctgctggtgagagggcaggctttgcagagtgtggtgagcacctggagctcaagctggggctcctggagtgttttcgtctatgtaactgtgtggactgaatcatgtgcctcatatccacctgctgacatcctaatcccagtacctaacaatgtggctgtatttggagacagggtctctaaagaggtagttaaggtacattgaggtcattagggtggaccctcatccaatatgactggtggtgtttttatacaaagaggagattaggacacagacagagatgccagacaagtgcatacatggagagacacccctgcaacatttggggaaaggcagccacctgtgaggcaaggagagaggcctcaaagaaaccaaccttgatgacatcttgatcttaaacttccwgtctccaaaattgtgaaaaaatacatttctgttgtttaaggcacc

SEQ ID NO: 204864 - DNA, 605 bp, Homo sapiens
agaagaaatggagaaatttcaggaaatatacaactaccgagactgaatcaagataaatagaaaacttccatggactagtaataaataacaagatttaattaatagtaaaagtcttccaataaacaaaagccaaaatcagatggcttcactgctgaattctaccgaacttatacgtatatctttaagcttatgtaaatgtttatagaaatatatatgtttttatatataaatatttatatatatttagacacatatatgtttatatatcatatatatatatatgtacatgatcatgcatgacccagggaagcagacagggacaagggcctaaacaagcatgactgggcacaaggccccaaactcagatactttgctgcttttcctcctgtcagtctgattttwtatatatatatatatatatatatatatatatatacacacacacatgaatctttcaatgttggctattcttgaattctttcctgagtgaagccaaaatctctccagagctgagccccaacttgggggttcacctgcatcatttctacacaatttctataaaacatttgtatacaacaatatatattgtgaggtatatatatata

SEQ ID NO: 204865 - DNA, 409 bp, Homo sapiens
aaacttaggggtacaaaagtgaaaaaaatatgtgaatattgtttgtgatgtcaactgagatcttcttcagggcacccagaaatacaagttgaaattytgcagaactatacagattttgctatatcagagtcagcagaaaaattaaaatataatctttagttgtttgtatggcatttagccattccaataggtgtatagagatattgaattattatgttatattgtgtttttatgatgactaacaaaatgcaatgttttcatgtccagggaccatttagatatgcccttttgtgaagttcttggtgtgtccagagaaaatataattacttaaggcaaaaattttaaaaagtagagttaaccaaataatgattatcccatactgaagctatttgtaaagatgctggatctc

SEQ ID NO: 204866 - DNA, 486 bp, Homo sapiens
ttttatctagttaatactatcttcatatagatatgaacaaattttatttcacaaaagtattctcacaaatcacaaaaaatattcacacactgcatacttttatgcagctcatctcctgggtacagcttataatattctattgcctgatagttgctagaatagtttagctttgcagctggtttcagtaaatgttaaggtaataatttgaatttattaattagcttactgattgatgacccaagggaaaatatagtgtaatgtttcaaaattcaagtcttttttcatgtttttataacaatatgatgcattttgagtacatgactttmactagtttagatttctgatcaagaataattgcaaacttgaattttatgtttaaaataaaatgcattacataaagatataaatgttacatattgaaattaactttaaaattagtaataggcacaattgcttatcatgcaacaagtgaattcattaacttta

SEQ ID NO: 204867 - DNA, 614 bp, Homo sapiens
tatatccagcaatgcctggtacatagtaggtcctcaatatagagttcttgaattaataaataaatgttttaagcaaaattaataaaatttatcattaatatatctttatctctgcataaaaagacaaagattaaacaatagaataacaatacatttattttccggttggtgagattgtaagtaaatttatggtttattgtcccaaaaattctttgttattgttctaatcttctataaagtcactgattattatttataatgtctctcacacacaaaatcaaatgatatcaaataggggtatggtgatatctcaagtagagggaaatgccacaaaaattgcagatataaataaagttttttaggagcaaacttaaaagtagagtagttgaaagaagtataatgtccaaagttcccaatgtaacacactttaagttagatatagatagtctgcatgcacagtgaccaatatttcaattgagagggaacccacayatttaatactctgcacataatgttgcataagaaaccactcccatttcagtggcttaaaattatatgcttttgtttagctcgtgaacctgcaggtagacaatttatcttcgtttggctgggta

SEQ ID NO: 204868 - DNA, 530 bp, Homo sapiens
aatatgaaatgtcaatccattcattgaagtcatataaattatccacaaatctactgaagtcaaatcagaaataaaatgaactacccatccatcagctgaggcttaaaaaacagaagtttcatcttccttgtggaaaaaaacagacacatacaatgttcttcctcagatttccttcattgccctactaatttctgtgcctagaaagtaagccaaagtagatggaagcatggctgtaaatagcttataaatagctgactaaaaagacaatgcattggtttattgagattttgtgactggctatgtcccytaatttgttgttgttgttgttgttgttgttgaatatacctagcgttttcacatctcatggaaatattttcatgatttttcaaattacatcaacaatattgtgcatgatgccctttttgatatatttcgtaaggcatttacatttgtctaccatcatggtgcccctcagttacctgaagaaattctaactgaacttttgtttaaaatttttctttttttctttt

SEQ ID NO: 204869 - DNA, 474 bp, Homo sapiens
aatgcaaagatgggaatttgagaattcatctttctggcaaataaaattttatcacatgtaactcatccaccacaagcttgtatagctaaacccttgacagattaaatgtttattgtcaaaaattgattgggtctgctttgaaaatttaattgaaatcatctcttaatttgattttagaaatatttgtttttgttgtattttttcttaatgtcatcctatggcacatttagttccwagttgtatttttcagagtgtcaataatcactatagaatagaatacattaggcctgatcttaagttagaatgaactatatctatttcttttttaactatgttaacccttttatattaataagaaatgggttttattgaaaaattacattaacaaatcagtgttacaataagaaatcaatgaacatcaactgaaaattttgatctcagacatgctgtagcatttggagttttatttcaaca

SEQ ID NO: 204870 - DNA, 438 bp, Homo sapiens
tatattttcattttcattgcaaatttattttgtatttacatttcaggttttgggttacacatttttggtttgggtgcaatagtgagcataaaatgttggaggtttattaaatatcatttttcttgtgttttcctacatagaaaaaaattaaaaatttgggttgtcagaaatggttatataccttgtgatacgccgggttagccccakgcaacaaaaaatatgaggtgatttttctttttcttttttatttttctgagacagagtcttgctctgtcgcccagactggagtgcagtgacgccatttcggcttactgcaaactccgcctcccgggttcacgccattctcctgcctcagcctcccgagtagctgggactacaggcgccagccgccacgcctggctaatttttgtattttttagtagagatggagtttcacag

SEQ ID NO: 204871 - DNA, 472 bp, Homo sapiens
gaattcacacaaaatgatgcccagtcttggtctgcatggtgaagggcccaggactgatgggcrggggctcatttgcataccacaacaccagggagagtcctgtcacctgccctcctgagtcctgaagaaaacccttcactccaattccctgtacactgcttctaaaggcaggaaatgtgtacagttctagaattacagtcacataaaatgctagaagaataacgtgatttatttaagtgcttagaggtacccccttgaagtttgtgttacctggaagttggcctcagggaaacacctcattgaccttctctcaaggataaatgagatgcagggacagggaagggagaaaggttattttaacatttcattcacagtccctgggattctttggagagcaccttaggaatgttcttaacctgagtcctcttactaagtattatcacatagtctgccaggctggcattattaaccc

SEQ ID NO: 204872 - DNA, 502 bp, Homo sapiens
gtctgcatggtgaagggcccaggactgatgggcaggggctcatttgcataccacaacaccagggagagtcctgtcacctgccctcctgagtcctgaagaaaacccttcacyccaattccctgtacactgcttctaaaggcaggaaatgtgtacagttctagaattacagtcacataaaatgctagaagaataacgtgatttatttaagtgcttagaggtacccccttgaagtttgtgttacctggaagttggcctcagggaaacacctcattgaccttctctcaaggataaatgagatgcagggacagggaagggagaaaggttattttaacatttcattcacagtccctgggattctttggagagcaccttaggaatgttcttaacctgagtcctcttactaagtattatcacatagtctgccaggctggcattattaaccctactttgcagctgaggcaactacaagagatgaccctatcgggctagtgaagtggaattc

SEQ ID NO: 204873 - DNA, 502 bp, Homo sapiens
gtctgcatggtgaagggcccaggactgatgggcaggggctcatttgcataccacaacaccagggagagtcctgtcacctgccctcctgagtcctgaagaaaacccttcactccaattccctgtacactrcttctaaaggcaggaaatgtgtacagttctagaattacagtcacataaaatgctagaagaataacgtgatttatttaagtgcttagaggtacccccttgaagtttgtgttacctggaagttggcctcagggaaacacctcattgaccttctctcaaggataaatgagatgcagggacagggaagggagaaaggttattttaacatttcattcacagtccctgggattctttggagagcaccttaggaatgttcttaacctgagtcctcttactaagtattatcacatagtctgccaggctggcattattaaccctactttgcagctgaggcaactacaagagatgaccctatcgggctagtgaagtggaattc

SEQ ID NO: 204874 - DNA, 502 bp, Homo sapiens
gtctgcatggtgaagggcccaggactgatgggcaggggctcatttgcataccacaacaccagggagagtcctgtcacctgccctcctgagtcctgaagaaaacccttcactccaattccctgtacactgcttctaaaggcaggaaatgtgtacagttctagaattacagtcacataaaatgctagaagaataacgtgatttatttaagtgcttagaggtacccccttgaagtttgtgttacctggaagttggcctcrgggaaacacctcattgaccttctctcaaggataaatgagatgcagggacagggaagggagaaaggttattttaacatttcattcacagtccctgggattctttggagagcaccttaggaatgttcttaacctgagtcctcttactaagtattatcacatagtctgccaggctggcattattaaccctactttgcagctgaggcaactacaagagatgaccctatcgggctagtgaagtggaattc

SEQ ID NO: 204875 - DNA, 466 bp, Homo sapiens
actggaataaaaggattctgtgatcaaagaagtttggaaaacattaacttaaacaaaagttcatcaggtttctttactgcaggacttctcagagcctttaatgcactgtggttccccaagggggtgccaggtcacagagcatttttcagccttttgcaactgtgaaattcatttgttcaaggggcatctggagtggatggtgacgaatgcactctgggagatgtggttgtgcaggacacacagcyggcactcagacccaggcctgcccacagcactggctcctcatgtggccaggccctctgcccctcactgagccttgccggctttgctgtaattgtattcccatatgtgtcccgtctggcttgatacaactctggccaccgacttccggaatattccaaggcctagcccaggcctgtgtgtcctgagattacctctcgttgctggcagccatctctatgaattc

SEQ ID NO: 204876 - DNA, 466 bp, Homo sapiens
actggaataaaaggattctgtgatcaaagaagtttggaaaacattaacttaaacaaaagttcatcaggtttctttactgcaggacttctcagagcctttaatgcactgtggttccccaagggggtgccaggtcacagagcatttttcagccttttgcaactgtgaaattcatttgttcaaggggcatctggagtggatggtgacgaatgcactctgggagatgtggttgtgcaggacacacagctggcactcagacccrggcctgcccacagcactggctcctcatgtggccaggccctctgcccctcactgagccttgccggctttgctgtaattgtattcccatatgtgtcccgtctggcttgatacaactctggccaccgacttccggaatattccaaggcctagcccaggcctgtgtgtcctgagattacctctcgttgctggcagccatctctatgaattc

SEQ ID NO: 204877 - DNA, 515 bp, Homo sapiens
  misc_feature (1)...(515): n = A,T,C or G
nnnnnnnnnnnnnnnnnnnnnnnnnnnnnnnggttatttacaatctgctgygtaacaaattactacaaacttagtaccttaacacatatttatttcacagtttctgtgggtcaggagatcagaaatggttctatttcaaggtctctcacagggctgcaatcaagatgttggcatggctggggtctcatctgaaggctggactggagaagaatctacttccaaacttatgtggtagttggaagaatttagttcctcaaggctgctaaactgatggcctgtgttccttgcctctgggatggtagcttgcttcaacaaagtgtgcaagcagagaagacagagagagtccgctagcaagatagaagccacaatctcttgtaatctatcatttttgctgtatgctactggttaaaaataactcattaggttagcctactggctctcagggggaagagattatacaaaggcatgaatttctggaggagggaatgagggcaaagaactctgaaaagtttctc

SEQ ID NO: 204878 - DNA, 515 bp, Homo sapiens
  misc_feature (1)...(515): n = A,T,C or G
nnnnnnnnnnnnnnnnnnnnnnnnnnnnnnnggttatttacaatctgctgtgtaacaaattactacaaacttagtaccttaacacatatttatttcacagtttctgtgggtcaggagatcagaaatggttctatttcaaggtctctcacagggctgcaatcaagatgttggcatggctggggtctcatctgaaggctggactggagaagaatctacttccaaacttatgtggtagttggaagaatttagttcctcaaggctgctaaactgatggcctgtgttccttgcctctgggatggtagcttgcttcaacaaagtgtgcaagcagagaagacagagagagtccgctagcaagatagaagccacaatctcttgtaatctatcatttttgctgtatkctactggttaaaaataactcattaggttagcctactggctctcagggggaagagattatacaaaggcatgaatttctggaggagggaatgagggcaaagaactctgaaaagtttctc

SEQ ID NO: 204879 - DNA, 515 bp, Homo sapiens
  misc_feature (1)...(515): n = A,T,C or G
nnnnnnnnnnnnnnnnnnnnnnnnnnnnnnnggttatttacaatctgctgtgtaacaaattactacaaacttagtaccttaacacatatttatttcacagtttctgtgggtcaggagatcagaaatggttctatttcaaggtctctcacagggctgcaatcaagatgttggcatggctggggtctcatctgaaggctggactggagaagaatctacttccaaacttatgtggtagttggaagaatttagttcctcaaggctgctaaactgatggcctgtgttccttgcctctgggatggtagcttgcttcaacaaagtgtgcaagcagagaagacagagagagtccgctagcaagatagaagccacaatctcttgtaatctatcatttttgctgtatgctactggttaaaaataactcattaggttagcctactggctctsagggggaagagattatacaaaggcatgaatttctggaggagggaatgagggcaaagaactctgaaaagtttctc

SEQ ID NO: 204880 - DNA, 434 bp, Homo sapiens
gcaatattgcttagggatggacaacttggcactggttatgtgttccaagtgaggtaaccttgttcccaggaataaagagaaccagatgactgtaaacatttccctaaactgaaatgcactgttgtatgttcacctgaaatgaatggtgtaagctgaatatgagatttttgacaaaataaaaattttgctgtgttctcagatctggcaggctattgtgaggcaatgtgtcattttaccttataacrcagagttgtaacatgctactctgagcagctcatgacatctgcttgaaatttaagttgggcccctagtatgtgtttattataaagattttgatgctgcttttcagagttgggtaacctactttacccccttagctaatgtttcccaaatacacccaaacccacagaaaggaaaactattcctcattaact

SEQ ID NO: 204881 - DNA, 566 bp, Homo sapiens
agatctggtatattttaaaatttttgtagacatagggtctcgccatgttgcccacgctgattctgaactcctgttctcaagcaatcctcctgcctggtcttcccaaacttttgggcttacagctgtgagtcactgascccagcttgtattcttttgattttaaaaaaatattctgaatgtgatccaccaaattaatttcaccatccactaataggtagcaacctgaatgaaaaatactgttataaactttacacaaaaccagagattataaacatttgcttccaaggagagaggtaaaaggtacttgtttgctctgatgggccctgtttccttcagtgccaggaagagtggctctcagacctttcttctggcatccctcatgtatgcagtgttggttattattttcaaggccttggtaaccaaatgcccctagtgtgaccagtcagactgacagtccatatctgtaatatggtggtaagtttcctttgcatgtctttctttctggcatcttagaacttttacctaggaaattttctttttgcttgaagtacatcattaagaatttt

SEQ ID NO: 204882 - DNA, 320 bp, Homo sapiens
tgcctggtcttcccaaacttttgggcttacagctgtgagtcactgaccccagcttgtattcttttgattttaaaaaaatattytgaatgtgatccaccaaattaatttcaccatccactaataggtagcaacctgaatgaaaaatactgttataaactttacacaaaaccagagattataaacatttgcttccaaggagagaggtaaaaggtacttgtttgctctgatgggccctgtttccttcagtgccaggaagagtggctctcagacctttcttctggcatccctcatgtatgcagtgttggttattattttcaagg

SEQ ID NO: 204883 - DNA, 572 bp, Homo sapiens
gtagacatagggtctcgccatgttgcccacgctgattctgaactcctgttctcaagcaatcctcctgcctggtcttcccaaacttttgggcttacagctgtgagtcactgaccccagcttgtattcttttgattttaaaaaaatattctgaatgtgatccaccaaattaatttcaccatccactaataggtagcaacctgaatgaaaaatactgttataaactttacacaaaaccagagattataaacatttgcytccaaggagagaggtaaaaggtacttgtttgctctgatgggccctgtttccttcagtgccaggaagagtggctctcagacctttcttctggcatccctcatgtatgcagtgttggttattattttcaaggccttggtaaccaaatgcccctagtgtgaccagtcagactgacagtccatatctgtaatatggtggtaagtttcctttgcatgtctttctttctggcatcttagaacttttacctaggaaattttctttttgcttgaagtacatcattaagaattttcagtgaaggcagattcttaaagtttttgttt

SEQ ID NO: 204884 - DNA, 565 bp, Homo sapiens
tagggtctcgccatgttgcccacgctgattctgaactcctgttctcaagcaatcctcctgcctggtcttcccaaacttttgggcttacagctgtgagtcactgaccccagcttgtattcttttgattttaaaaaaatattctgaatgtgatccaccaaattaatttcaccatccactaataggtagcaacctgaatgaaaaatactgttataaactttacacaaaaccagagattataaacatttgcttccaaggagagaggtaaaagrtacttgtttgctctgatgggccctgtttccttcagtgccaggaagagtggctctcagacctttcttctggcatccctcatgtatgcagtgttggttattattttcaaggccttggtaaccaaatgcccctagtgtgaccagtcagactgacagtccatatctgtaatatggtggtaagtttcctttgcatgtctttctttctggcatcttagaacttttacctaggaaattttctttttgcttgaagtacatcattaagaattttcagtgaaggcagattcttaaagtttttgttt

SEQ ID NO: 204885 - DNA, 580 bp, Homo sapiens
ttacacaaaaccagagattataaacatttgcttccaaggagagaggtaaaaggtacttgtttgctctgatgggccctgtttccttcagtgccaggaagagtggctctcagacctttcttctggcatccctcatgtatgcagtgttggttattattttcaaggccttggtaacmaaatgcccctagtgtgaccagtcagactgacagtccatatctgtaatatggtggtaagtttcctttgcatgtctttctttctggcatcttagaacttttacctaggaaattttctttttgcttgaagtacatcattaagaattttcagtgaaggcagattcttaaagtttttgttttccagaagagatcttggaaaatataaaaggttggcagttatttcttttagtacatgagatagtattacaccaatgctgttgagaagtctattgtgaggcaatgtgtcttctttctctggctgcttttgagatttctctctgtcttttttaggggcagttttactcttatgtgactagaagtagatttcttcttttttttttaatattgcttgagattttattgggtttttg

SEQ ID NO: 204886 - DNA, 572 bp, Homo sapiens
gtagacatagggtctcgccatgttgcccacgctgattctgaactcctgttctcaagcaatcctcctgcctggtcttcccaaacttttgggcttacagctgtgagtcactgaccccagcttgtattcttttgattttaaaaaaatattctgaatgtgatccaccaaattaatttcaccatccactaataggtagcaacctgaatgaaaaatactgttataaactttacacaaaaccagagattataaacatttgcttccaaggagagaggtaaaaggtacttgtttgctctgatgggccctgtttccttcagtgccaggaagagtggctctcagacctttcttctggcatccctcatgtatgcagtgttggttattattttcaaggccttggtaaccaaatgcccctagtgtgaccagtcagactgacagtccatatctgtaatatggtggtaagtttcctttgcatgtctttctttctggcatcttagamcttttacctaggaaattttctttttgcttgaagtacatcattaagaattttcagtgaaggcagattcttaaagtttttgttt

SEQ ID NO: 204887 - DNA, 572 bp, Homo sapiens
gtagacatagggtctcgccatgttgcccacgctgattctgaactcctgttctcaagcaatcctcctgcctggtcttcccaaacttttgggcttacagctgtgagtcactgaccccagcttgtattcttttgattttaaaaaaatattctgaatgtgatccaccaaattaatttcaccatccactaataggtagcaacctgaatgaaaaatactgttataaactttacacaaaaccagagattataaacatttgcttccaaggagagaggtaaaaggtacttgtttgctctgatgggccctgtttccttcagtgccaggaagagtggctctcagacctttcttctggcatccctcatgtatgcagtgttggttattattttcaaggccttggtaaccaaatgcccctagtgtgaccagtcagactgacagtccatatctgtaatatggtggtaagtttcctttgcatgtctttctttctggcatcttagaacttttacctaggaaattttctttttgcttgaagtacatcattaagaatttycagtgaaggcagattcttaaagtttttgttt

SEQ ID NO: 204888 - DNA, 649 bp, Homo sapiens
actttgttaactacctagctgcaatgcagatgcacttactagaaccacagtattcctctgattaagagtctgaaaatcttgccataaaagttagccaattcttaaatacccaaatgccagcacataacctacattttatgcttataatcatttgttcattaagctttaaaataaactgatmaaataaaatacaagcatctaagatgtttctattatatattcattctacagaaatatgtggtagttaataaagactgaggtaggtatctctgtgctgaagtggaacaatgaagaaacattcagaaaagcaaggcatctggcaataggtaaagcacacccacattgaggcacaatattttttaaaagcagagaaagaatgtattgcacatttgcatatgcaaaaaatatttctgaacacccaagaaactcctaacagtagctgtcatctaggaaaggagacctgagtgaatggattaagagggaaactaacttattatgattaaaagttcacagtcaggtgtggtggctcatacctgtaatctcagcactttgggagggcaaggcagaaggatcacttgaagccaggagttcaagaccaaccagcctgggaaacatagcaagaccttgtctttacaaaaaatttaacaat

SEQ ID NO: 204889 - DNA, 297 bp, Homo sapiens
agtggaagacttacctgaaatgctatgacatagcacaatgcagccagctcagaaagagcttgccattgaacattattaccatgctgacccatcttcaagagcagagaaccagcatgcatgtagaaatgtcctttcatttctaagaaagtagctgacagttcatcatttccacccaaagaagatttygcagactgaagagcactatcaaaactgtaatatgaaaatatcaaacagatgatacacacttactgcactgtgaataatcatggttcatttaattcaaaacaaaataaaaat

SEQ ID NO: 204890 - DNA, 420 bp, Homo sapiens
gtggccttgcacagtggcaggacagatctaytaggaacagcaaagtacaggggaaaagcatgtacttttcagacagctatgagtttgaattttgttccaccatttaccagcttcaatttttctctcaaccagtgatgagattaaataatgtatgtagagcccagggcctgggtcataagaactcctcaataagcagtatgactatattctgaggggtgatttatcagtgagccagggtggaaatacctcatttgagtaatcctcaactgttctgcaacattcctagatgtttctggtgtctactttaaacaggaaaaacttcccatgccactttgccatctccacctgaaaactgtttagtagttcagtactataaatatcagttgaataatttaaattcactggttatctttagaattc

SEQ ID NO: 204891 - DNA, 420 bp, Homo sapiens
gtggccttgcacagtggcaggacagatctactaggarcagcaaagtacaggggaaaagcatgtacttttcagacagctatgagtttgaattttgttccaccatttaccagcttcaatttttctctcaaccagtgatgagattaaataatgtatgtagagcccagggcctgggtcataagaactcctcaataagcagtatgactatattctgaggggtgatttatcagtgagccagggtggaaatacctcatttgagtaatcctcaactgttctgcaacattcctagatgtttctggtgtctactttaaacaggaaaaacttcccatgccactttgccatctccacctgaaaactgtttagtagttcagtactataaatatcagttgaataatttaaattcactggttatctttagaattc

SEQ ID NO: 204892 - DNA, 380 bp, Homo sapiens
tctactaggaacagcaaagtacaggggaaaagcatgtacttttcagacagctatgrgtttgaattttgttccaccatttaccagcttcaatttttctctcaaccagtgatgagattaaataatgtatgtagagcccagggcctgggtcataagaactcctcaataagcagtatgactatattctgaggggtgatttatcagtgagccagggtggaaatacctcatttgagtaatcctcaactgttctgcaacattcctagatgtttctggtgtctactttaaacaggaaaaacttcccatgccactttgccatctccacctgaaaactgtttagtagttcagtactataaatatcagttgaataatttaaattcactggt

SEQ ID NO: 204893 - DNA, 380 bp, Homo sapiens
tctactaggaacagcaaagtacaggggaaaagcatgtacttttcagacagctatgagtttraattttgttccaccatttaccagcttcaatttttctctcaaccagtgatgagattaaataatgtatgtagagcccagggcctgggtcataagaactcctcaataagcagtatgactatattctgaggggtgatttatcagtgagccagggtggaaatacctcatttgagtaatcctcaactgttctgcaacattcctagatgtttctggtgtctactttaaacaggaaaaacttcccatgccactttgccatctccacctgaaaactgtttagtagttcagtactataaatatcagttgaataatttaaattcactggt

SEQ ID NO: 204894 - DNA, 380 bp, Homo sapiens
tctactaggaacagcaaagtacaggggaaaagcatgtacttttcagacagctatgagtttgaattttgttccaccatttaccagcttcaatttttctctcaaccagtgatgagattaaataaygtatgtagagcccagggcctgggtcataagaactcctcaataagcagtatgactatattctgaggggtgatttatcagtgagccagggtggaaatacctcatttgagtaatcctcaactgttctgcaacattcctagatgtttctggtgtctactttaaacaggaaaaacttcccatgccactttgccatctccacctgaaaactgtttagtagttcagtactataaatatcagttgaataatttaaattcactggt

SEQ ID NO: 204895 - DNA, 407 bp, Homo sapiens
gtggcaggacagatctactaggaacagcaaagtacaggggaaaagcatgtacttttcagacagctatgagtttgaattttgttccaccatttaccagcttcaatttttctctcaaccagtgatgagattaaataatrtatgtagagcccagggcctgggtcataagaactcctcaataagcagtatgactatattctgaggggtgatttatcagtgagccagggtggaaatacctcatttgagtaatcctcaactgttctgcaacattcctagatgtttctggtgtctactttaaacaggaaaaacttcccatgccactttgccatctccacctgaaaactgtttagtagttcagtactataaatatcagttgaataatttaaattcactggttatctttagaattc

SEQ ID NO: 204896 - DNA, 420 bp, Homo sapiens
gtggccttgcacagtggcaggacagatctactaggaacagcaaagtacaggggaaaagcatgtacttttcagacagctatgagtttgaattttgttccaccatttaccagcttcaatttttctctcaaccagtgatgagattaaataatgtatgtagagcccagggcctgggtcataagaactcctcaayaagcagtatgactatattctgaggggtgatttatcagtgagccagggtggaaatacctcatttgagtaatcctcaactgttctgcaacattcctagatgtttctggtgtctactttaaacaggaaaaacttcccatgccactttgccatctccacctgaaaactgtttagtagttcagtactataaatatcagttgaataatttaaattcactggttatctttagaattc

SEQ ID NO: 204897 - DNA, 422 bp, Homo sapiens
tagtggccttgcacagtggcaggacagatctactaggaacagcaaagtacaggggaaaagcatgtacttttcagacagctatgagtttgaattttgttccaccatttaccagcttcaatttttctctcaaccagtgatgagattaaataatgtatgtagagcccagggcctgggtcataagaactcctcaataagcagtatgactatattctgaggggtgatttatcagtgagccagggtggaaatacctcatttgagtaatcctcaactgttctgcaacattcctagatgtttctggtgtctactttaaacaggaaaawcttcccatgccactttgccatctccacctgaaaactgtttagtagttcagtactataaatatcagttgaataatttaaattcactggttatctttagaattc

SEQ ID NO: 204898 - DNA, 547 bp, Homo sapiens
ggtaggtatcattattcaaactttacagacgatgaaacaggctcacagttgacaggtaattttttcagaaatcacaaagtcaaattggcttctggagtctgctgctctatcatgatgcctccgtgtcaccactattaactttgcctgaaggaaccatgacttgcagtttctaccccaygtggtcagtgaccatgaatacaaatgacccttactccaggtgattctgaagtttcaggaagatgacagattccccctaaattttgaacagtaatattaattacaggtaataaaatataccaaaacatcactacaaaaatttagcattacttcatcaagaggaataaactgaaactgtcagtttcttggaagggtgagaggatagtttatcctgctttctaatacccaccacctatttgtgactataaacttcccaccacttatttatggttcaagcctagggcaagagctagcattttattttaaaaaagatttgtttaataatttttccatttggacagtgtgatggttaatactgggtgtcaacttg

SEQ ID NO: 204899 - DNA, 620 bp, Homo sapiens
tcaggattaggtatttcagattgckgcatacttcttgaaacacacttgccgaaatctgcttggtagacatcctcaatcactgcccttatacctttacctctgcagcttcttaattgttgctgctcacacctacagtgctcatacagttaagagcccagaatccagggcacagaactaatcaattacgttgcctagcaagactttcctgtttgctgataaactatattttttctgagacagggtctcactctgtcacacaggttggagtgcagtggcacgatcttggctcacagcaacctctgcctcccaggctcaagccatcctcccacctcagccccacaagtagctgggacttccaggtgcatgccatcccgcccagataatttttgtacttttaatagagatgggatttcaccatgttgttcagactggtctcaaactcctggcctcatgtgatccacccgccttggcctcccaaagtgctgagattgcaggggtgagacaccacgcctggtctaaactgtaaagtttatcgggccctttgacatgtattggtttattgactcccaaaaatctgaagttcagagaaatttaatgactttgcccaaggtctcataact

SEQ ID NO: 204900 - DNA, 620 bp, Homo sapiens
tcaggattaggtatttcagattgcggcatacttcttgaaacacacttgccgaaatctgcttggtagacatcctcaatcactgcccttatacctttacctctgcagcttcttaattgttgctgctcacacctacagtgctcatacagttaagagcccagaatccagggcacrgaactaatcaattacgttgcctagcaagactttcctgtttgctgataaactatattttttctgagacagggtctcactctgtcacacaggttggagtgcagtggcacgatcttggctcacagcaacctctgcctcccaggctcaagccatcctcccacctcagccccacaagtagctgggacttccaggtgcatgccatcccgcccagataatttttgtacttttaatagagatgggatttcaccatgttgttcagactggtctcaaactcctggcctcatgtgatccacccgccttggcctcccaaagtgctgagattgcaggggtgagacaccacgcctggtctaaactgtaaagtttatcgggccctttgacatgtattggtttattgactcccaaaaatctgaagttcagagaaatttaatgactttgcccaaggtctcataact

SEQ ID NO: 204901 - DNA, 620 bp, Homo sapiens
tcaggattaggtatttcagattgcggcatacttcttgaaacacacttgccgaaatctgcttggtagacatcctcaatcactgcccttatacctttacctctgcagcttcttaattgttgctgctcacacctacagtgctcatacagttaagagcccagaatccagggcacagaactaatcaattacrttgcctagcaagactttcctgtttgctgataaactatattttttctgagacagggtctcactctgtcacacaggttggagtgcagtggcacgatcttggctcacagcaacctctgcctcccaggctcaagccatcctcccacctcagccccacaagtagctgggacttccaggtgcatgccatcccgcccagataatttttgtacttttaatagagatgggatttcaccatgttgttcagactggtctcaaactcctggcctcatgtgatccacccgccttggcctcccaaagtgctgagattgcaggggtgagacaccacgcctggtctaaactgtaaagtttatcgggccctttgacatgtattggtttattgactcccaaaaatctgaagttcagagaaatttaatgactttgcccaaggtctcataact

SEQ ID NO: 204902 - DNA, 609 bp, Homo sapiens
tgggggcagaatttgctttaaaaaaaaattaaaaaaagggcattgaaaaaagtttcagtggtgttgggagggccttggaacaaggagtgaatggaagatgagggagtggagggaggccatgtatggactctttctacagaccaggctgttgaaggagagagggctaacaggaaatgaagtgcagggggaagttttttgaagatgggagaaagargacaacttttatatatttcatttcatttgattccttataaatttgtaaggaagatagagcttgtattatgtcagtgaagttgaaaatagagtacagaaaaattaagatacagcacccccaaaactgagaacttctgacataatacactgttggaaatatttatttcagagtgaagaaaatattggaagttaggcttgttaattggtctgcatggttcataattactctttcttattaactatttaaggaacatgagaccaggaagttaaatacccaggtatatgcagatgtatatctagaattggtaccaaagtaaatacaggcataccttggagatactgtaggttccattatagactaccacaataaagtgaatatcaccataaagcaaggca

SEQ ID NO: 204903 - DNA, 609 bp, Homo sapiens
tgggggcagaatttgctttaaaaaaaaattaaaaaaagggcattgaaaaaagtttcagtggtgttgggagggccttggaacaaggagtgaatggaagatgagggagtggagggaggccatgtatggactctttctacagaccaggctgttgaaggagagagggctaacaggaaatgaagtgcagggggaagttttttgaagatgggagaaagaagacaacttttatatatttcatttcatttgattccttataaatttgtaaggaagatagagcttgtattatgtcagtgaagttgaaaatagagtacagaaaaattaagatacagcacccccaaaactgagaacttctgwcataatacactgttggaaatatttatttcagagtgaagaaaatattggaagttaggcttgttaattggtctgcatggttcataattactctttcttattaactatttaaggaacatgagaccaggaagttaaatacccaggtatatgcagatgtatatctagaattggtaccaaagtaaatacaggcataccttggagatactgtaggttccattatagactaccacaataaagtgaatatcaccataaagcaaggca

SEQ ID NO: 204904 - DNA, 485 bp, Homo sapiens
acttttatatatttcatttcatttgattccttataaatttgtaaggaagatagagcttgtattatgtcagtgaagttgaaaatagagtacagaaaaattaagatacagcacccccaaaactgagaacttctgacataatacactgttggaaatatttatttcagagtgaagaaaatattggaagttaggcttgttaattggtctgcatggttcataattactctttcttattaactatttaaggaacatgagaccaggaagttaaatacccaggtatatgcagatgtatatctagaattggtaccaaagtaaatacaggcataccttggagatactgtaggttccattatagactaccacaataaagtgaatrtcaccataaagcaaggcacacaaatattttgatttaccagtgtatgtaaatattatgtttatattctactgcagtctattaaatgttcaatagcgttatatttaaaaaaaca

SEQ ID NO: 204905 - DNA, 592 bp, Homo sapiens
acaacttttatatatttcatttcatttgattccttataaatttgtaaggaagatagagcttgtattatgtcagtgaagttgaaaatagagtacagaaaaattaagatacagcacccccaaaactgagaacttctgacataatacactgttggaaatatttatttcagagtgaagaaaatattggaagttaggcttgttaattggtctgcatggttcataattactctttcttattaactatttaaggaacatgagaccaggaagttaaatacccaggtatatgcagatgtatatctagaattggtaccaaagtaaatacaggcataccttggagatactgtaggttccattatagactaccacaataaagtgaatatcaccataaagcaaggcacacaaatattttgrtttaccagtgtatgtaaatattatgtttatattctactgcagtctattaaatgttcaatagcgttatatttaaaaaaacaatgtgcatactttaatttaaaaatactttattgctaaaaaatgctactgatcatctgagctttcagtaaattgtaagattttttgctgatagaggatgttggtg

SEQ ID NO: 204906 - DNA, 492 bp, Homo sapiens
actgcttattcttaattcttattgttcctttctaacacttcaacttataatgccaatatctacctcagcctaaagacaagctctagaatcacttgtgttacttattacatttcttttaaaaaactcatgaattacacatgaatttcaaagttgccaactgagattccaaggacttaaaaaaaaaacctggcacctttgcattataaaggctgtaaacagtgttcatagtgtttgtctttaagggacatgcctcatccattarcaacttttcttccttaaatcagcatatcttgcctaaaaatgttttctcaaaagttaggaagcactaagatttacagattgttctatcacatcttaatctacttatcaactttagcattatcaaagcatgaactgttttgggttttcatagttaattatgtttgtcataataattgggatgcaattgtttttcttacgattattttgtacttgcttttcttatggtaactt

SEQ ID NO: 204907 - DNA, 513 bp, Homo sapiens
tgatgctgtttgatagcattttttacccaaaagtagaactttttttcaaaattgtagtcagctcaaaccctgccactgctttaacaactaaggttatatagtattctaaatcctttgttgtcattcaataatttcacagccttttcaccaggagtagtttccatctttaagaaaccactttcttgggtcatctgtaaggaacaactcctaatctgtgcaagttttatcatgagattgcagcaattcagtcacatcttcaggctccacttctaattctcttgctgtttccactacatctgcagtaacttcctccacttgagtcttgaacctctcaaagtcatccatgagagttggartcaacttcttccaaacacctgttcatgttgatattttgacttcctctcatgaattatgaatgttcttaatgacatccacggtggtgaaatctttccaaaaggttttcagtttattttgcccaaatctgctacaggaatcactttttttttttttgag

SEQ ID NO: 204908 - DNA, 513 bp, Homo sapiens
tgatgctgtttgatagcattttttacccaaaagtagaactttttttcaaaattgtagtcagctcaaaccctgccactgctttaacaactaaggttatatagtattctaaatcctttgttgtcattcaataatttcacagccttttcaccaggagtagtttccatctttaagaaaccactttcttgggtcatctgtaaggaacaactcctaatctgtgcaagttttatcatgagattgcagcaattcagtcacatcttcaggctccacttctaattctcttgctgtttccactacatctgcagtaacttcctccacttgagtcttgaacctctcaaagtcatccatgagagttggagtcaacttcttccaaacacctgttcatgttgatattttgacttcctctcatgaattatgaatgttcttaatgacatccacggtggtgaartctttccaaaaggttttcagtttattttgcccaaatctgctacaggaatcactttttttttttttgag

SEQ ID NO: 204909 - DNA, 488 bp, Homo sapiens
acttgctacagcttccatgtcagcacttgctgcttcaytttccacttttatgttatgacaagagcatttttcctcatgagccaacctttacttgcttccagtttttcttctgcagttttctcacctctctcagccttcatagaactgaaaaagattagagccttgctgtggattaggctttttgcctaagggaatgttgtggctggtttgatcttccatatggaccactaaaactttcttcatattagcaataagattgtttcatgttcactgacatagtgcttttaattttattcaagaatttttcgtttacattcataattggctgagtggtacaagaggcctagttttaggcctttctcactttttgatattccttccccactaagattaatcatttgtagcttttcagttaaagtgagaggcatgtgacttttcctttccctgaattgtttgggcattatatattacttctgttgcactacagt

SEQ ID NO: 204910 - DNA, 488 bp, Homo sapiens
acttgctacagcttccatgtcagcacttgctgcttcactttccacttttatgttatgacaagagcatttttcctcatgagccaacctytacttgcttccagtttttcttctgcagttttctcacctctctcagccttcatagaactgaaaaagattagagccttgctgtggattaggctttttgcctaagggaatgttgtggctggtttgatcttccatatggaccactaaaactttcttcatattagcaataagattgtttcatgttcactgacatagtgcttttaattttattcaagaatttttcgtttacattcataattggctgagtggtacaagaggcctagttttaggcctttctcactttttgatattccttccccactaagattaatcatttgtagcttttcagttaaagtgagaggcatgtgacttttcctttccctgaattgtttgggcattatatattacttctgttgcactacagt

SEQ ID NO: 204911 - DNA, 488 bp, Homo sapiens
acttgctacagcttccatgtcagcacttgctgcttcactttccacttttatgttatgacaagagcatttttcctcatgagccaacctttacttgcttccagtttttcttctgcagttttctcacctctctcagccttcatagaactgaaaaagwttagagccttgctgtggattaggctttttgcctaagggaatgttgtggctggtttgatcttccatatggaccactaaaactttcttcatattagcaataagattgtttcatgttcactgacatagtgcttttaattttattcaagaatttttcgtttacattcataattggctgagtggtacaagaggcctagttttaggcctttctcactttttgatattccttccccactaagattaatcatttgtagcttttcagttaaagtgagaggcatgtgacttttcctttccctgaattgtttgggcattatatattacttctgttgcactacagt

SEQ ID NO: 204912 - DNA, 488 bp, Homo sapiens
acttgctacagcttccatgtcagcacttgctgcttcactttccacttttatgttatgacaagagcatttttcctcatgagccaacctttacttgcttccagtttttcttctgcagttttctcacctctctcagccttcatagaactgaaaaagattagagccttgctgtggattaggctttttgcytaagggaatgttgtggctggtttgatcttccatatggaccactaaaactttcttcatattagcaataagattgtttcatgttcactgacatagtgcttttaattttattcaagaatttttcgtttacattcataattggctgagtggtacaagaggcctagttttaggcctttctcactttttgatattccttccccactaagattaatcatttgtagcttttcagttaaagtgagaggcatgtgacttttcctttccctgaattgtttgggcattatatattacttctgttgcactacagt

SEQ ID NO: 204913 - DNA, 623 bp, Homo sapiens
ctttttgcctaagggaatgttgtggctggtttgatcttccatatggaccactaaaactttcttcatattagcaataagattgtttcatgttcactgacatagtgcttttaattttattcaagaatttttcgtttacattcataattggctgagtggtacaagaggcctagttttaggcctttctcactttttgatattccttccccactaagattaatcatttgtagcttttcagttaaagtgagaggcatgtgacttttcctttccctgaattgtttgggcattatatattacttctgttgcactacagtgtcagagttggttgctgcagagagcacatwtatttcaaattgctgctctgcatgctacaaatcacaatgacatagttactgtttgtcagtatgtgtgtgtgtgtgtgcaccacacatattgccctggcatcttatttatttctctcattaccagtgcatacctacctatcatgttaaaacaagaaagggagaaaagtggactttatatgtaacactttagaggcatagtggaatgtatattattattaacaaattagatagcaaagcattatatttgttatgctagaagactatggctgtgctaaaagaata

SEQ ID NO: 204914 - DNA, 574 bp, Homo sapiens
gctaagatgcgttacagttgatagtggcaaaaataactgtggagcagaaagacttgagttggacaaatttacaaagcttgttaaatgtcaggtgtttaaagcctgattatttattgtattatttattagcaggtactttgcagaaaatatttaaatctgtcatgttttagtgaactattatataatagtgtcagcagtgattttgacttgcatttgtggacttcatcatcatcaaatcctatgaatttttgttagatatagaggcagaatatactgaattgccattatacagagcaatttaatgacttggcagtggkaaagttttatttcagttttttgcgctgaggaatgagattgaaatttttctgaataatattgccctcaactgttaagtcaaatgcttaatagctttgaaagttggcttttcctatagatttcataatattttgtaacaaattcacctaaaattacaaggcagaacagtgattataagtgaaccttatactgtggtaaggtcacttctacaagaataatgaatcatgaaaatcaagagaaagaacaaatagtaggaaaa

SEQ ID NO: 204915 - DNA, 554 bp, Homo sapiens
ggcagtggtaaagttttatttcagttttttgcgctgaggaatgagattgaaatttttctgaataatattgccctcaactgttaagtcaaatgcttaatagctttgaaagttggcttttcctatagatttcataatattttgtaacaaattcacctaaaattacaaggcagaacagtgattataagtgaaccttatactgtggtaaggtcasttctacaagaataatgaatcatgaaaatcaagagaaagaacaaatagtaggaaaatatcttccaattccttttggcccttcatatttccacctaaactcataagcttttaaaaagataattattatttatacttaaaaagataatataggataatatttttgtaaaagagttcttgagatacagcactgaatataaagaaaatattggagcattcaactacatttgagaaataacttctgtttattaaaagatactgtaagaatgaaagcacaagccctaatgaatattcctgtttgatactaaaccaaagcttgagaagtggtagtttctcaagtttttcaa

SEQ ID NO: 204916 - DNA, 554 bp, Homo sapiens
ggcagtggtaaagttttatttcagttttttgcgctgaggaatgagattgaaatttttctgaataatattgccctcaactgttaagtcaaatgcttaatagctttgaaagttggcttttcctatagatttcataatattttgtaacaaattcacctaaaattacaaggcagaacagtgattataagtgaaccttatactgtggtaaggtcacttctacaagaataatgaatcatgaaaatcaagagaaagaacaratagtaggaaaatatcttccaattccttttggcccttcatatttccacctaaactcataagcttttaaaaagataattattatttatacttaaaaagataatataggataatatttttgtaaaagagttcttgagatacagcactgaatataaagaaaatattggagcattcaactacatttgagaaataacttctgtttattaaaagatactgtaagaatgaaagcacaagccctaatgaatattcctgtttgatactaaaccaaagcttgagaagtggtagtttctcaagtttttcaa

SEQ ID NO: 204917 - DNA, 421 bp, Homo sapiens
aagtgaaccttatactgtggtaaggtcacttctacaagaataatgaatcatgaaaatcaagagaaagaacaaatagtargaaaatatcttccaattccttttggcccttcatatttccacctaaactcataagcttttaaaaagataattattatttatacttaaaaagataatataggataatatttttgtaaaagagttcttgagatacagcactgaatataaagaaaatattggagcattcaactacatttgagaaataacttctgtttattaaaagatactgtaagaatgaaagcacaagccctaatgaatattcctgtttgatactaaaccaaagcttgagaagtggtagtttctcaagtttttcaagtggtttggtgcaatctgaagactgcaatcccatcaatgaactttatat

SEQ ID NO: 204918 - DNA, 421 bp, Homo sapiens
aagtgaaccttatactgtggtaaggtcacttctacaagaataatgaatcatgaaaatcaagagaaagaacaaatagtaggaaaatrtcttccaattccttttggcccttcatatttccacctaaactcataagcttttaaaaagataattattatttatacttaaaaagataatataggataatatttttgtaaaagagttcttgagatacagcactgaatataaagaaaatattggagcattcaactacatttgagaaataacttctgtttattaaaagatactgtaagaatgaaagcacaagccctaatgaatattcctgtttgatactaaaccaaagcttgagaagtggtagtttctcaagtttttcaagtggtttggtgcaatctgaagactgcaatcccatcaatgaactttatat

SEQ ID NO: 204919 - DNA, 421 bp, Homo sapiens
aagtgaaccttatactgtggtaaggtcacttctacaagaataatgaatcatgaaaatcaagagaaagaacaaatagtaggaaaatatcttccaattccttttggcccttcatatttccacctaaactcataagcttttaaaaagataattattatttatacttaaaaagataatataggataatatttttgtaaaagagttcttgagatacagcactgaayataaagaaaatattggagcattcaactacatttgagaaataacttctgtttattaaaagatactgtaagaatgaaagcacaagccctaatgaatattcctgtttgatactaaaccaaagcttgagaagtggtagtttctcaagtttttcaagtggtttggtgcaatctgaagactgcaatcccatcaatgaactttatat

SEQ ID NO: 204920 - DNA, 527 bp, Homo sapiens
aatgagattgaaatttttctgaataatattgccctcaactgttaagtcaaatgcttaatagctttgaaagttggcttttcctatagatttcataatattttgtaacaaattcacctaaaattacaaggcagaacagtgattataagtgaaccttatactgtggtaaggtcacttctacaagaataatgaatcatgaaaatcaagagaaagaacaaatagtaggaaaatatcttccaattccttttggcccttcatatttccacctaaactcataagcttttaaaaagataattattatttatacttaaaaagataatataggataatatttttgtaaaagagttcttgagatacagcactgaatataaagaaaatattggagcattcaactacatttgagaaataacttctgtttattaaaakatactgtaagaatgaaagcacaagccctaatgaatattcctgtttgatactaaaccaaagcttgagaagtggtagtttctcaagtttttcaagtggtttggtgc

SEQ ID NO: 204921 - DNA, 340 bp, Homo sapiens
gttgcctccgttgtgtaaaaaatcactgagacttaactgtgtccaacttttaaaatgtgaatataagtacaactaaagctatattttggttaatatttgcattgcatgcttttccattatttactttcaacatatgtgaaatatgaatataaattataaaaactttaagagagtccatttaaaaaatctggtctggttatgttttacctggtttaatacaacgtkcattcttgaattcagggtctaatataattggtacatttgtctatttgcaaaaaaaaaaaaccttgacaatattttaaaattaatttatccaactcacaacttatatgcttctgcc

SEQ ID NO: 204922 - DNA, 340 bp, Homo sapiens
gttgcctccgttgtgtaaaaaatcactgagacttaactgtgtccaacttttaaaatgtgaatataagtacaactaaagctatattttggttaatatttgcattgcatgcttttccattatttactttcaacatatgtgaaatatgaatataaattataaaaactttaagagagtccatttaaaaaatctggtctggttatgttttacctggtttaatacaacgttcattcttgaattcagggtctaatataattggtacatttgtctatttgcaaaaaaaaaaaamcttgacaatattttaaaattaatttatccaactcacaacttatatgcttctgcc

SEQ ID NO: 204923 - DNA, 418 bp, Homo sapiens
cccacaaataggtttctaagtcaaaggtattgtcagaagttcaaatgactggaccactcagtgctttgtgataytattttgatgatttttttgactgcattccattccaaaaactaatttactctgagtagaagcagagttaataaagtatgcaaaaatactaatctggcttatttaagtagtctagtgacatatctgagaaaaattttgtgtgagattcaataaaagctgagatttaaagaacaggttactgctggtctccccaagttaacatactttacctgagacatacacaaaattaacttttatccatctctctctctctctttttttttaaagtatttgcttgaggcataatcataatcaacttctaaagttacattttacttgatttgttgtcccaaatgtagacaaaaaa

SEQ ID NO: 204924 - DNA, 341 bp, Homo sapiens
ttatgtatagtattaatataccactccccacaaataggtttctaagtcaaaggtattgtcagaagttcaaatgactggaccactcagtgctttgtgatattattttgatgatttttytgactgcattccattccaaaaactaatttactctgagtagaagcagagttaataaagtatgcaaaaatactaatctggcttatttaagtagtctagtgacatatctgagaaaaattttgtgtgagattcaataaaagctgagatttaaagaacaggttactgctggtctccccaagttaacatactttacctgagacatacacaaaattaacttttatccatct

SEQ ID NO: 204925 - DNA, 341 bp, Homo sapiens
ttatgtatagtattaatataccactccccacaaataggtttctaagtcaaaggtattgtcagaagttcaaatgactggaccactcagtgctttgtgatattattttgatgatttttttgactgcattccattccaaaaactaatttactctgagtagawgcagagttaataaagtatgcaaaaatactaatctggcttatttaagtagtctagtgacatatctgagaaaaattttgtgtgagattcaataaaagctgagatttaaagaacaggttactgctggtctccccaagttaacatactttacctgagacatacacaaaattaacttttatccatct

SEQ ID NO: 204926 - DNA, 418 bp, Homo sapiens
cccacaaataggtttctaagtcaaaggtattgtcagaagttcaaatgactggaccactcagtgctttgtgatattattttgatgatttttttgactgcattccattccaaaaactaatttactctgagtagaagcagagttaataaagtatgcaaaaatactaatctggcttatttaagtagtctagtgacatatctgagaaaaattttgtgtgagattcaataaaagctgagatttaaagaacaggttactgctggtytccccaagttaacatactttacctgagacatacacaaaattaacttttatccatctctctctctctctttttttttaaagtatttgcttgaggcataatcataatcaacttctaaagttacattttacttgatttgttgtcccaaatgtagacaaaaaa

SEQ ID NO: 204927 - DNA, 418 bp, Homo sapiens
cccacaaataggtttctaagtcaaaggtattgtcagaagttcaaatgactggaccactcagtgctttgtgatattattttgatgatttttttgactgcattccattccaaaaactaatttactctgagtagaagcagagttaataaagtatgcaaaaatactaatctggcttatttaagtagtctagtgacatatctgagaaaaattttgtgtgagattcaataaaagctgagatttaaagaacaggttactgctggtctccccaagttaacatastttacctgagacatacacaaaattaacttttatccatctctctctctctctttttttttaaagtatttgcttgaggcataatcataatcaacttctaaagttacattttacttgatttgttgtcccaaatgtagacaaaaaa

SEQ ID NO: 204928 - DNA, 358 bp, Homo sapiens
gccaagcccggctcctctgatacatattttaataccttttaaaatcattctatatctttgtattttaaatatgacttataaatagcatggaatgggattttaacaatttatccatctttaactggattacttagtccatttgcatgtatttgtattctgacatacttggattctgtatagatggtgagtggtgtgtatgtacatgcatgtgtgtttgtgtcattttgtcactttctatttatcctacttatrtttcttttttcctttcttgccttcttttcaattggtgggattttttttcttctctagtcattttaagttagtctttgtttatattcttttagtaactgtcatgcta

SEQ ID NO: 204929 - DNA, 421 bp, Homo sapiens
tgggctgactgatttgtctataaaagagaatctctggaaagaaaaaataaatcatggatgtcatccaaagaggctagaccgtatcattggcaggtagataagaaaggtcagaggactgacagaatttagggcaaaagaaaagcagcaggacttaatgtcaagaaatacaaagataaccaaagaaaagaggctggagttaaakcttaagtgaagtaaaaggaattaaagctaaatgatgagtaaatacattgaggaacagggggtgaattaagatatgtagcatttccatgtttaaaccttgcaaaaacttctcattgcagaccgaacagaacccaaactccttcccttgcttacaagcctacatgatctagcctttgttcgccttgatgatgtctctactaccctcacctagtaggctact

SEQ ID NO: 204930 - DNA, 498 bp, Homo sapiens
aaaacaaataagaattacatcttgaaaaatctttaaaaaatcaactctaaattttatatcttgctccaaatatatagagatataaataggttatcttcaagatatggagaaagccatatcatggaaacactaaaataaagctgtgggaaggaccacattgatattagacacaacagagttcagaacaagaaatagtatcagagatgagagataatagataatataatcatcaattctcaagaagatgtaaacctcctactaattagggtatgcagctaacaacagaacctccaaatacatgaggaaaaacatgaaagaaatcaaaggtgaactagaaaaatccaaaattatatttgcagacttcaacacttttgtcttagtaatagacagactaggcacaatctcagtaatcatgyggaagataagaacaacaatatcaccaacaagacatccaatttgcaatggcagatactctttcctttcaagtgaaaaaaaaaa

SEQ ID NO: 204931 - DNA, 322 bp, Homo sapiens
ggattttaaaataaattttgaattttgaccttatcttttcccagaaagactttaaattgatactggaaaccaaataggatatattttgggagatttgaggctattaaaacaaaggcaaacaaagaagtgaccttctaaaagtcctagtaatgattaggtccattgtttcaattaaascataccgtgcttgagagataaagtgtattaaatatttgactgtaactttgtattagaaatgtttttaaaatctataaaaaagatttaccaatctatctataccatgtttttcagttttatggtatttcttccagacctctcttcc

SEQ ID NO: 204932 - DNA, 423 bp, Homo sapiens
ttttaaaataaattttgaattttgaccttatcttttcccagaaagactttaaattgatactggaaaccaaataggatatattttgggagatttgaggctattaaaacaaaggcaaacaaagaagtgaccttctaaaagtcctagtaatgattaggtccattgtttcaattaaaccatrccgtgcttgagagataaagtgtattaaatatttgactgtaactttgtattagaaatgtttttaaaatctataaaaaagatttaccaatctatctataccatgtttttcagttttatggtatttcttccagacctctcttcctgacatctccattagtgtcaagtatttcttcaacccccagtgatgcaacgtgagtctattttttaaaatgtagtctggaagcaatatgtaatatagtcaggaag

SEQ ID NO: 204933 - DNA, 474 bp, Homo sapiens
actttaaattgatactggaaaccaaataggatatattttgggagatttgaggctattaaaacaaaggcaaacaaagaagtgaccttctaaaagtcctagtaatgattaggtccattgtttcaattaaaccataccktgcttgagagataaagtgtattaaatatttgactgtaactttgtattagaaatgtttttaaaatctataaaaaagatttaccaatctatctataccatgtttttcagttttatggtatttcttccagacctctcttcctgacatctccattagtgtcaagtatttcttcaacccccagtgatgcaacgtgagtctattttttaaaatgtagtctggaagcaatatgtaatatagtcaggaagcagtatggatatatggttaagtatatacactatacacttaactgaggttaagcagagatcatagtgcctgacttgaagcacctgctctaccacaga

SEQ ID NO: 204934 - DNA, 322 bp, Homo sapiens
ggattttaaaataaattttgaattttgaccttatcttttcccagaaagactttaaattgatactggaaaccaaataggatatattttgggagatttgaggctattaaaacaaaggcaaacaaagaagtgaccttctaaaagtcctagtaatgattaggtccattgtttcaattaaaccataccgtgcttgagagataaagtgtattaaatatttgactgtaactttgtattagaaatrtttttaaaatctataaaaaagatttaccaatctatctataccatgtttttcagttttatggtatttcttccagacctctcttcc

SEQ ID NO: 204935 - DNA, 498 bp, Homo sapiens
taaaataaattttgaattttgaccttatcttttcccagaaagactttaaattgatactggaaaccaaataggatatattttgggagatttgaggctattaaaacaaaggcaaacaaagaagtgaccttctaaaagtcctagtaatgattaggtccattgtttcaattaaaccataccgtgcttgagagataaagtgtattaaatatttgactgtaactttgtattagaaatgtttttaaaatctataaaaaagatttacmaatctatctataccatgtttttcagttttatggtatttcttccagacctctcttcctgacatctccattagtgtcaagtatttcttcaacccccagtgatgcaacgtgagtctattttttaaaatgtagtctggaagcaatatgtaatatagtcaggaagcagtatggatatatggttaagtatatacactatacacttaactgaggttaagcagagatcatagtgcctgacttgaag

SEQ ID NO: 204936 - DNA, 461 bp, Homo sapiens
actttaaattgatactggaaaccaaataggatatattttgggagatttgaggctattaaaacaaaggcaaacaaagaagtgaccttctaaaagtcctagtaatgattaggtccattgtttcaattaaaccataccgtgcttgagagataaagtgtattaaatatttgactgtaactttgtattagaaatgtttttaaaatctataaaaaagatttaccaatctatctataccatgtttttcagttytatggtatttcttccagacctctcttcctgacatctccattagtgtcaagtatttcttcaacccccagtgatgcaacgtgagtctattttttaaaatgtagtctggaagcaatatgtaatatagtcaggaagcagtatggatatatggttaagtatatacactatacacttaactgaggttaagcagagatcatagtgcctgacttgaagcacct

SEQ ID NO: 204937 - DNA, 474 bp, Homo sapiens
actttaaattgatactggaaaccaaataggatatattttgggagatttgaggctattaaaacaaaggcaaacaaagaagtgaccttctaaaagtcctagtaatgattaggtccattgtttcaattaaaccataccgtgcttgagagataaagtgtattaaatatttgactgtaactttgtattagaaatgtttttaaaatctataaaaaagatttaccaatctatctataccatgtttttcagttttatggtatttcttccagacctctcttcctgacatctccattagtgtcaagtatttcttcaacccccagtgatgcaacgtgagtctatttttwaaaatgtagtctggaagcaatatgtaatatagtcaggaagcagtatggatatatggttaagtatatacactatacacttaactgaggttaagcagagatcatagtgcctgacttgaagcacctgctctaccacaga

SEQ ID NO: 204938 - DNA, 480 bp, Homo sapiens
ttttcccagaaagactttaaattgatactggaaaccaaataggatatattttgggagatttgaggctattaaaacaaaggcaaacaaagaagtgaccttctaaaagtcctagtaatgattaggtccattgtttcaattaaaccataccgtgcttgagagataaagtgtattaaatatttgactgtaactttgtattagaaatgtttttaaaatctataaaaaagatttaccaatctatctataccatgtttttcagttttatggtatttcttccagacctctcttcctgacatctccattagtgtcaagtatttcttcaacccccagtgatgcaacgtgagtctattttttaaaatgtagtctggaagcaatatgtaatatagtcaggaagcartatggatatatggttaagtatatacactatacacttaactgaggttaagcagagatcatagtgcctgacttgaagcacctgctcta

SEQ ID NO: 204939 - DNA, 498 bp, Homo sapiens
taaaataaattttgaattttgaccttatcttttcccagaaagactttaaattgatactggaaaccaaataggatatattttgggagatttgaggctattaaaacaaaggcaaacaaagaagtgaccttctaaaagtcctagtaatgattaggtccattgtttcaattaaaccataccgtgcttgagagataaagtgtattaaatatttgactgtaactttgtattagaaatgtttttaaaatctataaaaaagatttaccaatctatctataccatgtttttcagttttatggtatttcttccagacctctcttcctgacatctccattagtgtcaagtatttcttcaacccccagtgatgcaacgtgagtctattttttaaaatgtagtctggaagcaatatgtaatatagtcaggaagcagtatggatatatggttaagyatatacactatacacttaactgaggttaagcagagatcatagtgcctgacttgaag

SEQ ID NO: 204940 - DNA, 359 bp, Homo sapiens
ttatgtttcacagaccttgagaagataggaaaaaaaaagcttttatcaacattgctaaggaacaggtaaaagctaacattaggtaactaagaggtgacataaaaaagactgaataaaatatcatggaggtttcataataagattggaaattcaatagactaagagagaawagatcctaaaatatacatgctcattgggaaaacacctagtaagaaaaaggagagatctctatttaatgatacaatagtagagttataatttcctgtataatgtaaatttcaagcatttaaacattttcattgaattataaaatactatttggaaaagaaagaaaaacagcacaactgcagattacagat

SEQ ID NO: 204941 - DNA, 359 bp, Homo sapiens
ttatgtttcacagaccttgagaagataggaaaaaaaaagcttttatcaacattgctaaggaacaggtaaaagctaacattaggtaactaagaggtgacataaaaaagactgaataaaatatcatggaggtttcataataagattggaaattcaatagactaagagagaatagatcctaaaatatacatgctcattgggaaaacacctagtaagaaaaaggagagatctctatttaatgatacaatagtagagttataatttcctgtatawtgtaaatttcaagcatttaaacattttcattgaattataaaatactatttggaaaagaaagaaaaacagcacaactgcagattacagat

SEQ ID NO: 204942 - DNA, 359 bp, Homo sapiens
ttatgtttcacagaccttgagaagataggaaaaaaaaagcttttatcaacattgctaaggaacaggtaaaagctaacattaggtaactaagaggtgacataaaaaagactgaataaaatatcatggaggtttcataataagattggaaattcaatagactaagagagaatagatcctaaaatatacatgctcattgggaaaacacctagtaagaaaaaggagagatctctatttaatgatacaatagtagagttataatttcctgtataatgtaaatttcaagcatttaaacattttcattgaattataaaatactatttgkaaaagaaagaaaaacagcacaactgcagattacagat

SEQ ID NO: 204943 - DNA, 619 bp, Homo sapiens
aattagaaagttagaatttcattccttatattttcaaaaataaattgtgaagcattttataaacaaaacctaaaatwttttttaaaagcaaatagtaatatggttaaaggggcaggtttctatattgaggattattataaagtttttaaatcctaccaaaactagtaataggaacatatattatttataagacatattactattttttaccctgcctaaaaataaatacaaaataaattcatcaattataagttaacagggacacaaatggttaaagactcacaaaaaaaacaaaactacatacttcaatgtagcaatcaacttcaaatttcttaacaaaagatggaaatgtgggggaaaaaattagtcatctggtatctttcccatttcaacctgcctccattatcttgcaagtggtaaaatgcacagaaataagccccaaacaagaggggcagtctagggcaagtgaacacataagaagtcggaagaaattatgtaaaatgttgcatttacttattcagttttcccttagaatgattcacaaactcttcctcattctcccaagtccattttgagcatcattttctttgaagagagtctgatgggccctgtactatac

SEQ ID NO: 204944 - DNA, 619 bp, Homo sapiens
aattagaaagttagaatttcattccttatattttcaaaaataaattgtgaagcattttataaacaaaacctaaaatattttttaaaagcaaatagtaatatggttaaaggggcaggtttctatattgaggattattataaagtttttaaatcctaccaaaactagtaataggaacatatattatttatragacatattactattttttaccctgcctaaaaataaatacaaaataaattcatcaattataagttaacagggacacaaatggttaaagactcacaaaaaaaacaaaactacatacttcaatgtagcaatcaacttcaaatttcttaacaaaagatggaaatgtgggggaaaaaattagtcatctggtatctttcccatttcaacctgcctccattatcttgcaagtggtaaaatgcacagaaataagccccaaacaagaggggcagtctagggcaagtgaacacataagaagtcggaagaaattatgtaaaatgttgcatttacttattcagttttcccttagaatgattcacaaactcttcctcattctcccaagtccattttgagcatcattttctttgaagagagtctgatgggccctgtactatac

SEQ ID NO: 204945 - DNA, 616 bp, Homo sapiens
tgaaggtttacatttcctcatttgaaaaatggaaataataaagtaaaccctcatgaggtccttaagagtttaaatgaaataatccatataaagtgcttaagtgctgaacatagcatctggtatgcaataatcactctataaatgctaattggtaaaattatcatcattgttattgttagtccaactatagtagtagcatggaaccaggattctgaaaagtgtggcctgcagatcagggtcagtgcagacttactgrtttgcagtgagatctggagcttgtgccagaatgtaaataggcgatgtcactaaacatactgattactgttcagctgactttttaaaaatagcaagacctcttcagtgtaggaagcagttagttgatttacattctggtgcaagctctttaccttgccacaaaccagcagcagagttgacatggagtattggaccaatgatcccactctccaaaaaataatagtcctttattctgaagacgttattattcactcataatacctcattaactttctttttttctaaacattgtaataatagattataagtatattgtttatgagttcagcagatatttattgatcacatagtttgtgcacag

SEQ ID NO: 204946 - DNA, 569 bp, Homo sapiens
catataccaaaaatacttaacttttggtgatcttgtttgtgagtgtggctcataaacagcttagctgagataactggagcctcacgcagcagagacagttggaccctgctaacattactgtggatatcttcacatgttactacactgactttatattctgctaattaaccagggactacagtagttaaaattataattgttttcaatgttttatgtgtaaatctgtatctcacatactatcaaactcttcctcactgtcatcagtctactgcattgaatcaacataacaaagctaaatgactgctgagggctgaatcagaaagaagaaaasaaagagatacaaaactctggccggcccggtggctcacacctgtaatctcggcactttggaaggccaaggcgggcggatcacgaggtcaggagatcgagaccatcctggctgacacagtgaaactccatctctactgaaaatacaaaaaattagccggatgtggtggcaggcacctgtagtcccagctactcaggaggctgaagcaggagaagcttctaaataactcataaacactaat

SEQ ID NO: 204947 - DNA, 336 bp, Homo sapiens
gaataacatttcggtgctattttggcactcaagggtattaatgcattagaaacacaaaaaaatatttgtcttcattgataaagtgtaataaccagcttttacaaaacaggtaattttttatattgtaactcccaaggtatctaaatwtgtttagtgcattaacagaacccagaattaactgcaaatacaacaccttggtagtctaaatgtccaaagagaaaggtcacgtaaatgtcgaaagaaaaagtacaatcaatctgttgaaaaatgtttataacaactcattaacataactaatttctgctaaattgttaaaatctaaaatcgcttattttg

SEQ ID NO: 204948 - DNA, 336 bp, Homo sapiens
gaataacatttcggtgctattttggcactcaagggtattaatgcattagaaacacaaaaaaatatttgtcttcattgataaagtgtaataaccagcttttacaaaacaggtaattttttatattgtaactcccaaggtatctaaatatgtttagtgcattaacagaacccagaattaactrcaaatacaacaccttggtagtctaaatgtccaaagagaaaggtcacgtaaatgtcgaaagaaaaagtacaatcaatctgttgaaaaatgtttataacaactcattaacataactaatttctgctaaattgttaaaatctaaaatcgcttattttg

SEQ ID NO: 204949 - DNA, 336 bp, Homo sapiens
gaataacatttcggtgctattttggcactcaagggtattaatgcattagaaacacaaaaaaatatttgtcttcattgataaagtgtaataaccagcttttacaaaacaggtaattttttatattgtaactcccaaggtatctaaatatgtttagtgcattaacagaacccagaattaactgcaaatacaacaccttgrtagtctaaatgtccaaagagaaaggtcacgtaaatgtcgaaagaaaaagtacaatcaatctgttgaaaaatgtttataacaactcattaacataactaatttctgctaaattgttaaaatctaaaatcgcttattttg

SEQ ID NO: 204950 - DNA, 336 bp, Homo sapiens
gaataacatttcggtgctattttggcactcaagggtattaatgcattagaaacacaaaaaaatatttgtcttcattgataaagtgtaataaccagcttttacaaaacaggtaattttttatattgtaactcccaaggtatctaaatatgtttagtgcattaacagaacccagaattaactgcaaatacaacaccttggtagtctaaatgtccaaagagaaaggtcacgtaaatgtcgaaagaaaaagtacaatcaatctgttgaaaaatgtttataacarctcattaacataactaatttctgctaaattgttaaaatctaaaatcgcttattttg

SEQ ID NO: 204951 - DNA, 616 bp, Homo sapiens
tgaaggtttacatttcctcatttgaaaaatggaaataataaagtaaaccctcatgaggtccttaagagtttaaatgaaataatccatataaagtgcttaagtgctgaacatagcatctggtatgcaataatcactctataaatgctaattggtaaaattatcatcattgttattgttagtccaactatagtagtagcatggaaccaggattctgaaaagtgtggcctgcagatcagggtcagtgcagacttactggtttgcagtgagatctggagcttgtgccagaatgtaaataggcgatgtcactaaacatactgattactgttcagctgactttttaaaaatagcaagacctcttcagtgtaggaagcagttagttgatttacattctggtgcaarctctttaccttgccacaaaccagcagcagagttgacatggagtattggaccaatgatcccactctccaaaaaataatagtcctttattctgaagacgttattattcactcataatacctcattaactttctttttttctaaacattgtaataatagattataagtatattgtttatgagttcagcagatatttattgatcacatagtttgtgcacag

SEQ ID NO: 204952 - DNA, 538 bp, Homo sapiens
gaattttcaaaacttttatttaatagattgaaataatctgtcaaaatgtatctataaaacacaacagaatgaacaaaatttctgagattaaagttgtatcataaaaaaataccaagaagttaaatattccacagttcatttaattaattatccagtattwattctgtaccagctatagcaatggttttaggctacgtgctctaataaatattgtaaggatccccatgctccaaatttgtttttaatcttcaccaatctgtttttagtgttaggcaactaggattctcccaggatgcagtaataaagaacaaagatggaaagcaagagaaagaggcagaatgacacgaaaatctgatccagaaggtgcaacgtctgttttatatgagtaccagaaagggagaaaataggagggattataatcaccaaaattctaaaggaaaattatgtttatatctaataataaaagctaacatttaattaagcataatcctcattcaacagatgaggaacctaaaacccaaagagtcattatcactgt

SEQ ID NO: 204953 - DNA, 538 bp, Homo sapiens
gaattttcaaaacttttatttaatagattgaaataatctgtcaaaatgtatctataaaacacaacagaatgaacaaaatttctgagattaaagttgtatcataaaaaaataccaagaagttaaatattccacagttcatttaattaattatccagtattaattctgtaccarctatagcaatggttttaggctacgtgctctaataaatattgtaaggatccccatgctccaaatttgtttttaatcttcaccaatctgtttttagtgttaggcaactaggattctcccaggatgcagtaataaagaacaaagatggaaagcaagagaaagaggcagaatgacacgaaaatctgatccagaaggtgcaacgtctgttttatatgagtaccagaaagggagaaaataggagggattataatcaccaaaattctaaaggaaaattatgtttatatctaataataaaagctaacatttaattaagcataatcctcattcaacagatgaggaacctaaaacccaaagagtcattatcactgt

SEQ ID NO: 204954 - DNA, 538 bp, Homo sapiens
gaattttcaaaacttttatttaatagattgaaataatctgtcaaaatgtatctataaaacacaacagaatgaacaaaatttctgagattaaagttgtatcataaaaaaataccaagaagttaaatattccacagttcatttaattaattatccagtattaattctgtaccagctatagcaatggttttaggctacgtgctctaataaatattgtaaggmtccccatgctccaaatttgtttttaatcttcaccaatctgtttttagtgttaggcaactaggattctcccaggatgcagtaataaagaacaaagatggaaagcaagagaaagaggcagaatgacacgaaaatctgatccagaaggtgcaacgtctgttttatatgagtaccagaaagggagaaaataggagggattataatcaccaaaattctaaaggaaaattatgtttatatctaataataaaagctaacatttaattaagcataatcctcattcaacagatgaggaacctaaaacccaaagagtcattatcactgt

SEQ ID NO: 204955 - DNA, 538 bp, Homo sapiens
gaattttcaaaacttttatttaatagattgaaataatctgtcaaaatgtatctataaaacacaacagaatgaacaaaatttctgagattaaagttgtatcataaaaaaataccaagaagttaaatattccacagttcatttaattaattatccagtattaattctgtaccagctatagcaatggttttaggctacgtgctctaataaatattgtaaggatccccatgctccaaatttgtttttaatcttcaccaatctgtttttagtgttaggcaactaggattctcccaggatgcagtaataaagaacaaagatggaaagcaagagaaagaggcagaatgacaygaaaatctgatccagaaggtgcaacgtctgttttatatgagtaccagaaagggagaaaataggagggattataatcaccaaaattctaaaggaaaattatgtttatatctaataataaaagctaacatttaattaagcataatcctcattcaacagatgaggaacctaaaacccaaagagtcattatcactgt

SEQ ID NO: 204956 - DNA, 645 bp, Homo sapiens
tttttttaaaaatttattatttattattattattattattttttgagacagagtttcactctgttgcccaggcaggagtgcaatggcccgatctcggctcactgcaacctccgccccccaggttcaagcgattctcctgcctcagtctcctgagtagctggrattacaggcaccagccaccgcacccggataaatgatttcaaacttcttgaagccctcaccagaagcagatgccagcaccacacttcctgtactgtctgcagaattgtgagccaattaagcctctttttgttatcaattacccagcgacaggtatttctttacagcaacacaggagcagctatatatctatatctatatctatatatatatattcatacatatgcacaatgcacagtgacatacacaattcaaaaacagacttgaggggaaaaaacacaaacgctatccaaaaaaatgcaggtatagcaataattgcaaagaaacagaatttaaaaagcagtgaataagtcaaagataataattcataataacataagttttatgttacagtgtaaattccaaaagaagccatagtcattaaagtttatacacctaataaatatatgtcacatatagaaagtaaagctgagtagaaataacatg

SEQ ID NO: 204957 - DNA, 645 bp, Homo sapiens
tttttttaaaaatttattatttattattattattattattttttgagacagagtttcactctgttgcccaggcaggagtgcaatggcccgatctcggctcactgcaacctccgccccccaggttcaagcgattctcctgcctcagtctcctgagtagctggaattacaggcaccagccacygcacccggataaatgatttcaaacttcttgaagccctcaccagaagcagatgccagcaccacacttcctgtactgtctgcagaattgtgagccaattaagcctctttttgttatcaattacccagcgacaggtatttctttacagcaacacaggagcagctatatatctatatctatatctatatatatatattcatacatatgcacaatgcacagtgacatacacaattcaaaaacagacttgaggggaaaaaacacaaacgctatccaaaaaaatgcaggtatagcaataattgcaaagaaacagaatttaaaaagcagtgaataagtcaaagataataattcataataacataagttttatgttacagtgtaaattccaaaagaagccatagtcattaaagtttatacacctaataaatatatgtcacatatagaaagtaaagctgagtagaaataacatg

SEQ ID NO: 204958 - DNA, 427 bp, Homo sapiens
ggaattctgcagatgtgattgaagccaycaatcaactgcctttgaattaatcaaaagagagatttgcctaatctaatcaaataacctctttgaaagcggagttttctccagctagtagcaaaagggaaattcatagcaagggaacatttcaatacactgttgctatctttgaagataaaaagagccaggagcaaaaaccaaggagtggcctctaggaactgagtgtgacccaagccaataggcagtaagaaaatggtgagctcagcagggtgtggtggctcatgcctgtaatcccagcactttgggaggccaaggcaggaggatcacgaggtcatgagatcgagaccatcctggctaacgcggtaaaaccccgtttctactaaaaatacaaaaaaaaaaaatagccagcatggtggcgcacacctgt

SEQ ID NO: 204959 - DNA, 427 bp, Homo sapiens
ggaattctgcagatgtgattgaagccaccaatcaactgcctttgaattaatcaaaagagagatttgcctaatctaatcaaataacctctttgaaagcggagttttctccagctagtagcaaaagggaaattcatagcaagggaacatttcartacactgttgctatctttgaagataaaaagagccaggagcaaaaaccaaggagtggcctctaggaactgagtgtgacccaagccaataggcagtaagaaaatggtgagctcagcagggtgtggtggctcatgcctgtaatcccagcactttgggaggccaaggcaggaggatcacgaggtcatgagatcgagaccatcctggctaacgcggtaaaaccccgtttctactaaaaatacaaaaaaaaaaaatagccagcatggtggcgcacacctgt

SEQ ID NO: 204960 - DNA, 589 bp, Homo sapiens
gccaccaatcaactgcctttgaattaatcaaaagagagatttgcctaatctaatcaaataacctctttgaaagcggagttttctccagctagtagcaaaagggaaattcatagcaagggaacatttcaatacactgttgctatctttgaagataaaaagagccaggagcaaaaaccaargagtggcctctaggaactgagtgtgacccaagccaataggcagtaagaaaatggtgagctcagcagggtgtggtggctcatgcctgtaatcccagcactttgggaggccaaggcaggaggatcacgaggtcatgagatcgagaccatcctggctaacgcggtaaaaccccgtttctactaaaaatacaaaaaaaaaaaatagccagcatggtggcgcacacctgtaatcccggccacttgggaggctgaggcacgagaatcacttgaacccaggaggcagaggttgcagtgagccgagactgcaccactgcactccagcctgtgcaacagagcaagactctgtctcaaaaaaaaaaaaaaaaagaaaaagaaaatggcgagctcagccctacaactgcatagaactgaat

SEQ ID NO: 204961 - DNA, 589 bp, Homo sapiens
gccaccaatcaactgcctttgaattaatcaaaagagagatttgcctaatctaatcaaataacctctttgaaagcggagttttctccagctagtagcaaaagggaaattcatagcaagggaacatttcaatacactgttgctatctttgaagataaaaagagccaggagcaaaaaccaaggagtggcctctaggaactgagtgtgacccaagccaataggcagtaagaaaatggtgagctcagcagggtgtggtggctcatgcctgtaatcccagcactttgggaggccaaggcaggaggatcacgaggtcatgagatcgagacyatcctggctaacgcggtaaaaccccgtttctactaaaaatacaaaaaaaaaaaatagccagcatggtggcgcacacctgtaatcccggccacttgggaggctgaggcacgagaatcacttgaacccaggaggcagaggttgcagtgagccgagactgcaccactgcactccagcctgtgcaacagagcaagactctgtctcaaaaaaaaaaaaaaaaagaaaaagaaaatggcgagctcagccctacaactgcatagaactgaat

SEQ ID NO: 204962 - DNA, 589 bp, Homo sapiens
gccaccaatcaactgcctttgaattaatcaaaagagagatttgcctaatctaatcaaataacctctttgaaagcggagttttctccagctagtagcaaaagggaaattcatagcaagggaacatttcaatacactgttgctatctttgaagataaaaagagccaggagcaaaaaccaaggagtggcctctaggaactgagtgtgacccaagccaataggcagtaagaaaatggtgagctcagcagggtgtggtggctcatgcctgtaatcccagcactttgggaggccaaggcaggaggatcacgaggtcatgagatcgagaccatcctggctaacrcggtaaaaccccgtttctactaaaaatacaaaaaaaaaaaatagccagcatggtggcgcacacctgtaatcccggccacttgggaggctgaggcacgagaatcacttgaacccaggaggcagaggttgcagtgagccgagactgcaccactgcactccagcctgtgcaacagagcaagactctgtctcaaaaaaaaaaaaaaaaagaaaaagaaaatggcgagctcagccctacaactgcatagaactgaat

SEQ ID NO: 204963 - DNA, 580 bp, Homo sapiens
aatatttggggtattcctagaaatgtgtacctattattcacttgctctatatatatagagagagagctatatagctctctctctatatatagctatatatatagcaaagtgaattttatatataattcttcaacatatttttagaaaaattaagtttttttagaaaattaagagaattttagataaaaactcaacttttaatggaaaatattttcctttttctttctcacatgaaatcctatatcaaggttagtatcctacctggcatctctccaatactgggttaagagtttttcttctcaagtaacctgtattatattaagatgatattaactgaaataatcagatagatgaatgcatcataaagctaattctaagatatctgtcctcagccaaaagcagaaaagggatacacataacttccacataaaacatccacccccatttttttggttattcttaaaagctcataatgtatacaatgataaaatttattgtttcaaattagggtttttgaaattgaaatatkagtttaaacatatttgcttaacacaactttaaagttaataagaagacactg

SEQ ID NO: 204964 - DNA, 578 bp, Homo sapiens
ttgagtaggagtaaacacagacacactaagaatctagttggatacacttaaatcatgtcttttaagaacataagaacagattatttgcttcctctttagtccaaaaccttggtgtaattatagtccatatttgaaactaacagaagwatactcagcttcttaaaagttttatttcaagaacagtaaaagaacttctggtcttacaaacattacacagataaaacaagtttctccaaacagatgtatgtaaaaatctagtacatatacccccaagttaagttaataaggtgaaccagattctggtcgaatggaatccttgaaatataactttggtgaacaaactctttgtgttttccacttttcttaaaaaagaagtgataaagcagatttccagtacctgccagctgacaaaacgttacttaccaggtaaaaaccactaccaaaaatcagaatcacagaagggctatcagtaaaattattaatgccacaaattaacatgatgttaacagctgaattatgcatcaaaagagtatttatataatcacagcaaataactcaaatcttttacatcactagta

SEQ ID NO: 204965 - DNA, 578 bp, Homo sapiens
ttgagtaggagtaaacacagacacactaagaatctagttggatacacttaaatcatgtcttttaagaacataagaacagattatttgcttcctctttagtccaaaaccttggtgtaattatagtccatatttgaaactaacagaagtatactcagcttcttaaaagttttatttcaagaacagtaaaagaacttctggtcttacaaacattacacagataaaacaagtttctccaaacagatgtatgtaaaaatctagtacatatacccccaagttaagttaataaggtgaaccagattctggtcgaatggaatccttgaaatataactttggtgaacaaactstttgtgttttccacttttcttaaaaaagaagtgataaagcagatttccagtacctgccagctgacaaaacgttacttaccaggtaaaaaccactaccaaaaatcagaatcacagaagggctatcagtaaaattattaatgccacaaattaacatgatgttaacagctgaattatgcatcaaaagagtatttatataatcacagcaaataactcaaatcttttacatcactagta

SEQ ID NO: 204966 - DNA, 390 bp, Homo sapiens
gtatgagtgagtgaaagtctgatgaagatagttcctttttrcccccaaaggttttattgatcatgctgataatgaatttattgttattttaatctcttactgttatactcaggcttaaattctctaccctatacacttcagttgacataattttaatttccactctgatgcttctctcttttctatcaacactctctccccacagggtttcatctagatcaggagtcagcaacatttttgacaaagagccagacagtaaatagtgcaggctttgtgttgccaagaggcaaatttatggaactttccctgctgaaaaatttccctatattttacattttagacttataaatgatacacgtacttataactcatgagccacacaaaaacagg

SEQ ID NO: 204967 - DNA, 383 bp, Homo sapiens
tgagtgagtgaaagtctgatgaagatagttcctttttgcccccaaaggttttattgatcatgctgataatgaatttattgttattttaatctcttactgttatactcaggcttaaattctctaccctatacacttcagttgacataattttaatttccactmtgatgcttctctcttttctatcaacactctctccccacagggtttcatctagatcaggagtcagcaacatttttgacaaagagccagacagtaaatagtgcaggctttgtgttgccaagaggcaaatttatggaactttccctgctgaaaaatttccctatattttacattttagacttataaatgatacacgtacttataactcatgagccacacaaaaa

SEQ ID NO: 204968 - DNA, 392 bp, Homo sapiens
ttatatttcctgcctaagatgtttgtatgagtgagtgaaagtctgatgaagatagttcctttttgcccccaaaggttttattgatcatgctgataatgaatttattgttattttaatctcttactgttatactcaggcttaaattctctaccctatacacttcagttgacataattttaatttccactctgatgcttctctcttttctatcaacactctctccccacagggtttcwtctagatcaggagtcagcaacatttttgacaaagagccagacagtaaatagtgcaggctttgtgttgccaagaggcaaatttatggaactttccctgctgaaaaatttccctatattttacattttagacttataaatgatacacgtacttataac

SEQ ID NO: 204969 - DNA, 383 bp, Homo sapiens
tgagtgagtgaaagtctgatgaagatagttcctttttgcccccaaaggttttattgatcatgctgataatgaatttattgttattttaatctcttactgttatactcaggcttaaattctctaccctatacacttcagttgacataattttaatttccactctgatgcttctctcttttctatcaacactctctccccacagggtttcatctagatcaggagtcagcaacatttttgacaaagagccagacagtaaatartgcaggctttgtgttgccaagaggcaaatttatggaactttccctgctgaaaaatttccctatattttacattttagacttataaatgatacacgtacttataactcatgagccacacaaaaa

SEQ ID NO: 204970 - DNA, 477 bp, Homo sapiens
gaagacatacacaaatgttaaacctagagagaaatttgaatataagtaagtctctgaatgactggtagaacaaaccgaaaaataggatggagaggtttggaacagcatgattagsaaaattgacatatctgtcttttaatataggtagaaacatagataaaaacaggatttgtctcggagcatgatttctgaaaatagtggaatcgagtttgaatctagtaagtacatataaataaatgtcttaaaactcctcttatgttagctaattaagaaatattattgtaatagacattagaaaatattttaataaattgaatgcatttcacatgctaagaaaatgatcttacttgcatttgatagttcaattagatacatatatacctataggtagtttaaaatatttctaataaccttatatacttttaaaaaagcattgatatctgtttgcactatctggtctatagagtacacatacca

SEQ ID NO: 204971 - DNA, 477 bp, Homo sapiens
gaagacatacacaaatgttaaacctagagagaaatttgaatataagtaagtctctgaatgactggtagaacaaaccgaaaaataggatggagaggtttggaacagcatgattagcaaaattgacatatctgtcttttaatataggtagaaacatagataaaaacaggatttgtctcggagcatgatttctgaaaatagtggaatcgagtttgaatctagtaagtacatataaataaatgtcttaaaactcytcttatgttagctaattaagaaatattattgtaatagacattagaaaatattttaataaattgaatgcatttcacatgctaagaaaatgatcttacttgcatttgatagttcaattagatacatatatacctataggtagtttaaaatatttctaataaccttatatacttttaaaaaagcattgatatctgtttgcactatctggtctatagagtacacatacca

SEQ ID NO: 204972 - DNA, 477 bp, Homo sapiens
gaagacatacacaaatgttaaacctagagagaaatttgaatataagtaagtctctgaatgactggtagaacaaaccgaaaaataggatggagaggtttggaacagcatgattagcaaaattgacatatctgtcttttaatataggtagaaacatagataaaaacaggatttgtctcggagcatgatttctgaaaatagtggaatcgagtttgaatctagtaagtacatataaataaatgtcttaaaactcctcttatgttagctaattaagaaatattattgtaatagacattagaaaatattttaataaattgartgcatttcacatgctaagaaaatgatcttacttgcatttgatagttcaattagatacatatatacctataggtagtttaaaatatttctaataaccttatatacttttaaaaaagcattgatatctgtttgcactatctggtctatagagtacacatacca

SEQ ID NO: 204973 - DNA, 477 bp, Homo sapiens
gaagacatacacaaatgttaaacctagagagaaatttgaatataagtaagtctctgaatgactggtagaacaaaccgaaaaataggatggagaggtttggaacagcatgattagcaaaattgacatatctgtcttttaatataggtagaaacatagataaaaacaggatttgtctcggagcatgatttctgaaaatagtggaatcgagtttgaatctagtaagtacatataaataaatgtcttaaaactcctcttatgttagctaattaagaaatattattgtaatagacattagaaaatattttaataaattgaatgcatttcacatgctaagaaaatgatcttacttgcatttgatagttsaattagatacatatatacctataggtagtttaaaatatttctaataaccttatatacttttaaaaaagcattgatatctgtttgcactatctggtctatagagtacacatacca

SEQ ID NO: 204974 - DNA, 595 bp, Homo sapiens
tatagtaactagtacttcataattaagcaaaaagctcttattgaaaaatgacagaactatacatagagatgacaacatggagagatatttcctgagatcacaaagttatggtatggcagaactagaacgttgagaagagactctgtgttcccaatcattatttctaccagcagctttctatttggatattaataatgttcttatgtgggcaaccctacatatttgccaaggtttagttcattgacaaagaaatagaaagagcttcaagaacactctaatctttaaaaaataaaatatctataattggccatatgaaaaaaaattggtacttgacatatactgagatcgttttattttgtgcgagacaaatgaartcatagaacagaatgtgctttaagttttatgaatagtgcttgcatgtgtgtgtgtgtgtctatagatgcatattaggccgttgaaaagttttattattctttccagaagagagactgccaacttttgaacctaattagaacaagtagattgcttcttcatatttttatgaaggcaaagagagtctagttaaaaataattcaacttatcgtggaaacgctat

SEQ ID NO: 204975 - DNA, 486 bp, Homo sapiens
ggttctggacaaatatatttttattgatcacatacaaatagatgaagatggacttggatgttaagaaaaataatactatacaaaatcaagagtagacagtcactcctagacttaaattaagagtgtgtacattagataatttaatccaatgtatcaggtaaaaacttgaacaaaccttttggcctcttccatamaattcagggaagcatgtcctccacaaaacagtatcaaaatataaataaaagactggcttaagatgaaaggaaaccttatgaatgaaaagaagccagatgagaggcacttaactgagaatgaaaagaaactgagtggacaaaataattatgagaagatgaaccttcaaatcagaaagagggaaaaaagcttatttgatactatgggaactcaaaagagagtgaacacaaatgtgaaaattccaggagtaaagaaaagtagcacagctgaattaagagcatgagaaaatgtata

SEQ ID NO: 204976 - DNA, 486 bp, Homo sapiens
ggttctggacaaatatatttttattgatcacatacaaatagatgaagatggacttggatgttaagaaaaataatactatacaaaatcaagagtagacagtcactcctagacttaaattaagagtgtgtacattagataatttaatccaatgtatcaggtaaaaacttgaacaaaccttttggcctcttccatacaattcagggaagcatgtcctccacaaaacagwatcaaaatataaataaaagactggcttaagatgaaaggaaaccttatgaatgaaaagaagccagatgagaggcacttaactgagaatgaaaagaaactgagtggacaaaataattatgagaagatgaaccttcaaatcagaaagagggaaaaaagcttatttgatactatgggaactcaaaagagagtgaacacaaatgtgaaaattccaggagtaaagaaaagtagcacagctgaattaagagcatgagaaaatgtata

SEQ ID NO: 204977 - DNA, 486 bp, Homo sapiens
ggttctggacaaatatatttttattgatcacatacaaatagatgaagatggacttggatgttaagaaaaataatactatacaaaatcaagagtagacagtcactcctagacttaaattaagagtgtgtacattagataatttaatccaatgtatcaggtaaaaacttgaacaaaccttttggcctcttccatacaattcagggaagcatgtcctccacaaaacagtatcaaaatataaataaaagactggcttaagatgaaaggaaaccttatgaatgaaaagaagccagatgagaggcacttaactgagaatgaaaagaaactgagtggacaaaataattatgagaagatgaaccttcaaatcagaaagagggaaaaaagcttattygatactatgggaactcaaaagagagtgaacacaaatgtgaaaattccaggagtaaagaaaagtagcacagctgaattaagagcatgagaaaatgtata

SEQ ID NO: 204978 - DNA, 412 bp, Homo sapiens
aaaattcgttttaatgcatgtgtttatgcatagctttctatttttctcttttctatttatattccaaattagaatataatgctaatcaagcatagtggctgtgtttcttgcttcctgtagtctgcaggtagcatacaaatgtaataaactacttattcatgtcacatctatttattttctgccttataccaagcttgtgggattctcttaaatacaacatttttatacttacatctaggcaatacccattagcatcgccttcctaaatcaggggaaattgagcctctgtaaggtggagtaacttcctaagatacaaaactcagcattaaagtctgtatacttcaatatcctgcccccttctcatttgtctttactgccttttatrtatgtgttagatattcaataaattctg

SEQ ID NO: 204979 - DNA, 492 bp, Homo sapiens
gcctcttcctttgaactttgcagctggacccaaactctgcacaatttgggccagaagtctcgtgttgactttgcagcctaaattatcttgtagtttgtctaacscttaataaatttgctttcatcaaatattgtatttgttatcccaaaattaccatcatgtttttttctccaaataactaaaattgggagaaatagccagctgaatctgtaactcaacagaaacaagtgatccatataccatataagtggccatttcattttgtctccttccaccaaatcttagcaacctcaaccattaccatgagccactgtaggcctaccggctacaaacaaacaagtgtctttaaaaacatttcacactcccatttgataaatttcccagcaaagagatgactgctttaactctatgcacgtgggtcatattcgcaaagtctggagatattattcatgtagtgtgagaaaatcatcccagcgatgccagcacattctc

SEQ ID NO: 204980 - DNA, 368 bp, Homo sapiens
gaatgttagggatacgttctaacagatgcatccataggcaatttcatcgttttgtaaacatcacagagaatattacaaacacttagattgtacagcctaccacttctaggttatatggtagagcctctctctcctaggctacaaacctgtgtactacattaccgtactgaatactgcaggcaataagaacacagtgataagagtttatgtatgtaaacatacttaaacatagaaaagtatgtaaaaatatgtattataatctcatggaccacttttgcatatgtaatccatctttgacagaaatgttattatrcattacatgactctaagacaaaaataaaataacacattgtaaaaaatgtacacat

SEQ ID NO: 204981 - DNA, 228 bp, Homo sapiens
ttagaagggtacgtggtatatctaactgtatgtttacatatcttaattgtgcattttattcctaggkttgctttttctttagtttgtaaaacgttcttatttttatgataatgtagtatatactaaataaagaaaaatcaggaagtagaaaatgaagaagaaaacattaactattgtcaaccaaataaaaattgtgcaatctctaagtacatgaactatgtattattt

SEQ ID NO: 204982 - DNA, 228 bp, Homo sapiens
ttagaagggtacgtggtatatctaactgtatgtttacatatcttaattgtgcattttattcctagggttgctttwtctttagtttgtaaaacgttcttatttttatgataatgtagtatatactaaataaagaaaaatcaggaagtagaaaatgaagaagaaaacattaactattgtcaaccaaataaaaattgtgcaatctctaagtacatgaactatgtattattt

SEQ ID NO: 204983 - DNA, 228 bp, Homo sapiens
ttagaagggtacgtggtatatctaactgtatgtttacatatcttaattgtgcattttattcctagggttgcttttkctttagtttgtaaaacgttcttatttttatgataatgtagtatatactaaataaagaaaaatcaggaagtagaaaatgaagaagaaaacattaactattgtcaaccaaataaaaattgtgcaatctctaagtacatgaactatgtattattt

SEQ ID NO: 204984 - DNA, 416 bp, Homo sapiens
ctctgaaggccatggagagacattgaaaggttttatccaagtgaatgatggaaggagcaaactgtggaacccttggggcagcactgagaasagcgactcatgatgccccttttctgaactgcttatacagatttgattctcattcttggcattactcctgattcctccttcgtttacatgcacacgcacctacacacacacaaagacacacagagacacacgtctgcctctcggatctccttctagagtcttagttcttgttttttcagaatttgggcaactaacaaggctagaaaggaggccatctaaaaaagcgattggtgttgaaaagttgctgctcccgtcctagcagcacaactcttcacttcatagtaatgggagtaatgacgatgatgagtgtggacaactaatgagca

SEQ ID NO: 204985 - DNA, 416 bp, Homo sapiens
ctctgaaggccatggagagacattgaaaggttttatccaagtgaatgatggaaggagcaaactgtggaacccttggggcagcactgagaagagcgactcatgatgccccttttctgaactgcttatacagatttgattctcattcttggcattactcctgattcctccttcgtytacatgcacacgcacctacacacacacaaagacacacagagacacacgtctgcctctcggatctccttctagagtcttagttcttgttttttcagaatttgggcaactaacaaggctagaaaggaggccatctaaaaaagcgattggtgttgaaaagttgctgctcccgtcctagcagcacaactcttcacttcatagtaatgggagtaatgacgatgatgagtgtggacaactaatgagca

SEQ ID NO: 204986 - DNA, 416 bp, Homo sapiens
ctctgaaggccatggagagacattgaaaggttttatccaagtgaatgatggaaggagcaaactgtggaacccttggggcagcactgagaagagcgactcatgatgccccttttctgaactgcttatacagatttgattctcattcttggcattactcctgattcctccttcgtttacatgcacacgcacctacacacacacaaasacacacagagacacacgtctgcctctcggatctccttctagagtcttagttcttgttttttcagaatttgggcaactaacaaggctagaaaggaggccatctaaaaaagcgattggtgttgaaaagttgctgctcccgtcctagcagcacaactcttcacttcatagtaatgggagtaatgacgatgatgagtgtggacaactaatgagca

SEQ ID NO: 204987 - DNA, 416 bp, Homo sapiens
ctctgaaggccatggagagacattgaaaggttttatccaagtgaatgatggaaggagcaaactgtggaacccttggggcagcactgagaagagcgactcatgatgccccttttctgaactgcttatacagatttgattctcattcttggcattactcctgattcctccttcgtttacatgcacacgcacctacacacacacaaagacacacagagacacacgtctgcctctcrgatctccttctagagtcttagttcttgttttttcagaatttgggcaactaacaaggctagaaaggaggccatctaaaaaagcgattggtgttgaaaagttgctgctcccgtcctagcagcacaactcttcacttcatagtaatgggagtaatgacgatgatgagtgtggacaactaatgagca

SEQ ID NO: 204988 - DNA, 476 bp, Homo sapiens
gaatggaatggaacggagtggagtggagtggaatggaacggagtggagtggagtggagtgaagcggaatggaatggaatggaatggaatggaatggaatggaatggaatggtgaaatgaaatgtgagctgagattgtgcactgcactgcagcctgggtgacctagtgagatcctgtcaaaagaaaggaatggaattgaatggatttaaaatggaatggamtggaatggagtggagtggattagagtggattatcatggagtggagtggagtggagtggaatagaatggtgtggtatggattcttatggaatggaatggaatggagtgcagtggagtggagtggggtgtagtggagtggagtggaatggagtggaatggaatgggatggaatggaatggagtggagtggaaaggtgtagaatggagtggaatggaatggagtgcagtggactggagttgagtggagtggattgaagt

SEQ ID NO: 204989 - DNA, 476 bp, Homo sapiens
gaatggaatggaacggagtggagtggagtggaatggaacggagtggagtggagtggagtgaagcggaatggaatggaatggaatggaatggaatggaatggaatggaatggtgaaatgaaatgtgagctgagattgtgcactgcactgcagcctgggtgacctagtgagatcctgtcaaaagaaaggaatggaattgaatggatttaaaatggaatggactggaatggagtggagtggattagagtggattatcatggagtggagtggagtggagtggaatrgaatggtgtggtatggattcttatggaatggaatggaatggagtgcagtggagtggagtggggtgtagtggagtggagtggaatggagtggaatggaatgggatggaatggaatggagtggagtggaaaggtgtagaatggagtggaatggaatggagtgcagtggactggagttgagtggagtggattgaagt

SEQ ID NO: 204990 - DNA, 220 bp, Homo sapiens
gaattcaagtgtttcaaagatatcttattttaaaataccaaaataggaatmgaatatgaagggctggttatgagtaatatgatacacatttatgagaggatgagattacaataacaatacctcctctcatagaatagccagcaagtctccactaaataacagtgccttgattttataaatgtttaatcatagatattgagttaatgtgaaccatttgtag

SEQ ID NO: 204991 - DNA, 415 bp, Homo sapiens
ttgaattcaagtgtttcaaagatatcttattttaaaataccaaaataggaatcgaatatgaagggctggttatgagtaatatgatacayatttatgagaggatgagattacaataacaatacctcctctcatagaatagccagcaagtctccactaaataacagtgccttgattttataaatgtttaatcatagatattgagttaatgtgaaccatttgtagacacaggagtttattacagaattatatatctttcaagtatttagaagagtgttgaaattaagcctgcatccccacgattttcagcggtgctgatgcctaataaactcaactccttgcatgccaaaattggcttaaagcccactcgttacccaagctacacttcaagcatcaaggctcaaaaatgtaattttaa

SEQ ID NO: 204992 - DNA, 415 bp, Homo sapiens
gaattcaagtgtttcaaagatatcttattttaaaataccaaaataggaatcgaatatgaagggctggttatgagtaatatgatacacatttatgagaggatgagattacaataacaatacctcctctcatagaatagccagcaagtctccactaaataacagtgccttgattttataratgtttaatcatagatattgagttaatgtgaaccatttgtagacacaggagtttattacagaattatatatctttcaagtatttagaagagtgttgaaattaagcctgcatccccacgattttcagcggtgctgatgcctaataaactcaactccttgcatgccaaaattggcttaaagcccactcgttacccaagctacacttcaagcatcaaggctcaaaaatgtaattttaaat

SEQ ID NO: 204993 - DNA, 414 bp, Homo sapiens
tgaattcaagtgtttcaaagatatcttattttaaaataccaaaataggaatcgaatatgaagggctggttatgagtaatatgatacacatttatgagaggatgagattacaataacaatacctcctctcatagaatagccagcaagtctccactaaataacagtgccttgattttataaatgyttaatcatagatattgagttaatgtgaaccatttgtagacacaggagtttattacagaattatatatctttcaagtatttagaagagtgttgaaattaagcctgcatccccacgattttcagcggtgctgatgcctaataaactcaactccttgcatgccaaaattggcttaaagcccactcgttacccaagctacacttcaagcatcaaggctcaaaaatgtaattttaa

SEQ ID NO: 204994 - DNA, 415 bp, Homo sapiens
gaattcaagtgtttcaaagatatcttattttaaaataccaaaataggaatcgaatatgaagggctggttatgagtaatatgatacacatttatgagaggatgagattacaataacaatacctcctctcatagaatagccagcaagtctccactaaataacagtgccttgattttataaatgtttaatcatagatattgagttaatgtgaaccatttgtagacacaggagtttattrcagaattatatatctttcaagtatttagaagagtgttgaaattaagcctgcatccccacgattttcagcggtgctgatgcctaataaactcaactccttgcatgccaaaattggcttaaagcccactcgttacccaagctacacttcaagcatcaaggctcaaaaatgtaattttaaat

SEQ ID NO: 204995 - DNA, 414 bp, Homo sapiens
tgaattcaagtgtttcaaagatatcttattttaaaataccaaaataggaatcgaatatgaagggctggttatgagtaatatgatacacatttatgagaggatgagattacaataacaatacctcctctcatagaatagccagcaagtctccactaaataacagtgccttgattttataaatgtttaatcatagatattgagttaatgtgaaccatttgtagacacaggagtttattamagaattatatatctttcaagtatttagaagagtgttgaaattaagcctgcatccccacgattttcagcggtgctgatgcctaataaactcaactccttgcatgccaaaattggcttaaagcccactcgttacccaagctacacttcaagcatcaaggctcaaaaatgtaattttaa

SEQ ID NO: 204996 - DNA, 414 bp, Homo sapiens
tgaattcaagtgtttcaaagatatcttattttaaaataccaaaataggaatcgaatatgaagggctggttatgagtaatatgatacacatttatgagaggatgagattacaataacaatacctcctctcatagaatagccagcaagtctccactaaataacagtgccttgattttataaatgtttaatcatagatattgagttaatgtgaaccatttgtagacacaggagtttattacagaattatatatctttcaagtatttagaakagtgttgaaattaagcctgcatccccacgattttcagcggtgctgatgcctaataaactcaactccttgcatgccaaaattggcttaaagcccactcgttacccaagctacacttcaagcatcaaggctcaaaaatgtaattttaa

SEQ ID NO: 204997 - DNA, 349 bp, Homo sapiens
gttatgagtaatatgatacacatttatgagaggatgagattacaataacaatacctcctctcatagaatagccagcaagtctccactaaataacagtgccttgattttataaatgtttaatcatagatattgagttaatgtgaaccatttgtagacacaggagtttattacagaattatatatctttcaagtatttagaagagtgttgaaattaagcctgcatccccacgattttcagcggtgctgatgcctaataaactcaacyccttgcatgccaaaattggcttaaagcccactcgttacccaagctacacttcaagcatcaaggctcaaaaatgtaattttaaat

SEQ ID NO: 204998 - DNA, 419 bp, Homo sapiens
cctgaaaacatgagattccagtctacttgaatcagtggaagaaggaagtgccctctgctttaaccattacaaaaaagtaactgaagtagcttgatgttaaccamtcaggtttttctattctgtttccttgttgctacctcataaaacctgtggttctgctattgcccagtgggaactctctctgttttgcagagtggaaggtgcccagattcatgaatcatgaataaaagccaattaaatctataaatttgttgtagtcctctcataaacttaatataaaacctaatttgttgtaatttagtcttttgacaaacctaatatacaaagacatacgtttaactgtttcttcaggtctttatttccttacaaaggctcctaattatatcaagttacttccagaaaagtcaattttttctgtg

SEQ ID NO: 204999 - DNA, 419 bp, Homo sapiens
cctgaaaacatgagattccagtctacttgaatcagtggaagaaggaagtgccctctgctttaaccattacaaaaaagtaactgaagtagcttgatgttaaccactcaggtttttctattctgtttccttgttgctacctcataaaacctgtggttctgctattgcccagtgggaactctctctgttttgyagagtggaaggtgcccagattcatgaatcatgaataaaagccaattaaatctataaatttgttgtagtcctctcataaacttaatataaaacctaatttgttgtaatttagtcttttgacaaacctaatatacaaagacatacgtttaactgtttcttcaggtctttatttccttacaaaggctcctaattatatcaagttacttccagaaaagtcaattttttctgtg

SEQ ID NO: 205000 - DNA, 416 bp, Homo sapiens
gatattctcaatgatactctacattatttttactgtagttgtagtgctagttgagaatgtgacaacttctaatacagcttggtgccagctgccttcagttttggaaatgcatcaacagtwttacccaccatagcttttgcaccatgtaacaatttttgcttcaattgttaaacattattttggaaactcaaggaacagtaaagtctgttttattgcccatatttttactatttgtttgttctttcttccttcaggatgttctgagaatccttctttttatcattctcctttctggttcaataacttttctcactattcttttggtgtagttttgtctcatgactaatttttagttctcattcatctcacaatttcttgatttccctttcattactaatggatgtttttgctggata

SEQ ID NO: 205001 - DNA, 416 bp, Homo sapiens
gatattctcaatgatactctacattatttttactgtagttgtagtgctagttgagaatgtgacaacttctaatacagcttggtgccagctgccttcagttttggaaatgcatcaacagtattacccaccatagcttttgcaycatgtaacaatttttgcttcaattgttaaacattattttggaaactcaaggaacagtaaagtctgttttattgcccatatttttactatttgtttgttctttcttccttcaggatgttctgagaatccttctttttatcattctcctttctggttcaataacttttctcactattcttttggtgtagttttgtctcatgactaatttttagttctcattcatctcacaatttcttgatttccctttcattactaatggatgtttttgctggata

SEQ ID NO: 205002 - DNA, 416 bp, Homo sapiens
gatattctcaatgatactctacattatttttactgtagttgtagtgctagttgagaatgtgacaacttctaatacagcttggtgccagctgccttcagttttggaaatgcatcaacagtattacccaccatagcttttgcaccatgtaacaatttttgcttcaattgttaaacattattttggaaactcaaggaacagtaaagtctgttttattgcccatakttttactatttgtttgttctttcttccttcaggatgttctgagaatccttctttttatcattctcctttctggttcaataacttttctcactattcttttggtgtagttttgtctcatgactaatttttagttctcattcatctcacaatttcttgatttccctttcattactaatggatgtttttgctggata

SEQ ID NO: 205003 - DNA, 416 bp, Homo sapiens
gatattctcaatgatactctacattatttttactgtagttgtagtgctagttgagaatgtgacaacttctaatacagcttggtgccagctgccttcagttttggaaatgcatcaacagtattacccaccatagcttttgcaccatgtaacaatttttgcttcaattgttaaacattattttggaaactcaaggaacagtaaagtctgttttattgcccatatttttactatttgtttgttctttcttccttcaggatgttctgagaatccttctttttatcattctcctttctggttcaataacttttctcactattcttttggtgtagttttgtctcatractaatttttagttctcattcatctcacaatttcttgatttccctttcattactaatggatgtttttgctggata

SEQ ID NO: 205004 - DNA, 419 bp, Homo sapiens
cctgaaaacatgagattccagtctacttgaatcagtggaagaaggaagtgccctctgctttaaccattacaaaaaagtaactgaagtagcttgatgttaaccactcaggtttttctattctgtttccttgttgctacctcataaaacctgtggttctgctattgcccagtgggaactctctctgttttgcagagtggaaggtgcccagattcatgaatcatgaataaaagccaattaaatctataaatttgttgtagtcctctcataaacttaatataaaacctaatttgttgtaatttagtcttttgacaaacctaatatacaaagacataygtttaactgtttcttcaggtctttatttccttacaaaggctcctaattatatcaagttacttccagaaaagtcaattttttctgtg

SEQ ID NO: 205005 - DNA, 419 bp, Homo sapiens
cctgaaaacatgagattccagtctacttgaatcagtggaagaaggaagtgccctctgctttaaccattacaaaaaagtaactgaagtagcttgatgttaaccactcaggtttttctattctgtttccttgttgctacctcataaaacctgtggttctgctattgcccagtgggaactctctctgttttgcagagtggaaggtgcccagattcatgaatcatgaataaaagccaattaaatctataaatttgttgtagtcctctcataaacttaatataaaacctaatttgttgtaatttagtcttttgacaaacctaatatacaaagacatacgtttaactgtttcttcaggtctttatttccttacaaaggctcctarttatatcaagttacttccagaaaagtcaattttttctgtg

SEQ ID NO: 205006 - DNA, 437 bp, Homo sapiens
agactcttgctctgttgcccaggctggaatgcagtagaatgatctcagctcactgcaacctctgcttcctgggttcaagtgattctcatgcctcagcctcccaagtagctggaatcacggcgtgaaccaccatgcctggctaatttttgtatttttagtacagatggggtttcatgatgttggccaggctggtctcgaactcctgacctcragtgatccaaccacctctgcctcccaaagtgctgggattacaggcgtgagccactgtgtccagctgtaattgcttgttgaagcagttttataatatatagtttaaaatctttgatagataattatgacctctatgaattctcattgtttgcatcttttgactatattttcaaattcctcttcagattttcgtggttcttagtatggtatgacatgttatatttgat

SEQ ID NO: 205007 - DNA, 327 bp, Homo sapiens
tgttgcattgtttcctgtcttccatggtttctaatgagaagtcaggtgtggygtcagtagtatcattattcccatgtatataataatgttttgatattctctggctgctttcaggattttctctttatctttggttttcagcagtctgactatgatgtgcctaggtgtggttttctttgtgttcatcctgcttgggggttgctgagcttcttgaaagtgtaagttgatatttttcaccaaatttgtgaaaagcttgacttttatttcttattctttttctgtctcatttctctctcctcttcctctgtaactctaattacatgaatg

SEQ ID NO: 205008 - DNA, 367 bp, Homo sapiens
taatgtaaattgtttaaaattaatctgtatatgaaatgttttctaggactttcctgccagaaaagtaggaatagaatggcagaaggaaagaggttccttctacaagcaggcacacatcctatttcactttawcctgtgatcagtctcataaccatctcctggtatgaagtgctaaaactgtgctttaagaataacttaagtcctttatgtacaaactaaagcatgagagcctgaaccttggaaaccaagaaattccaaaaagccttatgtgtgagactgggtgccacagatcttggcagaaattactgcttattcttaattcttattgttcctttctaacacttcaacttataatgccaatatctac

SEQ ID NO: 205009 - DNA, 483 bp, Homo sapiens
agaaatacatgcttatgaaaattttttgcaccttcagacaaaagacaagggtagaagacatttgtaaccctataaacactagtaaattaaaaacagaaggaccttatgtcctaacatatttgtgttgggaaaggctgccctgtgaaatatgggatttcttaaacatattttaaaaatcatgggtgtcaatattttttagaaatccatttaaattttctcttgctattttacaatgcctatttatttatttagtggctctgctgattttgatgtatatcctaaactttacattctctttaaaggatgttttatacaactttatgtaaaatgtttcagtgtcttcacattctctccctgtccttttgttttgctcttatatggtggtcytgagtcttttctctggcttttcaaacctagtaagactaagacactaaagtaactttgcccgtggtttggtaatattttctaaagcacatcctaagc

SEQ ID NO: 205010 - DNA, 570 bp, Homo sapiens
agaagacatttgtaaccctataaacactagtaaattaaaaacagaaggaccttatgtcctaacatatttgtgttgggaaaggctgccctgtgaaatatgggatttcttaaacatattttaaaaatcatgggtgtcaatattttttagaaatccatttaaattttctcttgctattttacaatgcctatttatttatttagtggctctgctgattttgatgtatatcctaaactttacattctctttaaaggatgttttatacaactttatgtaaaatgtttcagtgtcttcacattctctccctgtccttttgttttgctcttatatggtggtcctgagtcttttctctggcttttcaaacctagtaagactaagacactaaagtaactttgcccgtggtttggtaatattttctaaagcacatcctaagctctcatgcatacaggggtctcctttgagctctgtgcttttgagatcccatatacctaaattccagtattggaaatcagtactgctcagtttcagttactamgtttaaaaatgtattttaatagcaagttagtttagtgc

SEQ ID NO: 205011 - DNA, 441 bp, Homo sapiens
tgtgtgtgtgtgtgtgtgtgtgtgtgtgttttgggggggtgggtatgcatgtgagtttgtgtgtgtggtattttacaagaacacatagcatataaagttgttgtgattttgaagaaaagtttttggatgtttgtttcttttctttagggtttttatgttttacattttaaaatttcaagaacctattcttaaaggatgtgatgttctttagaaattaaatgaaaaaacgtgacgtttctcattcttctgccaagcgtatttagggkaaattaatgatagagtggagctgcaagtttgtggcatcctgaaatgtctgttggagagtagaaaagggccatagattttgtaataaggctttcaatattgacttgatcaatagctgtatggagtggtttgtgccaaatctagtatctgtgaatgtattttgtgataagtattgta

SEQ ID NO: 205012 - DNA, 535 bp, Homo sapiens
tattgtctcaactgtgtgcaaccactacttataaaaaatgatataagaaatgcagtctgaaatctgaattctaaataacaatgtagggccattatccctctgggacccttagggtcaaaataagagaaaagrgatgaatggtgggttggaagtaagtcaatgatccttgtcaattttttgtatctgtcaagaaaagcatctgcttgaggacatccattttcctgcttctgagttacagaataataggtgcctatcctgaatgtaacattccctgacacggactctgtgtctatgctgcttaggtggtttgtgcatgagaaagtgtttaacatctgaaaatggagacaatccttagagaaagatacatatgaattttaaaaggaaatatacctacgatagaaatgaaacaaatagcataaatatctagctgtattttgtctttttggtaactgttacaatatatacattttcaaacaactaagttcagcactgacttcgggagaatctagataaaactgaactgacatataataag

SEQ ID NO: 205013 - DNA, 342 bp, Homo sapiens
ttttggggaaccgatggtgtttggttacatgaataacttctttagtgatgatttctgagattttagtgcacccatcactcgagcagggtacactgtayccaatgtttagtcttttctccctcatccccctcccaccctttcccctgggtccccagagtcaattgtatcattcttatgcctttgcatcttcatagctttgctcccacctataagtgagaacatatgatatttggttttccattcctgagttacttcacatagaactagtctccaattccatccagattgctgcaaatgccattattttgttcctttttatggctgagtagtattccatgctac

SEQ ID NO: 205014 - DNA, 342 bp, Homo sapiens
ttttggggaaccgatggtgtttggttacatgaataacttctttagtgatgatttctgagattttagtgcacccatcactcgagcagggtacactgtatccaatgtktagtcttttctccctcatccccctcccaccctttcccctgggtccccagagtcaattgtatcattcttatgcctttgcatcttcatagctttgctcccacctataagtgagaacatatgatatttggttttccattcctgagttacttcacatagaactagtctccaattccatccagattgctgcaaatgccattattttgttcctttttatggctgagtagtattccatgctac

SEQ ID NO: 205015 - DNA, 342 bp, Homo sapiens
ttttggggaaccgatggtgtttggttacatgaataacttctttagtgatgatttctgagattttagtgcacccatcactcgagcagggtacactgtatccaatgtttagtcttttctccctcatccccctcccaccctttcccctgggtccccagagtcaattgtatcattcttatgcctttgcatcttcatagctttgctcccacctataagtgagaacatatgatatttggttttccattcctgagttamttcacatagaactagtctccaattccatccagattgctgcaaatgccattattttgttcctttttatggctgagtagtattccatgctac

SEQ ID NO: 205016 - DNA, 603 bp, Homo sapiens
gtttattcttttttaagtggtttttttacttccttttctttaaatttattttttatttcaataggtttttggggaaccgatggtgtttggttacatgaataacttctttagtgatgatttctgagattttagtgcacccatcactcgagcagggtacactgtatccaatgtttagtcttttctccctcatccccctcccaccctttcccctgggtccccagagtcaattgtatcattcttatgcctttgcatcttcatagctttgctcccacctataagtgagaacatatgatatttggttttccattcctgagttacttcacatagaacwagtctccaattccatccagattgctgcaaatgccattattttgttcctttttatggctgagtagtattccatgctacatatataccacattttctttatccattcgttcactaatgggcatttgaactgattccatattttttcagttgcagattgtgctgctataaacatatgagaaaaggccaggcaccgtggctcatacctgtaatcccagccctttgggaggccaaggcagacagatcacctgaggtcaggagttcaagaccagcctg

SEQ ID NO: 205017 - DNA, 523 bp, Homo sapiens
aactagtctccaattccatccagattgctgcaaatgccattattttgttcctttttatggctgagtagtattccatgctacatatataccacattttctttatccattcgttcactaatgggcatttgaactgattccatattttttcagttgcagattgtgctgctataaacatatgagaaaaggccaggcaccgtggctcatacmtgtaatcccagccctttgggaggccaaggcagacagatcacctgaggtcaggagttcaagaccagcctgaccaacatgcagaaaccttatctctactaaaaatacaaaattagctgggtgtggtggcacatgcctataatctcagctacctgggaggctgaggcaggataatcgcttgaacccgggaggtagaggttgtggggagctgagagcacaccactgcactccagcctgggaaacaagagtgaaactgtctcaacaaaaaaaaagggagaaaaaaacgtatttattctctcgtattttctgtgggtcagga

SEQ ID NO: 205018 - DNA, 413 bp, Homo sapiens
tttggtcacaactcaactgggttcactgcatagggtttcacaaggttgcaggcaaggcgtcagctgagctaggttcaagctcattgaggttgttgacaaaattcatttccttatgtctgtatgattgtgtagctatgttttttattgggtattggctggaggccaccctcaggtcttagacaccacctgctgttgggcttccycaatatggtcacacacttcatcaaatcagcaaggagaatcttgtgtgcatgccagcaatatgtctatctcatatcctaatgtatgtctctctcctcctcctctcctcttctctctcctttcttctgtgcacacacacacacacacacacacacacacacatatcacaggagtaacaacccatcacatttgcaatattatgtcagttagaa

SEQ ID NO: 205019 - DNA, 499 bp, Homo sapiens
tgatatcaaaactagacttgtcacagagaatgcaagaggcgggagttatttcccaaatccaagttctgcctctggattattagacgtggcctcactgtccttgatctgcaaggaatttatactgattagagcattagtaaaacctatgttctattcatcatgaaaagtcattttttaaagattccagaattattagaggcagaaacaaattgaaaggttgtacacctacacctgctgtttgaaaaacacaacttaccaaagccaaacagaagaagtatgtaaactcctatgtctagtaataggcagaatccgtaatttaaaactttcccacaaaaacaattcccagttcctgawggcttcactggtgaattcttcaatgaaagggaaaactaacaccaacactacagaatttcttttttaattttagggacagatttttttttttaatcttagtgacagagtctcactatgttgcccaggctggagtgcagtggctact

SEQ ID NO: 205020 - DNA, 517 bp, Homo sapiens
aatcagcaacggttgttcacacaatatatcaaatcagtatttgaattagcttttgaattacgaggacaaatggatcaagtcttgactcattagtaggtaaatcttattaggctgaaatgtgttttcgcctgttttyccacaaggagattgcagatttgcaaacctcagctgctctcattttatgctctcaccaatccaaaagctgaagttcatcaatcagtgtgtctaagtgttcactagttatataccattttgtagtttaggctatctttccaacttcctaaatcatcaccttcatttgaccttgtttttttccactatcacttctttactgaccatataaagaatacaagtaagttcttattttcttattgttcattttagtctaatttcatcaaaatatcataattctttaatttcattttaatttcaaagattaaaagaaacctacatagaaataagtttaagattgtatttgcgttattttgacatcaatttgctatcctccctcatacac

SEQ ID NO: 205021 - DNA, 367 bp, Homo sapiens
taatgtaaattgtttaaaattaatctgtatatgaaatgttttctaggactttcctgccagaaaagtaggaatagaatggcagaaggaaagaggttccttctacaagcaggcacacatcctatttcactttatcctgtgatcagtctcataaccatctcctggtatgaagtgctaaaactgtgctttaagaataacttaagtcctttatgtacaaactaaagcatgagagcctgaaccttggaaaccaagaaattccaaaaagccttatgtgtgagactgggtgccacagatcktggcagaaattactgcttattcttaattcttattgttcctttctaacacttcaacttataatgccaatatctac

SEQ ID NO: 205022 - DNA, 563 bp, Homo sapiens
agaatagccagccctcaggctcatggtggttgctgctattctgttgaacgtgaaccatagcctttagaaaggagcaagtctttgtggaagacacaggatttgaagtgcaacaaaggggtggaaacccagctgaccatgataccttcaagtgagtttttccactgaatttgattattttctcatttggcacttctttctgggttttttaagcagcccaaaaactctaggtgattttacttttgtaattgtattctcttgggaatgctcattcctgattcctcrtttcaccaaataggtgtgtaaccttcttgtttctgcccataataattctggagtctttaaacaaaacgactgtgacttttcatgatgagtagaagataggttttactcatgctacaatcaatattaattccttacagttcaaagacactgaggccctgactaataatatagaagttgaacttggacttgggagatgactcctgcctctcgtactctctgtggctctgctttctattattttactcataagcttgttttgtctccttgctgagaattgtcaa

SEQ ID NO: 205023 - DNA, 563 bp, Homo sapiens
agaatagccagccctcaggctcatggtggttgctgctattctgttgaacgtgaaccatagcctttagaaaggagcaagtctttgtggaagacacaggatttgaagtgcaacaaaggggtggaaacccagctgaccatgataccttcaagtgagtttttccactgaatttgattattttctcatttggcacttctttctgggttttttaagcagcccaaaaactctaggtgattttacttttgtaattgtattctcttgggaatgctcattcctgattcctcatttcaccaaataggtgtgtaaccttcttgtttctgcccataataattctggagtctttaaacaaaacgactgtgacttttcatgatgagtagaagataggttttactcatgctacaatcaatattaattccttacagttcaaagacactgaggccctgactaataatatagaagttgaacttggacttgggagatgactcctgcytctcgtactctctgtggctctgctttctattattttactcataagcttgttttgtctccttgctgagaattgtcaa

SEQ ID NO: 205024 - DNA, 634 bp, Homo sapiens
ctcataagcttgttttgtctccttgctgagaattgtcaaacatgaaatgtaatttcaggttatagtgaagaaagatgacataggcagaagaaattggcaatcatttggcctgtacatsttgctttttgttttttttctggacttaagatatagaccacaccttgacatttctggcctttgagtctttcacaactgttattataatgcattagctcttctagaagttagaagtgaatttggattaagtctttcataaggtggctaaatgaatttatatggctcatcacaattcactagattggttaagcaggaaatttacagagatttttttctttgctgtaaatgtttttctaaattgaaaaacttctaatactgtcttctggagtagtcctagaaataagtgcaagtgtttttggcaggaggccacataaacatttctgcttctctgtgccttatgggtagcattgatataaattgttaaaaataatgattgtagataatgtatcagagtttgggctcagccgcggtagctgctgttgacccagagggaccactgggatcctcacatctcagggcagcacatcgtttgcagcaatggttgcttctatgcaaccttttatgaaattaggtgagg

SEQ ID NO: 205025 - DNA, 634 bp, Homo sapiens
ctcataagcttgttttgtctccttgctgagaattgtcaaacatgaaatgtaatttcaggttatagtgaagaaagatgacataggcagaagaaattggcaatcatttggcctgtacatgttgctttttgttttttttctggayttaagatatagaccacaccttgacatttctggcctttgagtctttcacaactgttattataatgcattagctcttctagaagttagaagtgaatttggattaagtctttcataaggtggctaaatgaatttatatggctcatcacaattcactagattggttaagcaggaaatttacagagatttttttctttgctgtaaatgtttttctaaattgaaaaacttctaatactgtcttctggagtagtcctagaaataagtgcaagtgtttttggcaggaggccacataaacatttctgcttctctgtgccttatgggtagcattgatataaattgttaaaaataatgattgtagataatgtatcagagtttgggctcagccgcggtagctgctgttgacccagagggaccactgggatcctcacatctcagggcagcacatcgtttgcagcaatggttgcttctatgcaaccttttatgaaattaggtgagg

SEQ ID NO: 205026 - DNA, 547 bp, Homo sapiens
aagaaattggcaatcatttggcctgtacatgttgctttttgttttttttctggacttaagatatagaccacaccttgacatttctggcctttgagtctttcacaactgttattataatgcattagctcttctagaagttagaagtgaatttggattaagtctttcataaggtggctaaatgaatttatatggctcatcacaattcactagattggttaagcaggaaatttacagagatttttttctttgctgtaaatgtttttctaaattgaaaaacttctaatactgtcttctggagtagtcctagaaataagtgcaagtgtttttggcaggaggccacataaacatttctgcttctctgtgccttatgggtagcattgatataaattgttaaaaataatgattgtagataatgtrtcagagtttgggctcagccgcggtagctgctgttgacccagagggaccactgggatcctcacatctcagggcagcacatcgtttgcagcaatggttgcttctatgcaaccttttatgaaattaggtgagg

SEQ ID NO: 205027 - DNA, 604 bp, Homo sapiens
ggttatagtgaagaaagatgacataggcagaagaaattggcaatcatttggcctgtacatgttgctttttgttttttttctggacttaagatatagaccacaccttgacatttctggcctttgagtctttcacaactgttattataatgcattagctcttctagaagttagaagtgaatttggattaagtctttcataaggtggctaaatgaatttatatggctcatcacaattcactagattggttaagcaggaaatttacagagatttttttctttgctgtaaatgtttttctaaattgaaaaacttctaatactgtcttctggagtagtcctagaaataagtgcaagtgtttttggcaggaggccacataaacatttctgcttctctgtgccttatgggtagcattgatataaattgttaaaaataatgattgtagataatgtatcagagtttgggctcagccrcggtagctgctgttgacccagagggaccactgggatcctcacatctcagggcagcacatcgtttgcagcaatggttgcttctatgcaaccttttatgaaattaggtgaggcccttgcttagaattttttaaaagctt

SEQ ID NO: 205028 - DNA, 604 bp, Homo sapiens
ggttatagtgaagaaagatgacataggcagaagaaattggcaatcatttggcctgtacatgttgctttttgttttttttctggacttaagatatagaccacaccttgacatttctggcctttgagtctttcacaactgttattataatgcattagctcttctagaagttagaagtgaatttggattaagtctttcataaggtggctaaatgaatttatatggctcatcacaattcactagattggttaagcaggaaatttacagagatttttttctttgctgtaaatgtttttctaaattgaaaaacttctaatactgtcttctggagtagtcctagaaataagtgcaagtgtttttggcaggaggccacataaacatttctgcttctctgtgccttatgggtagcattgatataaattgttaaaaataatgattgtagataatgtatcagagtttgggctcagccgcggtagctgctgttgacccagagggaccactgggatcctcacatctcagggcagcacatcgtttgcagcaatggttgcttctaygcaaccttttatgaaattaggtgaggcccttgcttagaattttttaaaagctt

SEQ ID NO: 205029 - DNA, 589 bp, Homo sapiens
ctcatcacaattcactagattggttaagcaggaaatttacagagatttttttctttgctgtaaatgtttttctaaattgaaaaacttctaatactgtcttctggagtagtcctagaaataagtgcaagtgtttttggcaggaggccacataaacatttctgcttctctgtgccttatgggtagcattgatataaattgttaaaaataatgattgtagataatgtatcagagtttgggctcagccgcggtagctgctgttgacccagagggaccactgggatcctcacatctcagggcagcacatcgtttgcagcaatggttgcttctatgcaaccttttatgaaattaggtgaggcccttgcttagaattttttaaaagcttaatatgagtttatatctctttaaatatcagtttctaatatttttttaaaggcctatgtttacaacaaatttgggagatacctatatgcwctactaactagtgttcttttgtggtgctttagaaattctggcttacttgtatttttgctggccttctaatgatttcactcatcaatcagaagatatttgtgtccacctccctgcttcc

SEQ ID NO: 205030 - DNA, 547 bp, Homo sapiens
ctaatgatttcactcatcaatcagaagatatttgtgtccacctccctgcttcctctccggtgatcttgtctattcttggccattttagagttgacttagcagccttcacaaaactgrttggaatttccactgggattaaattgataggtcatttttgggagacctttgcaatattgaactttccaatccgtgaactttacttatctgcccatttattatgtttgtttttggtagattacaaaattatatgatcactccaaaaattaccttgccctttatagtaaaaccttccattgtaaacttctggcaatcactgatctgtgttcctctagcattgcttttttttcagaattttatacaaatggaatcgttcaggatgtagccttttgagtctggctactttcatgtactgcatcacagttattcctttttattgccaaatagtaatccattgtataaatactacatggtttgcttatttgtttgtcattggaggaatatggactattttcactttttggtaaattataagtggattggaattcac

SEQ ID NO: 205031 - DNA, 580 bp, Homo sapiens
agtttctaatatttttttaaaggcctatgtttacaacaaatttgggagatacctatatgctctactaactagtgttcttttgtggtgctttagaaattctggcttacttgtatttttgctggccttctaatgatttcactcatcaatcagaagatatttgtgtccacctccctgcttcctctccggtgatcttgtctattcttggccattttagagttgacttagcagccttcacaaaactgattggaatttccactgggattaaattgataggtcatttttgggagacctttgcaatattgaactttccaatccrtgaactttacttatctgcccatttattatgtttgtttttggtagattacaaaattatatgatcactccaaaaattaccttgccctttatagtaaaaccttccattgtaaacttctggcaatcactgatctgtgttcctctagcattgcttttttttcagaattttatacaaatggaatcgttcaggatgtagccttttgagtctggctactttcatgtactgcatcacagttattcctttttattgccaaatagtaatccattg

SEQ ID NO: 205032 - DNA, 547 bp, Homo sapiens
ctaatgatttcactcatcaatcagaagatatttgtgtccacctccctgcttcctctccggtgatcttgtctattcttggccattttagagttgacttagcagccttcacaaaactgattggaatttccactgggattaaattgataggtcatttttgggagacctttgcaatattgaactttccaatccgtgaactttacttatctgcccatktattatgtttgtttttggtagattacaaaattatatgatcactccaaaaattaccttgccctttatagtaaaaccttccattgtaaacttctggcaatcactgatctgtgttcctctagcattgcttttttttcagaattttatacaaatggaatcgttcaggatgtagccttttgagtctggctactttcatgtactgcatcacagttattcctttttattgccaaatagtaatccattgtataaatactacatggtttgcttatttgtttgtcattggaggaatatggactattttcactttttggtaaattataagtggattggaattcac

SEQ ID NO: 205033 - DNA, 580 bp, Homo sapiens
agtttctaatatttttttaaaggcctatgtttacaacaaatttgggagatacctatatgctctactaactagtgttcttttgtggtgctttagaaattctggcttacttgtatttttgctggccttctaatgatttcactcatcaatcagaagatatttgtgtccacctccctgcttcctctccggtgatcttgtctattcttggccattttagagttgacttagcagccttcacaaaactgattggaatttccactgggattaaattgataggtcatttttgggagacctttgcaatattgaactttccaatccgtgaactttacttatctgcccatttatyatgtttgtttttggtagattacaaaattatatgatcactccaaaaattaccttgccctttatagtaaaaccttccattgtaaacttctggcaatcactgatctgtgttcctctagcattgcttttttttcagaattttatacaaatggaatcgttcaggatgtagccttttgagtctggctactttcatgtactgcatcacagttattcctttttattgccaaatagtaatccattg

SEQ ID NO: 205034 - DNA, 590 bp, Homo sapiens
ttttgggagacctttgcaatattgaactttccaatccgtgaactttacttatctgcccatttattatgtttgtttttggtagattacaaaattatatgatcactccaaarattaccttgccctttatagtaaaaccttccattgtaaacttctggcaatcactgatctgtgttcctctagcattgcttttttttcagaattttatacaaatggaatcgttcaggatgtagccttttgagtctggctactttcatgtactgcatcacagttattcctttttattgccaaatagtaatccattgtataaatactacatggtttgcttatttgtttgtcattggaggaatatggactattttcactttttggtaaattataagtggattggaattcacaaggtgctttttgtctgagcataggttttcatttcacttgtgcaaatgcctaagggtaggattgccgagtcacatggtccgtgtacgtttgactttatcagaacctgccaaattgtcttccaaagtgctgtgccacttctgtttctttaataaatacaggggtattcaagctgtctgtttcttcttgagttttgg

SEQ ID NO: 205035 - DNA, 500 bp, Homo sapiens
tgatcttgtctattcttggccattttagagttgacttagcagccttcacaaaactgattggaatttccactgggattaaattgataggtcatttttgggagacctttgcaatattgaactttccaatccgtgaactttacttatctgcccatttattatgtttgtttttggtagattacaaaattatatgatcactccaaaaattaccttgccctttatagtaaaaccttccrttgtaaacttctggcaatcactgatctgtgttcctctagcattgcttttttttcagaattttatacaaatggaatcgttcaggatgtagccttttgagtctggctactttcatgtactgcatcacagttattcctttttattgccaaatagtaatccattgtataaatactacatggtttgcttatttgtttgtcattggaggaatatggactattttcactttttggtaaattataagtggattggaattcacaaggtgctttttg

SEQ ID NO: 205036 - DNA, 547 bp, Homo sapiens
ctaatgatttcactcatcaatcagaagatatttgtgtccacctccctgcttcctctccggtgatcttgtctattcttggccattttagagttgacttagcagccttcacaaaactgattggaatttccactgggattaaattgataggtcatttttgggagacctttgcaatattgaactttccaatccgtgaactttacttatctgcccatttattatgtttgtttttggtagattacaaaattatatgatcactccaaaaattaccttgccctttatagtaaaaccttccattgtaaacttctggcaatcactgatctgtgttcctctagcattgcttttttttcagaattttatacaaatggaatcgttcaggmtgtagccttttgagtctggctactttcatgtactgcatcacagttattcctttttattgccaaatagtaatccattgtataaatactacatggtttgcttatttgtttgtcattggaggaatatggactattttcactttttggtaaattataagtggattggaattcac

SEQ ID NO: 205037 - DNA, 580 bp, Homo sapiens
agtttctaatatttttttaaaggcctatgtttacaacaaatttgggagatacctatatgctctactaactagtgttcttttgtggtgctttagaaattctggcttacttgtatttttgctggccttctaatgatttcactcatcaatcagaagatatttgtgtccacctccctgcttcctctccggtgatcttgtctattcttggccattttagagttgacttagcagccttcacaaaactgattggaatttccactgggattaaattgataggtcatttttgggagacctttgcaatattgaactttccaatccgtgaactttacttatctgcccatttattatgtttgtttttggtagattacaaaattatatgatcactccaaaaattaccttgccctttatagtaaaaccttccattgtaaacttctggcaatcactgatctgtgttcctctagcattgcttttttttcagaattttatacaaatggaatcgttcaggatgtagccttttgagtctggctactttcatrtactgcatcacagttattcctttttattgccaaatagtaatccattg

SEQ ID NO: 205038 - DNA, 590 bp, Homo sapiens
ttttgggagacctttgcaatattgaactttccaatccgtgaactttacttatctgcccatttattatgtttgtttttggtagattacaaaattatatgatcactccaaaaattaccttgccctttatagtaaaaccttccattgtaaacttctggcaatcactgatctgtgttcctctagcattgcttttttttcagaattttatacaaatggaatcgttcaggatgtagccttttgagtctggctactttcatgtactgcatcacagttattcctttttattgccaaatagtaatccattgtataaatactacatggtttgcttatttgtttgtcattggaggaatatggactrttttcactttttggtaaattataagtggattggaattcacaaggtgctttttgtctgagcataggttttcatttcacttgtgcaaatgcctaagggtaggattgccgagtcacatggtccgtgtacgtttgactttatcagaacctgccaaattgtcttccaaagtgctgtgccacttctgtttctttaataaatacaggggtattcaagctgtctgtttcttcttgagttttgg

SEQ ID NO: 205039 - DNA, 614 bp, Homo sapiens
catttctcataatttagtgctataaattgacctgtaagcacgtattttgataagatgatgtcatatttattaagttcaaactgttttccaatttgtcttaagatactctctttgacctatgggccatttagaagtacaccatttaacttctcatagttgggaatgttctagaaatgttctagattcctagtttaattctgtcatcagagaaaataattcactgaattttaattgtttaactttagggtttgttttatgactcagaatatgatctctcaccaccgccatccagataattcttcaggttttgacgtttcccaacctgtctgctggttacttttcagagtacttaggtcattgytatttatattttgtccagagtttcaaattgtgatcagtggaaatgacaggccatagcatgcatacgccatcctggccagcatcacaggtggtcagtatatctttctgttgttgttttgagacagggtctcactctgttgcccaggctggagcacagtggcatgatcagggatcactgcattctcaacctgctaggctcaagtgatcctcccacctcagcctcctgaatagctgggtctataggtgtgctgcca

SEQ ID NO: 205040 - DNA, 614 bp, Homo sapiens
catttctcataatttagtgctataaattgacctgtaagcacgtattttgataagatgatgtcatatttattaagttcaaactgttttccaatttgtcttaagatactctctttgacctatgggccatttagaagtacaccatttaacttctcatagttgggaatgttctagaaatgttctagattcctagtttaattctgtcatcagagaaaataattcactgaattttaattgtttaactttagggtttgttttatgactcagaatatgatctctcaccaccgccatccagataattcttcaggttttgacgtttcccaacctgtctgctggttacttttcagagtacttaggtcattgttatttatattttgtccagagtttcaaattgtgatcagtggaaatgacaggccatagcatgcatacgccatcctgrccagcatcacaggtggtcagtatatctttctgttgttgttttgagacagggtctcactctgttgcccaggctggagcacagtggcatgatcagggatcactgcattctcaacctgctaggctcaagtgatcctcccacctcagcctcctgaatagctgggtctataggtgtgctgcca

SEQ ID NO: 205041 - DNA, 614 bp, Homo sapiens
catttctcataatttagtgctataaattgacctgtaagcacgtattttgataagatgatgtcatatttattaagttcaaactgttttccaatttgtcttaagatactctctttgacctatgggccatttagaagtacaccatttaacttctcatagttgggaatgttctagaaatgttctagattcctagtttaattctgtcatcagagaaaataattcactgaattttaattgtttaactttagggtttgttttatgactcagaatatgatctctcaccaccgccatccagataattcttcaggttttgacgtttcccaacctgtctgctggttacttttcagagtacttaggtcattgttatttatattttgtccagagtttcaaattgtgatcagtggaaatgacaggccatagcatgcatacgccatcctggccagcatyacaggtggtcagtatatctttctgttgttgttttgagacagggtctcactctgttgcccaggctggagcacagtggcatgatcagggatcactgcattctcaacctgctaggctcaagtgatcctcccacctcagcctcctgaatagctgggtctataggtgtgctgcca

SEQ ID NO: 205042 - DNA, 367 bp, Homo sapiens
taatgtaaattgtttaaaattaatctgtatatgaaatgttttctaggactttcctgccagaaaagtaggaatagaatggcagaaggaaagaggttccttctacaagcaggcacacatcctatttcactttatcctgtgatcagtctcataaccatctcctggtatgaagtgctaaaactgtgctttaagaataacttaagtcctttatgtacaaactaaagcatgagagcctgaaccttggaaaccaagaaattccaaaaagccttatgtgtgagactgggtgccacagatcttggcagaaattactgcttattcttaattcttattkttcctttctaacacttcaacttataatgccaatatctac

SEQ ID NO: 205043 - DNA, 401 bp, Homo sapiens
acactgtaatcatatagaatgattattttatcagcagctgtgaagttgactttgaggaaattttgaattgaaatactttaggtgacaagtaaaggcaactgtgaaaagcaacatttgattttagsggacagggtacctgtggaagaagactggttaggagtggaagtgaggtgtaaaggcactgaaatgtctgaggcagggacaatattcagtttctcttcctctatcacctagtgcaatgtacttgttaaacgtttgttgaatgagtgagaaggactttagagaaattgctttggatatagggatacactttactattggagaaaacacccgagatcagaaagttgctaatgagataggtgtgggggatgaatggtaaagacactgattgtacctttttg

SEQ ID NO: 205044 - DNA, 401 bp, Homo sapiens
acactgtaatcatatagaatgattattttatcagcagctgtgaagttgactttgaggaaattttgaattgaaatactttaggtgacaagtaaaggcaactgtgaaaagcaacatttgattttagcggacagggtacctgtggaagaagactggttaggagtggaagtgaggygtaaaggcactgaaatgtctgaggcagggacaatattcagtttctcttcctctatcacctagtgcaatgtacttgttaaacgtttgttgaatgagtgagaaggactttagagaaattgctttggatatagggatacactttactattggagaaaacacccgagatcagaaagttgctaatgagataggtgtgggggatgaatggtaaagacactgattgtacctttttg

SEQ ID NO: 205045 - DNA, 401 bp, Homo sapiens
acactgtaatcatatagaatgattattttatcagcagctgtgaagttgactttgaggaaattttgaattgaaatactttaggtgacaagtaaaggcaactgtgaaaagcaacatttgattttagcggacagggtacctgtggaagaagactggttaggagtggaagtgaggtgtaaargcactgaaatgtctgaggcagggacaatattcagtttctcttcctctatcacctagtgcaatgtacttgttaaacgtttgttgaatgagtgagaaggactttagagaaattgctttggatatagggatacactttactattggagaaaacacccgagatcagaaagttgctaatgagataggtgtgggggatgaatggtaaagacactgattgtacctttttg

SEQ ID NO: 205046 - DNA, 492 bp, Homo sapiens
actgcttattcttaattcttattgttcctttctaacacttcaacttataatgccaatatctacctcagcctaaagacaagctctagaatcacttgtgttacttattacatttcttttaaaaaactcatgaattacacatgaatttcaaagttgccaactgagattccaaggacttaaaaaaaaaacctggcacctttgcattataaaggctgtaaacagtgttcayagtgtttgtctttaagggacatgcctcatccattaacaacttttcttccttaaatcagcatatcttgcctaaaaatgttttctcaaaagttaggaagcactaagatttacagattgttctatcacatcttaatctacttatcaactttagcattatcaaagcatgaactgttttgggttttcatagttaattatgtttgtcataataattgggatgcaattgtttttcttacgattattttgtacttgcttttcttatggtaactt

SEQ ID NO: 205047 - DNA, 290 bp, Homo sapiens
actaggtctgtcttacctttcaatgcttttatttgttcccttttgaacatggctgaattttacctttctgtctmcctgcccgccattcttgctacccctccttcctttttccactctcatctttttcccattttccagtctgtaaatcctacctatccttttattttttaaattacaatatctcattctgttacttaggcaggagtgcggtggcacaatcatagttgactgcagcttcgaatttctgggcccaaatgaccctcccatctcagcctcccaagtagctggga

SEQ ID NO: 205048 - DNA, 290 bp, Homo sapiens
actaggtctgtcttacctttcaatgcttttatttgttcccttttgaacatggctgaattttacctttctgtctccctgcccgccattcttgctayccctccttcctttttccactctcatctttttcccattttccagtctgtaaatcctacctatccttttattttttaaattacaatatctcattctgttacttaggcaggagtgcggtggcacaatcatagttgactgcagcttcgaatttctgggcccaaatgaccctcccatctcagcctcccaagtagctggga

SEQ ID NO: 205049 - DNA, 290 bp, Homo sapiens
actaggtctgtcttacctttcaatgcttttatttgttcccttttgaacatggctgaattttacctttctgtctccctgcccgccattcttgctacccctccttcctttttccactctcatctttttcccattttccagtctgtaaatcctacctatccttttattttttaaattacaatatctcattctgttacttaggcaggagygcggtggcacaatcatagttgactgcagcttcgaatttctgggcccaaatgaccctcccatctcagcctcccaagtagctggga

SEQ ID NO: 205050 - DNA, 532 bp, Homo sapiens
ccttcttcaacttatatattcaggttttttcctacactttcctcttcctgattctgaacatcagttatgttattttaggacaaaacttctcttttttccttaatacatcctgattaccttgcatacaaagttgttcctctttaccactattgctgttagtagagtctcattcacctatagtgattataacttttaaccgcagtcatggctatttcacagagaaaattgtgaggtagataatataaactgtctctcacacaccagcattttgcagcagagtaacagagctcattaataaacacttcacaactctctatagccactcacatcccttacagtacaacttctcaacacagcaaaaatgaacacattgttggcagactcacagatttgtagcctctctatagcacataaaataaggcaaaaaagcatttacccttaaaattatgttttgtaattaatccttcagygttctatcttacttaggatgtgggcatctaatgaatatacattaattaactcaacttgaata

SEQ ID NO: 205051 - DNA, 445 bp, Homo sapiens
agtctggggattactcttccccatgcttacaacccctttacctacatatatcacaggagggcttcagggcaggaccacctagcctggctccattgtctccagtaccagagcatgctatctaggggtttggagtcrtgcaaccaattcactatcattggcacctgagcactcttctggggatctgaggtcagacccattcaacttgctagtgccatcatagttggtatccacctatatgtgccacctggggactgactggcccacccagcctgtcacagccacagccaaaaccagtgcagactgcttgggtcccagaaggttgtctcatgactgctaatgtcattgcccatgccacacctgttggccaggagctaaagagtcagcccacccacgtgccccaccactgccatttctgggggcctaagcaagccacctagaggcccaa

SEQ ID NO: 205052 - DNA, 445 bp, Homo sapiens
agtctggggattactcttccccatgcttacaacccctttacctacatatatcacaggagggcttcagggcaggaccacctagcctggctccattgtctccagtaccagagcatgctatctaggggtttggagtcgtgcaaccaattcactatcattggcacctgagcactcttctggggatctgaggtcagacccattcaacttgctagtgccatcatagttggtatccacctatatgtgccacctggggactgactggcccacccagcctgtcacagccacagccaaaaccagtgcagactgcttgggtcccagaaggttgtctcaygactgctaatgtcattgcccatgccacacctgttggccaggagctaaagagtcagcccacccacgtgccccaccactgccatttctgggggcctaagcaagccacctagaggcccaa

SEQ ID NO: 205053 - DNA, 445 bp, Homo sapiens
agtctggggattactcttccccatgcttacaacccctttacctacatatatcacaggagggcttcagggcaggaccacctagcctggctccattgtctccagtaccagagcatgctatctaggggtttggagtcgtgcaaccaattcactatcattggcacctgagcactcttctggggatctgaggtcagacccattcaacttgctagtgccatcatagttggtatccacctatatgtgccacctggggactgactggcccacccagcctgtcacagccacagccaaaaccagtgcagactgcttgggtcccagaaggttgtctcatsactgctaatgtcattgcccatgccacacctgttggccaggagctaaagagtcagcccacccacgtgccccaccactgccatttctgggggcctaagcaagccacctagaggcccaa

SEQ ID NO: 205054 - DNA, 211 bp, Homo sapiens
tgggcatatatacagtgaagcttcagaagcactttcattaaaggcagaaatatactgatttcattgcttctatactttgctacctctayttaaccttgtgtcaaatgccccagcctatacaagacaatacaaatgaatcaaagttaggattaagagaaaaaataaattaaaatatcaatatgcatatgctatatgattgccaataccccaa

SEQ ID NO: 205055 - DNA, 446 bp, Homo sapiens
aatctgtatgtgtaacttcttgtacttgaatattactatctttctctaggtttgggtagttctctgttatccctttgaataaaatttctatgcctatctatttttctacctcttctttaaggccagtaacttgtagatttgcccttttgaggctgttttcaagatcctgtaagtgtgcttcattgatttgkactcttttttttttttttttttttgtctcctctgactgtgtattttcaaacaggctttcttcaagctcactaatttttttcttctgctggattcattctgctgttaaagaactctgatgcattattcagtatgccaattgcatttttcagctccaaaatttctggcttgattcttttaaattatttcaatctttttgttaaatttatctgatataattctaaattccttctttgttatcttgaatttcttgggtt

SEQ ID NO: 205056 - DNA, 446 bp, Homo sapiens
aatctgtatgtgtaacttcttgtacttgaatattactatctttctctaggtttgggtagttctctgttatccctttgaataaaatttctatgcctatctatttttctacctcttctttaaggccagtaacttgtagatttgcccttttgaggctgttttcaagatcctgtaagtgtgcttcattgatttggactcttttttttttttttttttttgkctcctctgactgtgtattttcaaacaggctttcttcaagctcactaatttttttcttctgctggattcattctgctgttaaagaactctgatgcattattcagtatgccaattgcatttttcagctccaaaatttctggcttgattcttttaaattatttcaatctttttgttaaatttatctgatataattctaaattccttctttgttatcttgaatttcttgggtt

SEQ ID NO: 205057 - DNA, 480 bp, Homo sapiens
ttattaaatgccttgaggtaagtgttctttgaattaaatctgtatgtgtaacttcttgtacttgaatattactatctttctctaggtttgggtagttctctgttatccctttgaataaaatttctatgcctatctatttttctacctcttctttaaggccagtaacttgtagatttgcccttttgaggctgttttcaagatcctgtaagtgtgcttcattgatttggactcttttttttttttttttttttgtctcctctgactgtgtattttcaaacaggctttcttcaagctcactaatttttttcttctgctggattcattctgctgttaaagaactctgatgcattattcagtatgccaattgcatttttcagctccaaaatttctggcttgattcttttaaattatttcaatctttttgktaaatttatctgatataattctaaattccttctttgttatcttgaatttcttggg

SEQ ID NO: 205058 - DNA, 657 bp, Homo sapiens
tacattcatccacaaattctgtacatcaattctgtatattctactcacctataacatattttatgtctttcctgattcatattttaagtgatgactttcactaaccatttctccagccacatgacaggttgtgctcttctatttctatttctgacactattatctactgcctgatatagtctcagggcatctgtttactaatgtggttacatgtgtgcttaaaaagacacaattgtggcagagactgcctaccttcacatcaaactcatttcctttgtctcctaggcctaagcctgtactacattttccaggcttccttgcagttgagtttggccatgtgattgagtagtaccaattcaatatgaatagaagcgatgtgtggcattttggtttaacccataaagaaacttcttacgtgaaattatcttcctctctttccacattccccaatttgagtcaacatcaatcttagaaagtagaaactgaagatggtggaaccacagatgaattcattttgtgaacaaaagtactycacaatcagaaatacctgctttggactgttacaggagtgtactataaatgttaatccactggtatttgtgtcaacagttggtattaaccaaactaatacagaaattggaaccagaaatgttatcg

SEQ ID NO: 205059 - DNA, 579 bp, Homo sapiens
atccactggtatttgtgtcaacagttggtattaaccaaactaatacagaaattggwaccagaaatgttatcgtctggtagatagcaaagcaattgatattgaaggctgaaaagatagagacctatgttacacaatggcaaaatagcaaaactgtcaccagagataatctggaatgcaaattgcatgcctacttagactgtagctccaggaagagtggttacaaaaagttacagtgaggattacttttccattttgctttttgcaaagtataacagtaaaaacatgtttttttcctaagggcagaattgggtgatttgaaagaaaattgaaggagtatagacaaggccttgaaggattagaaaattagaaaaccaaactgcttttaaacctcaagtaaagtaatgtaaaactgaagattattttgaagaactaaagctcattatgattgctcagttaagcaaagtgtctcaactgtcaataagtccgatcgagagcactttcttcctatgcaaggctatttgtatttcacatggcctaaagacagttcaccaaactgagaaagagagaaaagagatattg

SEQ ID NO: 205060 - DNA, 579 bp, Homo sapiens
atccactggtatttgtgtcaacagttggtattaaccaaactaatacagaaattggaaccagaaatgttatcgtctggtagatagcaaagcaattgatattgaaggctgaaaagatagasacctatgttacacaatggcaaaatagcaaaactgtcaccagagataatctggaatgcaaattgcatgcctacttagactgtagctccaggaagagtggttacaaaaagttacagtgaggattacttttccattttgctttttgcaaagtataacagtaaaaacatgtttttttcctaagggcagaattgggtgatttgaaagaaaattgaaggagtatagacaaggccttgaaggattagaaaattagaaaaccaaactgcttttaaacctcaagtaaagtaatgtaaaactgaagattattttgaagaactaaagctcattatgattgctcagttaagcaaagtgtctcaactgtcaataagtccgatcgagagcactttcttcctatgcaaggctatttgtatttcacatggcctaaagacagttcaccaaactgagaaagagagaaaagagatattg

SEQ ID NO: 205061 - DNA, 553 bp, Homo sapiens
ctatgtaaagagacgggcacctctaacttgcctgcatctctttgttttattccccttggtgtctggtttatcacacacacagattttaattttgtcctagatgacatcttggttcaatgaccctttttaagatgctagttttgttttaatttgtgctgataaaaatcatatttctgtatttcagaaagttgaatagaattgaacttgatctttagctagaaatcttccttctagctcgattggtttcatttgtgtttcacttcttgtgcatatttattattcaaataaactayattgaggtataattcatgtttaataagtgatatccatttaaattgtagaatttggtaacctttgttggttgtatatggggaaactaccaccacaatagagatactgatcatttccattacctccaaaaatttcatctggccctttgcagccctcccaccctccttgcccagtcccaggcaaccactgatttgctttgcatcctcatagattagtttgcattttctagaattttatataaattgaatcatacagtatatgc

SEQ ID NO: 205062 - DNA, 452 bp, Homo sapiens
ttctatttacctatcacttttttgtgtcaagtaaagttttaaacttactcccaagataaatataataattttaaataggggtggcagatattaaagtttgatgacacaggaggttctcttccatcttggcaattcagtaaccctaattacttaaaagcctgtgtttaaaaaacaatttttaaaattcttgctttaggaaataacttaaattttctctaaaaagtcagagttatctgatctaaattaaagaagcagaataggaatttaaagaaataatagaattactaatttcaaatagcatctcagttgaaaaaatttctttaacttttcctcaaacakttcctgctaatgcagaaacatcttctaaatctaaatgtgaaaaagagcccaatgaggtgtggttaggttctggaaagtcgagatgtgtctctcttcttactgaaccctaactt

SEQ ID NO: 205063 - DNA, 450 bp, Homo sapiens
tgtcattttctatttacctatcacttttttgtgtcaagtaaagttttaaacttactcccaagataaatataataattttaaataggggtggcagatattaaagtttgatgacacaggaggttctcttccatcttggcaattcagtaaccctaattacttaaaagcctgtgtttaaaaaacaatttttaaaattcttgctttaggaaataacttaaattttctctaaaaagtcagagttatctgatctaaattaaagaagcagaataggaatttaaagaaataatagaattactaatttcaaatagcatctcagttgaaaaaatttctttaacttttcctcaaacagttcctgctaatgcagaaacatcttctaaatctaaatgtgaaaaagagcccaatgaggwgtggttaggttctggaaagtcgagatgtgtctctcttcttactgaa

SEQ ID NO: 205064 - DNA, 553 bp, Homo sapiens
ctatgtaaagagacgggcacctctaacttgcctgcatctctttgttttattccccttggtgtctggtttatcacacacacagattttaattttgtcctagatgacatcttggttcaatgaccctttttaagatgctagttttgttttaatttgtgctgataaaaatcatatttctgtatttcagaaagttgaatagaattgaacttgatctttagctagaaatcttccttctagctcgattggtttcatttgtgtttcacttcttgtgcatatttattattcaaataaactacattgaggtataattcatgtttaataagtgatatccatttaaattgtagaatttggtaacctttgttggttgtatatggggaaactaccaccacaatagagatactgatyatttccattacctccaaaaatttcatctggccctttgcagccctcccaccctccttgcccagtcccaggcaaccactgatttgctttgcatcctcatagattagtttgcattttctagaattttatataaattgaatcatacagtatatgc

SEQ ID NO: 205065 - DNA, 577 bp, Homo sapiens
atattatccactgaacgcttacaattacctattattgcccagagaacatctttgaacaatagctcagttttttttagtatacattccaagcagtagaacatctatatatatttgctgaatgttgtttccattatacactcagagatatagcacagcattttaacattttgatacttgttgatagattttttttgttaagagattaacattaatttatatcctaataatgtatacgtattttgccaccttggtaccaatattggatgttttcccatgttttacatctttggcaatcaagtagttaaaaatgatttatcattgttattttaatttgcattcttaaaatgtttgtatttcttcttttctaaatgtctgtttagatctctattcatttgataatcctttattagtgtgagagctgtttaaatggacaatgttaaaaaacatatatgcatacattwtatatatatatatatatatatatatatatatatatatcccaagttttatatatatccatttcatatatatatatgagacatgggatagtcccatatgtatatatatatacacacac

SEQ ID NO: 205066 - DNA, 492 bp, Homo sapiens
actttaaactctagcataaccccttgtcacacaaatcgtcttgagtctctccattttgggaagtctgctgtttggcctctttacttgtyccttttctctccatcagacattcccctatggttccactctcttctactctagcttacactctctgctcatccttttcctcaattaattttttgcctaagtaacattagactacctattgagaaccaaccattgtttagacactagaaatattgtataggaaataaatttagctttcattttggagtaaatattttaggggaggacagacaaaaagcaaataaataagcagatttttataagcacatgtcaggatgtggtaagagctacggaaaaatatcaagcaagttaagagtgctgcagagtataggaacaagggaattgttactttatatactagaaaagtcatggaaggcctcactgacaagatgatatttgtgcagagacttgaagaaagatatgaga

SEQ ID NO: 205067 - DNA, 580 bp, Homo sapiens
tgatcctccgtgattagacatttcagaaacacaaaatgatggtgggcttcttaatcatcacttcttcccaggagcacgggactcagataaagtttagcattgtcaattcttcctttcataaagacaagtgttatttgttggtgaacaacctaacagtgatcataaacctccttagtgggacagaacaagatctaagaaatagtctctggagaactcttgttgattttttttcctctaaagtagattgaacaatttgttaagaggtgacgacaaaggtcagttgttttagagtctggggatcagtcatctttaaaaaaggaatgcttaaaayatggaaaagagtttcatgaatctctagtcataggaataggagttgtctggtgttatgcatagtattaacaacctcccacatgcatgcatgaccagagcatttttcgagacatccaaagttatccagacagtagcttgtcaagtgagaattatggcccatgcatggtctgctgaggtactcaggtgtatattaaattgccagagtttggcttatggagatttttcagatcctgggggaaagggtcagcta

SEQ ID NO: 205068 - DNA, 628 bp, Homo sapiens
attatgaggactttaggaaaaatgctaggtctgtttcactcttgctgagttccagttgctgtgaacttcctcccattacgagttgttgtttwtctttaagcttatacttcaaagtattttttcatcaccaaatattattaccaattgaaaatttaattttaagcaatatactttaaggtgaatgatgaatgactttaaaatcacaacacacgcattcataaatatagaatttaaaatacaatcatatcagccaggaatcaccataagaagaaaagaaccttcaacacagtagtatatatgcaggcaaaatgtttgggtacaattgcagcatgaattgagctaatctgaaggaatcaattttgtagtgtgtaatcaaaagttcaaaacatctgatttgaacgatggcaactttgatttcagaaaaaaatagtagaggccatctctttccactcctttactccacagccagtgtgtgaggctcagactgcactaggatccctgcatcaggctccatccccagttgcttgttcttgctctcatgtcattttccttctctctgggctatcaaagcaactagcaaccagtttggccaaaaataagtttcactctttttgcttataataaaacc

SEQ ID NO: 205069 - DNA, 549 bp, Homo sapiens
taaaaatgaatgacaatgaaagcactttgtrtcaaaatttataggatgtagctcaaataatacccccccaaaacaaataaatggactaaaatatatttagaaaggaaggaatatctttagaaattaatggactaagcagaatccaattagagaagccagataaaagaaatatcaaataagtataaataaaatacaagaaaattaacttagagaaacatcatatttaatggtgaaatatttttgaaggctgcattaaatttagaaacaacattatttaacattattcctggaaattgaaatcattggaatatagtatgaaagaaaaataagacataaataattaaaaagaaaagaaaaattgttattacttagaggtggtgtatttgtcttactataaatacaagacagctttgaatatggagacattggtccccatgccttctgtgaattaaatgagtatctgtaaagagagaagaagctagaagttgagtggaagacttgagagtttgcgaaaatctggagtaaccatggaggcaatacttgctgacc

SEQ ID NO: 205070 - DNA, 421 bp, Homo sapiens
aaatgaatatatatttttaaatcaaacaaagcatttctcttttaaatgcacaaatagaaatgtataaatagaatccttaattgtaaggattaaggataggttttttaaaactatcttttattagcctagatacagtttgactgaccttagctacatacccaagtgtgagtgcacacacacatacacacacacactccctcttatctctacaaataaaaggtaataatgttgctgctcactgcactattaaatatgctcactttcsttatctcattaggtcaccaaaatcgtttaagcacctctagtctatttctctctccttgcaatgcattgcaattcaatcctctcttgtgaaaagtgtgacaatagtagccattactttctattatatttgaaggttgtgggcatatgggtgaattca

SEQ ID NO: 205071 - DNA, 605 bp, Homo sapiens
ctatttctctctccttgcaatgcattgcaattcaatcctctcttgtgaaaagtgtgacaatagtagccattactttctattatatttgaaggttgtgggcatatgggtgaattcactagggaaataatttcaaaattatgatggaggatttatgtgctcaaaatkctcgtttctgttaaccatatttgtgtatataactcttccagaactccttgaagtttagacatcaggaactttgttttacatcaaagtgaataccaatgtacagttggtatgaatttcctaggtccaaaaacacagtggggacacaagaaaaaacagcctcactgtaatgcatctgtaatgaatcagtcatctcatgtgaaacagtacactgtaaatttgaaaatataatctgtgctagaaaggctcaagctgtactgtaaattcaatctcatgctgtctaatgggaatttatcctggagatgagtacagtgtctgctgcctggctgtgtaattggatggagcaaggtctagctgcaaaaaaaaatctgcatttagatagccacatacatataagaagccaagatatcatatttttagagacaatataattctgcatgtgc

SEQ ID NO: 205072 - DNA, 605 bp, Homo sapiens
ctatttctctctccttgcaatgcattgcaattcaatcctctcttgtgaaaagtgtgacaatagtagccattactttctattatatttgaaggttgtgggcatatgggtgaattcactagggaaataatttcaaaattatgatggaggatttatgtgctcaaaatgctcgtttctgttaaccatatttgtgtatataactcttccagaactccttgaartttagacatcaggaactttgttttacatcaaagtgaataccaatgtacagttggtatgaatttcctaggtccaaaaacacagtggggacacaagaaaaaacagcctcactgtaatgcatctgtaatgaatcagtcatctcatgtgaaacagtacactgtaaatttgaaaatataatctgtgctagaaaggctcaagctgtactgtaaattcaatctcatgctgtctaatgggaatttatcctggagatgagtacagtgtctgctgcctggctgtgtaattggatggagcaaggtctagctgcaaaaaaaaatctgcatttagatagccacatacatataagaagccaagatatcatatttttagagacaatataattctgcatgtgc

SEQ ID NO: 205073 - DNA, 605 bp, Homo sapiens
ctatttctctctccttgcaatgcattgcaattcaatcctctcttgtgaaaagtgtgacaatagtagccattactttctattatatttgaaggttgtgggcatatgggtgaattcactagggaaataatttcaaaattatgatggaggatttatgtgctcaaaatgctcgtttctgttaaccatatttgtgtatataactcttccagaactccttgaagtttagacatcaggaactttgttttacatcaaagtgaataccaatgtacagttggtatgaatttcctaggtccaaaaacacagtggggacacaagaaaaaacagcctcactgtaatgcatctgtaatgaatcagtcatctcatgtgaaacagtacactgtaaatttgaaaatataatctgtgctagaaaggctcaagctgtactgtaaattcaatctcatgctgtctaatgggaatttatcctggagatgagtacagtgtctgctgcctggctgtgtaattggatggagcaaggtctagctgcaaaaaaaaatctgcatttagatagccacatacatataagaagccaagatatcatatktttagagacaatataattctgcatgtgc

SEQ ID NO: 205074 - DNA, 572 bp, Homo sapiens
tcctcatagaggtctttcctgaccrctctatgtaaactgtttctccattctagctcactggcacattattttgtatagtggttaattttatgtgtcaacttgactagcctaagtgatatccagatactctgtaaactattattgctcggtttgtctgtgagggggtgcctgaaaaagattggcatttgaatagatagactgaggaaagaagacctcccttgccaatgtgggtgggcaccatccaatccattgagtgcccatatgaaacaaaaggcagaggaaaggcagaatttgctcacgctgtttgggctgagtcatgcatcttcttttgtctttggatgctcttacttctcaggcctttggactttgaccaggatcactcgccttcataaccatgtgaaccaatacctataataaacctcctcgtgtgtgtgtgtgtgtgtgtgtgtgtgtgtgtgtgtgtgtgtgtttactccattggttctgtttctctgaagaaccctaagacactatgttttagtttctacataagagttaccatgatcaatattgttataatcaatcatttgctt

SEQ ID NO: 205075 - DNA, 572 bp, Homo sapiens
tcctcatagaggtctttcctgaccactctatgtaaactgtttctccattctagctcactggcacattattttgtrtagtggttaattttatgtgtcaacttgactagcctaagtgatatccagatactctgtaaactattattgctcggtttgtctgtgagggggtgcctgaaaaagattggcatttgaatagatagactgaggaaagaagacctcccttgccaatgtgggtgggcaccatccaatccattgagtgcccatatgaaacaaaaggcagaggaaaggcagaatttgctcacgctgtttgggctgagtcatgcatcttcttttgtctttggatgctcttacttctcaggcctttggactttgaccaggatcactcgccttcataaccatgtgaaccaatacctataataaacctcctcgtgtgtgtgtgtgtgtgtgtgtgtgtgtgtgtgtgtgtgtgtgtttactccattggttctgtttctctgaagaaccctaagacactatgttttagtttctacataagagttaccatgatcaatattgttataatcaatcatttgctt

SEQ ID NO: 205076 - DNA, 603 bp, Homo sapiens
atatataggatacaccatttaaaattcctttttcaggaaaattcctctccacactcttttgcattaaatgtatttataacctgggcagcagctgaacttcttttcacaagtgatggctaactaaccccttrggttttaccctgaaaccatattatgcaatctatgcatacactgtataattttatgttgtacaacctcttagtagatgtctagtttggcttttaataattaagttcatttctaatccaagacacaccagctttcttttaatacttccccaatattacggttttcataaagaagctgacctccccataatcacacgcacttatacacacaagtacaaatacccttctattaggagagatttggaatcagaaagcacttaaatagagctggtaccacctatcccagatggctaagaaagaaccaattagagctggagtggtgagattctttgtaatataaaaaagacccaagagtccaatgctctcatcacaatatttacaggactcttatttcacaaagggcagggctaaaatcataccaacaagggaaatatactttttatatattaaaatagactagtttttctcaagggaa

SEQ ID NO: 205077 - DNA, 603 bp, Homo sapiens
atatataggatacaccatttaaaattcctttttcaggaaaattcctctccacactcttttgcattaaatgtatttataacctgggcagcagctgaacttcttttcacaagtgatggctaactaaccccttaggttttaccctgaaacsatattatgcaatctatgcatacactgtataattttatgttgtacaacctcttagtagatgtctagtttggcttttaataattaagttcatttctaatccaagacacaccagctttcttttaatacttccccaatattacggttttcataaagaagctgacctccccataatcacacgcacttatacacacaagtacaaatacccttctattaggagagatttggaatcagaaagcacttaaatagagctggtaccacctatcccagatggctaagaaagaaccaattagagctggagtggtgagattctttgtaatataaaaaagacccaagagtccaatgctctcatcacaatatttacaggactcttatttcacaaagggcagggctaaaatcataccaacaagggaaatatactttttatatattaaaatagactagtttttctcaagggaa

SEQ ID NO: 205078 - DNA, 603 bp, Homo sapiens
atatataggatacaccatttaaaattcctttttcaggaaaattcctctccacactcttttgcattaaatgtatttataacctgggcagcagctgaacttcttttcacaagtgatggctaactaaccccttaggttttaccctgaaaccatattatgcaatctatgcatacactgtataattttatgttgtacaacctcttagtagatgtctagtttggcttttaataattaagttcatttctaatccaagacacaccagctttcttttaatacttccccaatattacggttttcataaagaagctgacctccccataatcacacgcacttatacacacaagtacaaatacccttctattargagagatttggaatcagaaagcacttaaatagagctggtaccacctatcccagatggctaagaaagaaccaattagagctggagtggtgagattctttgtaatataaaaaagacccaagagtccaatgctctcatcacaatatttacaggactcttatttcacaaagggcagggctaaaatcataccaacaagggaaatatactttttatatattaaaatagactagtttttctcaagggaa

SEQ ID NO: 205079 - DNA, 395 bp, Homo sapiens
agtttttgagacaacgaaacttgttcataccgcaaagcctttatagttgctattccctcttcctggcatgatcttttctcggcttgttgaatttctagctccttctcatcattgaggtttcacctcatttgttatctccttagagtcaatgcttcagtcacagcccactcccacactcacatgctatcccattatcctgttttatcttcttcagagtacttacttgtgctaatattaccttatggtttgtgtaattatttaccatcctgacctagaccctaactagactgtaaacacagtgttagcagaaactcagagctgtattaccagagttcctgccaacacagcatttacagtttagtyagagtcaagagcaagatgtgtgcaggctcaca

SEQ ID NO: 205080 - DNA, 470 bp, Homo sapiens
tcttttctttgtgggccatgtttcatgctacctgtaaggcctctttatcgtgtatacattttctggtatatgcttggattttttcttagatactcttatattctcttggatattttttatcatgtatacaatttcttgtgtactcgtgttttttttcttggatamgcttgtattttattgaatcatatttttgtatactcttcagtggtaagaccagttataaggtatgcattatagaagagaaagtggcctctgggacttaggataatctcttaggtcattgagggtgaagtgtgtctttatctcgaccttagtagatggaggaaaaggagaagaagaaaaatatttcttgtgacgttctagatgggaaaaagtttcttggggagagtcttttggccagtctttttggggtaatgaggaggtacaaaaactgtagtggtgggtaaatgttagattatggatgtcccata

SEQ ID NO: 205081 - DNA, 364 bp, Homo sapiens
cataatgttgcaaagtcatatttttttagagacagggttgtgctctatcacctagcctgggggagtgcygtggtgtaatcatggttccctgcagccttgaactcctggattcaaacaatcctcccacctcagcctctagaatagctccgactgcaagggtgtgccgccacacccagctaattttttgctttttatttttgtagagatgaagtctcactctgttgaccatgctggtcttgacctcctggcctcaagtgatcttcccaccttggcctcccaaagtactgaaattacagacatgagccaccacgactggtctgaaaattcttaaatctactcatgggctatcttctaactgttccct

SEQ ID NO: 205082 - DNA, 360 bp, Homo sapiens
cctgcctcaaccaccctagtagctgggattacaggtgcccaccaccacacccagctaagtttttgtatttttagtagagacagagtttcaccatgttggccaggctggtctcgaactcctgacctcgtgattcgcctgcctcgacctcccaacatgctgggattacaggtgtgagaatgtctttttaaagttttagtttccaattgtttgttgctaatatgtataaatataagaatgcaactgactttaaatatcaactttgtattctgcagtcttgctgartttacttactttgctagaaggatttttaaaaataccacttaggattttctatgtagacattcatataatttatggata

SEQ ID NO: 205083 - DNA, 543 bp, Homo sapiens
aattatcattttagtgtgttgttgaattcagtttgctattatttttgaggatttttgcatttgtcttcatcaaggttattgctgtgtaattttgttttcttgtgatatttttgtctgcctttggtaccagggtaaygggggccttgtggaaggagtatggatgtattctctccactttgcttctttcggaacagtttgtgaagtgttggtattagttcttctttaaatgtttgttagaattcaatggtgaatgcattgggtcctaagcttttcttggatggaagacattttattgctgatttaatctccttacttattattggtatattcagattttctgtttctttatgattcagtcttggtagattgtatgtatctagaaatttacccattttttccaggttatccaatttattggcatatagttattcataatagtctgttatgctcttttctattataagaggagttatcatgtcttctgtttcatttctgattttatttatttgagtcttccttcctttttcaattttatcttttcaa

SEQ ID NO: 205084 - DNA, 543 bp, Homo sapiens
aattatcattttagtgtgttgttgaattcagtttgctattatttttgaggatttttgcatttgtcttcatcaaggttattgctgtgtaattttgttttcttgtgatatttttgtctgcctttggtaccagggtaacgggggccttgtggaaggagtatggatgtattctctccactttgcttctttcggaacagtttgtgaagtgttggtattagttcttctttaaatgtttgttagaattcaatggtgaatgcattgggtcctaagcttttcttggatggaagacattttattgctgatttaatctccttacttattattggtatattcagattttctgtttctttatgattcagtcttggtagattgtatgtatctagaaatttacccattttttccaggttatccaatttattggcatatagtwattcataatagtctgttatgctcttttctattataagaggagttatcatgtcttctgtttcatttctgattttatttatttgagtcttccttcctttttcaattttatcttttcaa

SEQ ID NO: 205085 - DNA, 572 bp, Homo sapiens
cccactgccatactgccacattgaaaaaaaaatacatatgtatagcatacatatatgtaacgtatatagttgttgtgatggtcaatattgagtgtctacttgattggactgaaggatgagaagtactgttcctgggtgtgtctgtgagggtgttgccaaaggagattaacatttgagtcagtggactgggaaaggcagatccaccctcagtcttggtgggcaccatccaatcagctgccagcatggctaggataaaagcaggcagaggaacgtggaaagactagactggctgagtcttccggcctccatctttctcccgtgctggatgsttcctgcccttgaccatcagactccaagttcttcagcttttggactcttggacttacaccagtgatttgccaggggtgttcaggcctttcagtacagactgaaggctgaactgttggcttcccgacttttgaggttttgggactcagactggcttcctggctcctcagcttggggacagcctattgtgggacttcaccttgtgattgtgtgagtcaattctcctaataaactccccttcatag

SEQ ID NO: 205086 - DNA, 552 bp, Homo sapiens
ctccatttttttttcttaattaaaatgaacctggtagaggtaaaatttcagctaagcacaacaccyctcggtggaaagacctccatctgtaacgtttgcagctcaggtatgtcccagtgactaggttcaggccaaggagatgtaggcaagggagctgtgtctgatgcttgggaaatgttcttctaaactggggatgccccctctttccccctctcctcctgtgctctgggatgtggataggatgggtaagggcaggttcaggacccctcacagcactgtggcccagcagcacagcggggaggcttgaactccagtgctaaggatgccagggagccctggactgcctggttctgggagctttctgtggggatgcgaccttctgctttgtttagtcattataatgctgacatttccatcacacactacagaaatgatcaacgtatgcccctcacaagagttgagatgaagggcgatgcctcagaccagtgactttcctagatgcactccagacccagattcctgagctttgtggacccagaactcaggcaagag

SEQ ID NO: 205087 - DNA, 493 bp, Homo sapiens
cttccattagcacccttccgtattctttgggtcccagccctaagcctcctttttaataagctcttctctaattcagcctaaatcaactccttctttcggacttcaccctcagttccatcttagctgttatattgtaactctgggaatgagtccaaccagatgaaggaggtgagggatactcaaggtctaagactatcagttccataattggtaaatctctccatatcttcctacaatttttgtatttgttttttatttttaattttagtttgcgcagaagtcacctggagcacttgttaacaatacagatttctgggccccattaatagagatgttcattcaggagatctcagagatttagggaatgtggattttaaatgaagatactgggttgttatgaggggttgctccatggcccacactttgggaggcrttgctctagatcctagacctcatagcctcatcccacagcactcagcctgaccagcagcaa

SEQ ID NO: 205088 - DNA, 365 bp, Homo sapiens
tccaaatcacagagtttcacgttgcttttcatagagcagatgagaaacatgcttttcgtagggtctgcaagtggacatttggagagatttcaggcctgtggtggaaaacgaattatcgtcacgtaaaaactagagrgaagcattgtcagaaacttgtttgtgatgactgcattcaactcacagagttgaaggttccttttcaaacagcagtttccaaacactctttctgtggcatctgcaagtggatgtttgggcctctttgaagatttcgttggaaacgggataatcttcacagaaaagctaaacagaagcattctcagaaacttctttgtgatgtttgctttcaactcacagagttgaacttt

SEQ ID NO: 205089 - DNA, 583 bp, Homo sapiens
cgaagcatctgtcctgacctccctgttaaccagaggtggctctggggctctgggcagggatacaggagtggcagtgggaagcaaagtggaggaggaaatattgctggatactaatgagtcacagttgatagattcatgtcttcatgtgctgtggaggcagtgtggtggggtgcagatggcgtatgttttggtgacctacaggcttacattcaaatagctgttacctcatgttccacatctgtgaccttggcaggggaagctcctcaaccccgaaccttgcatagctgagtgggagaaaccagaagggtcttgtgttgtcggggacctggcatcatgcytggcacagagagtttgcaaaatcttcattctcaagattggcatttgtagctctaggggatacacacagaggtctctgtatgtatgggcagttacatgtggataggtgtgggtcggtttgtgtgtgtgggagtgcatgtttcagggacacaggctattcaaaccagcacaagttgactctaataagggaagggaggaaagcgcatggtaaaccaggaagacgctctagagatgaggcttccggcac

SEQ ID NO: 205090 - DNA, 645 bp, Homo sapiens
atggtgacacatgaagggaatcaatattgaagctcttgctctcagattgcacccaggaccacatccctattcactgaagacttagctcccagttcatgggcactttctcctgtggggaggatgccaacatgcacatacagagcccttctcatgctctggctcttggtccctccacctctagagrcattgtctgcaccctccctgagtcacccactcctacctgtatattcttgaccatatcactgcagaaactgtagctactccagaccctgaatttaaaacaccatttttttgaccaaccactttcctttttccagctgcctcccaactccaacacacttcaatgactccaaattttcactttgtgtcttactcaccttctttcaaatttcccctcctcccagctgagactatatggtccagcctgtcatccatcctcttaacactctccactctcttgccccactattgattgtactcccagggcaaaaccacactcccctgaaacccagccacacactccctctgctcctgcactcaggtggctgagcacagccagagagaaacacacgtgccttctggtctcaattaatcatcaagcccaaacatccagtggaccatggatgctgtcctaaaaaactcact

SEQ ID NO: 205091 - DNA, 439 bp, Homo sapiens
aagattatcccgtttccaacgaaatcttcaaagaggcccaaacatccacttgcagatgccacagaaagagtgtttggaaactgctgtttgaaaaggaaccttcaactctgtgagttgaatgcagtcatcacaaacaagtttctgacaatgcttctctctagtttttacgtgacgataattcgttttccaccacaggccwgaaatctctccaaatgtccacttgcagaccctgcgaaaagcatgtttctcatctgctctatgaaaagcaacgtgaaactctgtgagttgaacacaaacatcacagagaagtttctgagaatgcttctgtttagtttttatgtgaagatattcccgtttccaaagacaacttcaaagaggaccacatatccacttgcagattccacaaaaagagagattcaaaactgctctatccacagga

SEQ ID NO: 205092 - DNA, 478 bp, Homo sapiens
gtttctgtttagcttttctgtgaagattatcccgtttccaacgaaatcttcaaagaggcccaaacatccacttgcagatgccacagaaagagtgtttggaaactgctgtttgaaaaggaaccttcaactctgtgagttgaatgcagtcatcacaaacaagtttctgacaatgcttctctctagtttttacgtgacgataattcgttttccaccacaggccagaaakctctccaaatgtccacttgcagaccctgcgaaaagcatgtttctcatctgctctatgaaaagcaacgtgaaactctgtgagttgaacacaaacatcacagagaagtttctgagaatgcttctgtttagtttttatgtgaagatattcccgtttccaaagacaacttcaaagaggaccacatatccacttgcagattccacaaaaagagagattcaaaactgctctatccacaggagggttcaacgctttgag

SEQ ID NO: 205093 - DNA, 439 bp, Homo sapiens
aagattatcccgtttccaacgaaatcttcaaagaggcccaaacatccacttgcagatgccacagaaagagtgtttggaaactgctgtttgaaaaggaaccttcaactctgtgagttgaatgcagtcatcacaaacaagtttctgacaatgcttctctctagtttttacgtgacgataattcgttttccaccacaggccagaaatctctccaaatgtccacttgcagaccctrcgaaaagcatgtttctcatctgctctatgaaaagcaacgtgaaactctgtgagttgaacacaaacatcacagagaagtttctgagaatgcttctgtttagtttttatgtgaagatattcccgtttccaaagacaacttcaaagaggaccacatatccacttgcagattccacaaaaagagagattcaaaactgctctatccacagga

SEQ ID NO: 205094 - DNA, 439 bp, Homo sapiens
aagattatcccgtttccaacgaaatcttcaaagaggcccaaacatccacttgcagatgccacagaaagagtgtttggaaactgctgtttgaaaaggaaccttcaactctgtgagttgaatgcagtcatcacaaacaagtttctgacaatgcttctctctagtttttacgtgacgataattcgttttccaccacaggccagaaatctctccaaatgtccacttgcagaccctgcgaaaagcatgtttctcatctgctctatgaaaagcaacgtgaaactctgtgagttgaacacaaacatcacagagaagtttctgagaatgcttctgtttagtttttatgtgaagatattcccgtttccaaagacawcttcaaagaggaccacatatccacttgcagattccacaaaaagagagattcaaaactgctctatccacagga

SEQ ID NO: 205095 - DNA, 321 bp, Homo sapiens
caaacatcaccaaggagttcctgaggatgcttctgtgtaatttttatgtgaagatgattccgtttccaacgaaaccttcaaagaggtctgcatgtccccttgcagattccagagaaagagagtttcaaaactgcgctttcaaaaggagagttcaactctgtgagtkgaatgcagtcatcacagaaaagtttctgagaatgcttctgtctagatgttatgtgaagatttacccgtttcgaacgaagtccacagagtggtccgaatatccacttgtagatcctgcaaaaagagtgtttccaacctgaactttcaaaggaaggt

SEQ ID NO: 205096 - DNA, 321 bp, Homo sapiens
caaacatcaccaaggagttcctgaggatgcttctgtgtaatttttatgtgaagatgattccgtttccaacgaaaccttcaaagaggtctgcatgtccccttgcagattccagagaaagagagtttcaaaactgcgctttcaaaaggagagttcaactctgtgagtggaatgcagtcatcacagaaaagtttctgagaatgcttctgtctagatgttatgtgaagatwtacccgtttcgaacgaagtccacagagtggtccgaatatccacttgtagatcctgcaaaaagagtgtttccaacctgaactttcaaaggaaggt

SEQ ID NO: 205097 - DNA, 392 bp, Homo sapiens
tatcgtagtaaaggaaataacttcctataaaaacaagacagaagctttctcagaaaattctctgggatgattgagttgaactcacagagcagtactttccttgggatggagtagtttcgaaacacactttctgtaaaatctgcaagtggatatttggacctgtmtgaggaattcgttgcaaacgggataatttcagctaagtaaacagaagcagtctcagaatcttcttgtgatgtttgcattcaaatcccagaattgaaacttcctttgaaagttcaggttggaaacactctttttgcaggatctacaagtggatattcggaccactctgtggacttcgttcgaaacgggtatatcttcacataacatctagacagaagcattctcagaaa

SEQ ID NO: 205098 - DNA, 312 bp, Homo sapiens
aaagcttctctctcaaaaggaaagttcaactctgtgagttgaaagcaaacatcacaaagaagtttctgagmatgcttctgtttagcttttctgtgaagattatcccgtttccaacgaaatcttcaaagaggcccaaacatccacttgcagatgccacagaaagagtgtttggaaattgctgtttgaaaaggaaccttcaactctgtgagttgaatgcagtcatcacaaacaagtttctgacaatgcttctctctagtttttacgtgatgataattcgttttccaccacaggcctgaaagctctccaaatgtc

SEQ ID NO: 205099 - DNA, 506 bp, Homo sapiens
gggatgattgcattcaactttgagttgaaccctgctatggatagagcagtttwgaatctctctttttgtggaatctgcaagtggatatgtcgtcctccttgaagatgtctttggaaacgggaatatcttcacataaaaactaaacagaagcattctcagaaacttctctgtgatgtttgtgttcaaatcacagagtttcacgttgcttttcatagagcagatgagaaacatgcttttcgtagggtctgcaagtggacatttggagagatttcaagcctgtggtggaaaacgaattatcgtcacgtaaaaactagagggaagcattgtcagaaacttgtttgtgatgactgcattcaactcacagagttgaaggttccttttcaaacagcagtttccaaacactctttctgtggcatctgcaagtggatgtttgggcctctttgaagatttcgttggaaaagggataatcttcacagaaaagctaaacagaagcattctcagaaacc

SEQ ID NO: 205100 - DNA, 506 bp, Homo sapiens
gggatgattgcattcaactttgagttgaaccctgctatggatagagcagtttagaatctctctttttgtggaatctgcaagtggatatgtcgtcctccttgaagatgtctttggaaacgggaatatcttcacataaaaactaaacagaagcattctcagaaacttctctgtgatgtttgtgttcaamtcacagagtttcacgttgcttttcatagagcagatgagaaacatgcttttcgtagggtctgcaagtggacatttggagagatttcaagcctgtggtggaaaacgaattatcgtcacgtaaaaactagagggaagcattgtcagaaacttgtttgtgatgactgcattcaactcacagagttgaaggttccttttcaaacagcagtttccaaacactctttctgtggcatctgcaagtggatgtttgggcctctttgaagatttcgttggaaaagggataatcttcacagaaaagctaaacagaagcattctcagaaacc

SEQ ID NO: 205101 - DNA, 506 bp, Homo sapiens
gggatgattgcattcaactttgagttgaaccctgctatggatagagcagtttagaatctctctttttgtggaatctgcaagtggatatgtcgtcctccttgaagatgtctttggaaacgggaatatcttcacataaaaactaaacagaagcattctcagaaacttctctgtgatgtttgtgttcaaatcacagagtttcacgttgcttttcatagagcagatgagaaacatgcttttcgtagggtctgcaagtggacatttggagagatttcaagcctgtggtggaaaacgaattatcgtcacgtaaaaactagagrgaagcattgtcagaaacttgtttgtgatgactgcattcaactcacagagttgaaggttccttttcaaacagcagtttccaaacactctttctgtggcatctgcaagtggatgtttgggcctctttgaagatttcgttggaaaagggataatcttcacagaaaagctaaacagaagcattctcagaaacc

SEQ ID NO: 205102 - DNA, 431 bp, Homo sapiens
aagattatcccgtttccaacgaaatcttcaaagaggcccaaacatccacttgcagatgccacagaaagagtgtttggaaactgctgtttgaaaaggaaccttcaactctgtgagttgaatgcagtcatcacaaacaagtttctgacaatgcttctctctagtttttacgtgacgataattcgttttccaccacaggcctgaaakctctccaaatgtccacttgcagaccctacgaaaagcatgtttctcatctgctctatgaaaagcaacgtgaaactctgtgagttgaacacaaacatcacagagaagtttctgagaatgcttctgtttagtttttatgtgaagatattcccgtttccaaagacatcttcaaagaggaccacatatccacttgcagattccacaaaaagagagattcaaaactgctctat

SEQ ID NO: 205103 - DNA, 606 bp, Homo sapiens
aaaaccaaactagaagaaatgagtatttcatgctgtttagaaaaatgaaataaatatgaaagtagtgatakattaaaatatttactgtttgatacctcaagccttttaagggcaatatgaaggaatttctaaaaatcagtttgctttataacttcaaaataaagtccatgactcaatgacagcagttgatagaggtcaattctgatcaagttaaagatcatatagtgggatgaagtctcccagacctggtccattaccaaggcacaaaagatacagtttctccagatgtcaggggggaaaatgacttggcaccgcatcacacacttaaaatccaatagggttcctttaatgcaacacagcactgtgcgtcaaagcataccctggtgtaaaggcagtgaaatggacagaaacaccattatttgtgtttcatttcctgaatgccttataaacatgcacaacaaaatgctcctgatccccatcagagaggatgaaaacaacccaaatgtgccctttccacctcctcccctggtattggtgcttgcgcctcagcactgaggcttggagttgtcttctcaaaccatcattgtccggtgggaaattcaccga

SEQ ID NO: 205104 - DNA, 471 bp, Homo sapiens
gaattcagtcacactgtaataaaatgaatggagacagctaaatgagaagttttggggacactgggaaaacatcgcaatggtcaggctgatttctccaaaataggttcgctggtcttaccagctggggtcaaagaggtccctttggaaaactgcatgaaggagctgtcagggtaactgggtcatggagaggaacagatccctcacattctgctccttatattggaaaaaacctccttaaggcactgcaggaagaagggttcacctggctggagcaggaatgctgagctaggcaattagagaggacagtggcttctgtctaagcagatgcctgggtttggcttcctggctgagcttctcaaggtgattttggttctcctggttgtttctgctcctcctcstagcctttgctctgtcctttgacagtatgaggactgttcacatttgaatagcaccttatagtgtaccaagtgc

SEQ ID NO: 205105 - DNA, 507 bp, Homo sapiens
gcaggggaatgtggaatacattaccattttcttttttttttttaattaarctacatttttagtccaacttataacaggttatagtgagataagtaccacaaagcctgtttgattttgtgaaaggtctgagatacctagaagcatttctttgtaagaccttgaacctcatagctcactcatgaagaatatttttattttattttcattcttttttgagacagggtcttgcccgggctgaaggacagccgcacaatcacagctcactgcagcctccacctcctgggctcaggtgatcctcctgcctcagcctccagagcagctaggactacaagcgcataccaccacattccactatttttttttaggtcttactgtgtggcccaggctaagattatttttatgttatccttgctctgacttgaaatcccactctaggttggggaatcactcttctttgctttaatgaatgtacactttgtcctttaggaacgtctagacaatcagaat

SEQ ID NO: 205106 - DNA, 507 bp, Homo sapiens
gcaggggaatgtggaatacattaccattttcttttttttttttaattaaactacatttttagtccaacttataacaggttatagtgagataagtaccacaaagcctgtttgattttgtgaaaggtcygagatacctagaagcatttctttgtaagaccttgaacctcatagctcactcatgaagaatatttttattttattttcattcttttttgagacagggtcttgcccgggctgaaggacagccgcacaatcacagctcactgcagcctccacctcctgggctcaggtgatcctcctgcctcagcctccagagcagctaggactacaagcgcataccaccacattccactatttttttttaggtcttactgtgtggcccaggctaagattatttttatgttatccttgctctgacttgaaatcccactctaggttggggaatcactcttctttgctttaatgaatgtacactttgtcctttaggaacgtctagacaatcagaat

SEQ ID NO: 205107 - DNA, 513 bp, Homo sapiens
gaattctaaatattctaaatatcaaggggcaggggaatgtggaatacattaccattttcttttttttttttaattaaactacatttttagtccaacttataacaggttatagtgagataagtaccacaaagcctgtttgattttgtgaaaggtctgagatacctagaagcatttctttgtaagaccttgaacctcatagctcactcatgaaraatatttttattttattttcattcttttttgagacagggtcttgcccgggctgaaggacagccgcacaatcacagctcactgcagcctccacctcctgggctcaggtgatcctcctgcctcagcctccagagcagctaggactacaagcgcataccaccacattccactatttttttttaggtcttactgtgtggcccaggctaagattatttttatgttatccttgctctgacttgaaatcccactctaggttggggaatcactcttctttgctttaatgaatgtacactttgtccttta

SEQ ID NO: 205108 - DNA, 427 bp, Homo sapiens
ttcagctgcctctctctgcttacctacgtatttccatgtttcttggttcatcatctgaacgtcatcagctgtgctcctcttacrgaagaggggacctggctcccttccaccccgacattgcccacccctcctcctcctcagttataccagccatgcttctgcccttcactttccagccaagaaacaaactttaattatgcaccctcaatagatacatcttgttttttcccgggtaagtaaacatctcttttcctctttttcacatttccgacaaagttcttccttccctgcaccgtggtcgccatcctgccctgccccacccctttcacgccatcagcctcactccgcccactgcgcggcttggccccagagcacctgtcaccacggtgctgggagtccccctcctctcttgcctgcgacacagccc

SEQ ID NO: 205109 - DNA, 398 bp, Homo sapiens
acgtatttccatgtttcttggttcatcatctgaacgtcatcagctgtgctcctcttacggaagaggggacctggctcccttccaccccgacattgcccacccctcctcctcctcagttataccagccatgcttctgcccttcactttccagccaagaaacaaactttaattatgcaccctcaatagatacatcttgttttttcccgggtaagtaaacatctcttttcctctttttcacatttccgrcaaagttcttccttccctgcaccgtggtcgccatcctgccctgccccacccctttcacgccatcagcctcactccgcccactgcgcggcttggccccagagcacctgtcaccacggtgctgggagtccccctcctctcttgcctgcgacaca

SEQ ID NO: 205110 - DNA, 564 bp, Homo sapiens
ataaagcaaatattaacaaatctgaagagagaagtagacaacaataatacaataacagtargggacttccatatcccactttcaacaatggattgatcattcagacagataatcaataaggaaacagctgacttgaactacactatagatcaaatggaccagacatatacatgacattcctttccaaaacagcaaaatacacattcttctcgagcatacacagtacattctccaacataggtcatatattaggccagaaaacaagtcttagcaaatttaagaagattgagatctcaccaagtattctttttgactacagtggcatgaaactgaaattaaaaacaggagaaaacttagaaaagtgacaaatatgtggaaatcaaccaacacactcctgaataaccagtagatcaaagaaaacatcaaaaaagaaataaaatatcttgagacaaactaaaatgaaagcacgacatactaaaactgatgagatgaagcaaaagccgttctaagagagggaagtttatacagataagtgctaaataaagaaaaaagatcccaaataaa

SEQ ID NO: 205111 - DNA, 564 bp, Homo sapiens
ataaagcaaatattaacaaatctgaagagagaagtagacaacaataatacaataacagtaagggacttccatatcccactttcaacaatggattgatcaytcagacagataatcaataaggaaacagctgacttgaactacactatagatcaaatggaccagacatatacatgacattcctttccaaaacagcaaaatacacattcttctcgagcatacacagtacattctccaacataggtcatatattaggccagaaaacaagtcttagcaaatttaagaagattgagatctcaccaagtattctttttgactacagtggcatgaaactgaaattaaaaacaggagaaaacttagaaaagtgacaaatatgtggaaatcaaccaacacactcctgaataaccagtagatcaaagaaaacatcaaaaaagaaataaaatatcttgagacaaactaaaatgaaagcacgacatactaaaactgatgagatgaagcaaaagccgttctaagagagggaagtttatacagataagtgctaaataaagaaaaaagatcccaaataaa

SEQ ID NO: 205112 - DNA, 564 bp, Homo sapiens
ataaagcaaatattaacaaatctgaagagagaagtagacaacaataatacaataacagtaagggacttccatatcccactttcaacaatggattgatcattcagacagataatcartaaggaaacagctgacttgaactacactatagatcaaatggaccagacatatacatgacattcctttccaaaacagcaaaatacacattcttctcgagcatacacagtacattctccaacataggtcatatattaggccagaaaacaagtcttagcaaatttaagaagattgagatctcaccaagtattctttttgactacagtggcatgaaactgaaattaaaaacaggagaaaacttagaaaagtgacaaatatgtggaaatcaaccaacacactcctgaataaccagtagatcaaagaaaacatcaaaaaagaaataaaatatcttgagacaaactaaaatgaaagcacgacatactaaaactgatgagatgaagcaaaagccgttctaagagagggaagtttatacagataagtgctaaataaagaaaaaagatcccaaataaa

SEQ ID NO: 205113 - DNA, 564 bp, Homo sapiens
ataaagcaaatattaacaaatctgaagagagaagtagacaacaataatacaataacagtaagggacttccatatcccactttcaacaatggattgatcattcagacagataatcaataaggaaacagctgacttgaactacactatagatcaaatggaccagacatatacatgacattcctttccaaaacagcaaaatacacattcttctcgagcatacacagtacattctccaacataggtcatatattaggccagaaaacaagtcttagcaaatttaagaagattgagatctcaccaagtattctttttgactacagtggcatgaaactgaaattaaaaacaggagaaaacttagaaaagtgacaaatatgtggaaatcaaccaacacactcctgaataaccagtagatcaaagaaaacatcaaaaaagaaataaaatatcttgagacaaactaaaatgaaagcacgacatactaaaactgatgagatgaagcaaaagccgttctaagagagggaagtttatacagataagtgctaaatraagaaaaaagatcccaaataaa

SEQ ID NO: 205114 - DNA, 658 bp, Homo sapiens
ttttctttcagaaaatatttgtcaagcaccttctgtgttctaagaactgttctagagctttgcatgctatggaggtctagaaattcacattatggtggcaggtgacagacaatacaaagagataaagcaatttcatatagtgataasctagggaggagtgctaaaaggagccaaggtgtagtggtgactggaaggtgaccagggaaaccactgtagggtttctaagtgatgagatctgtgacaaatccctgtggtcagcagcaggcattggatatgtaactttattctgtcccattgatcttgtagtcaaccctggtctgttctgtattgttttaattacataatctttgtaataatctttaatacctggtggagtgctctgtttacttatttctgcataattaaccacccctaagcttaacttactcatggttctgcagggtgactgctctccatgtttctaggtggttctgcatggggcctctcacatgtgctacagtcaaacattagccggggccacagtcatctgaaactcacttacatggctgacaattgatgttggctgttgcctggagaagacatatgtggcgtggtggaatggaatggtgactagattcaagaaagagcttcccaggaggaaggctaccaagagaccgaa

SEQ ID NO: 205115 - DNA, 658 bp, Homo sapiens
ttttctttcagaaaatatttgtcaagcaccttctgtgttctaagaactgttctagagctttgcatgctatggaggtctagaaattcacattatggtggcaggtgacagacaatacaaagagataaagcaatttcatatagtgataagctagggaggmgtgctaaaaggagccaaggtgtagtggtgactggaaggtgaccagggaaaccactgtagggtttctaagtgatgagatctgtgacaaatccctgtggtcagcagcaggcattggatatgtaactttattctgtcccattgatcttgtagtcaaccctggtctgttctgtattgttttaattacataatctttgtaataatctttaatacctggtggagtgctctgtttacttatttctgcataattaaccacccctaagcttaacttactcatggttctgcagggtgactgctctccatgtttctaggtggttctgcatggggcctctcacatgtgctacagtcaaacattagccggggccacagtcatctgaaactcacttacatggctgacaattgatgttggctgttgcctggagaagacatatgtggcgtggtggaatggaatggtgactagattcaagaaagagcttcccaggaggaaggctaccaagagaccgaa

SEQ ID NO: 205116 - DNA, 658 bp, Homo sapiens
ttttctttcagaaaatatttgtcaagcaccttctgtgttctaagaactgttctagagctttgcatgctatggaggtctagaaattcacattatggtggcaggtgacagacaatacaaagagataaagcaatttcatatagtgataagctagggaggagtgctaaaaggagccaaggtgtagtggtgactggaaggtgaccagggaaaccactgtagggtttctaastgatgagatctgtgacaaatccctgtggtcagcagcaggcattggatatgtaactttattctgtcccattgatcttgtagtcaaccctggtctgttctgtattgttttaattacataatctttgtaataatctttaatacctggtggagtgctctgtttacttatttctgcataattaaccacccctaagcttaacttactcatggttctgcagggtgactgctctccatgtttctaggtggttctgcatggggcctctcacatgtgctacagtcaaacattagccggggccacagtcatctgaaactcacttacatggctgacaattgatgttggctgttgcctggagaagacatatgtggcgtggtggaatggaatggtgactagattcaagaaagagcttcccaggaggaaggctaccaagagaccgaa

SEQ ID NO: 205117 - DNA, 500 bp, Homo sapiens
tcctggccaacatagtgaaacccgtctccaataaaaaaaaaaaatacaaaaattagctgggcatggtggtgtgaaccggtagtcccaactactcgggaggctgagacaggagaatctctagaacctgggaggcggaggttgcrgtgagctgagattgcaccactgcactcaagactggcaatagagggagattccatctcaaaaaaaaaaaaaaaaaaaatccaatagcagaattcccagaatggaatttatgtcacattctatggatcaagcaagttgcaaggcagccagattcaaggggaagggagctattcctcacctcttgagaagcaatgtgtgttgaggaagggaaagaattgatggtagctgtctttgacttctgccatacagagcaaggtctccacactcctttctcctgtaataattttccatttgaaaattttccttgcaattctcacacctttattatttcatataaattttacaatcaatttttttct

SEQ ID NO: 205118 - DNA, 500 bp, Homo sapiens
tcctggccaacatagtgaaacccgtctccaataaaaaaaaaaaatacaaaaattagctgggcatggtggtgtgaaccggtagtcccaactactcgggaggctgagacaggagaatctctagaacctgggaggcggaggttgcggtgagctgagattgcaccactgcactcaagactggcaatagagggagaytccatctcaaaaaaaaaaaaaaaaaaaatccaatagcagaattcccagaatggaatttatgtcacattctatggatcaagcaagttgcaaggcagccagattcaaggggaagggagctattcctcacctcttgagaagcaatgtgtgttgaggaagggaaagaattgatggtagctgtctttgacttctgccatacagagcaaggtctccacactcctttctcctgtaataattttccatttgaaaattttccttgcaattctcacacctttattatttcatataaattttacaatcaatttttttct

SEQ ID NO: 205119 - DNA, 500 bp, Homo sapiens
tcctggccaacatagtgaaacccgtctccaataaaaaaaaaaaatacaaaaattagctgggcatggtggtgtgaaccggtagtcccaactactcgggaggctgagacaggagaatctctagaacctgggaggcggaggttgcggtgagctgagattgcaccactgcactcaagactggcaatagagggagattccatctcaaaaaaaaaaaaaaaaaaaatccaatagyagaattcccagaatggaatttatgtcacattctatggatcaagcaagttgcaaggcagccagattcaaggggaagggagctattcctcacctcttgagaagcaatgtgtgttgaggaagggaaagaattgatggtagctgtctttgacttctgccatacagagcaaggtctccacactcctttctcctgtaataattttccatttgaaaattttccttgcaattctcacacctttattatttcatataaattttacaatcaatttttttct

SEQ ID NO: 205120 - DNA, 500 bp, Homo sapiens
tcctggccaacatagtgaaacccgtctccaataaaaaaaaaaaatacaaaaattagctgggcatggtggtgtgaaccggtagtcccaactactcgggaggctgagacaggagaatctctagaacctgggaggcggaggttgcggtgagctgagattgcaccactgcactcaagactggcaatagagggagattccatctcaaaaaaaaaaaaaaaaaaaatccaatagcagaattcccagaatggaatttatgtcacattctatggatcaagcaagttgcaaggcagccagattcaaggggaagggagctattcctcacctcttgagaagcaatgtgtgttgaggaagggaaagaattgatggtagctgtctttgacttctrccatacagagcaaggtctccacactcctttctcctgtaataattttccatttgaaaattttccttgcaattctcacacctttattatttcatataaattttacaatcaatttttttct

SEQ ID NO: 205121 - DNA, 591 bp, Homo sapiens
cttacattgctctaaagaaatacctgagactgggtaatttataaagaaaagcagtttaattggctcatggttctgcacgttatacagaaagcatgatgcatctgctgggcttctgcgggggcmtcagtaagctaacaatcatggcagaaggtgaagggggagccagcacttcacatggctggaagcaggaagaagagtgagaggtggggaggtgctatacacttttaacaaccagactcacaataactcactcactgtcacaagaacagcaccaaggagatggtgctaaaccatttaagagaaaccgcccgatgatccaattgcctcccaacaggccccacctccaacagtgggacttacagtttgacatgagatttgggtggggacacagatccaaatgatatcaatgtgttaaaaggaaaaggagatagcagtgggaaatggatatttaacttcagtttatgagtttttattttagagttctaaaattatgtcttatactgcctatacaagtgctagaatagtttctgtattaagtggtagatattaatatccaaatatcatacttaccttctttgaccttgcagttta

SEQ ID NO: 205122 - DNA, 525 bp, Homo sapiens
cacaaacatttgagtaaaaaaatgagaaaggtttagtggtgacttcttcccatgttagaaaaaaggattcataatgaacaactttttttttcatgtatttcctacaattgagtaaaataataggactaggtaagtttactggtttgcattttttcatctgggtctggttttycatttcaattgttagccattgtattaactactttcaccattcaaaggaatgaatgatctgccatagtattttctgcagttccatctcttgttttcagtatcattccaattctgcatctatctaattttgatctctgttctatttattttcctgattcataacattttgctttgtgctgagcacctaattgtctctctgtcattctcaacattttagccctatggtctaaaagatgcccaaaagaatgtagcatattctagtatatcagtgggacaacataaacaacttgcttaattgttaatctatttaaaaatgaaacagtgtttttcattttttcaatcaatttaatgctg

SEQ ID NO: 205123 - DNA, 525 bp, Homo sapiens
cacaaacatttgagtaaaaaaatgagaaaggtttagtggtgacttcttcccatgttagaaaaaaggattcataatgaacaactttttttttcatgtatttcctacaattgagtaaaataataggactaggtaagtttactggtttgcattttttcatctgggtctggttttccatttcaattgttagccattgtattaactactttcaccattcaaaggaatgaatgatctgccatagtattttctgcagttccatctcttgttttcagtatcattccaattctgcatctatctaattttgatctctgttctatttattttcctgattcataacattttgctttgtgctgagcwcctaattgtctctctgtcattctcaacattttagccctatggtctaaaagatgcccaaaagaatgtagcatattctagtatatcagtgggacaacataaacaacttgcttaattgttaatctatttaaaaatgaaacagtgtttttcattttttcaatcaatttaatgctg

SEQ ID NO: 205124 - DNA, 624 bp, Homo sapiens
acaacattaaatggagaaaaattatatagctaagtaaattaaactaaatttagatctttgaagggatcaataaaattgttaaatctctggccagactatggagaaaataataggaaataaataatttacaaattttaagaatgayagaagtggctggggttggtggctcatgcctgtgatcccagcactttgggaggccgaggcaggcggatcgtttgaggtcaggagttccagaccagcctggccaacatagtgaagccctgtctctactaaaaatacaaaaattagctgagcgtgatggcgcctgcctgtattcccagctactcgggaggctgaggcacaagaattgcttgaagctgggaggtggaatttgcagtgagtagagatgaggccactgcactcaagcccgggcgacagaacgggactctgtctcaaaacaaataaacaacaaaaaaagaatgatagaagtaacatttccattgtcctacaacagtttaaggataactaaatgaataccatgatgaaatttataaatgtaaattagttaatttagattaagtgtataaatccctcaaaagatacaaactaaggcaaactcaaaaagaaagcaataaaatgcacatc

SEQ ID NO: 205125 - DNA, 624 bp, Homo sapiens
acaacattaaatggagaaaaattatatagctaagtaaattaaactaaatttagatctttgaagggatcaataaaattgttaaatctctggccagactatggagaaaataataggaaataaataatttacaaattttaagaatgacagaagtggctggggktggtggctcatgcctgtgatcccagcactttgggaggccgaggcaggcggatcgtttgaggtcaggagttccagaccagcctggccaacatagtgaagccctgtctctactaaaaatacaaaaattagctgagcgtgatggcgcctgcctgtattcccagctactcgggaggctgaggcacaagaattgcttgaagctgggaggtggaatttgcagtgagtagagatgaggccactgcactcaagcccgggcgacagaacgggactctgtctcaaaacaaataaacaacaaaaaaagaatgatagaagtaacatttccattgtcctacaacagtttaaggataactaaatgaataccatgatgaaatttataaatgtaaattagttaatttagattaagtgtataaatccctcaaaagatacaaactaaggcaaactcaaaaagaaagcaataaaatgcacatc

SEQ ID NO: 205126 - DNA, 624 bp, Homo sapiens
acaacattaaatggagaaaaattatatagctaagtaaattaaactaaatttagatctttgaagggatcaataaaattgttaaatctctggccagactatggagaaaataataggaaataaataatttacaaattttaagaatgacagaagtggctggggttggtggctcatgcctgtgatcccagcactttgggaggccgaggcaggcggatcgtttgaggtcaggagttccagaccagcctggccaacatagtgaagccctgtctctactaaaaatacaaaaattagctgagcgtgatggcgcmtgcctgtattcccagctactcgggaggctgaggcacaagaattgcttgaagctgggaggtggaatttgcagtgagtagagatgaggccactgcactcaagcccgggcgacagaacgggactctgtctcaaaacaaataaacaacaaaaaaagaatgatagaagtaacatttccattgtcctacaacagtttaaggataactaaatgaataccatgatgaaatttataaatgtaaattagttaatttagattaagtgtataaatccctcaaaagatacaaactaaggcaaactcaaaaagaaagcaataaaatgcacatc

SEQ ID NO: 205127 - DNA, 624 bp, Homo sapiens
acaacattaaatggagaaaaattatatagctaagtaaattaaactaaatttagatctttgaagggatcaataaaattgttaaatctctggccagactatggagaaaataataggaaataaataatttacaaattttaagaatgacagaagtggctggggttggtggctcatgcctgtgatcccagcactttgggaggccgaggcaggcggatcgtttgaggtcaggagttccagaccagcctggccaacatagtgaagccctgtctctactaaaaatacaaaaattagctgagcgtgatggcgcctgcctgtattcccagctactcgggaggctgaggcacaagaattgcttgaagctgggaggtggaatttgcagtgagtagagatgaggccactgcactcaagcccgggcgacagaacgggactctgtctcaaaacaaataaacaacaaaaaaagaatgatagaagtaacatttcyattgtcctacaacagtttaaggataactaaatgaataccatgatgaaatttataaatgtaaattagttaatttagattaagtgtataaatccctcaaaagatacaaactaaggcaaactcaaaaagaaagcaataaaatgcacatc

SEQ ID NO: 205128 - DNA, 573 bp, Homo sapiens
tgatcattttcctttgtttgaaatttgtcttttgacgtttctttggaaggtgcttttggatgataaattttctgttattctttgtctaaaatgtcattattttgactcatttataaaaggagtttttgtgttttataaacctctaatgtatagaagtgtgtctaaactcattgaggatattttccaaattttttcctactttttattgctgttgataagaagtcagtgttggtattttgacatttaagttatgtgtcattttgttgtggtagttctgaagatcttccctctgttttatattctccttcacctttcataaatgtactttatatttatttggtaataaattttgaacatatactatgctataaagataatctaggccctttggttacatcttgtaaataaaatcaacaaaatctgttttgagattatattgtaatataagatacccaaagtaactaggatgtgtaccatatgtttgaaggtggtaaatacgatgagaaaaatagatcaggtcaggaagaatgaagatgattgaaggtacagkttatgatgaaaacttaggtgtgc

SEQ ID NO: 205129 - DNA, 403 bp, Homo sapiens
aagcttctcagtctatggcattttgttatagcagcccatgctaatgaatacagatgaccgtgtgtctgcagaccttcctaggaaattattgagtccttcattgaatactaaactgtgaatacatgagagaaaataacwgaagcctggggtaaaatgccaacacaaagggtttgaagaacaattctcaaagctcaagaaagctctgcaaatattattgttgccacaaaccaaagtagaagacagggtaatatatgagctattaggtagaatctttggaagaatcctgcttttgtgatggaactcactcattcctaaacctaaagcaactctacatcttctctaagaaaattttatagcaatctctaaaagcatcaaactgattccaaataatttaactgtgttt

SEQ ID NO: 205130 - DNA, 403 bp, Homo sapiens
aagcttctcagtctatggcattttgttatagcagcccatgctaatgaatacagatgaccgtgtgtctgcagaccttcctaggaaattattgagtccttcattgaatactaaactgtgaatacatgagagaaaataacagaagcctggggtaaaatgccaacacaaagggtttgaagaacaattctcaaagctcaagaaagctctgcaaatattattgttgccacaaaccaaagtagaagacagggtaatrtatgagctattaggtagaatctttggaagaatcctgcttttgtgatggaactcactcattcctaaacctaaagcaactctacatcttctctaagaaaattttatagcaatctctaaaagcatcaaactgattccaaataatttaactgtgttt

SEQ ID NO: 205131 - DNA, 582 bp, Homo sapiens
ggggcctgttggggcgtggggggaaaggggagggagagcatcaggactgatatctaatgcatgcagcttaaaacctagatgatggtttgataggggcagcaaaccaccatggcacatgtatacctatgtaacaaacctgcaaattctgcatatgtatcccagaaattaaagtaaaataaaataaaataataaaaacaacaacaaaatgtaccttgaatctccaaaataagttaagacaaatagttaaaattgagcatgcttttattagaagaagaaaatgtcattgamaatataacagataatttatagatgggaacatacgtaaaaacgtataagtacttagatctgctagataaagtgagtcccaaatgataaggttacaaaaataatgtttttttgtagaatatgtgttttcaatgagaaagtgttgcaaaagtcagtcatacagattggtaacttttatgtttatttttcaaaagcagctcaaaatagttctttagattctgtaacaccacggtgtcctaattttgctcctaaaattttgtcacaaaagtttaaattcacttgcaaattgatcttcat

SEQ ID NO: 205132 - DNA, 582 bp, Homo sapiens
ggggcctgttggggcgtggggggaaaggggagggagagcatcaggactgatatctaatgcatgcagcttaaaacctagatgatggtttgataggggcagcaaaccaccatggcacatgtatacctatgtaacaaacctgcaaattctgcatatgtatcccagaaattaaagtaaaataaaataaaataataaaaacaacaacaaaatgtaccttgaatctccaaaataagttaagacaaatagttaaaattgagcatgcttttattagaagaagaaaatgtcattgacaatataacagataatttatagatgggaacatacgtaaaaacgtataagtacttagatctgctagataaagtgagtcccaaatgataaggttacaaaaataatgtttttttgtagaatatgtgttttcaatgagaaagtgttgcaaaagtcagtcatacagattggtaacttttatgtttatttttcaaaagcagctcaaaatagttctttagattctgtaacaccacggtgtcctaattttgctcctaaaattttgtcacaaaaktttaaattcacttgcaaattgatcttcat

SEQ ID NO: 205133 - DNA, 538 bp, Homo sapiens
  misc_feature (1)...(538): n = A,T,C or G
nnnnnnnnnnnnnnnnnnnnnnnnnnnnnnnntgacccctgaaagatttctcaattatacgatgaggaactataaaatggcatcttgtggcaagtcagatgaagtacagtattatcatcaatcacggttgctatcgcagatacaagatttctggaaacatcctcttagcaataccctttccacttgagcagcattagaaattttgttcttgttaataggtataagcatgttctaatcctgtacttttgttaaattatctattttattgactttcgtaatagatttttttgagaatattctttttttctgattagagtttaagtagattataatttttcactagaaagcatttaaaatgctgctcattttctatagttagtgtggcttgattatctgacaaatcctgccagcagcctgtaggtctgatayaccttatataacatcatctgcattattattattatagcagccattttataagcagataggaatatttaaataatcattatcagataatcaaatctaacatactcttaag

SEQ ID NO: 205134 - DNA, 592 bp, Homo sapiens
tagtaaaacaccacgtttcttaggttaaagaggccacatcatactcccagtcacaagggcttttaagaaatagcccaatrtctttctaaaagggagacctaaatggctgtatatttgtaatgttttctgccaaggccatatctaaagcataagggagacaattattaagggaataccagttttaggatagagtgggaatgggcatagacccggcaattacttcggttaatttcattggctactttgtcagctaagagaccgagggaattatggtcatgagaggaaagcacgggatagggtaagatgaggaaacagaggggaatcatgacagggctgctgaggctggagatggagtatatatgttgtaagtaggacacatcactaggataaagatgggacgttgtagaggacacaggagtagtagcagaatgcgtagacccaaaattgaagtcagagacaggggaggggaatcggagtgaatcttgtttcatgatctttggcagaagcggactgcttcatcatatcatttacttgctccgtagttcttaggatggatgtctgtctccagctgttggctacttttagaggttct

SEQ ID NO: 205135 - DNA, 538 bp, Homo sapiens
tgtaaaaccaatcaacttctgctgaaaaacttctgtaaaactcatttttttttttccagtatgtttcctctgaagacaatcttcacatctagggaatattaatggtaataataacagcattgatttattgagagttttcctatgtaacaattactatacaagtatgccatttaatctatttctctagtttcaatattaatattggtacttaataaaygagtaaactgaaaataataagtttaaaatcttttttcacagctagtcagcaatacaactgggatttgatatcagattcatacgattccgaagaccctgaccaccaaatgcaaaaggtacatggcaacagctgattgcaatgagagaaaaacaactaataaggcaacaagcaggatactaagatattttccaaaatgaatagcactgattctgtgaggaatgaacattgccaaacaagtgttttgttttgtttttcaactcctctaaaaaaattcacatatatgcatgccactttcctgaaaaatatctgcctcataattgc

SEQ ID NO: 205136 - DNA, 522 bp, Homo sapiens
gtgagtcctccccagccatgtggaactgtatgtccaataaaccwttttcttttgtaagttgtccagtcgtgggtatgtctttatcagcagtgttaaaatggactaatacaatcactctatcaaatgagataatatttattcctttaccactgacaactctctctcggctcttctattcaatcatgttactgatagacgctttgctttttgtttttgttgtttaacctgattgttatagcttattttatgaatttctgttcttcttttaattttacaacaattttactatttctccttacatgtttataagtcatatggagactccttctcatctaccctgaccccagaatattaaaacttttcagagtttcaggattaattccattatatggacatgattccttgagataggaaaaactgattggattgtgacattagacttatcagaatctaagatcttacaaaatataaagctttactagtaatttcacgaactcaggtaatcattaggcataggcaaat

SEQ ID NO: 205137 - DNA, 520 bp, Homo sapiens
gtgttaaaaacaggattttctctgcacaagctctttttttgcctgctgccacccacataagatgtgtcttgctcctttttgccatgattgtgagtcctccccagccatgtggaactgtatgtccaataaacctttttcttttgtaagttgtccagtcrtgggtatgtctttatcagcagtgttaaaatggactaatacaatcactctatcaaatgagataatatttattcctttaccactgacaactctctctcggctcttctattcaatcatgttactgatagacgctttgctttttgtttttgttgtttaacctgattgttatagcttattttatgaatttctgttcttcttttaattttacaacaattttactatttctccttacatgtttataagtcatatggagactccttctcatctaccctgaccccagaatattaaaacttttcagagtttcaggattaattccattatatggacatgattccttgagataggaaaaactgattggattgtg

SEQ ID NO: 205138 - DNA, 509 bp, Homo sapiens
gcacaagctctttttttgcctgctgccacccacataagatgtgtcttgctcctttttgccatgattgtgagtcctccccagccatgtggaactgtatgtccaataaacctttttcttttgtaagttgtccagtcgtgggtatgtctttatcagcagtgttaaaatggactaatacaatcactctatcaaatgagataatatttattcctttaccactgacaactctctctcggctcttctattcaatcatgttactgatagacgctttgctttttgtttttgttgtttaacctgattgttatagcttattttatgaatttctgttcttcttttaattttacaacaattttactatttctccttacatgtttataagtcatatggagactmcttctcatctaccctgaccccagaatattaaaacttttcagagtttcaggattaattccattatatggacatgattccttgagataggaaaaactgattggattgtgacattagactta

SEQ ID NO: 205139 - DNA, 509 bp, Homo sapiens
gcacaagctctttttttgcctgctgccacccacataagatgtgtcttgctcctttttgccatgattgtgagtcctccccagccatgtggaactgtatgtccaataaacctttttcttttgtaagttgtccagtcgtgggtatgtctttatcagcagtgttaaaatggactaatacaatcactctatcaaatgagataatatttattcctttaccactgacaactctctctcggctcttctattcaatcatgttactgatagacgctttgctttttgtttttgttgtttaacctgattgttatagcttattttatgaatttctgttcttcttttaattttacaacaattttactatttctccttacatgtttataagtcatatggagactccttctcatctaccctkaccccagaatattaaaacttttcagagtttcaggattaattccattatatggacatgattccttgagataggaaaaactgattggattgtgacattagactta

SEQ ID NO: 205140 - DNA, 507 bp, Homo sapiens
tatttattcctttaccactgacaactctctctcggctcttctattcaatcatgttactgatagacgctttgctttttgtttttgttgtttaacctgattgttatagcttattttatgaatttctgttcttcttttaattttacaacaattttactatttctccttacatgtttataagtcatatggagactccttctcatctaccctgaccccagaatattaaaacttttcagagtttcaggattaattccattatatggacatgattccttgagataggaaaaactgattggattgtgacattagacttatcagaatctaagatcttacaaaatataaagctttactagtaatttcacgaactcaggtaatcattaggcatrggcaaatcagagaattatttagatctcttaatctgattctttagatccttggttctgtcattagatactcccttgcccaggcagatagatgagacttctagagaggtatgcagacaatttattt

SEQ ID NO: 205141 - DNA, 563 bp, Homo sapiens
ccttggaattctgcattgcttaatatttactactgtggagagcttgagcaattccaaaggatcccatttggcakagctgattaaaatttggtgaagagtgagctcagtcttcatcctctgtggaaacacaaagacgacaatgtcccattcatactgaatgacaattgcaattttgtatttatgtaaaggtagcacaagcaggtaatattctctccaaccacacatttcaacctgtaacttcatctttaccttggtttcctccctgatgttctcttcatgcactccagatttcacttagagcatgtatgagactctttcctaccttccataaggcctactgtaaattctgctctacatcctaccaatgataagaaactttgaataccaccccaggtaactttgttcaaattatatatatggcctcagatccatgactggggctggaatgaacagacctcagttctttatttaattgttttcagattctacggctttaattaaggcagtaaactcagccccctgttcaagtatgttctgttctatatcactatcctcataattgg

SEQ ID NO: 205142 - DNA, 563 bp, Homo sapiens
ccttggaattctgcattgcttaatatttactactgtggagagcttgagcaattccaaaggatcccatttggcagagctgattaaaatttggtgaagagtgagctcagtcttcatcctctgtggaaacacaaagacgacaatgtcccattcataytgaatgacaattgcaattttgtatttatgtaaaggtagcacaagcaggtaatattctctccaaccacacatttcaacctgtaacttcatctttaccttggtttcctccctgatgttctcttcatgcactccagatttcacttagagcatgtatgagactctttcctaccttccataaggcctactgtaaattctgctctacatcctaccaatgataagaaactttgaataccaccccaggtaactttgttcaaattatatatatggcctcagatccatgactggggctggaatgaacagacctcagttctttatttaattgttttcagattctacggctttaattaaggcagtaaactcagccccctgttcaagtatgttctgttctatatcactatcctcataattgg

SEQ ID NO: 205143 - DNA, 409 bp, Homo sapiens
attttctccctgtcatccctaataacagttrcattttttacaggctcctgctcctttacataggcccactgtggttccagcttcccccaaatatccctccctgcagctccagtagtacagcctcctatccctgttctccaagggaaggtgatagtagcctcccattgttgctaaattgtaggttgcctcactgtcccctggttggctttaatttttttaaagttatttctaccatcaattacctgtatcaattccctttgttttaaattctcaatgatttcagttttcctggctagtttctgattacttcagatacctaatggaaatctcaaagaaagtatgactcaagagaaattgttgatttccatctcccagctactaccaaacctgtttatgcttatccatttca

SEQ ID NO: 205144 - DNA, 409 bp, Homo sapiens
attttctccctgtcatccctaataacagttacattttttacaggctcctgctcctttacataggcccactgtggttccagcttcccccaaatatccctccctgcagctccagtagtacagcctcctatccctgttctccaagggaaggtgatagtagcctcccattgttgctaaattgtaggttgcctcactgtcccctggttggctttaatttttttaaagttatttctaccatcaattacctgtatcaattccctttgttttaaattctcaatgatttcarttttcctggctagtttctgattacttcagatacctaatggaaatctcaaagaaagtatgactcaagagaaattgttgatttccatctcccagctactaccaaacctgtttatgcttatccatttca

SEQ ID NO: 205145 - DNA, 409 bp, Homo sapiens
attttctccctgtcatccctaataacagttacattttttacaggctcctgctcctttacataggcccactgtggttccagcttcccccaaatatccctccctgcagctccagtagtacagcctcctatccctgttctccaagggaaggtgatagtagcctcccattgttgctaaattgtaggttgcctcactgtcccctggttggctttaatttttttaaagttatttctaccatcaattacctgtatcaattccctttgttttaaattctcaatgatttcagttttcctggctagtttctgattacttcagatacctaatggaaatctcaaagaaagtatgactcaagagaaattgytgatttccatctcccagctactaccaaacctgtttatgcttatccatttca

SEQ ID NO: 205146 - DNA, 432 bp, Homo sapiens
acacaatacttgttccaaataacctccccaggctattcctgagagagggggtaccttggtttttggagtaggccagaagtttgtggtaggaaaggtgactgatttgcagctagactcacctgctaaagtagacacrggtctgttgcactgcaggttttgagaacagcctggaccaaaccacacagtgaccccaaaggcataaaaatgataatgaaggcagcgatggctcaactaatatcatgaagtctatgcatgaggctgcctactttgatttgcagtagttgatactttaaaacttcagtcctggcttatctgcctgtcccagggattcctggctcccaatagtgagccaggatggggaagagctagctccatcagcacacactacatgtggacagttggactggactgttttttaaaagcacaaactca

SEQ ID NO: 205147 - DNA, 603 bp, Homo sapiens
gcctcccaaagtgctggaattacaggagtcagctaccacactgggccttccctattctaaaagaagtaaatagtcaggataaacacttttcttcataattccttttgtcttcttactcttgcgatgcggccttactggagttggagttgttcattttgggtagtttacctctgtctttttagaagtcgaatgcttcagttgcttatctttgaagcagcctgattatttgcttgcttaattcagtgtaaagagttcagaaacctgctttccactwagaacttgtttctttcaatcacttttctgtgtaggaaaagtttgaattacataagtatttaatatgcattaaacattgaaaaatgtcatgaatatatgtgaaaattatcagacacactgcaatacccagaccagtgattgtccagtagccagcacaatattttggtggcatatgtggccagtgagtcatgcttgagctaggggctgttccctggcagtgtagcttgtgtatgctaggagccaagctcttctccacatagcaagctcgtatctccaacatcaattactaaataattcattttttccctccttgacttttgatgccacatc

SEQ ID NO: 205148 - DNA, 607 bp, Homo sapiens
ctacagaaaaatgctgggcatggtagtgcgcgcgtatggtcccgttacagaggctgaggtgggaggattgcttgagcctgggaggtagaggatgcagtgagttgagattgtgccactgcactccagcctgggcaccagagcaaaatcctgcctataaaaaaaataaaataaaataaataaaatttaaaaataaaaaagcagaagttacacataacagacaaaaatcatgagaagtagactgtaataacccttaggatggaaaaaaaatatttgtaaatcatgtgtctgataaggatctaatatccagaattcttacaactcaatttcaaaaggacaaacaacccaatttaaaaaatggggaaagacttgaatagctatttcttcaaagargatatacaaatggcaagaaacacatgaaaagatgttcaacatcactaatcattaggaaaatgcaagttaaaaccacaatgagataccatctcatactccctgggatggttataattaaaaaaacaacttttgacaaggatctgaagaaattggcactctcatacattgctagtgggaaagtaaaaacaaggttgccatgtcatgtaatatgaaacag

SEQ ID NO: 205149 - DNA, 607 bp, Homo sapiens
gtacagagggaagagggaagagcctcttataaaaccatcagatcttgtgagaacacactatcacaacaacagcatgggggagccacacccatgagccaatcacctcccaagaggtccctctcccaacatgtggggattacaatttggattacaattcaagatgagatttgggaacagagagccagaccatatcaaggacttcaaccatttttgcttataaaaccctaaacaaatttgtaaaagtatgtagcttcttgcatatttataaattgacacataaaaattttttatcataagtttaaatagtaactraatattgatttctggtatattataaatatttttattttaaaaataacagttttaaatgtaagtcactttctaatgtaattaatgggacctaaaaaatagtgatttgataaccaacatcacctgggtcagaattgtataacaactactttaacagtgacaagcattacatatttccttcttcctgtatttatatcatcattcaacttccctacaggtttttctcctattaaaacacaatttgtgctcgaattttttttactgattttcctatcatacatctgtaacaattacatga

SEQ ID NO: 205150 - DNA, 553 bp, Homo sapiens
gtcatgtttttttttttttgcctcttttaaagcagagactaaatgatataatatgtaagaagtacttagtagtgtggttaacactcagtagttatatayatcattatgattactattaaatttcataggccaatcagtttaagctttacagtcatattaatgacactcttattatttaggtgtttttgcacttttctgatttatttatttatttatttactttttagatggagtctcgctctgtcacccaggctggagggcagtggcacaatctcggccccctgcaagctccgcctctcgggttcacgccattcccctgcctcagcctcctgagtagctgggactacaggcacccgccaccatgcccagctaatttttttttttttttttttttagtagagacggggtttcaccgtgttagccaggatggtcttgatctcctgacctcgtgatcgcctcggcctcccaaggtgctgggattacaggcgtgagccaccgcgcctggcctctgatttttttaaattcccttagcaacaacttttatcatgccaca

SEQ ID NO: 205151 - DNA, 553 bp, Homo sapiens
gtcatgtttttttttttttgcctcttttaaagcagagactaaatgatataatatgtaagaagtacttagtagtgtggttaacactcagtagttatatacatcattatgattactattaaatttcataggccaatcagtttaagctttacagtcatattaatgacactcttattatttaggtgtttttgcacttttctgatttatttatttatttatttactttttagatggagtctcgctctgtcacccaggctggagggcagtggcrcaatctcggccccctgcaagctccgcctctcgggttcacgccattcccctgcctcagcctcctgagtagctgggactacaggcacccgccaccatgcccagctaatttttttttttttttttttttagtagagacggggtttcaccgtgttagccaggatggtcttgatctcctgacctcgtgatcgcctcggcctcccaaggtgctgggattacaggcgtgagccaccgcgcctggcctctgatttttttaaattcccttagcaacaacttttatcatgccaca

SEQ ID NO: 205152 - DNA, 553 bp, Homo sapiens
gtcatgtttttttttttttgcctcttttaaagcagagactaaatgatataatatgtaagaagtacttagtagtgtggttaacactcagtagttatatacatcattatgattactattaaatttcataggccaatcagtttaagctttacagtcatattaatgacactcttattatttaggtgtttttgcacttttctgatttatttatttatttatttactttttagatggagtctcgctctgtcacccaggctggagggcagtggcacaatctcggccccctgcaagctccgcctctcgggttcacgccattcccctgcctcagcctcctgagtagctgggactacaggcacccgccaccatgcccagctaatttttttttttttttwtttttagtagagacggggtttcaccgtgttagccaggatggtcttgatctcctgacctcgtgatcgcctcggcctcccaaggtgctgggattacaggcgtgagccaccgcgcctggcctctgatttttttaaattcccttagcaacaacttttatcatgccaca

SEQ ID NO: 205153 - DNA, 553 bp, Homo sapiens
gtcatgtttttttttttttgcctcttttaaagcagagactaaatgatataatatgtaagaagtacttagtagtgtggttaacactcagtagttatatacatcattatgattactattaaatttcataggccaatcagtttaagctttacagtcatattaatgacactcttattatttaggtgtttttgcacttttctgatttatttatttatttatttactttttagatggagtctcgctctgtcacccaggctggagggcagtggcacaatctcggccccctgcaagctccgcctctcgggttcacgccattcccctgcctcagcctcctgagtagctgggactacaggcacccgccaccatgcccagctaatttttttttttttttttttttagtagagacggggtttcaccgtgttagccaggatggtcttgatctcctgacctcgtgatygcctcggcctcccaaggtgctgggattacaggcgtgagccaccgcgcctggcctctgatttttttaaattcccttagcaacaacttttatcatgccaca

SEQ ID NO: 205154 - DNA, 592 bp, Homo sapiens
actgggcacagtgtcaattctcctaagcattgcagtacttttcattttaaagaaaaattatgtttcaaaacacagaagttttataaccaagagagaaagaacaatggtgtctacaagattccaaaaggaaaattacactacaagtgatcatctgctacaacccaactactggccaggcaaggaaactcaactttagaaacatgatgactggaagtcatgtcttctaattggttgacattttgcaaacaaataaattgtaatcaaaagagctctaaatttgtaatttctttctcctttcaaaaaatgtctactttgttttggtcctaggcattaggtaatataactgataatatactgaaayatataatggaagatgcagatgataaaactaattttgaactttttaatttatataaattattttatatcacttacttatttcactttattttgctttgtgctcattgatatatattagctgtactcctagaagaacaattgtctctattgtcacacatggttatatttaaagtaatttctgaactgtgtaatgtgtctagagtaagcaaatactgctaacaattaactcata

SEQ ID NO: 205155 - DNA, 592 bp, Homo sapiens
actgggcacagtgtcaattctcctaagcattgcagtacttttcattttaaagaaaaattatgtttcaaaacacagaagttttataaccaagagagaaagaacaatggtgtctacaagattccaaaaggaaaattacactacaagtgatcatctgctacaacccaactactggccaggcaaggaaactcaactttagaaacatgatgactggaagtcatgtcttctaattggttgacattttgcaaacaaataaattgtaatcaaaagagctctaaatttgtaatttctttctcctttcaaaaaatgtctactttgttttggtcctaggcattaggtaatataactgataatatactgaaacatataatggaagatgcagatgataaaactaattttgaactttttaatttatataaattattttatatcayttacttatttcactttattttgctttgtgctcattgatatatattagctgtactcctagaagaacaattgtctctattgtcacacatggttatatttaaagtaatttctgaactgtgtaatgtgtctagagtaagcaaatactgctaacaattaactcata

SEQ ID NO: 205156 - DNA, 590 bp, Homo sapiens
cagttaccatctgtattattttcctattgctgctgctgtaggagtatcacaaacttggtggcttaaaataacacaaatgtattgtcttacccttatggaggctgtaagtctgaaatcctttgtactgagctaaagtcaaggttttagcagggttggttccttctggatgatctgggaggagaatctgtctcctggtttttttccagcttctagtggcttcctgtattccttgacgtgttccctttctccattttcaaagtgcattgcacagattggagctataacctgtggatgttaaaaaaaaattgaatgataaaatagaagtctgtgtggcctctgtatagcagattggagctataacctatggatgttaacaaaatgttgaatgataaaatagaaktttgcccaaccagataatccaggataatctccccatgttaagattcttagcttaatcacatctgcaaagttacttttgccatataaattaatatccacaggttccagggattggaacatgggtatttttaagggtcattattcagcctaccataccaccaatcttcactgctcttcacctttcttttata

SEQ ID NO: 205157 - DNA, 338 bp, Homo sapiens
aaggtagaaacttaaatactgattttaaatgtttcctcttttctcatatatgtattcagtgyaataaattttcctctaagcattgcttttgctacctcccacaaactttgatgaattgtgtttttatttttatttagtcaaaatatttaaaaacttatcttgagatttcctttgacctaaatgttacttaaaaatgtgttacttagtctctacatatttggggatttttccagttatttctgttattgattctactttaattctattgttgtctgagaacaaatgctatcacttctttttgaaaataaattggataagatatattttatggcttagaa

SEQ ID NO: 205158 - DNA, 520 bp, Homo sapiens
gtctccaactatgatagtgtattcatctatttctccttgcagttytaccagtttttacttcatagaatttgatgctctgttgttgggtgcatatatgttaaggagtattatatcttttttgagaactgatgtccttattattctgtaatgccccctcccacctttttttttaaatcaatttccttttgcttttctttttttttaaattttattattattatactttaagttttagggtacatgtgcacaacatgcaggtttgttacatttgtatacctttttttaacctctggtaactttccttgctttgaagtttgctgtgtctaaaattaatatagctattcctgatttcttttgattattgttagcatagaatatttttctccatccatttacttttattctatatgtgtttttatatttaaagtgggtgtcatgcacacaacatgtagttggccttgttacttgatttactgtcaccttctatcttttagttggtgcatttagataattgatgtta

SEQ ID NO: 205159 - DNA, 520 bp, Homo sapiens
gtctccaactatgatagtgtattcatctatttctccttgcagttctaccagtttttacttcatagaatttgatgctctgttgttgggtgcatatatgttaaggagtattatatcttttttgagaactgatgtccttattattctgtaatgccccctcccacctttttttttaaatcaatttccttttgcttttctttttttttaaattttattattattatactttaagttttagggtacatgtgcacaacatgcaggtttgttacatwtgtatacctttttttaacctctggtaactttccttgctttgaagtttgctgtgtctaaaattaatatagctattcctgatttcttttgattattgttagcatagaatatttttctccatccatttacttttattctatatgtgtttttatatttaaagtgggtgtcatgcacacaacatgtagttggccttgttacttgatttactgtcaccttctatcttttagttggtgcatttagataattgatgtta

SEQ ID NO: 205160 - DNA, 484 bp, Homo sapiens
atatttctctctgtaatatggtaggctagaactggctgaagttgggtatttcctttacctcaggtcagttaagcttagataacaccagagcttatgaggctccaattaattagtttttcctgagggcaagtctcataatccctattaaaaacaaagtgctctggcctatttcaaaatgattcctttctctttcactctgctagaatgagaagatttttctccaacatttactataagatccaggtcgagctcctgaagagaaaatcatcaaaaaaggggrtccttgaattggtccccctggagttattagccctcagacttgtccaacctgaggctctagcaattcaattatagtacatttttttttcttttttaccctagcactatttcctttctggtttttgttatgagtttctgctccaggaagctgttactccttatatttactttgtctctccatctccaatcttggagacagtggttt

SEQ ID NO: 205161 - DNA, 456 bp, Homo sapiens
ttttgcccttcccactgtgagattactgtaagaagatggccctcttcctgctgctgtcctgatctcagacttttcaacctctggaactgtgacaagtaaatttctgttgtttataaggtactcagttttgttgtatgctatattttgctatatttttaatagaagccccaaacatactaaaatacatgttctcatgttctttgatacgcctctttaacctttatactctctgatactatctcgattttccatctaaaattttaaattttagatattatatctattttcttyccttttctatttttggtctcattttttaaaagacaattacaaaattatcaagtgttttattcaccttgttttacaaatctcacacaatatcttcagtatttgattcttgttttattgaagtatatcttccgaatttgatttcagtgtgtatctttacatgccaca

SEQ ID NO: 205162 - DNA, 456 bp, Homo sapiens
ttttgcccttcccactgtgagattactgtaagaagatggccctcttcctgctgctgtcctgatctcagacttttcaacctctggaactgtgacaagtaaatttctgttgtttataaggtactcagttttgttgtatgctatattttgctatatttttaatagaagccccaaacatactaaaatacatgttctcatgttctttgatacgcctctttaacctttatactctctgatactatctcgattttccatctaaaattttaaattttagatattatatctattttctttccttttctatttttggtctcattttttaaaagacaattacaaaattatcaagtgttytattcaccttgttttacaaatctcacacaatatcttcagtatttgattcttgttttattgaagtatatcttccgaatttgatttcagtgtgtatctttacatgccaca

SEQ ID NO: 205163 - DNA, 630 bp, Homo sapiens
tatggcacccttcaataaatggtaatggtgaaataatggtgaaactggatgtcccatacacagaakaataaaactagacccaattttcttaccatatacaaaaatcaacacaaaatgtattaaagacttaaatataagacccaaagctataaaacatcttcaaggaaatgtagaggaaatgcttcaggatattgctctaggcaaggattttattgctaaaacttcaaaaacacaaaacaacaaaaggaaagacagacaagtggcacaaactagactatattaaacaaaaaatattctctacagcaaaagaaacaatcaacagagtgaagaaaaaaatctttagaatggaaaaaatatttgcaaacaagggactaatatccagaatatagaagaaattcaaacaactcaacagttaaaaaaacaacaaaaaacaaccatctaccttctctacctccatgagttcaacttttctagctcccatatgagtgaaaacatgcaatctttgtctttctggcctggcttatctcactgaccataaagacctttaattccattcatgtcgctgcaaatggaagatttttattctttttatgactgaatgatactctattgtgtacatacacattttct

SEQ ID NO: 205164 - DNA, 630 bp, Homo sapiens
tatggcacccttcaataaatggtaatggtgaaataatggtgaaactggatgtcccatacacagaagaataaaactagacccaattttcttaccatatacaaaaatcaacacaaaatgtattaaagacttaaatataagacccaaagctataaaacatcttcaaggaaatgtagaggaaatgcttcaggatattgctctaggcaaggattttattgctaaaacttcaaaaacacaaaacaacaaaaggaaagacagacaagtggcacaaactagactatattaaacraaaaatattctctacagcaaaagaaacaatcaacagagtgaagaaaaaaatctttagaatggaaaaaatatttgcaaacaagggactaatatccagaatatagaagaaattcaaacaactcaacagttaaaaaaacaacaaaaaacaaccatctaccttctctacctccatgagttcaacttttctagctcccatatgagtgaaaacatgcaatctttgtctttctggcctggcttatctcactgaccataaagacctttaattccattcatgtcgctgcaaatggaagatttttattctttttatgactgaatgatactctattgtgtacatacacattttct

SEQ ID NO: 205165 - DNA, 630 bp, Homo sapiens
tatggcacccttcaataaatggtaatggtgaaataatggtgaaactggatgtcccatacacagaagaataaaactagacccaattttcttaccatatacaaaaatcaacacaaaatgtattaaagacttaaatataagacccaaagctataaaacatcttcaaggaaatgtagaggaaatgcttcaggatattgctctaggcaaggattttattgctaaaacttcaaaaacacaaaacaacaaaaggaaagacagacaagtggcacaaactagactatattaaacaaaaaatattctctacagcaaaagaaacaatcaacagagtgaagaaaaaaatctttagaatggaaaaaatatttgcaaacaagggactaatatccagaatatagaagaaattcaaacaactcaacagttaaaaaaacaacaaaaaacaaccatctaccttctctacctccatgagwtcaacttttctagctcccatatgagtgaaaacatgcaatctttgtctttctggcctggcttatctcactgaccataaagacctttaattccattcatgtcgctgcaaatggaagatttttattctttttatgactgaatgatactctattgtgtacatacacattttct

SEQ ID NO: 205166 - DNA, 493 bp, Homo sapiens
tctgcaaacaccacagtgtcattgggctggggcacaagtccgttgaaacacctagaaagctttcccaaggacaggcacaaacaagcccagactgtgaagattacaataaatacctaattcttcaatgtccagacaccaaagaacatctacaagcatcaacaccatctagaaaaacataacctcaccaaatcaactagataaggcactmaggaccaatcttgaagaaacatagatatatgacctttcaggcagataattcaaaatagctgtttagaggaaactaaaaggaattcaagataacacagagaatgaattcagaattttatcagatacatttaacagagattgaaataattaagaagaattaagtagaaattacagatgtgaaaaaatgcagctgatatgaagaatataccagtctcttaacaacagaattgatcaaactgaagaaagaattcatgagctagaaaataggctacttgaaaatacataa

SEQ ID NO: 205167 - DNA, 543 bp, Homo sapiens
tttcataagcaaactgtcaaaggtcaaggaaaaagaaaggatcctaaaagcatcaagagaaatgaaacaaataacatacaatggagttccaatatttctttcagcagacttttcagtggaaactttacaggtcaggagagaatggtatgacatatttaaagtgctkaaagaaaaaacatttaccttagaatagtatgtccagtgaaaatatactgtaagtatgaaaaaacccaaagaccttcccaaagaaatgaaagctgagggatttcatcaacaccagacctgtcctacaagaaatgctaataggagttattcatgctaaaagaaaaatgtgtcaatgagcaagaagatatcatcagaaggtaaaaaaatcactggtactagtaaacagatagaaaatcatagattagtataacactgtaattgtgatatgtaagtttctcgacttaaatagaaagactaaatgatgaatgaataaaaaatgataactacaacatttcaacacatagacagtagcataagacataaagagaaacaacaaaa

SEQ ID NO: 205168 - DNA, 543 bp, Homo sapiens
tttcataagcaaactgtcaaaggtcaaggaaaaagaaaggatcctaaaagcatcaagagaaatgaaacaaataacatacaatggagttccaatatttctttcagcagacttttcagtggaaactttacaggtcaggagagaatggtatgacatatttaaagtgcttaaagaaaaaacatttaccttagaatagtatgtccagtgaaaatatactgtaagtwtgaaaaaacccaaagaccttcccaaagaaatgaaagctgagggatttcatcaacaccagacctgtcctacaagaaatgctaataggagttattcatgctaaaagaaaaatgtgtcaatgagcaagaagatatcatcagaaggtaaaaaaatcactggtactagtaaacagatagaaaatcatagattagtataacactgtaattgtgatatgtaagtttctcgacttaaatagaaagactaaatgatgaatgaataaaaaatgataactacaacatttcaacacatagacagtagcataagacataaagagaaacaacaaaa

SEQ ID NO: 205169 - DNA, 577 bp, Homo sapiens
atgaaaaggtgctcaacatcactgatcatcagagaaatgcagatcaaaactacaatgagatatcaccacacctcagttaaaatggcttttattgaaaagtcaggcaataacaaatgctagtgaggatgcggagaaaagggaaccctcatacactattggtgaaagtgtaaattagtataaccactaaggagaacagtttggcagttccttggaacactaaaaatagagctaacatatgacccaacaatcccactgtttggcctgttataccccaaagaaaggaartcagttgatagaagagatacctgtattcccacgtttgttgtagcactgttaacaatagccaagatttggaatcaacccaagtatccatcagccaacaaatggattaaacgaatgtggtacttatacacaatagagtgctactcagccatacaaaaagaatgagatcctatcatttgcaataacatggatgaaactaaaagtcattatgttatgtgaaataagccaggcacagaatgtcaaatatcacgtgttctcacttatctgtaggacctaaaaaatcaaaaccatttga

SEQ ID NO: 205170 - DNA, 381 bp, Homo sapiens
attaaagcagtggcagtcgctgcacgcagacatgagggctaggctaaaacagtaagstcaagttgtttggacagaaaggctacagggtgtggtcctggcccttgtgtaagaattctgaccatgctaaccatgcctaggaaggaaaggagttgttttgtagaaggtgctgggatttgagagatcagtcggacatgattggcagggagagcacatgtgtttttatgagaattatgccgagataggtaacagatgaggaagaaatttgggcttgattgaagtaatgggggctgtctgtgaagctttgcggctgtacagcctaggtaatttgctgagcttgatgggtgtcagggtcagtccaagtgaaagcgaagagaggctggg

SEQ ID NO: 205171 - DNA, 566 bp, Homo sapiens
caccaccttaagagctgtaacactcaccgcaaaggcctgcagcttcactcctgagccagcgagaccatgaacccaccagaaggaagaaactctgaacacatctgaacatcagaaagaacaaactcyggacacaccacctttaagaactgtaacactcaccgcaaaggtctgcggcttcattcttgaagtcaatgagaccaagaacccaccaattctggacacattttggcgaccacgaagggactttcacctattgccaagcggtgagacaatcgccgagcagtgagaccatcgcctattgccgagcagtgagacaatcgcctatcgccaagcagtgagtaccatcagaccccttttgcttgctattctgtcctgtttttccttagaattcaggggcttaataccgggcacctgttggccagttaaaagtgactagcgcggctgccggactatagacacgggtgtcaggctttctgggaaagggctctctaacaacccccgactcttcagagttgggactgttggtttgcctagaaccagcttccacttttcctgtactactgggc

SEQ ID NO: 205172 - DNA, 566 bp, Homo sapiens
caccaccttaagagctgtaacactcaccgcaaaggcctgcagcttcactcctgagccagcgagaccatgaacccaccagaaggaagaaactctgaacacatctgaacatcagaaagaacaaactccggacacaccacctttaagaactgtaacactcaccgcaaaggtctgcggcttcattcttgaagtcaatgagaccaagaacccaccaattctggacacattttggcgaccacgaagggactttcacctattgccaagcggtgagacaatcgccgagcagtgagaccatcgcctattgccgagcagtgagacaatcgcctatcgccaagcagtgagtaccatcagaccccttttgcttgctattctgtcctgtttttccttagaattcaggrgcttaataccgggcacctgttggccagttaaaagtgactagcgcggctgccggactatagacacgggtgtcaggctttctgggaaagggctctctaacaacccccgactcttcagagttgggactgttggtttgcctagaaccagcttccacttttcctgtactactgggc

SEQ ID NO: 205173 - DNA, 598 bp, Homo sapiens
cccagtccaaatcaaaagatcccaccacttttccttatcaaaggcaatatcccttagagcctgaagctcataaaagattacagaatattggtaaacatttgaaagctcaaggcttagtaaagaaatgcagcagtccctgcaacaacccaattctgggagtacaaaaaccgaatggtcagtagagactagtgsaagatcttagactcatcaatgaggcagtaattctgggcgctcctccttaaaggaccggtgcttcaaatacgcacatgtgtggccctcaaccctgccacttttctcccagaggatgaggaaccaatcgagcatgactgccaacaaattatagtccagacttatgctgcccaagatgatctcttagaagcccccttaactaatcctgaccttaacctatataatgatagaagttcatttgtggagaataagatatgaaaggcaagttacgccacagttagtgatgtaaccatacttgaaagcaagcctcttccccaagggaccagtgcccagttagcagaactagtggcacttacccaaggcctagaactaacaaaaggaaaaaaataaatatgtacacagatagcaa

SEQ ID NO: 205174 - DNA, 598 bp, Homo sapiens
cccagtccaaatcaaaagatcccaccacttttccttatcaaaggcaatatcccttagagcctgaagctcataaaagattacagaatattggtaaacatttgaaagctcaaggcttagtaaagaaatgcagcagtccctgcaacaacccaattctgggagtacaaaaaccgaatggtcagtagagactagtggaagatcttagactcatcaatgaggcagtaattctgggcgctcytccttaaaggaccggtgcttcaaatacgcacatgtgtggccctcaaccctgccacttttctcccagaggatgaggaaccaatcgagcatgactgccaacaaattatagtccagacttatgctgcccaagatgatctcttagaagcccccttaactaatcctgaccttaacctatataatgatagaagttcatttgtggagaataagatatgaaaggcaagttacgccacagttagtgatgtaaccatacttgaaagcaagcctcttccccaagggaccagtgcccagttagcagaactagtggcacttacccaaggcctagaactaacaaaaggaaaaaaataaatatgtacacagatagcaa

SEQ ID NO: 205175 - DNA, 549 bp, Homo sapiens
acttagtaaaataaaatatacattaatagaacatttattttataacaacacaaaacaataaattgctggataatacactcctttgtcttaggaaaactcagaagatctcagactataatttgtacaaagttaaattattgacactaatttttatctaatgtatttgaatccttcataaaacattttccccatgaggcttgtagaatattagaaaaagaattaaaccttctttctagttttctgttatatgatactagttcttattatatcaaaatattcagcctctgagtatatgaaaataatcagtagtttacagttctgattatgtgaaaatactcagtaccacrgaatgtcattttgtgggtttcattttaagttaaaaattaaaaaattaaataactttgcttcaagaaaataaaccaaatttaaacattcttgagaatacttacctatggtgatttattattactctttgaagcatttttggttattgaattatttgcataactaaagaaccacttcttaatgcaaagcaatgaggaaatcatt

SEQ ID NO: 205176 - DNA, 534 bp, Homo sapiens
tttttcatctgggagatatggacccagaattcattcagttagcaaaagttactagtgaaaaaacatgctttgcagcatcctcatttaactggcaataaaactatatcagattatcatttaaattagaaaaggtagatgattggttgtccatcgacctccatgcaaatgaatcatcattctcttactgggcttggagagaactacaatgtataaaaatggtgattaaaatataactttataaaaatgtttcccttttccttttttaaaaaaagagtttactatctacagaaacaaaaaaatcttcatatttacatcaagataactatcatgacatatataataatatgaaataaaatattgaaagtgagtatcaactttttaaatagaggtttggctcacagcataaacaagtgtagataaacaaacaaaccaaaacaaaacaaacaaaaaaaaagactttcaataataaccsaatcttcaaacaatctctctataatctccccggccagaagaagcatgactgacaatgggcca

SEQ ID NO: 205177 - DNA, 481 bp, Homo sapiens
gtgtttccacaaagtgttttctagcagctgggagaggtagccggctgagctctgtgttgaaacacatgctctcgtgtcttttattttatttcctaactgctctggctaggacttccagtcattactatattgaatgagagtgacgaaattagacattctaatcttccagtacttagaggaaaagctttctgcttctctccattctgtatgatgttagctctggagatgtcatatatggcttttattatgctgaaatgtgttccttcagttcctaatttgytgcggttttatcatgagagggatgtttaatattattaagtacttttctgcatctattgagatgatcatatagttttcgttttttattctgttgatgtgatgtatcacaatcattgatttgcatatgttgaatcatccttgcatctctgggacaaatcccacatgattatggtgtgttacctttttgatgagtttttgaatt

SEQ ID NO: 205178 - DNA, 594 bp, Homo sapiens
gtgtgtggagctgcaaaactctacttgggatcatctgtctttggttacctcctatttctttccctgtttgcactgggctgtgaaaattctgatgtggcaggactaactgtctcctaccaagggtatgttccctcattaaatagtttgaggatattggtttgtttaattaaatcaattattggtggagttgcaaaaaaggaatttgatttttaaacatcataactatggtaagcaacttagtattttattgtggaataactgacaatacytagaatctgttattgtcaccaaaatttatcatctcctttgattgtagagaaatataaaaattgctaaacccatattttacactagagaaccaacctgattaatttagaaaaacaacatgatagcagaaatacaaaccttgaataatgcctctgtctattcttaatgaaatgatgtacatgtggtttaaactaatccaacttcaattttcccatcttaaaaacagaagtaataactaccttttaaacttttgtaaggtttaagcaagctaacatacatgaaagtgaatgctacttgcctgacacaagctaaatgtgccattcatgg

SEQ ID NO: 205179 - DNA, 594 bp, Homo sapiens
gtgtgtggagctgcaaaactctacttgggatcatctgtctttggttacctcctatttctttccctgtttgcactgggctgtgaaaattctgatgtggcaggactaactgtctcctaccaagggtatgttccctcattaaatagtttgaggatattggtttgtttaattaaatcaattattggtggagttgcaaaaaaggaatttgatttttaaacatcataactatggtaagcaacttagtattttattgtggaataactgacaatacctagaatctgttattgtcaccaaaatttatcatctcctttgattgtagagaaatataaaaattgctaaacccatattttacactagagaaccaacctgattaatttagaaaaacaacatgatagcagaaatacaaaccttgaataatgcctctgtctattcttaatgaaatgatgtacatgtggtttaaactaatccaacttcaattttcccatcttaaaaacagaagtaataactaccttttaaacttytgtaaggtttaagcaagctaacatacatgaaagtgaatgctacttgcctgacacaagctaaatgtgccattcatgg

SEQ ID NO: 205180 - DNA, 506 bp, Homo sapiens
catacaggcatttccatacaccctctgaaatctaggcagaggttccaaaacgctcaattcttgacttctgtgcacccacaggctcaatactacatggaagctccaaggcttggggcttccacattctgaagcggcagcccaaactgtatcttggccccttttagtcatagctggagttgctgggatgcagagcaccaagtccctggactgcacacagcagaaggaccctgagcctggcccacgaaaccattttttctcctaaacctcagggcctgtgatgggagggactgctgcaaagttctctgacgtgccctggagacatytttccccattgtcttgggggttaacatttggctccttgttacttggtcaaatttctgcagccagcttgaatttctcctcagaaaatgagattttcttttctatcacattgtcagggtgcaaatttcccaaacttttatgctctgttttccttttaaaactcaatgcctttaacagcctccaag

SEQ ID NO: 205181 - DNA, 318 bp, Homo sapiens
ctttcttaagtgaaaatataacatgaaagccaattccaagccactggagggggmgaaaataactgttacaggggctggaccgaaacagagacatagtgcttcccctttgaagtatggccacctgtgaactcctattgatcttgggcagccaagcttcaaaggaataaggctgcacttctcccccacctggccactgcgtggtataacacttttgagtcagcaggggctactttgaagttaaaatttggattaaaaagctaaattgtgagaggtgaatagctcataaggtagcttttaaaacaaatatgatttgagatc

SEQ ID NO: 205182 - DNA, 553 bp, Homo sapiens
ggacctctgggataaccactgtcacctaaaaattaattcacrttaaatataattttaaggtattgttaggtacatcataataaacataagcactacttacccaataatccaaccaccagtgatcaatctatcttcaaacagatggtgtcatgacaaattagacaaaatgtggaaatcatggcaagatcctaggaaatgtaaacagatgtttacagcacaatgatcatgatcacgttcaatttatgcattcatagagtgctggttccttctgcctcaaagggatatttattttgtgaaaggagttttaatgcctacatgggtgtaatcaacaggtctctcaacattaaaaacactttttgctaattgaagcatcttacatactataaatgtgtgtgtctataggaaagagatataacacattttctctgctcagactttactcatatgtgtcatgtaatttgggcttcacatttcttcaattgaattacacgcacacacacatgcacacacacacacaaattgaacctcaagaaaacaaaagtaatgtgataat

SEQ ID NO: 205183 - DNA, 355 bp, Homo sapiens
tttcttgcctcttcttggcttctgatgtctggcaatccttaacattccatggcttgtagatgcatcactctaatctctgcctgcatcattacatggtgttctctccatgtggttctgtgtccaaaactccctcttatagggacacaagtcacatctgagttagggcccaccctaattcastataacttcatcttaacttgcttacatttacaaagaccacacaaagaccatatttcctcataagatcacaatcgcaggttccaagcagatgtgaattttgttggagcactattcaactcattacagggaattaaataaataaattcagtgtttaatggtaccaggataagatagt

SEQ ID NO: 205184 - DNA, 553 bp, Homo sapiens
ggacctctgggataaccactgtcacctaaaaattaattcacattaaatataattttaaggtattgttaggtacatcataataaacataagcactacttacccaataatccaaccaccagtgatcaatctatcttcaaacagatggtgtcatgacaaattagacaaaatgtggaaatcatggcaagatcctaggaaatgtaaacagatgtttacagcacaatgatcatgatcacgttcaatttatgcattcatagagtgctggttccttctgcctcaaagggatatttattttgtgaaaggagttttaatgccyacatgggtgtaatcaacaggtctctcaacattaaaaacactttttgctaattgaagcatcttacatactataaatgtgtgtgtctataggaaagagatataacacattttctctgctcagactttactcatatgtgtcatgtaatttgggcttcacatttcttcaattgaattacacgcacacacacatgcacacacacacacaaattgaacctcaagaaaacaaaagtaatgtgataat

SEQ ID NO: 205185 - DNA, 553 bp, Homo sapiens
ggacctctgggataaccactgtcacctaaaaattaattcacattaaatataattttaaggtattgttaggtacatcataataaacataagcactacttacccaataatccaaccaccagtgatcaatctatcttcaaacagatggtgtcatgacaaattagacaaaatgtggaaatcatggcaagatcctaggaaatgtaaacagatgtttacagcacaatgatcatgatcacgttcaatttatgcattcatagagtgctggttccttctgcctcaaagggatatttattttgtgaaaggagttttaatgcctacatgggtgtaatcaacaggtctctcaacattaaaaacactttttgctaattgaagcatcttacatactataaatgtgtgtgtctataggaaagagatataacacatwttctctgctcagactttactcatatgtgtcatgtaatttgggcttcacatttcttcaattgaattacacgcacacacacatgcacacacacacacaaattgaacctcaagaaaacaaaagtaatgtgataat

SEQ ID NO: 205186 - DNA, 524 bp, Homo sapiens
gaattccaaattatgggtatcaaagccgctctaatttggccaaaattccttgcagctgcaaaagaggaaacaaaaacaaaaacatgctgttggyttctgtctttgctttctgtcttaaaaacaaaacaaaacaaaagttctttcatttacttttcttccaccctataccttcttccccctttgccatctgtagtaccaaaaaatctagagaaggcttctagtgatttgaacccctttaaagagttcagaacaaagatgctactcaccacttttggggtgttctgtttactgtgtggattttcaagagtcataggcaggttcttcttaggtctaaagttcggttttcctgtattgcatgacctgaactctttgattttgagactaccagagattacattgttctgtgagaggatttgaccttggcacgtgtaatggtgcatgacagctgcaaagtaggagtggcagagcacagtttacaggaagtggtcttggctgttgttattgttgttgtttttctcctacgc

SEQ ID NO: 205187 - DNA, 524 bp, Homo sapiens
gaattccaaattatgggtatcaaagccgctctaatttggccaaaattccttgcagctgcaaaagaggaaacaaaaacaaaaacatgctgttggtttctgtctttgctttctgtcttaaaaacaaaacaaaacraaagttctttcatttacttttcttccaccctataccttcttccccctttgccatctgtagtaccaaaaaatctagagaaggcttctagtgatttgaacccctttaaagagttcagaacaaagatgctactcaccacttttggggtgttctgtttactgtgtggattttcaagagtcataggcaggttcttcttaggtctaaagttcggttttcctgtattgcatgacctgaactctttgattttgagactaccagagattacattgttctgtgagaggatttgaccttggcacgtgtaatggtgcatgacagctgcaaagtaggagtggcagagcacagtttacaggaagtggtcttggctgttgttattgttgttgtttttctcctacgc

SEQ ID NO: 205188 - DNA, 511 bp, Homo sapiens
tgaccaactttatctgacttggtcaaattggaatgagaattccaaattatgggtatcaaagccgctctaatttggccaaaattccttgcagctgcaaaagaggaaacaaaaacaaaaacatgctgttggtttctgtctttgctttctgtcttaaaaacaaaacaaaacaaaagttctttcatttacttttcttccaccctataccttcttccccctttgccatctgtagtaccaaaaaatctagagaaggcttctagtgatttgaacccctttaaagagttcagaacaaagatgcyactcaccacttttggggtgttctgtttactgtgtggattttcaagagtcataggcaggttcttcttaggtctaaagttcggttttcctgtattgcatgacctgaactctttgattttgagactaccagagattacattgttctgtgagaggatttgaccttggcacgtgtaatggtgcatgacagctgcaaagtaggagtggcagagcacagttt

SEQ ID NO: 205189 - DNA, 511 bp, Homo sapiens
tgaccaactttatctgacttggtcaaattggaatgagaattccaaattatgggtatcaaagccgctctaatttggccaaaattccttgcagctgcaaaagaggaaacaaaaacaaaaacatgctgttggtttctgtctttgctttctgtcttaaaaacaaaacaaaacaaaagttctttcatttacttttcttccaccctataccttcttccccctttgccatctgtagtaccaaaaaatctagagaaggcttctagtgatttgaacccctttaaagagttcagaacaaagatgctactcaccrcttttggggtgttctgtttactgtgtggattttcaagagtcataggcaggttcttcttaggtctaaagttcggttttcctgtattgcatgacctgaactctttgattttgagactaccagagattacattgttctgtgagaggatttgaccttggcacgtgtaatggtgcatgacagctgcaaagtaggagtggcagagcacagttt

SEQ ID NO: 205190 - DNA, 510 bp, Homo sapiens
attctctttcgtttctcttatcacacattcagcttttacacatgtgatatttgtatggttctatgytttgaatgtgctcacctcagacaaaatttcttagctctatatttagaacgaaggttcttcggtcctggattgttccatgtaatatgtgcctggcttggtattgtgatcccctaaaatctgagataggtctcagttggtttagaaagtttattttgccaaggtgaggatgcatgcccatgccacagcctcaggaggtcctgaggacaagtgtccaaggtggtaggggcacagcttggttttataaatgtcagggagacataagacatcaatcaatatgtgtaagatgtacatttgttcattctgaaaaggtgagacagtttgaggcaaaggtggggcaactctaagcaatgagggggcttccaggttgtaggtagataagagacaaatggctgcatttttttgagtttctgattagcctctccaaatgagggaatcagataaatg

SEQ ID NO: 205191 - DNA, 549 bp, Homo sapiens
agtggttgagccagtttctcaagttgttctttgccttctgtttatcagggaagtcagagtatgtagtcaccttcctcttacaaacagctagtctacctggacatagcgtttgggtatagtattattctccaccactccagggaaatatattttacaaccagaagaaggggccacattatttgtctttgtgtyaccagggcctggcactgacggccagaaaagcatgcaatatttatgggatatgccgtgatctcattatgccatcaggagactggtgctgtggccccaaatgctaaaatgtgccatggaatctgtctccttatttagtagctgggatgaagtcttgagcatctcaagctcaaattcaggaacaactaaacagaaatgtaggtgagagttgagagcaagaaacaggcttgttcaataaatcagagaagggacaaattcatccaagtcagaaagggagagtctcctgtcaaaggaaaattgcactggacagagttaagaggcaaggaagattttattcaagactattgtaataggggtcaa

SEQ ID NO: 205192 - DNA, 549 bp, Homo sapiens
agtggttgagccagtttctcaagttgttctttgccttctgtttatcagggaagtcagagtatgtagtcaccttcctcttacaaacagctagtctacctggacatagcgtttgggtatagtattattctccaccactccagggaaatatattttacaaccagaagaaggggccacattatttgtctttgtgtcaycagggcctggcactgacggccagaaaagcatgcaatatttatgggatatgccgtgatctcattatgccatcaggagactggtgctgtggccccaaatgctaaaatgtgccatggaatctgtctccttatttagtagctgggatgaagtcttgagcatctcaagctcaaattcaggaacaactaaacagaaatgtaggtgagagttgagagcaagaaacaggcttgttcaataaatcagagaagggacaaattcatccaagtcagaaagggagagtctcctgtcaaaggaaaattgcactggacagagttaagaggcaaggaagattttattcaagactattgtaataggggtcaa

SEQ ID NO: 205193 - DNA, 549 bp, Homo sapiens
agtggttgagccagtttctcaagttgttctttgccttctgtttatcagggaagtcagagtatgtagtcaccttcctcttacaaacagctagtctacctggacatagcgtttgggtatagtattattctccaccactccagggaaatatattttacaaccagaagaaggggccacattatttgtctttgtgtcaccagggcctggcactgacggccagaaaagcatgcaatatttatgggatatgccrtgatctcattatgccatcaggagactggtgctgtggccccaaatgctaaaatgtgccatggaatctgtctccttatttagtagctgggatgaagtcttgagcatctcaagctcaaattcaggaacaactaaacagaaatgtaggtgagagttgagagcaagaaacaggcttgttcaataaatcagagaagggacaaattcatccaagtcagaaagggagagtctcctgtcaaaggaaaattgcactggacagagttaagaggcaaggaagattttattcaagactattgtaataggggtcaa

SEQ ID NO: 205194 - DNA, 549 bp, Homo sapiens
agtggttgagccagtttctcaagttgttctttgccttctgtttatcagggaagtcagagtatgtagtcaccttcctcttacaaacagctagtctacctggacatagcgtttgggtatagtattattctccaccactccagggaaatatattttacaaccagaagaaggggccacattatttgtctttgtgtcaccagggcctggcactgacggccagaaaagcatgcaatatttatgggatatgccgtgatctcattatgccatcaggagactggtgctgtggccccamatgctaaaatgtgccatggaatctgtctccttatttagtagctgggatgaagtcttgagcatctcaagctcaaattcaggaacaactaaacagaaatgtaggtgagagttgagagcaagaaacaggcttgttcaataaatcagagaagggacaaattcatccaagtcagaaagggagagtctcctgtcaaaggaaaattgcactggacagagttaagaggcaaggaagattttattcaagactattgtaataggggtcaa

SEQ ID NO: 205195 - DNA, 206 bp, Homo sapiens
aattccttttctccttcctccccccaaaacctgtggtgccaggatgacatataagcttctgacctctgttgggggtgggrgaattatcactttgtgattctccccatgtacacattaaataatttgtatgccttttctctgattaatctgccttttgtgtgttgattttttagtgaatcttcaaaagttgaagatgaagttttctc

SEQ ID NO: 205196 - DNA, 193 bp, Homo sapiens
cattgtctcttccacccaaaatctcccagtycaggagtaaaagtagctctacaaatagtaattatggtgtcatgggatagaactgcaacagaaatcctgatcaaagatgaaacatacatggatttgaccattcaggactcagaatatacacagtgcaggaagcaacagcagcattcatggatttagtgaattc

SEQ ID NO: 205197 - DNA, 516 bp, Homo sapiens
actttcatgtaattttggaataagcttttaaaaactgagagcagcaagaacagcatgtgaacacagatgggctggggggaggggcagattgaattgggtgaagtttatacgaataaaaaagaagaggggattttacgaatgctactttcaaaggcaaaagacctagtcaaagcacttatttttgctttcttaattccttacctgctactgcaaataaagagcagcaaaattaaaagaaaaaaaagctatgtgctgtaaatacctttaaagacacttctttagtagttcattgtgttgcatacatcataatgtsttgctgggcaggctgcccagctcaacttccagtctcacggttctgtgagatgaaaagtgaaatgtaatatttacaatcctgggaatgaattaatccctggcaaaatagaaggatttgattttcttatctgctcatatctagctggctttgtacctaagaatggtaccagggatctgtttctatttgtcgccacaggacaggga

SEQ ID NO: 205198 - DNA, 432 bp, Homo sapiens
aattcattaaactccttttcctttataaattatccagtctcatttgtgtatttatcagcagcatgaaaacgaactaatacagagaatgtggaatttgttttcattgattgttaaagtgcaacaagttctccatccatgtttttgctgactrctgacaacactttaagactcctcatgtgtgaagtaagagtttcactgagatagtgcctacattttctattctgttaaaagacatctattatttccagggtagtattgcttttcagtatgacagcaaaatacaccatcccatcatgagttattttattgcagccaacgtcaaggtagtgtaggctactgttcagatgcagggcatcacagctcctaaggcaggggatttcagaaagcactttctatataatagcaggaaaccatctgttctgaagcaaccca

SEQ ID NO: 205199 - DNA, 539 bp, Homo sapiens
tgaaactgtgttttcctcaaaacatctattttcatcttaacaatggttaagatgagacaatggttgcctgtacatggaagatagctttctacttctttaacttttcaagttttaaataatgtacacttagtactttcataatcacaaaacttttctgttttgttaaaattccacagtgtactttgggaggccgaggagggtggatcatgaggtcaagagattgagaccatcctggccaacatggtgaaaccccgtctctactaaaaatacaaaaattagccgggcatggtggcaggtggctgtagttccagctactcgggaggctgaggcaggagaatggtgtgaamccagaaggtggaggttgcagtgagccgagatcgcaccactgcactccagcctgggcaatagagcgagactccatctcaaaaaaaaaaaaaaaattccacagtgtaggtcctcaatttaaacacaattggcatatctggcataacatacagtatgtataaataggaaaacaaggggagagctggcatgtgatc

SEQ ID NO: 205200 - DNA, 539 bp, Homo sapiens
tgaaactgtgttttcctcaaaacatctattttcatcttaacaatggttaagatgagacaatggttgcctgtacatggaagatagctttctacttctttaacttttcaagttttaaataatgtacacttagtactttcataatcacaaaacttttctgttttgttaaaattccacagtgtactttgggaggccgaggagggtggatcatgaggtcaagagattgagaccatcctggccaacatggtgaaaccccgtctctactaaaaatacaaaaattagccgggcatggtggcaggtggctgtagttccagctactcgggaggctgaggcaggagaatggtgtgaaaccagaaggtggaggttgcagtgagccgagatcgcaccactgcactccagcctgggcaatagagygagactccatctcaaaaaaaaaaaaaaaattccacagtgtaggtcctcaatttaaacacaattggcatatctggcataacatacagtatgtataaataggaaaacaaggggagagctggcatgtgatc

SEQ ID NO: 205201 - DNA, 628 bp, Homo sapiens
caaacacacacattagccaggcctacacayggttgggatcatcactatcactgtcttccatttccacatcttatcccactggaagtctttgaggtaaataacacacaaggagctgtagtcatcttctatgataacaatacctttttctgagtacctcctgaaggagctgccttaggctattttacagttaacttttttcttagaaggaatatactcaaaaataaaaatatccctggtagtctagtgtttaggactttttaaaaggccaggcacagtggctcacacttttaatcccaacactttgggagcctgaggcagaaggatcacttgaacccaagagttcaagaccagctgggcaacatagcaagacctccatccctaccaaaaaaaaaaaaaattagctgggcatggtagcccgcacctgtggtcccatctacttgggaggctgagataggaggatagtttgagcccaggaagtagacgctgcagtgagctatgattgtgccactgcactccagcctgggtgacagagtgagaccctgtctcagaaaaaaaagaaaagaaaaataaaataaccataaaaagcatagtaaatacatgaaccagcaacatagtcatttattatcat

SEQ ID NO: 205202 - DNA, 584 bp, Homo sapiens
gcctaaattcatcaaggaattgagaatttgggggcgttggaggcagtagactttctttgcctggggaatagtctcacttttcaccttcatttgtcactagatataaaattcctctaaaagctcaagtaagcaggcatacaagtagcttactgatatttctgtattattattgctctgtaaaattaacatttattgaagattaactatgtgctacagacttcacatatatcatctcatttcattctcatgaaacatcctcaggaaaaaaaatatatctcaaccatgattttcagttaaggaaactggtattccaagagagaatcagtaagctgcccaagatgacagagccagtaggtggaaaagaaaggatgtgaattcacctctatctcatacacacacacacatacacacacttacacacacaccattttgtttggattcatcaaaaagggagcacatgaaaaaactgctgggaaatctatgtgtgataaaatatagtsagtttgcttttacaatgattactgggaggaatttatatttgtaaagtgagttgtcatgaaatcaggtgatgaattcgatctata

SEQ ID NO: 205203 - DNA, 535 bp, Homo sapiens
tctttaccataaatatttaaattcgttaccactattgtctctttataagtaaaattactagttgctattataaatgattattcaatcacttttcatttttggggggttcagtacaaagttagtaacaaataaacaatattggccttggcaatgcaagaggagctcaagtcctccagggcacatcaggaaaaggctaaatgacagctgtgctgtgagtggacagaatacagctctcatacagactattgagtatttgatgttcttcaacaatttcattaatcttcagtttttttcctctttgaagtgaaagtctgctatgactttcaagtttcttttgaaataattatagattcacaggaagttgcaaaaggtacagggatgtcttaagtactcytcactaattccagtggtgacatcttacatagctatagagcattatcaaaacctggaaactgacataggtacaattcagaaagcttactcagatagcaaccgttttgtatgcattcatttttgtatgtgtgtatgcgtgtgc

SEQ ID NO: 205204 - DNA, 535 bp, Homo sapiens
tctttaccataaatatttaaattcgttaccactattgtctctttataagtaaaattactagttgctattataaatgattattcaatcacttttcatttttggggggttcagtacaaagttagtaacaaataaacaatattggccttggcaatgcaagaggagctcaagtcctccagggcacatcaggaaaaggctaaatgacagctgtgctgtgagtggacagaatacagctctcatacagactattgagtatttgatgttcttcaacaatttcattaatcttcagtttttttcctctttgaagtgaaagtctgctatgactttcaagtttcttttgaaataattatagattcacaggaagttgcaaaaggtacagggatgtcttaagtactcttcactaattccagtggtgacatctyacatagctatagagcattatcaaaacctggaaactgacataggtacaattcagaaagcttactcagatagcaaccgttttgtatgcattcatttttgtatgtgtgtatgcgtgtgc

SEQ ID NO: 205205 - DNA, 622 bp, Homo sapiens
aataagctgattatccacaaatacgtaagtggtaattctctgtttaaytctctttcttttccttttgggtggagcctttgaggaatccccttggcctgcatctcatcatttatgaaatttctaagtgtgtgtcgaatgtaaatatgagccaagtcctgtagattcctgacagtgattccttacagatttgtagtggtgagggttagatttaattttatataaggtttgaataattgttaagcttatgtaacctgatctgaatttgcacttcctctatgaaaacttcacttatctaataaggaaatcaaatgctttgtagacctatttaccttacttttgttgcaatcactgttgctgggttgctgtatatatattccgggcaatatatgagtgcaataacaatacaaaatattgagtaatttagctttttaaaatcccacaaattttatgaaattttacagccctgctacttttgcttttgaatctcttgccaaaagacacgagtaaaatatctgcttctctcatagagattttaagagcacagcaagtgaattattaaaataggaagtatgtacttaatacaactctttatatggaccctttacattttcagtattttaaa

SEQ ID NO: 205206 - DNA, 614 bp, Homo sapiens
gattatccacaaatacgtaagtggtaattctctgtttaattctctttcttttccttttgggtggagcctttgaggaatccccttggcctgcatctcatcatttatgaaatttctaagtgtgtgtcgaatgtaaatatgagccaagtcctgtagattcctgacagtgattccttacagatttgtagtggtgagggttagatttaattttatrtaaggtttgaataattgttaagcttatgtaacctgatctgaatttgcacttcctctatgaaaacttcacttatctaataaggaaatcaaatgctttgtagacctatttaccttacttttgttgcaatcactgttgctgggttgctgtatatatattccgggcaatatatgagtgcaataacaatacaaaatattgagtaatttagctttttaaaatcccacaaattttatgaaattttacagccctgctacttttgcttttgaatctcttgccaaaagacacgagtaaaatatctgcttctctcatagagattttaagagcacagcaagtgaattattaaaataggaagtatgtacttaatacaactctttatatggaccctttacattttcagtattttaaa

SEQ ID NO: 205207 - DNA, 614 bp, Homo sapiens
gattatccacaaatacgtaagtggtaattctctgtttaattctctttcttttccttttgggtggagcctttgaggaatccccttggcctgcatctcatcatttatgaaatttctaagtgtgtgtcgaatgtaaatatgagccaagtcctgtagattcctgacagtgattccttacagatttgtagtggtgagggttagatttaattttatataaggtttgaataattgttaagcttatgtaacctgatctgaatttgcacttcctctatgaaaacttcacttatctaataaggaaatcaaatgctttgtagacctatttaccttacttttgttgcaatcactgttgctgggttgctgtatatatattccggrcaatatatgagtgcaataacaatacaaaatattgagtaatttagctttttaaaatcccacaaattttatgaaattttacagccctgctacttttgcttttgaatctcttgccaaaagacacgagtaaaatatctgcttctctcatagagattttaagagcacagcaagtgaattattaaaataggaagtatgtacttaatacaactctttatatggaccctttacattttcagtattttaaa

SEQ ID NO: 205208 - DNA, 626 bp, Homo sapiens
attatccacaaatacgtaagtggtaattctctgtttaattctctttcttttccttttgggtggagcctttgaggaatccccttggcctgcatctcatcatttatgaaatttctaagtgtgtgtcgaatgtaaatatgagccaagtcctgtagattcctgacagtgattccttacagatttgtagtggtgagggttagatttaattttatataaggtttgaataattgttaagcttatgtaacctgatctgaatttgcacttcctctatgaaaacttcacttatctaataaggaaatcaaatgctttgtagacctatttaccttacttttgttgcaatcactgttgctgggttgctgtatatatattccgggcaatatatgagtgcaataacaatacaaaatattgartaatttagctttttaaaatcccacaaattttatgaaattttacagccctgctacttttgcttttgaatctcttgccaaaagacacgagtaaaatatctgcttctctcatagagattttaagagcacagcaagtgaattattaaaataggaagtatgtacttaatacaactctttatatggaccctttacattttcagtattttaaaaaatgaggttacc

SEQ ID NO: 205209 - DNA, 626 bp, Homo sapiens
attatccacaaatacgtaagtggtaattctctgtttaattctctttcttttccttttgggtggagcctttgaggaatccccttggcctgcatctcatcatttatgaaatttctaagtgtgtgtcgaatgtaaatatgagccaagtcctgtagattcctgacagtgattccttacagatttgtagtggtgagggttagatttaattttatataaggtttgaataattgttaagcttatgtaacctgatctgaatttgcacttcctctatgaaaacttcacttatctaataaggaaatcaaatgctttgtagacctatttaccttacttttgttgcaatcactgttgctgggttgctgtatatatattccgggcaatatatgagtgcaataacaatacaaaatattgagtaatttagcttttwaaaatcccacaaattttatgaaattttacagccctgctacttttgcttttgaatctcttgccaaaagacacgagtaaaatatctgcttctctcatagagattttaagagcacagcaagtgaattattaaaataggaagtatgtacttaatacaactctttatatggaccctttacattttcagtattttaaaaaatgaggttacc

SEQ ID NO: 205210 - DNA, 540 bp, Homo sapiens
gtttttatctggaaaacctggggaaagttatctgtcccatctaccctgctgtttttttgttttgttttgttttttgttgttttttttttctcggttggagctgctgtttagatgatgcttttactatgtaggagagagtttttgttaaggatatatttgargattggcttttccatattgtctttcattctttgaccttggcaaagtgtaaagtagattttcatgatcattgcatatttcttgtcattgaaatgtatcttttatgtttttaaatgcattcattttacactcatgactttatcattgactttaagaggtagaaataaaaaatgaaaataaaaaaatgaatgagatccacacacctgcgtgtgtgactatcacggcaatggtgacacccacaggcattgcgcccttcacggagagggcctggaaaatcaagactatcatggaggttcagttccacactccacccttccagggtggtttctccctgaaatcgtgtgtgaacccagagagaaacttccagtttctgtagaattc

SEQ ID NO: 205211 - DNA, 448 bp, Homo sapiens
actccaagtgtcctcttgcagattctataaaaagagattttcaaagctgctcaatcaaagaagggtttaactctgtgagatgaatgcatacatcacaaagatgtttctcagattgcttctgtctagattttatgtgaagatatttccttttctaccataggcctcaaagccctccaaatgtccacttgcagattccacaaaaggagtgtttcaaaactgctcaatcaaaagaaatgtttaactctgtgagatgaatgcacaaatcaaaaagaagtttctcacattgcttctgtctaggttttatrtgaggatatttccttttctaccataggccacaaagcactccaaatgtccacttgcagaatctacaaaaattgtgtttgcaaactgctcaatcaaaagaaaagttcaactctgtgagatgaacgcacacatcacaaagaagttt

SEQ ID NO: 205212 - DNA, 440 bp, Homo sapiens
tgttgaagggaaaagcaactttcaggagagtatgtatggactgctatttgtataaaattgcaaaaacagaccaaagaacactatccattcttcatggacatgcacactrggtattaaacatggatgggaagacacacattgacttcagaatagtggggagggaggcggtaactgggctagaaaagggacatataactcgaggttcagcatgaacattatggctgaatccgtagttttcttcccttaaactctggagcaaatgcatccaaaatctaccacgtttgaattttaactgggaggtacatgaaagtttgatatcattttcctttgcgcaatcctgtgtgtttgtaatattgaggcatattttttaaacacttgacacagcatgaaaggaagcttgcctacatggtaacaatggttatctttaggtagcagaattc

SEQ ID NO: 205213 - DNA, 440 bp, Homo sapiens
tgttgaagggaaaagcaactttcaggagagtatgtatggactgctatttgtataaaattgcaaaaacagaccaaagaacactatccattcttcatggacatgcacactgggtattaaacatggatgggaagacacacattgacttcagaatagtggggagggaggcggtaactgggctagaaaagggacatataactcgaggktcagcatgaacattatggctgaatccgtagttttcttcccttaaactctggagcaaatgcatccaaaatctaccacgtttgaattttaactgggaggtacatgaaagtttgatatcattttcctttgcgcaatcctgtgtgtttgtaatattgaggcatattttttaaacacttgacacagcatgaaaggaagcttgcctacatggtaacaatggttatctttaggtagcagaattc

SEQ ID NO: 205214 - DNA, 440 bp, Homo sapiens
tgttgaagggaaaagcaactttcaggagagtatgtatggactgctatttgtataaaattgcaaaaacagaccaaagaacactatccattcttcatggacatgcacactgggtattaaacatggatgggaagacacacattgacttcagaatagtggggagggaggcggtaactgggctagaaaagggacatataactcgaggttcagcatgaacattatggytgaatccgtagttttcttcccttaaactctggagcaaatgcatccaaaatctaccacgtttgaattttaactgggaggtacatgaaagtttgatatcattttcctttgcgcaatcctgtgtgtttgtaatattgaggcatattttttaaacacttgacacagcatgaaaggaagcttgcctacatggtaacaatggttatctttaggtagcagaattc

SEQ ID NO: 205215 - DNA, 440 bp, Homo sapiens
tgttgaagggaaaagcaactttcaggagagtatgtatggactgctatttgtataaaattgcaaaaacagaccaaagaacactatccattcttcatggacatgcacactgggtattaaacatggatgggaagacacacattgacttcagaatagtggggagggaggcggtaactgggctagaaaagggacatataactcgaggttcagcatgaacattatggctgaatccgtagttttcttcccttaaactctggagcaaatgcatccaaaatctaccacgtttgaattttaactgggaggtacatgaaagtttgatatcattwtcctttgcgcaatcctgtgtgtttgtaatattgaggcatattttttaaacacttgacacagcatgaaaggaagcttgcctacatggtaacaatggttatctttaggtagcagaattc

SEQ ID NO: 205216 - DNA, 308 bp, Homo sapiens
gcgtgttctccttccaccatgtgaggacacagctaggaggtgccckctataaggaacaggccctcaacagacacccaatctgccactacctcgaccttccacttgccagcatccagacctatgagacataaatttctgctgcttataagccccctaggctaaggtattttgttacggcagcccaaatggaatgagacagcctctgaccatcttgagcaactcacttatctgctgaactctccacagatttaactgtgatgaaatcccttcatcagatgtatattgaacacctactctgtataaggaca

SEQ ID NO: 205217 - DNA, 308 bp, Homo sapiens
gcgtgttctccttccaccatgtgaggacacagctaggaggtgcccgctataaggaacaggccctcaacagacacccaatctgccactacctcgaccttccacttgmcagcatccagacctatgagacataaatttctgctgcttataagccccctaggctaaggtattttgttacggcagcccaaatggaatgagacagcctctgaccatcttgagcaactcacttatctgctgaactctccacagatttaactgtgatgaaatcccttcatcagatgtatattgaacacctactctgtataaggaca

SEQ ID NO: 205218 - DNA, 431 bp, Homo sapiens
gggtgagtgtggctcccactgagtacctagcaggttttccccaggttatctacaaasagtgacttttgaactgtttcatgtgagtcacgagtatgatgtccccagcttttttcttattcctcatgattggcttggtcattcagcctacattgtaggcttgcattttctattactataaaaagtgggacagggattttgatacggatttgagttagcttacagattgctttggataatatgacaccttattaaccaaaagccctgccttctcaaaatgacccttttcgatcttgggttttagcaatgtttcataatgccctgtatcccaaagctcactatattgcccaggctgttcttgaactcctggcctggcagtcctcccacctcaggctcctgaatggaggagattactgtcatgagccacagtgcct

SEQ ID NO: 205219 - DNA, 377 bp, Homo sapiens
acgatttcttgttgacacggagatggttgagttcttctacaataaatctatgggagaggcargttgtgatgagttggaagtgttggttgccttcatggtctcaaagttctctgtcaagttcacctcagcactgctgtacttctgttctgctgtcaggttgggaatgcttggccagtagtggttctccacacggtcctcaactaccggtgcttctctgatccactgcctgtcagaaatgcaattgtagcagaggaggctggtaaggggacagaagccagagatggtaactggccaccgcctggctgaggaagagagtggtgggctctcaatcctagctcacatgccaagtgccattctcatcccagcacccagcggtg

SEQ ID NO: 205220 - DNA, 377 bp, Homo sapiens
acgatttcttgttgacacggagatggttgagttcttctacaataaatctatgggagaggcaggttgtgatgagttggaagtgttggttgccttcatggtctcaaagttctctgtcaagttcacctcagcactgctgtactkctgttctgctgtcaggttgggaatgcttggccagtagtggttctccacacggtcctcaactaccggtgcttctctgatccactgcctgtcagaaatgcaattgtagcagaggaggctggtaaggggacagaagccagagatggtaactggccaccgcctggctgaggaagagagtggtgggctctcaatcctagctcacatgccaagtgccattctcatcccagcacccagcggtg

SEQ ID NO: 205221 - DNA, 377 bp, Homo sapiens
acgatttcttgttgacacggagatggttgagttcttctacaataaatctatgggagaggcaggttgtgatgagttggaagtgttggttgccttcatggtctcaaagttctctgtcaagttcacctcagcactgctgtacttctgttctgctgtcaggttgggaatgcttggccagtagtggttctccacacggtcctcaactrccggtgcttctctgatccactgcctgtcagaaatgcaattgtagcagaggaggctggtaaggggacagaagccagagatggtaactggccaccgcctggctgaggaagagagtggtgggctctcaatcctagctcacatgccaagtgccattctcatcccagcacccagcggtg

SEQ ID NO: 205222 - DNA, 377 bp, Homo sapiens
acgatttcttgttgacacggagatggttgagttcttctacaataaatctatgggagaggcaggttgtgatgagttggaagtgttggttgccttcatggtctcaaagttctctgtcaagttcacctcagcactgctgtacttctgttctgctgtcaggttgggaatgcttggccagtagtggttctccacacggtcctcaactaccggtgcttctctgatccactgcctgycagaaatgcaattgtagcagaggaggctggtaaggggacagaagccagagatggtaactggccaccgcctggctgaggaagagagtggtgggctctcaatcctagctcacatgccaagtgccattctcatcccagcacccagcggtg

SEQ ID NO: 205223 - DNA, 570 bp, Homo sapiens
cttgaacccaggagttggaggttgcagtgagccaagatcactccaatgcactccagccgggcgacggagcaagactccatcaaaaaaaaaaaaaaaaaaaaaaaaaaaaagaaagaaagaaaatracacttgagtactaggcttgatacctgggagatgaaatgatccgtacaacaaacccccatgatgtgagtctagctatataacaaacctgtacatgtacccctgaatctaatataaaagttaaaaatttaaaatatatatattttaagtgccaccttcaacagttcctgaacagactgtggtggctgagggacaggtccaggcagattctagattttccataaaatgggaaatcctctcaaaagccagtgaatgccagcatggtccagggaacaaaaccaagagcccttgaccctccaagagaaagtggaggtgactatttaggccacagaaggaggaagaggcagagtatgggaccagcctcagagctgttggggtcagagccatcagccaggcatgtggtagaaagatcatttaggaccatgtgggtcccttggggagggtgag

SEQ ID NO: 205224 - DNA, 613 bp, Homo sapiens
ataaaagatctctaagcaaagtccaggatcccatgttttcactgctgattattgtgagaaatttagagaagaaccaataccagtcctactcaaactattccaaaaaatagaggaggaggagaaaacatttccagactcattctatgaggccagcattactctgacaccaaaaccagacaaggacaggttaaaaaaaaaaaaaactacaggccaatatcccttatgaatattgattcaaaaatcctcaacaaaatactagcaaaccaaattcaacagcatattaaaaacatcattcatcatgaccaagtgggatttatcccagcaatgcaaggatggttaacatatataatcaatcaacctgataaatcatatstccagaatgaaggacaaaaaccatataatcatttcaattgatgctgaaaaagcatttgatcaaattcaatatcccttcatgataaaaaccctcaaaaacttgagtatagaaggaacacaccacaacacaaaaaggccatatacggtagatccacagctagtatcatactgaatgggcaaaagctgaaagtctttcctgtaagatctgggacacaacaaagatgcccactgtcaccactgt

SEQ ID NO: 205225 - DNA, 630 bp, Homo sapiens
tagggattatggcaattacaattggagatgagattttggtgggaatacagagccaaaccatattgatatagtatactaacatttttcgaagacagtagatttaggtgatcctcccccaaccacaaaagtaactaaatgagatgatggatatgttaaattgcttacttgtagtaattattttactatgtatgtgtatatcaaaatatcatattatacacttaaatttatataataaaaaacaaacaacactgggaggctgaggtgggcagatcacgaggtcaggagattaagactatcctggccaacacggtgaaaccctgtctctactaaaaatacaaaaattagctgggtgtggtggtgtgtgcctgtaatcccagctactcgggaggctgaggcaggagaatygcttgaaccagggaggcagagtttgcagtgaacggagattgtgccactgcactgtagcttggcgacaaagtgagactctgtctcaaaaaaaaaaaaaaaaaaaggaccacagaataataatgatctaaaatccagagatttttaaaaactaaataacagaacatattattgtggtttttaaaatccttataaagttcacacataatcatgtagataattcaagca

SEQ ID NO: 205226 - DNA, 630 bp, Homo sapiens
tagggattatggcaattacaattggagatgagattttggtgggaatacagagccaaaccatattgatatagtatactaacatttttcgaagacagtagatttaggtgatcctcccccaaccacaaaagtaactaaatgagatgatggatatgttaaattgcttacttgtagtaattattttactatgtatgtgtatatcaaaatatcatattatacacttaaatttatataataaaaaacaaacaacactgggaggctgaggtgggcagatcacgaggtcaggagattaagactatcctggccaacacggtgaaaccctgtctctactaaaaatacaaaaattagctgggtgtggtggtgtgtgcctgtaatcccagctactcgggaggctgaggcaggagaattgcttgaaccagggaggcagagtttgcagtgaacggagattgtgccactgcastgtagcttggcgacaaagtgagactctgtctcaaaaaaaaaaaaaaaaaaaggaccacagaataataatgatctaaaatccagagatttttaaaaactaaataacagaacatattattgtggtttttaaaatccttataaagttcacacataatcatgtagataattcaagca

SEQ ID NO: 205227 - DNA, 518 bp, Homo sapiens
gtgtagaaattcattgtagaaattcaaccatgagaacctgaaaaataaataataaaggaagagggagacagccttaaaattcctcagacacaaccaatgtatagcactgttaatactttgtgcacatcccaccataattctttactatatacaatattgacataggtaaagttatttagcaagattgaagaaaccttccggatcactgagccagacacatatgtctgggaactcatgtagtaacacactatggcacatggctttgtctttgggtactctcaacaagtcctttgggtggtctcctcccaggctttctttgccattacctacctccctgatgctaagaccttgcttgcattctggcatcacatagaccactcctcctggaccttactctgcrcttcaaaattgattcctttcttttccatgaccccagctacatttctattccctctctgccctgctcatctctgggtttcaagaaggaaagaatataaccaactcattctcaccaaaat

SEQ ID NO: 205228 - DNA, 592 bp, Homo sapiens
gccattttccttggcagagggaagacaagtcatgaagaccttccctaacagaatttcagacacctaatggggactgtggacatacttttagctaagatttgggaccatctccaaaatccccaaatcctaccacatatcagcctcctataagggaatcatgtaatcccaccttaggtaatattagatttttaaagtttcctatcactagtttataacaaaacttcatgaatggaaacacacacaaagttaatggagttgacttgatgatggtctgttctcccttttctttacttctcccttttcttcttttttcaggctaggactgatcttggacaaaactattccttcccttttctagggccagatttctaggcacccaaatttctgttttctcatcctccctgtrtcttctccagcctaggattactgtgtccaacctcctgggcttccttctttccctgccacaccactcctccagtttagctggctctaactttcatcatctccagatctaaggcttcaactaactaatatggttaactaatcagtgttacagtgtgatggtggaagactatgggttctcccaggtaac

SEQ ID NO: 205229 - DNA, 460 bp, Homo sapiens
ggaactcacaatttatcctagaagttatcttttgttttgataaatcccaacctaacataagcttttttctgcagtgatgtgcagtttgcccccaataaaggtacctaaaaaatacatcacttgagtagtctgatctatcaggacttgcctaggttctggattttctgtgttatttaaggtctgtattttaaccttattaaaatggataagtggagaagaaataatgacagactttcagtgttagaagtacgcaccacaggatttcagaaggttaaagcactgccagaaccaaggaattatccagccagcccaaattccctgtactacaaatgggaaaactgggagttcatcccatagctgccttcatcaggtagagtatgggacttttatctgattgttgtatatrtggggctgggggtgtttctccatttcagttgtaaactccttttgggcaagatct

SEQ ID NO: 205230 - DNA, 602 bp, Homo sapiens
gcattttatctttttcccctagaagtaatttactgacttaatggaaatgtgagagatttgctttaacagattttaygaatttaagcaaaaggtcctgctgaacatttctctgtggagagaggttattctttggccaggagacatttgtaatagttcagtaatctaaaaagatttgccttggacttgctaatttgctcaatctcttaagtaacaaaagggtctaaactctgcctctcaatttaaagtgagccccataaaagcttccagcttagcaagaaatctaagattccacaatgtgagcttttaaccccatttcaatttgtgcaagtgtaatatcattagggactgatttctactacaaggtagttgtggcttttcatggaatttagttctttatctgagaggtggcatggtagtggaacacacagaagaggacaaagtactgcagaaataaagtttgtttttcctgaaggatcagaatctgggaacactgcaaattcataagaaagcctcattcctatgaaacttttggttaaatactgccaagtaagaattggcaaaatctggattggactttgattagggggtgaaaaattcaactg

SEQ ID NO: 205231 - DNA, 376 bp, Homo sapiens
ctagagtggttatggaggctccgctacrtaggcatgcttgattaaatcattggccatttgtgactgaactcaatggccaccttctctcttccctccccagaggtctgggagtgggactgaaagttccaaccctctaatcacatggtgggttcctctggcaaccagccccatcctctaaagtggactcaggtgtggtggactcaggtgtggttgaaatgcttattatgaagaacaaaagacactcctctcaccccatcacttggaaaattccaagggttttagaagctctgtgccaggaattggagttagaacaaatacatatttctcattatatcacagttacaaaactctatcattatgtatttttggtagtcta

SEQ ID NO: 205232 - DNA, 525 bp, Homo sapiens
tgcctcagcctcccaaagtgttgggattacagaagtgaggcaccatgcccaaccatgaaagagagggtttgaaaaacacagcccaaataaaatctagacctcagctgaaaaggaaatggagatccagattcaggactgaaacttttgtggccactgaaacctctggagttggaagaacacagtgggtttgtgctggtaccaarcattgaatcagagaaggaatgccagatagtcggcagtctgtcattttaaatcctgctggtgacattttaaatctggtgacatacaccacatatgtcaacctgaaggaaaaaactgatacaaaattaatggaagtaggaagtgtatttgggccaagtttaaggagtatagcccagaagcattgattcaagttgccctgaatatattctctgattagcagcagttacaagttatatcttatttattcatttatttaaatttaatttaatttgttttttttgagacagagtctcactcagtcactggggctggagtgcaatggcg

SEQ ID NO: 205233 - DNA, 516 bp, Homo sapiens
tagttagttaggatgccctataaacttgtttgaaaatttgacatgagaaataaagtgtcacttttaatgagacacacttggtttcatatgtttatttctagtttgaacccacttatgaagaattcccttccttagagagygattctttgttggattacagctgtatgcagaggctgggagcaaaactggggtaggtgacaaggcctggggtgtcaggcttcatactgcccttcttgtaaaaggcagatgagctccatagaagggatgaatggagaccattttaaagcctagggttgaatgaaacatagtgaatatttgtttaagaaacactgtattcctgtacttgttgagctgaattactcagctgtattgacttttttactcaacacaatggaaatttcttttggtataatgagctagaaagaaacaacatttacgtgattcagtgttacttctataagcctaaaacaattggtcattcaggcatcaaatcctgtctagtagaaacttggtggc

SEQ ID NO: 205234 - DNA, 521 bp, Homo sapiens
tcttcttgaactatcccaaaaattggaaaaggagagaattctccctgactcattctatgagaccagcatcaccataccaaaatcagacaatgacacaacaaagataagaaaactagaggccaatatccgtgatgaatatagatgcaaaaattctcaactcaatactggcaaactgaatccaacattatattaaaaaaattaatatacaaagatcaagcgggatttatcctagggatgcaaggatcaacctatgcaaatcagtaaatgtgatacatcgcattaacagaatgaagaaatgatctatgaagaatgaaggtttataatcaactcaatagatgcagaagtagcatttgacaaaattcaacatcccttcatgataaaaacaacaaactaggcatagaaataatatacttcaaaataataaaggccatatatgacacacccagagctaacatcatactgaatagggaaaagctggaasgctttcccctaagaactagaacaagacaaggatgcccact

SEQ ID NO: 205235 - DNA, 521 bp, Homo sapiens
tcttcttgaactatcccaaaaattggaaaaggagagaattctccctgactcattctatgagaccagcatcaccataccaaaatcagacaatgacacaacaaagataagaaaactagaggccaatatccgtgatgaatatagatgcaaaaattctcaactcaatactggcaaactgaatccaacattatattaaaaaaattaatatacaaagatcaagcgggatttatcctagggatgcaaggatcaacctatgcaaatcagtaaatgtgatacatcgcattaacagaatgaagaaatgatctatgaagaatgaaggtttataatcaactcaatagatgcagaagtagcatttgacaaaattcaacatcccttcatgataaaaacaacaaactaggcatagaaataatatacttcaaaataataaaggccatatatgacacacccagagctaacatcatactgaatagggaaaagctggaacsctttcccctaagaactagaacaagacaaggatgcccact

SEQ ID NO: 205236 - DNA, 477 bp, Homo sapiens
gaattctctaaaatgaacacaataatctagatgtaatccaaagagttcagactacagttacaccattgactagtatagtacattgcttaaatcacattcatagttttagttcccatatcccactaatgtcttacatttggcttttggtcacctaaaaaatcaccatctttctcctggactattgctatagccttctaagtagcctccatggatccacatgtccttttcaccactactcctctccttctctgctgctcttctgctcttctgttcatctgctcatggaacctggggtttgaggtttatatgggtacatgataggggacatggcaggccaaatggcaacttttgggcgagaaaacaggaatgcytgttcccatttagggccacaggtttccaggcttgagagtggggcctttgccagggaaccaccctcttctacccattatttccctgtctccggtccatatcaaagat

SEQ ID NO: 205237 - DNA, 300 bp, Homo sapiens
agaaaccagggaaaactcctaagctcctgatctatgctgcatccagtctgcaaagtgggattccctctcggttcagtgacagtggatctgggacagattacactctcaccatcagcagcctgcagcctgaagattttgcaacttattactgtcaacagagtgacagtacccctcccacagtgttacaagtcataacataaaccccaaggaagcagatgyatgaggctgggctgccccaatgctccttctggtgcctctgtctgctgagggaagttctcaaactcagtcaggtttggaaag

SEQ ID NO: 205238 - DNA, 300 bp, Homo sapiens
agaaaccagggaaaactcctaagctcctgatctatgctgcatccagtctgcaaagtgggattccctctcggttcagtgacagtggatctgggacagattacactctcaccatcagcagcctgcagcctgaagattttgcaacttattactgtcaacagagtgacagtacccctcccacagtgttacaagtcataacataaaccccaaggaagcagatgcrtgaggctgggctgccccaatgctccttctggtgcctctgtctgctgagggaagttctcaaactcagtcaggtttggaaag

SEQ ID NO: 205239 - DNA, 603 bp, Homo sapiens
cagcctactgtgggaccttgtgatcctgtaagttaatatgtaataatatgtaataaacccatatatatatatatagaacttattagttctgtccctctagagaaccctcactaatacagattttggtaccaggaatggttctgcaggaacagaatattaaggttggagttcttttgttggttttggggtttctggatttggctgctaaatatgattagatcccaaaatgctaaggactctacttttaatagtgtagagaacattgacagttcttggcatgaaaggtttaaagagctatgcaaaacaaattcattcgacactaatgaatcatcgctcrtgagaggcaaggagtttagtgactctgtacctaatacccttgacaaacaccttgcaaaatagatttgtgaggagagcgcctgcatctttgaagagccctgtaaaggctcttctctgtatgtcagttctaatggtgagaactgcagtcactcagttacaaaagttaaatacaatttggaataattggatcctgaagtggcaggggccaagtggtagcactcaaccctcaaaggcatggtgggtgtagctaccgtaatgggcagaaaa

SEQ ID NO: 205240 - DNA, 603 bp, Homo sapiens
cagcctactgtgggaccttgtgatcctgtaagttaatatgtaataatatgtaataaacccatatatatatatatagaacttattagttctgtccctctagagaaccctcactaatacagattttggtaccaggaatggttctgcaggaacagaatattaaggttggagttcttttgttggttttggggtttctggatttggctgctaaatatgattagatcccaaaatgctaaggactctacttttaatagtgtagagaacattgacagttcttggcatgaaaggtttaaagagctatgcaaaacaaattcattcgacactaatgaatcatcgctcatgagaggcaaggagtttagtgactctgtacctaatacccttgacaaacaccttgcaaaatagatttgtgaggasagcgcctgcatctttgaagagccctgtaaaggctcttctctgtatgtcagttctaatggtgagaactgcagtcactcagttacaaaagttaaatacaatttggaataattggatcctgaagtggcaggggccaagtggtagcactcaaccctcaaaggcatggtgggtgtagctaccgtaatgggcagaaaa

SEQ ID NO: 205241 - DNA, 603 bp, Homo sapiens
cagcctactgtgggaccttgtgatcctgtaagttaatatgtaataatatgtaataaacccatatatatatatatagaacttattagttctgtccctctagagaaccctcactaatacagattttggtaccaggaatggttctgcaggaacagaatattaaggttggagttcttttgttggttttggggtttctggatttggctgctaaatatgattagatcccaaaatgctaaggactctacttttaatagtgtagagaacattgacagttcttggcatgaaaggtttaaagagctatgcaaaacaaattcattcgacactaatgaatcatcgctcatgagaggcaaggagtttagtgactctgtacctaatacccttgacaaacaccttgcaaaatagatttgtgaggagagcrcctgcatctttgaagagccctgtaaaggctcttctctgtatgtcagttctaatggtgagaactgcagtcactcagttacaaaagttaaatacaatttggaataattggatcctgaagtggcaggggccaagtggtagcactcaaccctcaaaggcatggtgggtgtagctaccgtaatgggcagaaaa

SEQ ID NO: 205242 - DNA, 276 bp, Homo sapiens
tggacctctctgagtggtcaaaaactgaagatatttgtaccctgtgtgagtgttgaccaacaagtgacttcagsagaggaggattttgataatcaagtggataagatgacccgttctgtggataccactcagcctctttcctcagacacccctgtcattgtccaatgagaccatgaacatagtggccatggtgtcagggatggaggctatgcatggattcagcaatgtggacttccactcaccaaggctgaactgtctgtggccactgctgagtgc

SEQ ID NO: 205243 - DNA, 454 bp, Homo sapiens
tacatatatatatacacacacacatacatatatatatgcacacacacacacacatatatatatttatttataaaggggagtttattaacttacaggatcataagttacacaatgggctgtctgcaaactgatgagaaaggagagccatggagtccaatgtttgagggcaggaagaaaccagcatgggagaaagatgtaggctgggaggctaggccagtctctccttttcaaatttttctgcctgmtttatatttgctggcagcagattagattgtgcccaccagattaagggtgggtctgccttccccagcccactgactcaaatgttaatctctttcggcaacactctcacagacacaccctggatcaatacttcatatctctcaatcctatcaagttgacactcattattaaccatgtcactccctttcatatatatatgtatatagtcctt

SEQ ID NO: 205244 - DNA, 454 bp, Homo sapiens
tacatatatatatacacacacacatacatatatatatgcacacacacacacacatatatatatttatttataaaggggagtttattaacttacaggatcataagttacacaatgggctgtctgcaaactgatgagaaaggagagccatggagtccaatgtttgagggcaggaagaaaccagcatgggagaaagatgtaggctgggaggctaggccagtctctccttttcaaatttttctgcctgatttatatttgctggcagcakattagattgtgcccaccagattaagggtgggtctgccttccccagcccactgactcaaatgttaatctctttcggcaacactctcacagacacaccctggatcaatacttcatatctctcaatcctatcaagttgacactcattattaaccatgtcactccctttcatatatatatgtatatagtcctt

SEQ ID NO: 205245 - DNA, 454 bp, Homo sapiens
tacatatatatatacacacacacatacatatatatatgcacacacacacacacatatatatatttatttataaaggggagtttattaacttacaggatcataagttacacaatgggctgtctgcaaactgatgagaaaggagagccatggagtccaatgtttgagggcaggaagaaaccagcatgggagaaagatgtaggctgggaggctaggccagtctctccttttcaaatttttctgcctgatttatatttgctggcagcagattagattgtrcccaccagattaagggtgggtctgccttccccagcccactgactcaaatgttaatctctttcggcaacactctcacagacacaccctggatcaatacttcatatctctcaatcctatcaagttgacactcattattaaccatgtcactccctttcatatatatatgtatatagtcctt

SEQ ID NO: 205246 - DNA, 454 bp, Homo sapiens
tacatatatatatacacacacacatacatatatatatgcacacacacacacacatatatatatttatttataaaggggagtttattaacttacaggatcataagttacacaatgggctgtctgcaaactgatgagaaaggagagccatggagtccaatgtttgagggcaggaagaaaccagcatgggagaaagatgtaggctgggaggctaggccagtctctccttttcaaatttttctgcctgatttatatttgctggcagcagattagattgtgcccaccagattaagggtgggtctgccttccccagcccactgactcaaatgttaatctctttcggcaacactctcacagacacaccctggatcaatacttcatatcyctcaatcctatcaagttgacactcattattaaccatgtcactccctttcatatatatatgtatatagtcctt

SEQ ID NO: 205247 - DNA, 486 bp, Homo sapiens
tgtcaactggtggagagttttccccaggagacatttgtcaatgtctagggttattgtggggatgtcaagactggtggaggtgtgaaatttagaggtcaaacgaaacacctagcattgytagggcagcctcccacaacaaagaatcctctggtcctaaaggtaagtagcaccaaggttgagaaaccataatctagacagtaaacactatgtagctattccaagtgctcaggaaaacacatcagtgccctggagaggaaaagtgtaaacattttaattgctgtacatggtgacacaaaatcatgttgttaatctaagtggaaggggctgaagcacaaaacgtaattcaaagagtttacttgatccacaatgaggacagctgcctggaagaaacagacccaagtatccttggatatgaactccctttggagctttgcaacaagcagtttcttaaaggcaaaaaagggtccagaagtgggatgatgcaaa

SEQ ID NO: 205248 - DNA, 218 bp, Homo sapiens
aacatcttttaaagaaaatgtaaagtttaggatatacatcaaaatcagcagagccactaaataaataaataggcattgtaaaayagcaagagaaaatttaaatggatttctaaaaaatattgacacctatgatttttaaaatatgtttaagaaatcccgtatttcacagggcagcctttcacaacacagatatgttaggacataaaggtccttctgtt

SEQ ID NO: 205249 - DNA, 218 bp, Homo sapiens
aacatcttttaaagaaaatgtaaagtttaggatatacatcaaaatcagcagagccactaaataaataaataggcattgtaaaacarcaagagaaaatttaaatggatttctaaaaaatattgacacctatgatttttaaaatatgtttaagaaatcccgtatttcacagggcagcctttcacaacacagatatgttaggacataaaggtccttctgtt

SEQ ID NO: 205250 - DNA, 218 bp, Homo sapiens
aacatcttttaaagaaaatgtaaagtttaggatatacatcaaaatcagcagagccactaaataaataaataggcattgtaaaacagcaagagaaaatttaaatggatttctaaaaaatattgacmcctatgatttttaaaatatgtttaagaaatcccgtatttcacagggcagcctttcacaacacagatatgttaggacataaaggtccttctgtt

SEQ ID NO: 205251 - DNA, 357 bp, Homo sapiens
aggtatataaattatctggcaaagtgacatatcctgacacattctccaggatagatcamatgttaggtcacaaagcgagtcttaacaaaattaagacaaaggaaatcaagaacctgttttgaccaaaagtaggatgaagcaaaaattcaatagtagaaggaaaacagaaacatttacaaatatatggaaattaaacaacatactattgaacaaccaatgagtcaaagaagaaatcaaaaagaatattagaaaagaagctgacaaaaaaataaaaaaacacaacatagcaaaacttagaaatgcagcaaaggcagtactaaagagggaaatttatagcaataaatgcctaccttaaaa

SEQ ID NO: 205252 - DNA, 357 bp, Homo sapiens
aggtatataaattatctggcaaagtgacatatcctgacacattctccaggatagatcaaatgttaggtcacaaagcgagtcttaacaaawttaagacaaaggaaatcaagaacctgttttgaccaaaagtaggatgaagcaaaaattcaatagtagaaggaaaacagaaacatttacaaatatatggaaattaaacaacatactattgaacaaccaatgagtcaaagaagaaatcaaaaagaatattagaaaagaagctgacaaaaaaataaaaaaacacaacatagcaaaacttagaaatgcagcaaaggcagtactaaagagggaaatttatagcaataaatgcctaccttaaaa

SEQ ID NO: 205253 - DNA, 357 bp, Homo sapiens
aggtatataaattatctggcaaagtgacatatcctgacacattctccaggatagatcaaatgttaggtcacaaagcgagtcttaacaaaattaagacaaaggaaatcaagaacctgttttgaccaaaagtaggatgaagcaaaaattcaatagtagaaggaaaacagaaacatttacaaatatatggaaattaaacaacatactattgaacaaccaatgagtcaaagaagaaatcaaaaagaatattagaaaasaagctgacaaaaaaataaaaaaacacaacatagcaaaacttagaaatgcagcaaaggcagtactaaagagggaaatttatagcaataaatgcctaccttaaaa

SEQ ID NO: 205254 - DNA, 441 bp, Homo sapiens
aaatgcctaccttaaaaaagaagaaagatctcaaataaacaacctaactttacaactcaaggaactaaaaaaaagaaccaagcccaaacccagcaaaaggaaggaaataataaarattaagcaaataaaggatattttcacacacatattttcattataaccagaaagtagaaccaatgcaagtgaatagattaaaaaaaaactgtggtattactatacaatggaatatggcaattaaaaagagaaaagactcaaccaaataaaattaaaaatgaaaaagtagacattgcaattgatgccacagaaataaaaaagattattagagactgctgtgaattattatggtaataattggataacctagaaaaaaacaaattactggaaatatacaacaaacaacactgaatcaaaaagaaatacaaaatatgaacaaatctatag

SEQ ID NO: 205255 - DNA, 441 bp, Homo sapiens
aaatgcctaccttaaaaaagaagaaagatctcaaataaacaacctaactttacaactcaaggaactaaaaaaaagaaccaagcccaaacccagcaaaaggaaggaaataataaaaattaagcaaataaaggatattttcacacacatattttcattataaccagaaagtagaaccaatgcaagtgaatagattaaaaaaaaactgtggtattactatacaatggaatatggcaattaaaaagagaaaagactcaaccaaataaaattaaaaatgaaaaagtagacattgyaattgatgccacagaaataaaaaagattattagagactgctgtgaattattatggtaataattggataacctagaaaaaaacaaattactggaaatatacaacaaacaacactgaatcaaaaagaaatacaaaatatgaacaaatctatag

SEQ ID NO: 205256 - DNA, 441 bp, Homo sapiens
aaatgcctaccttaaaaaagaagaaagatctcaaataaacaacctaactttacaactcaaggaactaaaaaaaagaaccaagcccaaacccagcaaaaggaaggaaataataaaaattaagcaaataaaggatattttcacacacatattttcattataaccagaaagtagaaccaatgcaagtgaatagattaaaaaaaaactgtggtattactatacaatggaatatggcaattaaaaagagaaaagactcaaccaaataaaattaaaaatgaaaaagtagacattgcaattgatgccacagaaataaaaaagattattagagactgctgtgaatkattatggtaataattggataacctagaaaaaaacaaattactggaaatatacaacaaacaacactgaatcaaaaagaaatacaaaatatgaacaaatctatag

SEQ ID NO: 205257 - DNA, 435 bp, Homo sapiens
aaaatccatatggaaccacaacggaccctgaatatccaaaacaatcctaagaaagagaaacagttagaggcctcacattttctgactttgaaatatactacaaagctacagcaatcscaatagtgtgatattaatgtaaaactaatcatatagatgaatggaacagaatggattattggaacagaatagaaagcccactgggagcgccaaggcgggcagatcacctaaggtcgggagttcaagaccagcctggctaacatggtgaaacccgtctctatgaaaaaatacaaaaattagctgggcatggttatgggcacctgtaattcagctacttgggaggctgaggtaggagaatcgcttgaacccaggaggaagaggttgcagtgagccaagatcacaccactgcactcccgccttggttacagagcaagactc

SEQ ID NO: 205258 - DNA, 582 bp, Homo sapiens
acaccactgcactcccgccttggttacagagcaagactccatctcaaaaagaaagaaagaaataagaaagaaagaaagaaagaaagaaagaaagaaagaaagaaagaaagaaggaargaaggaaggaaggaaggaaggaaggaaggaaggaaggaaggaaggaaagaaagcaagcccagaaataaacccacatgcatatagtcaaatgatctttgacgagggtgccaaaactatacaatggagaaaggataatttcttcaacaaatattgttgggaaaactggatatccatatgcaaaagaatgaaagtgaaccgttatcttaaaactgttcacaaatgttaactccaaatggattgaagacttaaatgtaagaactaaagctgtaaaactacaagaaaacataaagaaaggctttatcacattggtcgtggcaataattccttggatttgataccaaaagcacaggcaacaaaagcaaaaataggttagggtgattacatcaagataaaatgcttctgtgcaaaaaaggaaacaacagagtgaacaggcagcctatagaattggagaaaatatttgaaaac

SEQ ID NO: 205259 - DNA, 633 bp, Homo sapiens
aggaaggaaggaaggaaggaaagaaagcaagcccagaaataaacccacatgcatatagtcaaatgatctttgaygagggtgccaaaactatacaatggagaaaggataatttcttcaacaaatattgttgggaaaactggatatccatatgcaaaagaatgaaagtgaaccgttatcttaaaactgttcacaaatgttaactccaaatggattgaagacttaaatgtaagaactaaagctgtaaaactacaagaaaacataaagaaaggctttatcacattggtcgtggcaataattccttggatttgataccaaaagcacaggcaacaaaagcaaaaataggttagggtgattacatcaagataaaatgcttctgtgcaaaaaaggaaacaacagagtgaacaggcagcctatagaattggagaaaatatttgaaaaccgtatatgtgctaagggcttaatatccaaaatatataagaaacacctagaactcaaaagcaaataaacacataacccaattttaaaatggccaaattcttaaatagatatttttcaggaagacatgcaaatgaccaacagggatataaaaagatactcaacatcattaatcatcagggaaatgctaattaaaat

SEQ ID NO: 205260 - DNA, 390 bp, Homo sapiens
gtagatttttttgttatgtgttttttaattacaaaaatttctgtctgtatttagtttacattttagtaaggaaagasaaataagctaataaatggtaatgataaatgctgtaaggatatctagagcaataaaagaagttatggatatgggagtataattttagatagtgaagatttctgtattcaaatgccacatggaaaaaggactaaggggaatgaggagatgagtcatatggaatgcccaagacacagaaaaaggcaggcagagaaaataacaaggataaagacactgaagtaaaatcatgctttctatatttcaaaacagcagcaagtacactactgtgatagagcaggagtgaccaatgggaggctggagattttgtcagagata

SEQ ID NO: 205261 - DNA, 390 bp, Homo sapiens
gtagatttttttgttatgtgttttttaattacaaaaatttctgtctgtatttagtttacattttagtaaggaaagacaaataagctaataaatggtaatgataaatgctgtaaggatatctagagcaataaaagaagttatggatatgggartataattttagatagtgaagatttctgtattcaaatgccacatggaaaaaggactaaggggaatgaggagatgagtcatatggaatgcccaagacacagaaaaaggcaggcagagaaaataacaaggataaagacactgaagtaaaatcatgctttctatatttcaaaacagcagcaagtacactactgtgatagagcaggagtgaccaatgggaggctggagattttgtcagagata

SEQ ID NO: 205262 - DNA, 540 bp, Homo sapiens
gttatggatatgggagtataattttagatagtgaagatttctgtattcaaatgccacatgsaaaaaggactaaggggaatgaggagatgagtcatatggaatgcccaagacacagaaaaaggcaggcagagaaaataacaaggataaagacactgaagtaaaatcatgctttctatatttcaaaacagcagcaagtacactactgtgatagagcaggagtgaccaatgggaggctggagattttgtcagagatattgtcaaggctcaggatcgtacagggacttgtaagcctggaaagcactttgaattttattcagaatgagatgagaagccattgaaaagtttttaagcagatgagtaaaataatccaccttgtattttaagaggagcattctaccttctctgtggaatagagaggtggaagggaaagcttgaagcagagagagcagtgaagagtgtactgtaatattcttatgtgagaaatagtggagggaatgagaggtggtcagccttaaactgccatttgctctctgtatcagg

SEQ ID NO: 205263 - DNA, 390 bp, Homo sapiens
gtagatttttttgttatgtgttttttaattacaaaaatttctgtctgtatttagtttacattttagtaaggaaagacaaataagctaataaatggtaatgataaatgctgtaaggatatctagagcaataaaagaagttatggatatgggagtataattttagatagtgaagatttctgtattcaaatgccacatggaaaaaggactaaggggaatgaggagatgagtcatatggaatgcccaagacacagaaraaggcaggcagagaaaataacaaggataaagacactgaagtaaaatcatgctttctatatttcaaaacagcagcaagtacactactgtgatagagcaggagtgaccaatgggaggctggagattttgtcagagata

SEQ ID NO: 205264 - DNA, 540 bp, Homo sapiens
gttatggatatgggagtataattttagatagtgaagatttctgtattcaaatgccacatggaaaaaggactaaggggaatgaggagatgagtcatatggaatgcccaagacacagaaaaaggcaggcagagaaaataacaaggataaagacactgaagtaaaatcatgctttctatrtttcaaaacagcagcaagtacactactgtgatagagcaggagtgaccaatgggaggctggagattttgtcagagatattgtcaaggctcaggatcgtacagggacttgtaagcctggaaagcactttgaattttattcagaatgagatgagaagccattgaaaagtttttaagcagatgagtaaaataatccaccttgtattttaagaggagcattctaccttctctgtggaatagagaggtggaagggaaagcttgaagcagagagagcagtgaagagtgtactgtaatattcttatgtgagaaatagtggagggaatgagaggtggtcagccttaaactgccatttgctctctgtatcagg

SEQ ID NO: 205265 - DNA, 390 bp, Homo sapiens
gtagatttttttgttatgtgttttttaattacaaaaatttctgtctgtatttagtttacattttagtaaggaaagacaaataagctaataaatggtaatgataaatgctgtaaggatatctagagcaataaaagaagttatggatatgggagtataattttagatagtgaagatttctgtattcaaatgccacatggaaaaaggactaaggggaatgaggagatgagtcatatggaatgcccaagacacagaaaaaggcaggcagagaaaataacaaggataaagacactgaagtaaaatcatgctttctatatttcaaaacagcagcaagkacactactgtgatagagcaggagtgaccaatgggaggctggagattttgtcagagata

SEQ ID NO: 205266 - DNA, 604 bp, Homo sapiens
ttatggatatgggagtataattttagatagtgaagatttctgtattcaaatgccacatggaaaaaggactaaggggaatgaggagatgagtcatatggaatgcccaagacacagaaaaaggcaggcagagaaaataacaaggataaagacactgaagtaaaatcatgctttctatatttcaaaacagcagcaagtacactactgtgatagagcaggagtgaccaatgggaggctggagattttgtcagagatattgtcaaggctcaggatcgtacagggacttgtaagcctggaaagcactttgaattttattcagaatgagatgagaagccattgaaaagtttttaagcagatgmgtaaaataatccaccttgtattttaagaggagcattctaccttctctgtggaatagagaggtggaagggaaagcttgaagcagagagagcagtgaagagtgtactgtaatattcttatgtgagaaatagtggagggaatgagaggtggtcagccttaaactgccatttgctctctgtatcagggctcagggactttcagactctccagggattccttacagtttttacattcgtttctcagttgcaaa

SEQ ID NO: 205267 - DNA, 616 bp, Homo sapiens
ggtctattaaaacatatttgtagatgtgtaggtatsaaaaatgcttttagagatgggaagagaaaaaaactcatttgtttaacaagttctgatgggtgcttttcactaaaagagaaacatcatatgtttataacactcaggatgtaaattgcggtacatttcaaattacatgagaaactaaagaaaatatctgtttcgggtcactgaataattcattcttatttagtgtttgtccctaatttctgtgattttatgaataattcagagcaatgattttacctttctctacagctgtatttggtaaatgtccacattatttttgttgcaaagatgcagccaagtttcttagaataggaacaatgtttagaatgtattttttccataatgaaaaatattatgaaaggggaaactaagatatagcttacagggttctctattgtgataactaaaacatacttagcctcaagtaaaactgacatcttgctaactgttggtggtgaaggagaaagaagacaacactgaaccagactggggaaagatgaattcaaattagttagagatttgtcacccaaagcaaaacaaattcaagcttgaactgagttgacattggtagtta

SEQ ID NO: 205268 - DNA, 630 bp, Homo sapiens
tatattctggtactcaaggggaaaatgacatcatatagagtttaggtctattaaaacatatttgtagatgtgtaggtatgaaaaatgcttttagagatgggaagagaaaaaaactcatttgtttaacaagttctgatgggtgcttttcactaaaagagaaacatcatatgtttataacactcaggatgtaaattgcggtacatttcaaattacatgagaaactaaagaaaatatctgtttcgggtcactgaataattcattcttatttwgtgtttgtccctaatttctgtgattttatgaataattcagagcaatgattttacctttctctacagctgtatttggtaaatgtccacattatttttgttgcaaagatgcagccaagtttcttagaataggaacaatgtttagaatgtattttttccataatgaaaaatattatgaaaggggaaactaagatatagcttacagggttctctattgtgataactaaaacatacttagcctcaagtaaaactgacatcttgctaactgttggtggtgaaggagaaagaagacaacactgaaccagactggggaaagatgaattcaaattagttagagatttgtcacccaaagcaaaacaaattc

SEQ ID NO: 205269 - DNA, 413 bp, Homo sapiens
acagctcagaggagacccatagtgggtagctcctccctaggttgttctgtcaagtgttcagctctcaggagaaagggaaaccctggagagggttgctcctgtctgcagctggtagttcccagacatctctgcaggtctctgaagcattcagcagagaaaacagctggccctcccattgtctccagctatcagcagaaaggatagctccttcctgcctctawtcttccctcctctgccctctgccctgttctggctgagtcctgggcttttatggatgtcagaggggaggaaatgtatgcccattggtccatgggcagccatgggcgggcccaggaaaaacaccatgagttttgcctccagtctgcaggactggcagcctagcctgcaggtggggcttcactggggacccatca

SEQ ID NO: 205270 - DNA, 413 bp, Homo sapiens
acagctcagaggagacccatagtgggtagctcctccctaggttgttctgtcaagtgttcagctctcaggagaaagggaaaccctggagagggttgctcctgtctgcagctggtagttcccagacatctctgcaggtctctgaagcattcagcagagaaaacagctggccctcccattgtctccagctatcagcagaaaggatagctccttcctgcctctattcttccctcctctgccytctgccctgttctggctgagtcctgggcttttatggatgtcagaggggaggaaatgtatgcccattggtccatgggcagccatgggcgggcccaggaaaaacaccatgagttttgcctccagtctgcaggactggcagcctagcctgcaggtggggcttcactggggacccatca

SEQ ID NO: 205271 - DNA, 413 bp, Homo sapiens
acagctcagaggagacccatagtgggtagctcctccctaggttgttctgtcaagtgttcagctctcaggagaaagggaaaccctggagagggttgctcctgtctgcagctggtagttcccagacatctctgcaggtctctgaagcattcagcagagaaaacagctggccctcccattgtctccagctatcagcagaaaggatagctccttcctgcctctattcttccctcctctgccctctgccctgttctggctgagtcctgggcttttatggatgtcagaggggaggaaatgtatgcccattggtccatgggcagccatgggcgggcccargaaaaacaccatgagttttgcctccagtctgcaggactggcagcctagcctgcaggtggggcttcactggggacccatca

SEQ ID NO: 205272 - DNA, 413 bp, Homo sapiens
acagctcagaggagacccatagtgggtagctcctccctaggttgttctgtcaagtgttcagctctcaggagaaagggaaaccctggagagggttgctcctgtctgcagctggtagttcccagacatctctgcaggtctctgaagcattcagcagagaaaacagctggccctcccattgtctccagctatcagcagaaaggatagctccttcctgcctctattcttccctcctctgccctctgccctgttctggctgagtcctgggcttttatggatgtcagaggggaggaaatgtatgcccattggtccatgggcagccatgggcgggcccaggaaaaacaycatgagttttgcctccagtctgcaggactggcagcctagcctgcaggtggggcttcactggggacccatca

SEQ ID NO: 205273 - DNA, 554 bp, Homo sapiens
tcgtcaatgagctatacacattgtttgtcaccagaataactgaatcaagaggttccaactcattgtttcattcccatatacctgaacatctgggacatgaagaaatagtgtgtatgtgttaataggcaaagctgtagtaatgacttctacatattggaagcagttatctattttcctgttactaatttttacacaaaaatacctcagatgaatattgacagaaactcagaagtatggcataaactaataygaaggtaacgtagtaatggcagaaagttacagcttaaaagtttttacagtgggaagactattgtaatagtgagagccatgtataagtttgttttgaaatgataatgtacagctaaagagtataatgctcaaatttttgtatatgaagttttcgtaattcaacaagtagggttaagagacaataagaattacacagaatgttggattttatttcacgtctgttcctcttgtcagacattgccatctttcccctgtttcgtcaggtcttcagtaagttaacaacattcactctgtgaaaagtacca

SEQ ID NO: 205274 - DNA, 554 bp, Homo sapiens
tcgtcaatgagctatacacattgtttgtcaccagaataactgaatcaagaggttccaactcattgtttcattcccatatacctgaacatctgggacatgaagaaatagtgtgtatgtgttaataggcaaagctgtagtaatgacttctacatattggaagcagttatctattttcctgttactaatttttacacaaaaatacctcagatgaatattgacagaaactcagaagtatggcataaactaatacgaaggtaacgtagtaatggcagaaagttacagcttaaaagtttttacagtgggaagactattgtaatagtgagagccatgtataagtttgttttgaaatgataatgtacagctaaagagtataatgctcraatttttgtatatgaagttttcgtaattcaacaagtagggttaagagacaataagaattacacagaatgttggattttatttcacgtctgttcctcttgtcagacattgccatctttcccctgtttcgtcaggtcttcagtaagttaacaacattcactctgtgaaaagtacca

SEQ ID NO: 205275 - DNA, 551 bp, Homo sapiens
tggtatatttgtttatttagcactcattttatgttttctaattataaatataacgtattctcatattctsaaggtaataaatttgcaaattttaaattagtaggaagagtaaaaggaactaagatcccactgtccaaaggtaatcattattcaggttctgttcttttccttccatttggttctctgatattttcttcatggttgccattacatcacatattcaatattatgacccactttgtgtttcagtcagtgtctatacatacaactttgaatgatacaaatgtctcatagaaactaagtttaatcaaatcaagaaactaagtttaatgccagtctatatcaatgtaccgtttccttctagctaaatatttaggcttttccaaattttgttaacataaataactccaaagatatttttgttaacattttctcttagtgttactttcctaaggtagactttaacaatttactataacaaattatagaaaatgatcattttaaggttccttattcttgtactatttgtaaataatgttatcacctctttc

SEQ ID NO: 205276 - DNA, 551 bp, Homo sapiens
tggtatatttgtttatttagcactcattttatgttttctaattataaatataacgtattctcatattctgaaggtaataaatttgcaaattttaaattagtaggaagagtaaaaggaactaagatcccactgtccaaaggtaatcattattcaggttctgttcttttccttccatttggttctctgatattttcttcatggttgccattacatcacatattcaatattatgacccactttrtgtttcagtcagtgtctatacatacaactttgaatgatacaaatgtctcatagaaactaagtttaatcaaatcaagaaactaagtttaatgccagtctatatcaatgtaccgtttccttctagctaaatatttaggcttttccaaattttgttaacataaataactccaaagatatttttgttaacattttctcttagtgttactttcctaaggtagactttaacaatttactataacaaattatagaaaatgatcattttaaggttccttattcttgtactatttgtaaataatgttatcacctctttc

SEQ ID NO: 205277 - DNA, 551 bp, Homo sapiens
tggtatatttgtttatttagcactcattttatgttttctaattataaatataacgtattctcatattctgaaggtaataaatttgcaaattttaaattagtaggaagagtaaaaggaactaagatcccactgtccaaaggtaatcattattcaggttctgttcttttccttccatttggttctctgatattttcttcatggttgccattacatcacatattcaatattatgacccactttgtgtttcagtcagtgtctatacatacaactttgaatgatacaaatgtctcatagaaactaagtttaatcaaatcaagaaactaagtttaatgccagtctatatcaatgtaccgtttccttctagctaaatatttaggcttttccaaattttgttaacataaataactccaaagatatttttrttaacattttctcttagtgttactttcctaaggtagactttaacaatttactataacaaattatagaaaatgatcattttaaggttccttattcttgtactatttgtaaataatgttatcacctctttc

SEQ ID NO: 205278 - DNA, 496 bp, Homo sapiens
gttggtaagcgaatttaaccagaagagcagtagattcttttggaataatgacatagtggaaaataaaaacacatatacaccaagaaacaatttgtgaactaaaacatgattaaatttaatctattgccataaagtagaaaatgttcgaaacaaggaagactgtgtactttcagctaaactgaaaataaaatgacaacaaaaaagcaggactctccacaattcaagacttgctgcttctatgatgccacactcttgattatttacccctgctatatgaatgagtgagtgttaacactgatgtattacacctaaaagattggaagagcatctttgattccattccagtccaccacgtcgtgctagaaccagcacatctgccctccatagtaaatctccataaaattttactggggagaaaagaatcctctacatatgaggtagagatgtgaatcagacaagtccttaaatgyatgattcatctaactgcctctgaata

SEQ ID NO: 205279 - DNA, 584 bp, Homo sapiens
gataaggtgattaattttaaatatttcttttctaatacatgtattcaacgctataaatttctctctaagcactgctttcgacacatcccacaaactttgtaagttgtattttcattttcatttagttcaaaatacttattttgttgttgtkaagatttcttctttcatccacgtgttctttaatagtgtgttctttaatcataagacactcagtagatgtcaattatatccagttaattgacggtgctgtgtttactcttttttctgtctgcttgatatgtccatttttgatagaggggtgttgaagtcaccaactatgatagtggactcatgtttttctccttgcagttctattagatgttgcctcatgttttttgatgctccattgttaggcatctatacattaaggattgtcatgtctttataaggaactgacccctttatcattatgtaatacccatctttagccctgataactttctttgctctgaagtctagtctgtttaaagttaatatagctgttcccattttaaaaattagcatcagcatagtatatctttcagtatgtgctcttatagttaatg

SEQ ID NO: 205280 - DNA, 584 bp, Homo sapiens
gataaggtgattaattttaaatatttcttttctaatacatgtattcaacgctataaatttctctctaagcactgctttcgacacatcccacaaactttgtaagttgtattttcattttcatttagttcaaaatacttattttgttgttgtgaagatttcttctttcatccacgtgttctttaatagtgtgttctttaatcataagacactcagtagatgtcaattatatccagttaattgacggtgctgtgtttactcttttttctgtctgcttgatatgtccatttttgatagaggggtgttgaagtcaccaactatgatagtggactcatgtttttctccttgcagttctmttagatgttgcctcatgttttttgatgctccattgttaggcatctatacattaaggattgtcatgtctttataaggaactgacccctttatcattatgtaatacccatctttagccctgataactttctttgctctgaagtctagtctgtttaaagttaatatagctgttcccattttaaaaattagcatcagcatagtatatctttcagtatgtgctcttatagttaatg

SEQ ID NO: 205281 - DNA, 511 bp, Homo sapiens
tacgtatttggggcaaaaaatacaatatcctttgtgatatcccttggattgtaatatctgacctttgaccmcacatgttttaattatgcaactaattatcatgtaataaaggaaatacaacttcaagatggtagctttgtattttatatttaaaatcttagaaagttttattattgataaataaaaggattcaaaataatcctgaagtataatgatgttaaacatatagtttagaactagattaacaaaataataccatttgcataggtagggtgtctgatatgcttctaaattaatttgatttgtatattcttgaaaactcccacaagttatttgcatgtactaaatagatgttgctttttattctgaaagaatgagaatgaagataaaacataggttcatacattggtcaacatgcagaaaaaccaatattgattatttttacagttcattacatcattaatatattgggatttcccttttaccacagacaataatatatttcactatg

SEQ ID NO: 205282 - DNA, 616 bp, Homo sapiens
ctgatatgcttctaaattaatttgatttgtatattcttgaaaactcccacaagttatttgcatgtactaaatagatgttgctttttattctgaaagaatgagaatgaagataaaacataggttcatacattggtcaacatgcagaaaaaccaatattgattatttttacagttcattacatcattaatatattgggatttcccttttaccacagacaataatatatttcactatgcatgtttattgaaataygttttaaatagatatgcataacaaagtatatattagttcaagcagatgtttagggtcataaccgtcaagaaatttgagctgcccaggcgtgtggcaaaatcagagttactaatgattgttttattgtttctgcatttcagtcatagagtctggcagattgcaagtgtactgttattctgtaggaggtataaaatgttcatgatgttatcttgggcgaggcctccagcctggaagatcagcataactctgagttgctaatctggccagttcagtctttgtttttatagagaaaatcaaagatatatcaattgatgctagttgcaaattacagaaatgttgtgattagtatttttgaaagtcttat

SEQ ID NO: 205283 - DNA, 616 bp, Homo sapiens
ctgatatgcttctaaattaatttgatttgtatattcttgaaaactcccacaagttatttgcatgtactaaatagatgttgctttttattctgaaagaatgagaatgaagataaaacataggttcatacattggtcaacatgcagaaaaaccaatattgattatttttacagttcattacatcattaatatattgggatttcccttttaccacagacaataatatatttcactatgcatgtttattgaaatacgttttaaatagatwtgcataacaaagtatatattagttcaagcagatgtttagggtcataaccgtcaagaaatttgagctgcccaggcgtgtggcaaaatcagagttactaatgattgttttattgtttctgcatttcagtcatagagtctggcagattgcaagtgtactgttattctgtaggaggtataaaatgttcatgatgttatcttgggcgaggcctccagcctggaagatcagcataactctgagttgctaatctggccagttcagtctttgtttttatagagaaaatcaaagatatatcaattgatgctagttgcaaattacagaaatgttgtgattagtatttttgaaagtcttat

SEQ ID NO: 205284 - DNA, 545 bp, Homo sapiens
ttgataaataaaaggattcaaaataatcctgaagtataatgatgttaaacatatagtttagaactagattaacaaaataataccatttgcataggtagggtgtctgatatgcttctaaattaatttgatttgtatattcttgaaaactcccacaagttatttgcatgtactaaatagatgttgctttttattctgaaagaatgagaatgaagataaaacataggttcatacattggtcaacatgcagaaaaaccaatattgattatttttacagttcattacatcattaatatattgggatttcccttttaccacagacaataatatatttcactatgcatgtttattgaaatacgttttaaatagatatgcataacaaagtatatattagttcaagcagatgtttagggtcataaccgtcaagaaatttgagctgcccaggcgtgtggcaaaatcagagttactaatkattgttttattgtttctgcatttcagtcatagagtctggcagattgcaagtgtactgttattctgtaggaggtata

SEQ ID NO: 205285 - DNA, 545 bp, Homo sapiens
ttgataaataaaaggattcaaaataatcctgaagtataatgatgttaaacatatagtttagaactagattaacaaaataataccatttgcataggtagggtgtctgatatgcttctaaattaatttgatttgtatattcttgaaaactcccacaagttatttgcatgtactaaatagatgttgctttttattctgaaagaatgagaatgaagataaaacataggttcatacattggtcaacatgcagaaaaaccaatattgattatttttacagttcattacatcattaatatattgggatttcccttttaccacagacaataatatatttcactatgcatgtttattgaaatacgttttaaatagatatgcataacaaagtatatattagttcaagcagatgtttagggtcataaccgtcaagaaatttgagctgcccaggcgtgtggcaaaatcagagttactaatgattgttttattgtttctgcatttcagtcatagagtctggcagattgyaagtgtactgttattctgtaggaggtata

SEQ ID NO: 205286 - DNA, 545 bp, Homo sapiens
ttgataaataaaaggattcaaaataatcctgaagtataatgatgttaaacatatagtttagaactagattaacaaaataataccatttgcataggtagggtgtctgatatgcttctaaattaatttgatttgtatattcttgaaaactcccacaagttatttgcatgtactaaatagatgttgctttttattctgaaagaatgagaatgaagataaaacataggttcatacattggtcaacatgcagaaaaaccaatattgattatttttacagttcattacatcattaatatattgggatttcccttttaccacagacaataatatatttcactatgcatgtttattgaaatacgttttaaatagatatgcataacaaagtatatattagttcaagcagatgtttagggtcataaccgtcaagaaatttgagctgcccaggcgtgtggcaaaatcagagttactaatgattgttttattgtttctgcatttcagtcatagagtctggcagattgcaagtrtactgttattctgtaggaggtata

SEQ ID NO: 205287 - DNA, 470 bp, Homo sapiens
tgaccatctgaatctgaatcggactatagtggatggactgatgctaccctgcagccttacttccttaactttstttccccaggccctaatataaaccccaggaaaacaggcatacagctgtatgcatttggcagattactatccatttcattgttcagttgttctggaaaggcaccgaatgcaactgtagcctggaaacatttggaaaaatggtactgttcctgatatctttgtttcttcctaggtgacagttgaaggtgactttcctttgtacagttctgcctgctgttagcaattttccaaaattaaataccatattttgtgtttgataggcacagctgtgtctgttaccaagggcaagcccacttgcacaacactctgtgttcatttatatactgagaactttatttagaacccagttttacagaaaaaaatcaagttgggtgaaccaattttgagggcaatgaatt

SEQ ID NO: 205288 - DNA, 470 bp, Homo sapiens
tgaccatctgaatctgaatcggactatagtggatggactgatgctaccctgcagccttacttccttaactttgtttccccaggccctaatataaaccccaggaaaacaggcatacagctgtatgcatttggsagattactatccatttcattgttcagttgttctggaaaggcaccgaatgcaactgtagcctggaaacatttggaaaaatggtactgttcctgatatctttgtttcttcctaggtgacagttgaaggtgactttcctttgtacagttctgcctgctgttagcaattttccaaaattaaataccatattttgtgtttgataggcacagctgtgtctgttaccaagggcaagcccacttgcacaacactctgtgttcatttatatactgagaactttatttagaacccagttttacagaaaaaaatcaagttgggtgaaccaattttgagggcaatgaatt

SEQ ID NO: 205289 - DNA, 551 bp, Homo sapiens
ccaaaccactttcacctgttctgccaacataggatgtgtacctggtcactcctgttttgttttattgtatatatatatatatattttttttcaattaatcattggaaaaccccattttctcttttgggaaaaaaatctaatactgtctctaggtccttctgccaaacccagtgagacagattccagatgccaatgccattgcttatcaatatcacatggtatcactgtcagatgcacatcatgaaaaacttcatgcctgtctgctgctactgggatacccttgctggtagaagcctgtgccagagtggtgctcatgagatatcaaggatatagcccattttacatcatactcccatgttccatccttattccactaaacaatcayggagctagtaaggctgtgtttggatgagttactgcaagctaattttagtaggccaaataatgcatacagtaaactagagaatatttgctcgaaaatattatggtgccttgtccttattttagactcacctcgtaagtagtaactaaaacaataaatgaatgaatga

SEQ ID NO: 205290 - DNA, 551 bp, Homo sapiens
ccaaaccactttcacctgttctgccaacataggatgtgtacctggtcactcctgttttgttttattgtatatatatatatatattttttttcaattaatcattggaaaaccccattttctcttttgggaaaaaaatctaatactgtctctaggtccttctgccaaacccagtgagacagattccagatgccaatgccattgcttatcaatatcacatggtatcactgtcagatgcacatcatgaaaaacttcatgcctgtctgctgctactgggatacccttgctggtagaagcctgtgccagagtggtgctcatgagatatcaaggatatagcccattttacatcatactcccatgttccatccttattccactaaacaatcacggagctagtaaggctgtgtttggatgagttaytgcaagctaattttagtaggccaaataatgcatacagtaaactagagaatatttgctcgaaaatattatggtgccttgtccttattttagactcacctcgtaagtagtaactaaaacaataaatgaatgaatga

SEQ ID NO: 205291 - DNA, 456 bp, Homo sapiens
ctgaatcggactatagtggatggactgatgctaccctgcagccttacttccttaactttgtttccccaggccctaatataaaccccaggaaaacaggcatacagctgtatgcatttggcagattactatccatttcattgttcagttgttctggaaagrcaccgaatgcaactgtagcctggaaacatttggaaaaatggtactgttcctgatatctttgtttcttcctaggtgacagttgaaggtgactttcctttgtacagttctgcctgctgttagcaattttccaaaattaaataccatattttgtgtttgataggcacagctgtgtctgttaccaagggcaagcccacttgcacaacactctgtgttcatttatatactgagaactttatttagaacccagttttacagaaaaaaatcaagttgggtgaaccaattttgagggcaatgaat

SEQ ID NO: 205292 - DNA, 551 bp, Homo sapiens
ccaaaccactttcacctgttctgccaacataggatgtgtacctggtcactcctgttttgttttattgtatatatatatatatattttttttcaattaatcattggaaaaccccattttctcttttgggaaaaaaatctaatactgtctctaggtccttctgccaaacccagtgagacagattccagatgccaatgccattgcttatcaatatcacatggtatcactgtcagatgcacatcatgaaaaacttcatgcctgtctgctgctactgggatacccttgctggtagaagcctgtgccagagtggtgctcatgagatatcaaggatatagcccattttacatcatactcccatgttccatccttattccactaaacaatcacggagctagtaaggctgtgtttggatgagttactgcaagctaattttagtaggccaaataatgcatacagtaaactagagartatttgctcgaaaatattatggtgccttgtccttattttagactcacctcgtaagtagtaactaaaacaataaatgaatgaatga

SEQ ID NO: 205293 - DNA, 551 bp, Homo sapiens
ccaaaccactttcacctgttctgccaacataggatgtgtacctggtcactcctgttttgttttattgtatatatatatatatattttttttcaattaatcattggaaaaccccattttctcttttgggaaaaaaatctaatactgtctctaggtccttctgccaaacccagtgagacagattccagatgccaatgccattgcttatcaatatcacatggtatcactgtcagatgcacatcatgaaaaacttcatgcctgtctgctgctactgggatacccttgctggtagaagcctgtgccagagtggtgctcatgagatatcaaggatatagcccattttacatcatactcccatgttccatccttattccactaaacaatcacggagctagtaaggctgtgtttggatgagttactgcaagctaattttagtaggccaaataatgcatacagtaaactagagaatatttgctygaaaatattatggtgccttgtccttattttagactcacctcgtaagtagtaactaaaacaataaatgaatgaatga

SEQ ID NO: 205294 - DNA, 451 bp, Homo sapiens
tgaccatctgaatctgaatcggactatagtggatggactgatgctaccctgcagccttacttccttaactttgtttccccaggccctaatataaaccccaggaaaacaggcatacagctgtatgcatttggcagattactatccatttcattgttcagttgttctggaaaggcaccgaatgcaactgtagcctggaaayatttggaaaaatggtactgttcctgatatctttgtttcttcctaggtgacagttgaaggtgactttcctttgtacagttctgcctgctgttagcaattttccaaaattaaataccatattttgtgtttgataggcacagctgtgtctgttaccaagggcaagcccacttgcacaacactctgtgttcatttatatactgagaactttatttagaacccagttttacagaaaaaaatcaagttgggtgaacca

SEQ ID NO: 205295 - DNA, 595 bp, Homo sapiens
gctgtctggaccagcttggtaataaatatcctgaagttcatctttccatttttaaaaagtcactcaacttatgtttgataaatataaacaaacttttttatgtcatcattttaaatgctttaggaaatgctttcatttcctttcgttttgtccgatgttcatatctttcatgctttgcttatcttttggaagtgtctgtccaactagagctcttccaaaaagatatttggcaaggacatcttctgctcccaggtataaaagtgagtcaaacaccattattatttttatccttcaggaaaaaccttctgtgaaaatyctgattgcatttccttttataagattctgtctcatatttattaactgaaagatttgggtcaaatcagccacatgtactctctgtagtttatcagcagaaggattctttgaaagattaaattgcacagggctgacttctaaagtgcagtgaaaaaaataaaaaagccacttggtaaaaatgctaaaactgttattttcttgggaaatgtagaattttagcaaattaacatgttacatttaaacccatttgtacttgagactggattgtttatagatgctt

SEQ ID NO: 205296 - DNA, 595 bp, Homo sapiens
gctgtctggaccagcttggtaataaatatcctgaagttcatctttccatttttaaaaagtcactcaacttatgtttgataaatataaacaaacttttttatgtcatcattttaaatgctttaggaaatgctttcatttcctttcgttttgtccgatgttcatatctttcatgctttgcttatcttttggaagtgtctgtccaactagagctcttccaaaaagatatttggcaaggacatcttctgctcccaggtataaaagtgagtcaaacaccattattatttttatccttcaggaaaaaccttctgtgaaaatcctgattgcatttccttttataagattctgtctcatatttattaactgaaagrtttgggtcaaatcagccacatgtactctctgtagtttatcagcagaaggattctttgaaagattaaattgcacagggctgacttctaaagtgcagtgaaaaaaataaaaaagccacttggtaaaaatgctaaaactgttattttcttgggaaatgtagaattttagcaaattaacatgttacatttaaacccatttgtacttgagactggattgtttatagatgctt

SEQ ID NO: 205297 - DNA, 478 bp, Homo sapiens
gaattccactttagagtccaatctgaccatctgaatctgaatcggactatagtggatggactgatgctaccctgcagccttacttccttaactttgtttccccaggccctaatataaaccccaggaaaacaggcatacagctgtatgcatttggcagattactatccatttcattgttcagttgttctggaaaggcaccgaatgcaactgtagcctggaaacatttggaaaaatggtactgttcctgatatctttgtttcttcctargtgacagttgaaggtgactttcctttgtacagttctgcctgctgttagcaattttccaaaattaaataccatattttgtgtttgataggcacagctgtgtctgttaccaagggcaagcccacttgcacaacactctgtgttcatttatatactgagaactttatttagaacccagttttacagaaaaaaatcaagttgggtgaaccaattt

SEQ ID NO: 205298 - DNA, 443 bp, Homo sapiens
ctgaatcggactatagtggatggactgatgctaccctgcagccttacttccttaactttgtttccccaggccctaatataaaccccaggaaaacaggcatacagctgtatgcatttggcagattactatccatttcattgttcagttgttctggaaaggcaccgaatgcaactgtagcctggaaacatttggaaaaatggtactgttcctgatatctttgtttcttcctaggtgacagttgaaggtgactttcctttgtasagttctgcctgctgttagcaattttccaaaattaaataccatattttgtgtttgataggcacagctgtgtctgttaccaagggcaagcccacttgcacaacactctgtgttcatttatatactgagaactttatttagaacccagttttacagaaaaaaatcaagttgggtgaaccaatttt

SEQ ID NO: 205299 - DNA, 471 bp, Homo sapiens
tgaccatctgaatctgaatcggactatagtggatggactgatgctaccctgcagccttacttccttaactttgtttccccaggccctaatataaaccccaggaaaacaggcatacagctgtatgcatttggcagattactatccatttcattgttcagttgttctggaaaggcaccgaatgcaactgtagcctggaaacatttggaaaaatggtactgttcctgatatctttgtttcttcctaggtgacagttgaaggtgactttcctttgtacagttctkcctgctgttagcaattttccaaaattaaataccatattttgtgtttgataggcacagctgtgtctgttaccaagggcaagcccacttgcacaacactctgtgttcatttatatactgagaactttatttagaacccagttttacagaaaaaaatcaagttgggtgaaccaattttgagggcaatgaattc

SEQ ID NO: 205300 - DNA, 478 bp, Homo sapiens
gaattccactttagagtccaatctgaccatctgaatctgaatcggactatagtggatggactgatgctaccctgcagccttacttccttaactttgtttccccaggccctaatataaaccccaggaaaacaggcatacagctgtatgcatttggcagattactatccatttcattgttcagttgttctggaaaggcaccgaatgcaactgtagcctggaaacatttggaaaaatggtactgttcctgatatctttgtttcttcctaggtgacagttgaaggtgactttcctttgtacagttctgcctgctgttagcaattttccaaaattaaataccatattttgtgtttgataggcacagctgygtctgttaccaagggcaagcccacttgcacaacactctgtgttcatttatatactgagaactttatttagaacccagttttacagaaaaaaatcaagttgggtgaaccaattt

SEQ ID NO: 205301 - DNA, 541 bp, Homo sapiens
ctcatgttaaaattctaaattttggtgcaagaggaatagctctcgtttttgcccaagcgactttatttttcaatgtcttcattattttatctgccgattgaacccatcagagtagaggaatgcccagaattatttgaagctctgaaagttctacaatttgggctagagaaatggaatatactaattctaccaattaagacacmaactcttcaggcaaaattaatttaatacttggggtatgatgggttgaccctgaatatttacaagatactaacattggaaaatgttagagtgtgtcacatgggacaagagtctgttaaggtgttctacaagaatgggaggttgtgtggttaaacatttggcatgcttggcacattttttccctcttcctggagagttgtagtttgcattcacatttaaaggatctgagaaatcctgcagaaaagaaaattatgtagctttgtttaacccaatgtttcccaaacttagtggactttatgcattcgacatctttccattgctcttccagattactcttcag

SEQ ID NO: 205302 - DNA, 368 bp, Homo sapiens
aatcacaatatttaaaatatttaccaaagcctacttgactgtgtagacactgcctcacttcagcaagttttttaaaataatgactatactaaattaaccgcctgaattcaaacctattctttttctttagrtgaaatttttaattcaaatttctgaaatccaataatgtcacctaggccaataatagatcaatcatggtgcctgtcaggttctttctgagccctgttagcagctcatttaagtgtcatccattaatacacactgccttgacacctccactgtattttttgttagattagttttcccatgcattgggtccattatcaatccttaataatgagaaaaacatgaaatttaaaatttaaaat

SEQ ID NO: 205303 - DNA, 368 bp, Homo sapiens
aatcacaatatttaaaatatttaccaaagcctacttgactgtgtagacactgcctcacttcagcaagttttttaaaataatgactatactaaattaaccgcctgaattcaaacctattctttttctttagatgaaatttttaattcaaatttctgaaatccaataatgtcacctaggccaataatagatcaatcatggtgcctgtcaggttctttctgagccctgttagcagctcatttaagtgtcatccaytaatacacactgccttgacacctccactgtattttttgttagattagttttcccatgcattgggtccattatcaatccttaataatgagaaaaacatgaaatttaaaatttaaaat

SEQ ID NO: 205304 - DNA, 584 bp, Homo sapiens
aaagaaattttaattgttccttgtataaagccccagtttacagaaaggttgaaccaattcatttctgcagcttacatatctaaatctgtgaccatgtagcatatgaaacaaatagggtatccctattaatcactsagttgtcaatatgaacataaagattggtgtgaattcagtgtcctgcacaaaagtcttcagttaaaacagaagagatattatggtgatggattccccaggatgttcaacaaacagagaagaggccaaagcacgttgtctcaatctttcttcttgttttagtccattctcacactgctaaacgatactacccaagactggataatttacaaagaaaagaggtttaattgactcacagttccacatggctggggaggcctcaggaaacttacaatcatggcagaaggagaaagcaagcacatcttacatggtggcaggtgagggaacatgagcaaaagcagggaaaactgccttataaagccatcagatctcatgataattcactcactatcacgagaacagcataggggaaaccacctctacgatccaatcgtctcccatcagattcctcc

SEQ ID NO: 205305 - DNA, 390 bp, Homo sapiens
cactgagttgtcaatatgaacataaagattggtgtgaattcagtgtcctgcacaaaagtcttcagttaaaacagaagagatattatggtgatggattccccaggatgttcaacaaacagagaagaggccaaagcaygttgtctcaatctttcttcttgttttagtccattctcacactgctaaacgatactacccaagactggataatttacaaagaaaagaggtttaattgactcacagttccacatggctggggaggcctcaggaaacttacaatcatggcagaaggagaaagcaagcacatcttacatggtggcaggtgagggaacatgagcaaaagcagggaaaactgccttataaagccatcagatctcatgataattcactcac

SEQ ID NO: 205306 - DNA, 578 bp, Homo sapiens
caaagaaaacggtggaagttgtatgcttttttattaactagccttagaggtcgcatagcatcatttctaccatagtacatgtgtagaagaagtcataagtccagccaaaatgaagtcaagatgtagagacacctctcaatgggaagaaatctaaagaatatgccacagttttttaaaactaccctacacttcatctcaattaaagcaaaagccaaaattttctcaatggtctgcaatgggaaattgtagcaaatttgaccactgcttgctttttaaatcaagttggattagaacagtcacatgtatttgtttacatacaatgatggcttttgtattataatgccaaagttgagtagttgtgacagagataatgtggcctgcaaagctgaacctgtttataatctggccccttagaaggcaagtttactaacccctgrtctgcagttttgaacacacacaccctgctcccctatttgctctgtgaattcatctctctagtactctgttcctcactgtatagtttagcatatgtgccaccttgctgttccctctgcctagcatgcttttccttcagatat

SEQ ID NO: 205307 - DNA, 592 bp, Homo sapiens
gagataatgtggcctgcaaagctgaacctgtttataatctggccccttagaaggcaagtttactaacccctgatctgcagttttgaacacacacaccctgctcccctatttgctctgtgaattcatctctctagtactctgttcctcactgtatagtttagcatatgtgccaccttgctgttccctctgcctagcatgcttttccttcagatatccagctrgctcatttctgcatctctttcatgcatttgctcaaatttcatcttttcagtgagtctttttctgaatgctcaatttaaaattcacccctatttcctaaaactccttctctgccttctctgagtgatttccccccacttataatattctcatatgctattgatttaacttatttattttatttatagtctattttcctcattaaaatgcaagctccgttacatcagggattgttgtttgttttgttctctgatgcatcccagagcctacaacagtgctgacatgtaatagttcctcaataaacatttgttgaatggacagaggcatgcatgcagtgactaatgaaataacacaaaataaatatgtaaaattc

SEQ ID NO: 205308 - DNA, 592 bp, Homo sapiens
gagataatgtggcctgcaaagctgaacctgtttataatctggccccttagaaggcaagtttactaacccctgatctgcagttttgaacacacacaccctgctcccctatttgctctgtgaattcatctctctagtactctgttcctcactgtatagtttagcatatgtgccaccttgctgttccctctgcctagcatgcttttccttcagatatccagctggctcatttctgcatctctttcatgcatttgctcaaatttcatcttttcagtgagtctttttctgaatgctcaatttaaaattcacccctatttcctaaaactccttctctgccttctctgagtgatttcccccmacttataatattctcatatgctattgatttaacttatttattttatttatagtctattttcctcattaaaatgcaagctccgttacatcagggattgttgtttgttttgttctctgatgcatcccagagcctacaacagtgctgacatgtaatagttcctcaataaacatttgttgaatggacagaggcatgcatgcagtgactaatgaaataacacaaaataaatatgtaaaattc

SEQ ID NO: 205309 - DNA, 591 bp, Homo sapiens
gatgttctgaagatcttgatgctaacattagtttaagctcattcaatactgtcataggagagagaaaatcatktgagatctttgatattaatattccaatccctcacctctgtctgtttgaactcatcaatcactttgggaataaaactggaatagtgtacaaattcatgttgaggtgaggggttttaatatagaagatattttcttctttcccttgatgtctcagaataaaatgatgaaaccagaaggagagagaaactttgatttttgtatttcaaatttctattatttattatttaagagtatatgatttggagtcagggtaaaattgagtcctcacctcaactctgtaatttcacagctatttgttcttagaaaaattcctcaatgtttcagatcctcaagttctttctcgttgagaaaatgaagacggtaatatccatctcatgcaattttaggaaaattaaataaagttagatattttgaaaaatgtactaaatttagaatagtacctggtacatatcttctcagtaatgataaacagaatattttcccacatctattttcaataataatgaccataatagacag

SEQ ID NO: 205310 - DNA, 634 bp, Homo sapiens
ctactacacgcctaggctatgtggtatagagcctattgctcttcacttttaagcctgtatagcttgtgattgttccaaatgctgcaggcaattgtaacacaacggtaagtatttatgtatataaacatgtcaaaataaaaaatgtacagcagtaatatgatattacatccttatggaaccaccatggtatatgcagaccactattgaactaaattattatataatgaatgactgtatgcatatttatgtattaacacactagctatgcgtttgtacagattggcattcagtaaattttgwatgcttttttctggggtttggcaaactatggccctcaaattaaatcaaacccacctccatattcacagctaaagttttattggaacaaaaccacattcattcgttgatgtactgtctggttacttttatgttacaatggcagagttaagtggttatggcagagaacataatgtcctcaaagcccaaaacatagactatctggccctttacagaaagagttgatcaacttttggtttattccatagagcaaatatgggactctctacaaatcccaattagcacctataactacaataatagtaataattacagtagtagtaataattgttatcag

SEQ ID NO: 205311 - DNA, 634 bp, Homo sapiens
ctactacacgcctaggctatgtggtatagagcctattgctcttcacttttaagcctgtatagcttgtgattgttccaaatgctgcaggcaattgtaacacaacggtaagtatttatgtatataaacatgtcaaaataaaaaatgtacagcagtaatatgatattacatccttatggaaccaccatggtatatgcagaccactattgaactaaattattatataatgaatgactgtatgcatatttatgtattaacacactagctatgcgtttgtacagattggcattcagtaaattttgaatgcttttttctggggtttggcaaactatggccctcaaattaaatcaaacccacctccrtattcacagctaaagttttattggaacaaaaccacattcattcgttgatgtactgtctggttacttttatgttacaatggcagagttaagtggttatggcagagaacataatgtcctcaaagcccaaaacatagactatctggccctttacagaaagagttgatcaacttttggtttattccatagagcaaatatgggactctctacaaatcccaattagcacctataactacaataatagtaataattacagtagtagtaataattgttatcag

SEQ ID NO: 205312 - DNA, 596 bp, Homo sapiens
ttggataaagtctcattaatacaagaagtgattagtattttttcagaggcaagcatttgttgataatatgctaaacttagtttgattctaggaggggagcctctatgttgtatttcctattctttgtaacaatgaaataaataaacaaaactctatttcaaatcaatagtaatgccaaatcaaactgcgtagtctccagattgggatgcatacaaaaatgatctgctgtggtagaaataatttattaaaaattctgtttacatttatcttatctcatcaattttagtaggtatttttamattatatattagaaaaattgtgtacatataaataaacaaatatagtactgaagtttacttgctcaaatattattacttatagagatgtgcatccaaaaatgtttagaaactactgacaaactataagtaaataacctgtcaaagagttctcagaatccctctaagattgtaactgagtatgcctgtagcataatccttattaattttgctagaaaactcagttatgttcaaatataaataaatatacttatgtttaaatacagatacatcaataaatgcaatgactgtcatttcatt

SEQ ID NO: 205313 - DNA, 536 bp, Homo sapiens
agataggcttttttcccacttagcctcaatatatattcaagttattgtgtctattaatagcttattctttttcatttctgagtagtattctgttgtaatgatgtaccacagtttgtttattcattcattcattgaacgacaattgagtttttccagattagggctattacaaataaagttcctatgyattttagtgttctggtttttcgtgaatgtaagtttccatttctctgagataaacactaaagattgtgatttatatgtcatgtgataaagatatggttaactttataaaagactgccaaactgtttttcagaataaatgtatcgatttacattctcaccaccaatgcaggagagatccagttgttccacatatttaccagcacttgatattgtcagcatggttttacttttcccattctattaagtgtatagtggcatgttattgtagctttactttgcttttctctaatagctaatgatattgcatcaaaaaccttttaaacctttaaaaatgatattatgatataatg

SEQ ID NO: 205314 - DNA, 536 bp, Homo sapiens
agataggcttttttcccacttagcctcaatatatattcaagttattgtgtctattaatagcttattctttttcatttctgagtagtattctgttgtaatgatgtaccacagtttgtttattcattcattcattgaacgacaattgagtttttccagattagggctattacaaataaagttcctatgcattttagtgttctggtttttcgtgaatgtaagtttccatttctctgagataaacactaaagattgtgatttatatgtcatgtgataaagatatggttaactttataaaagactgccaaactgtttttcagaataaatgtatcratttacattctcaccaccaatgcaggagagatccagttgttccacatatttaccagcacttgatattgtcagcatggttttacttttcccattctattaagtgtatagtggcatgttattgtagctttactttgcttttctctaatagctaatgatattgcatcaaaaaccttttaaacctttaaaaatgatattatgatataatg

SEQ ID NO: 205315 - DNA, 575 bp, Homo sapiens
acatactttagacacatgcaagttttttgaggttatatcaataacaggtttcatataacaaactaaaaataagcaaaaaaaatggaaaaagggtatgtaacatgcatttactatagttgacatgcaaacttagagtccctgctttaaaaaatcaacaatgaggctgggcrccgtggctcactcctataatcccagcactttgggaggccaaggtaggcagatcacttgaggtcagcagttcgagaccagcctgtccaatatgttgaaactgcatctccactaaaaatacaaaaattagccaggcgtggtggcagggccctgtagtcccagctactcgggaggctgaggcaggagaatcgcttgaacccaggaggcagaggttgcagtgagccgagatcacaccacacgccactacactccagcctgggtgacagagcgagactccatctccaaaaaaaaaaaaaaaaaaaaatcaactatgaagttcaacaattgcaaaatgtttaatcaaaagagtttatcaagagaatgaaaaagaatgtagctattagaatttataaagctataaactatat

SEQ ID NO: 205316 - DNA, 575 bp, Homo sapiens
acatactttagacacatgcaagttttttgaggttatatcaataacaggtttcatataacaaactaaaaataagcaaaaaaaatggaaaaagggtatgtaacatgcatttactatagttgacatgcaaacttagagtccctgctttaaaaaatcaacaatgaggctgggcacsgtggctcactcctataatcccagcactttgggaggccaaggtaggcagatcacttgaggtcagcagttcgagaccagcctgtccaatatgttgaaactgcatctccactaaaaatacaaaaattagccaggcgtggtggcagggccctgtagtcccagctactcgggaggctgaggcaggagaatcgcttgaacccaggaggcagaggttgcagtgagccgagatcacaccacacgccactacactccagcctgggtgacagagcgagactccatctccaaaaaaaaaaaaaaaaaaaaatcaactatgaagttcaacaattgcaaaatgtttaatcaaaagagtttatcaagagaatgaaaaagaatgtagctattagaatttataaagctataaactatat

SEQ ID NO: 205317 - DNA, 493 bp, Homo sapiens
atactaataagtagagaacctcggttgctgcttctgttgattacggagactactgggataaggcaatcaaaactaagaaataatttgccattctcttggaagccagagaaaaagaaaaacaccagaaacctagccctggaatgtcattgaatagctgtaggatagtggcaaggatgtcagcatctgtaacactcgattttctctyctgcaaaaatgaaactattagtattccaccatattgcaattaatatcacttgagctaatgtatacaagcagtatgaaatcccacaggattcacatgtaaaatattggattttttatattttaatatgtaaaatgtaagttgtttcttttctctctgatacgaaatgcagttttcattccacagtttcactctcatacacttaataacttttgttaacgtaacaatacagcgtgagcgttcctggggctatgcctgacccaaagcagacacttagtaaaatgtctgtgg

SEQ ID NO: 205318 - DNA, 493 bp, Homo sapiens
atactaataagtagagaacctcggttgctgcttctgttgattacggagactactgggataaggcaatcaaaactaagaaataatttgccattctcttggaagccagagaaaaagaaaaacaccagaaacctagccctggaatgtcattgaatagctgtaggatagtggcaaggatgtcagcatctgtaacactcgattttctcttctgcaaaaatgaaactattagtattccaccatattgcaattaatatcacttgagctaatgtatacaagcagtatgaaatcccacaggattcacatgtaaaatattggattttttatattttaatatgtaaaatgtaagttgtttcttttctctctgatacgaaatgcagttttcattccacagtttcactctcatacacttaataacttttgttaacgtaacaatacagcgtgagmgttcctggggctatgcctgacccaaagcagacacttagtaaaatgtctgtgg

SEQ ID NO: 205319 - DNA, 616 bp, Homo sapiens
tcttgtaaaggttatatatttttaatttcacttaatatttctgcttttatttttctacacatgaccataaatatatatcttcatgtatgcatgatgaagcatggtaacagattttttaatggaataagctattatggtactttcattctatgaaatattacgtagttctcaatcaaaatgagagggatagctgtataaaacctaagctattgttaacagaaaaaaagcatgtaaacaaaattattaaattatggttttaataaaatccatatatatgaatttggacacgtgtatacacaagtaaagtcagagaaaatgacagaatataatgtatgttgaaatkatagcaatgactaccactaaaaaaaaatcagaatagaatggtaatttaaaataaatataagacagcagtgggcaggatgaggacacatttaaatctacataatactgcattgtgtaagctaaatttttcaagacctgcttgtgtaattatttttaaaaagaaaaaaggtttgtttccttgtgttgagaattattcaacatggaaagtgctacagaagagagagctcattgactccatttgttctaataaaacaaacaaacaagcaacaaaaaa

SEQ ID NO: 205320 - DNA, 630 bp, Homo sapiens
tcttaagatttcatttctaaagcaaataaaacaaggcaaagccaatattgtaaaaaaaattaatcctaagtctacatgaacttagctgggtaccagttgagatatttgaagtttatctaccctgtagtcctcacatttaaaatttttctcaatagttgaatgtaagttatttacttctggattgaacaataaaatgtaaatggaggtttccaggaagatgaattgagtgtgccatactgcctgcctctgtaggctccacctctgggggcagggcacagacaaacaaaaagacagcagtaacctctgcagacttaaatgtccctgtctgacagctttgaggagagcagtggtgttcccagcacgcagctggagatctgagaactggcagactgcctcctcaagtgggtccctgacccctgacccccgagcagcctaactgggagtcamcccccagtaggggcagactgacacctcacacagcgggtactcctctgagacaaaacttgcagaggaacgatcagacagcagcatttgcggttcatgaaaatccgctgttctgcagccaccgctgctggtacccaggcaaacagcgtctggagtggacctctagcaaactccaacagacctgca

SEQ ID NO: 205321 - DNA, 630 bp, Homo sapiens
tcttaagatttcatttctaaagcaaataaaacaaggcaaagccaatattgtaaaaaaaattaatcctaagtctacatgaacttagctgggtaccagttgagatatttgaagtttatctaccctgtagtcctcacatttaaaatttttctcaatagttgaatgtaagttatttacttctggattgaacaataaaatgtaaatggaggtttccaggaagatgaattgagtgtgccatactgcctgcctctgtaggctccacctctgggggcagggcacagacaaacaaaaagacagcagtaacctctgcagacttaaatgtccctgtctgacagctttgaggagagcagtggtgttcccagcacgcagctggagatctgagaactggcagactgcctcctcaagtgggtccctgacccctgacccccgagcagcctaactgggagtcaccccccagtaggggcagactgacacctcacacagcgggtactcctctgaracaaaacttgcagaggaacgatcagacagcagcatttgcggttcatgaaaatccgctgttctgcagccaccgctgctggtacccaggcaaacagcgtctggagtggacctctagcaaactccaacagacctgca

SEQ ID NO: 205322 - DNA, 630 bp, Homo sapiens
tcttaagatttcatttctaaagcaaataaaacaaggcaaagccaatattgtaaaaaaaattaatcctaagtctacatgaacttagctgggtaccagttgagatatttgaagtttatctaccctgtagtcctcacatttaaaatttttctcaatagttgaatgtaagttatttacttctggattgaacaataaaatgtaaatggaggtttccaggaagatgaattgagtgtgccatactgcctgcctctgtaggctccacctctgggggcagggcacagacaaacaaaaagacagcagtaacctctgcagacttaaatgtccctgtctgacagctttgaggagagcagtggtgttcccagcacgcagctggagatctgagaactggcagactgcctcctcaagtgggtccctgacccctgacccccgagcagcctaactgggagtcaccccccagtaggggcagactgacacctcacacagcgggtactcctctgagacaaaacttgcagaggaacgatcagacagcagcattygcggttcatgaaaatccgctgttctgcagccaccgctgctggtacccaggcaaacagcgtctggagtggacctctagcaaactccaacagacctgca

SEQ ID NO: 205323 - DNA, 630 bp, Homo sapiens
tcttaagatttcatttctaaagcaaataaaacaaggcaaagccaatattgtaaaaaaaattaatcctaagtctacatgaacttagctgggtaccagttgagatatttgaagtttatctaccctgtagtcctcacatttaaaatttttctcaatagttgaatgtaagttatttacttctggattgaacaataaaatgtaaatggaggtttccaggaagatgaattgagtgtgccatactgcctgcctctgtaggctccacctctgggggcagggcacagacaaacaaaaagacagcagtaacctctgcagacttaaatgtccctgtctgacagctttgaggagagcagtggtgttcccagcacgcagctggagatctgagaactggcagactgcctcctcaagtgggtccctgacccctgacccccgagcagcctaactgggagtcaccccccagtaggggcagactgacacctcacacagcgggtactcctctgagacaaaacttgcagaggaacgatcagacagcagcatttgcggttcatgaaaatccgctgttctgcagccacygctgctggtacccaggcaaacagcgtctggagtggacctctagcaaactccaacagacctgca

SEQ ID NO: 205324 - DNA, 487 bp, Homo sapiens
attagtatgtcgtctactcaggaggagtcttagtgatccaaagtgcatggatagtaccgagagactgatagatctatctaaaatgaagggtatggacattgccataaragcctcacaatgcatgaaatggataatagatgtgagattccctggggagctgtgtgcacgtgacttccaaaacgctgtcatttcactatgtagaaggacaatatgaatttacatggaaatttatttccaccatcagtaatatattcctattgcaaatgtacattttagagaaagtatattttcagttgaagtgaaaaaaaagagatgcacaaatagatgtttgaatggcatttgtataattctgggtcaagtttttaggacaagcttaccaaagaaatttttaaggttaaataaaaagcaaacttttagtgtatcagggtgtttgctaaaagcagagcactgtgacaaacataaaaagcagaaacattaaaagcagaaa

SEQ ID NO: 205325 - DNA, 487 bp, Homo sapiens
attagtatgtcgtctactcaggaggagtcttagtgatccaaagtgcatggatagtaccgagagactgatagatctatctaaaatgaagggtatggacattgccataaamgcctcacaatgcatgaaatggataatagatgtgagattccctggggagctgtgtgcacgtgacttccaaaacgctgtcatttcactatgtagaaggacaatatgaatttacatggaaatttatttccaccatcagtaatatattcctattgcaaatgtacattttagagaaagtatattttcagttgaagtgaaaaaaaagagatgcacaaatagatgtttgaatggcatttgtataattctgggtcaagtttttaggacaagcttaccaaagaaatttttaaggttaaataaaaagcaaacttttagtgtatcagggtgtttgctaaaagcagagcactgtgacaaacataaaaagcagaaacattaaaagcagaaa

SEQ ID NO: 205326 - DNA, 413 bp, Homo sapiens
gttaacataaaatatgacaaaggcattggaatagaaataaagcaaatatgttaaacataacygtagctttgagaaagcataaagcaagcctgaataaaaacttctactattccagatgaagagataattttatgaaacataaaaggatatgtctattgcttggaaaggattgtagtttttcttagcattcatgtctaagtgaaatttcttacacagatgtacacagaaaagcaatattattttctccaataagaacacagactagtgactcttgattgatcatccacagtgcattacactaagccattttacaaatgggctctcaaattttgacattagggaagtaagtcaatttgagccaagaatttcaataaagctatgcatgaacatgaatcttgatataggttaagatt

SEQ ID NO: 205327 - DNA, 413 bp, Homo sapiens
gttaacataaaatatgacaaaggcattggaatagaaataaagcaaatatgttaaacataactgtagctttgagaaagcataaagcaagcctgaataaaaacttctactatyccagatgaagagataattttatgaaacataaaaggatatgtctattgcttggaaaggattgtagtttttcttagcattcatgtctaagtgaaatttcttacacagatgtacacagaaaagcaatattattttctccaataagaacacagactagtgactcttgattgatcatccacagtgcattacactaagccattttacaaatgggctctcaaattttgacattagggaagtaagtcaatttgagccaagaatttcaataaagctatgcatgaacatgaatcttgatataggttaagatt

SEQ ID NO: 205328 - DNA, 413 bp, Homo sapiens
gttaacataaaatatgacaaaggcattggaatagaaataaagcaaatatgttaaacataactgtagctttgagaaagcataaagcaagcctgaataaaaacttctactattccagatgaagagataattttatgaaacataaaaggatatgtctattgcttggaaaggattgtagtttttcttagcattcatgtctaagtgaaatttcttacacagatgtamacagaaaagcaatattattttctccaataagaacacagactagtgactcttgattgatcatccacagtgcattacactaagccattttacaaatgggctctcaaattttgacattagggaagtaagtcaatttgagccaagaatttcaataaagctatgcatgaacatgaatcttgatataggttaagatt

SEQ ID NO: 205329 - DNA, 413 bp, Homo sapiens
gttaacataaaatatgacaaaggcattggaatagaaataaagcaaatatgttaaacataactgtagctttgagaaagcataaagcaagcctgaataaaaacttctactattccagatgaagagataattttatgaaacataaaaggatatgtctattgcttggaaaggattgtagtttttcttagcattcatgtctaagtgaaatttcttacacagatgtacacagaaaagcaatattattttctccaataagaacacagactagtgactcttgattgatcatccacagtgcattacactaagccattttacaaatgggctctcaaattttgacattagggaagtaagtcaatttgagccaagaatttcaataaagctatgcaygaacatgaatcttgatataggttaagatt

SEQ ID NO: 205330 - DNA, 449 bp, Homo sapiens
ctgcctagaacagacataattttcttttcattcatttttggtgaaaaatataggctggtgtgattatttctgtgatgtaattcaataactaaaatgtacactcttgtctcaaaktcctcaacatcaccttgtcctaaactcctggtccaagaccaatctaccctccatcctcttgttgcctggatcccttttctttgtgggtatgaccattggagcactgaaaagatgatataagtgtcaggtgagttccatgttatacatttgatttatgagggaatgcaggctgctttgggaatttcctctggcaccttagccctttttctcctttccttttctccatattccaggaccatctgtaaaaggcagggatgagagagagttcaatgcctttctcctcctcttgataagaaggggtaggattatggataactacaactttgagaattctc

SEQ ID NO: 205331 - DNA, 445 bp, Homo sapiens
ccatctgcctagaacagacataattttcttttcattcatttttggtgaaaaatataggctggtgtgattatttctgtgatgtaattcaataactaaaatgtacactcttgtctcaaagtcctcaacatcaccttgtcctaaactcckggtccaagaccaatctaccctccatcctcttgttgcctggatcccttttctttgtgggtatgaccattggagcactgaaaagatgatataagtgtcaggtgagttccatgttatacatttgatttatgagggaatgcaggctgctttgggaatttcctctggcaccttagccctttttctcctttccttttctccatattccaggaccatctgtaaaaggcagggatgagagagagttcaatgcctttctcctcctcttgataagaaggggtaggattatggataactacaactttga

SEQ ID NO: 205332 - DNA, 443 bp, Homo sapiens
ctgcctagaacagacataattttcttttcattcatttttggtgaaaaatataggctggtgtgattatttctgtgatgtaattcaataactaaaatgtacactcttgtctcaaagtcctcaacatcaccttgtcctaaactcctggtccaagaccaatctaccctccatcctcttgttgcctggaycccttttctttgtgggtatgaccattggagcactgaaaagatgatataagtgtcaggtgagttccatgttatacatttgatttatgagggaatgcaggctgctttgggaatttcctctggcaccttagccctttttctcctttccttttctccatattccaggaccatctgtaaaaggcagggatgagagagagttcaatgcctttctcctcctcttgataagaaggggtaggattatggataactacaactttgaga

SEQ ID NO: 205333 - DNA, 463 bp, Homo sapiens
cctccatctgcctagaacagacataattttcttttcattcatttttggtgaaaaatataggctggtgtgattatttctgtgatgtaattcaataactaaaatgtacactcttgtctcaaagtcctcaacatcaccttgtcctaaactcctggtccaagaccaatctaccctccatcctcttgttgcctggatcccttttctttgtgggtatgaccattggagcactgaaaagatgatataagtgtcaggtgarttccatgttatacatttgatttatgagggaatgcaggctgctttgggaatttcctctggcaccttagccctttttctcctttccttttctccatattccaggaccatctgtaaaaggcagggatgagagagagttcaatgcctttctcctcctcttgataagaaggggtaggattatggataactacaactttgagaattctccctctta

SEQ ID NO: 205334 - DNA, 461 bp, Homo sapiens
ctccatctgcctagaacagacataattttcttttcattcatttttggtgaaaaatataggctggtgtgattatttctgtgatgtaattcaataactaaaatgtacactcttgtctcaaagtcctcaacatcaccttgtcctaaactcctggtccaagaccaatctaccctccatcctcttgttgcctggatcccttttctttgtgggtatgaccattggagcactgaaaagatgatataagtgtcaggtgagttscatgttatacatttgatttatgagggaatgcaggctgctttgggaatttcctctggcaccttagccctttttctcctttccttttctccatattccaggaccatctgtaaaaggcagggatgagagagagttcaatgcctttctcctcctcttgataagaaggggtaggattatggataactacaactttgagaattctccctctt

SEQ ID NO: 205335 - DNA, 445 bp, Homo sapiens
ccatctgcctagaacagacataattttcttttcattcatttttggtgaaaaatataggctggtgtgattatttctgtgatgtaattcaataactaaaatgtacactcttgtctcaaagtcctcaacatcaccttgtcctaaactcctggtccaagaccaatctaccctccatcctcttgttgcctggatcccttttctttgtgggtatgaccattggagcactgaaaagatgatataagtgtcaggtgagttccatgttatacatttgatttatgagggaatgcaggctgctttgggaatttcctctggcaccttagccmtttttctcctttccttttctccatattccaggaccatctgtaaaaggcagggatgagagagagttcaatgcctttctcctcctcttgataagaaggggtaggattatggataactacaactttga

SEQ ID NO: 205336 - DNA, 445 bp, Homo sapiens
ccatctgcctagaacagacataattttcttttcattcatttttggtgaaaaatataggctggtgtgattatttctgtgatgtaattcaataactaaaatgtacactcttgtctcaaagtcctcaacatcaccttgtcctaaactcctggtccaagaccaatctaccctccatcctcttgttgcctggatcccttttctttgtgggtatgaccattggagcactgaaaagatgatataagtgtcaggtgagttccatgttatacatttgatttatgagggaatgcaggctgctttgggaatttcctctggcaccttagccctttttctcctttccttttstccatattccaggaccatctgtaaaaggcagggatgagagagagttcaatgcctttctcctcctcttgataagaaggggtaggattatggataactacaactttga

SEQ ID NO: 205337 - DNA, 445 bp, Homo sapiens
ccatctgcctagaacagacataattttcttttcattcatttttggtgaaaaatataggctggtgtgattatttctgtgatgtaattcaataactaaaatgtacactcttgtctcaaagtcctcaacatcaccttgtcctaaactcctggtccaagaccaatctaccctccatcctcttgttgcctggatcccttttctttgtgggtatgaccattggagcactgaaaagatgatataagtgtcaggtgagttccatgttatacatttgatttatgagggaatgcaggctgctttgggaatttcctctggcaccttagccctttttctcctttccttttctccatattccagraccatctgtaaaaggcagggatgagagagagttcaatgcctttctcctcctcttgataagaaggggtaggattatggataactacaactttga

SEQ ID NO: 205338 - DNA, 463 bp, Homo sapiens
cctccatctgcctagaacagacataattttcttttcattcatttttggtgaaaaatataggctggtgtgattatttctgtgatgtaattcaataactaaaatgtacactcttgtctcaaagtcctcaacatcaccttgtcctaaactcctggtccaagaccaatctaccctccatcctcttgttgcctggatcccttttctttgtgggtatgaccattggagcactgaaaagatgatataagtgtcaggtgagttccatgttatacatttgatttatgagggaatgcaggctgctttgggaatttcctctggcaccttagccctttttctcctttccttttctccatattccaggaccatctgtaaaaggcagggatgagagagagttcaatgyctttctcctcctcttgataagaaggggtaggattatggataactacaactttgagaattctccctctta

SEQ ID NO: 205339 - DNA, 438 bp, Homo sapiens
ctgcctagaacagacataattttcttttcattcatttttggtgaaaaatataggctggtgtgattatttctgtgatgtaattcaataactaaaatgtacactcttgtctcaaagtcctcaacatcaccttgtcctaaactcctggtccaagaccaatctaccctccatcctcttgttgcctggatcccttttctttgtgggtatgaccattggagcactgaaaagatgatataagtgtcaggtgagttccatgttatacatttgatttatgagggaatgcaggctgctttgggaatttcctctggcaccttagccctttttctcctttccttttctccatattccaggaccatctgtaaaaggcagggatgagagagagttcaatgcctttctcctccycttgataagaaggggtaggattatggataactacaactt

SEQ ID NO: 205340 - DNA, 618 bp, Homo sapiens
cagtttttttaagtatcctgcaaacaccaaaggttgacaatcaaagttttaagtcaacatgtgaagttgccattgctacttatcagggcaataaagtcaatgactgatatattttttcagttttttaaatttattttttaattaaattttagtgtttattttagatatggggggatacatgtgcaggtttgttacataggtatattgcataatcctgagtttgggggtatggatcctgtcatccaggkagttagcataggatccaataggtagtttttcaacccttccccacctctctctcccctctcttagtccccggtgtctattgcttccatctacatgtccatgtaaactcaatgtccagctcttattcattagtgagaacatgtggtatttgattttctgtttctgcattaattcacttaggattatggacttcagcttaatccatgttgcttaaaaggacataatttgattctttattatgactgcatagtgttccttggtacctgtatgtaccacattttctttatccaatccaccactaatggatacctaggttgagttcatgtctttgttattgtgaatagcacagcaaagaaaatataagtgcgtgta

SEQ ID NO: 205341 - DNA, 618 bp, Homo sapiens
cagtttttttaagtatcctgcaaacaccaaaggttgacaatcaaagttttaagtcaacatgtgaagttgccattgctacttatcagggcaataaagtcaatgactgatatattttttcagttttttaaatttattttttaattaaattttagtgtttattttagatatggggggatacatgtgcaggtttgttacataggtatattgcataatcctgagtttgggggtatggatcctgtcatccagggagttagcataggatccaataggtagtttttcaacccttycccacctctctctcccctctcttagtccccggtgtctattgcttccatctacatgtccatgtaaactcaatgtccagctcttattcattagtgagaacatgtggtatttgattttctgtttctgcattaattcacttaggattatggacttcagcttaatccatgttgcttaaaaggacataatttgattctttattatgactgcatagtgttccttggtacctgtatgtaccacattttctttatccaatccaccactaatggatacctaggttgagttcatgtctttgttattgtgaatagcacagcaaagaaaatataagtgcgtgta

SEQ ID NO: 205342 - DNA, 618 bp, Homo sapiens
cagtttttttaagtatcctgcaaacaccaaaggttgacaatcaaagttttaagtcaacatgtgaagttgccattgctacttatcagggcaataaagtcaatgactgatatattttttcagttttttaaatttattttttaattaaattttagtgtttattttagatatggggggatacatgtgcaggtttgttacataggtatattgcataatcctgagtttgggggtatggatcctgtcatccagggagttagcataggatccaataggtagtttttcaacccttccccacctctctctcccctctyttagtccccggtgtctattgcttccatctacatgtccatgtaaactcaatgtccagctcttattcattagtgagaacatgtggtatttgattttctgtttctgcattaattcacttaggattatggacttcagcttaatccatgttgcttaaaaggacataatttgattctttattatgactgcatagtgttccttggtacctgtatgtaccacattttctttatccaatccaccactaatggatacctaggttgagttcatgtctttgttattgtgaatagcacagcaaagaaaatataagtgcgtgta

SEQ ID NO: 205343 - DNA, 618 bp, Homo sapiens
cagtttttttaagtatcctgcaaacaccaaaggttgacaatcaaagttttaagtcaacatgtgaagttgccattgctacttatcagggcaataaagtcaatgactgatatattttttcagttttttaaatttattttttaattaaattttagtgtttattttagatatggggggatacatgtgcaggtttgttacataggtatattgcataatcctgagtttgggggtatggatcctgtcatccagggagttagcataggatccaataggtagtttttcaacccttccccacctctctctcccctctcttagtccccggtgtctattgcttccatctacatgtccatgtaaactcaatgtccagctcttattcattagtgagaacatgtggtatttgattttctgtttctgcattaattcacttaggattatggacttcagcttaatccatgttgcttaaaaggacataatttgattctttattatgactgcatagtgttccttggtacctgtatgtaccacattttctttatccaatccaccactaatggatacctaggttgagttcatgtctttgttattgtgaatagcacagyaaagaaaatataagtgcgtgta

SEQ ID NO: 205344 - DNA, 665 bp, Homo sapiens
aagtcatttataaatgacagaaaagaaggaaatttcaaggtccttaaagtaaacatattttataaatacatataggtaaatacatatatatgtcaaggcacttaaatgaaaattgaacatagaaaaatagaagttataaaatgaaaaatgtgacatgtatagatgaaaaataaatattagaaataaaaattccatgagatagaataagtaatggattttacccaaacatcagaaaatttatagaaaaaaatagaagmtttacaaactaaaggacaaagggtaaactaaaataagaccgccagatactcactgataagtcagacaatatgcagcagtgtaacatacatgtaattaacatctcaaaaaggatgggtgggggaattataggtgaataaagaatgctacactcattcctgagggcaccgaggagggaggatatctttatgatttctgagagggagggtattatccattcatgaaggtccaaccccatgaccaaacaccttccagtaagccccacctgcaacattggggatcaaattttaacatgagattggaaggggcaagcattcaaaccatagcaagagttaaatttcctttttaaaaaaatcactgatatgattccatttcgccatagataaaagctagtatttcagcctaccatt

SEQ ID NO: 205345 - DNA, 665 bp, Homo sapiens
aagtcatttataaatgacagaaaagaaggaaatttcaaggtccttaaagtaaacatattttataaatacatataggtaaatacatatatatgtcaaggcacttaaatgaaaattgaacatagaaaaatagaagttataaaatgaaaaatgtgacatgtatagatgaaaaataaatattagaaataaaaattccatgagatagaataagtaatggattttacccaaacatcagaaaatttatagaaaaaaatagaagctttacaaactaaaggacaaagggtaaactaaaataagaccgccagatactcactgatamgtcagacaatatgcagcagtgtaacatacatgtaattaacatctcaaaaaggatgggtgggggaattataggtgaataaagaatgctacactcattcctgagggcaccgaggagggaggatatctttatgatttctgagagggagggtattatccattcatgaaggtccaaccccatgaccaaacaccttccagtaagccccacctgcaacattggggatcaaattttaacatgagattggaaggggcaagcattcaaaccatagcaagagttaaatttcctttttaaaaaaatcactgatatgattccatttcgccatagataaaagctagtatttcagcctaccatt

SEQ ID NO: 205346 - DNA, 665 bp, Homo sapiens
aagtcatttataaatgacagaaaagaaggaaatttcaaggtccttaaagtaaacatattttataaatacatataggtaaatacatatatatgtcaaggcacttaaatgaaaattgaacatagaaaaatagaagttataaaatgaaaaatgtgacatgtatagatgaaaaataaatattagaaataaaaattccatgagatagaataagtaatggattttacccaaacatcagaaaatttatagaaaaaaatagaagctttacaaactaaaggacaaagggtaaactaaaataagaccgccagatactcactgataartcagacaatatgcagcagtgtaacatacatgtaattaacatctcaaaaaggatgggtgggggaattataggtgaataaagaatgctacactcattcctgagggcaccgaggagggaggatatctttatgatttctgagagggagggtattatccattcatgaaggtccaaccccatgaccaaacaccttccagtaagccccacctgcaacattggggatcaaattttaacatgagattggaaggggcaagcattcaaaccatagcaagagttaaatttcctttttaaaaaaatcactgatatgattccatttcgccatagataaaagctagtatttcagcctaccatt

SEQ ID NO: 205347 - DNA, 467 bp, Homo sapiens
cagcccatgcaactacaaattcaatagatgtcgaacacagggtcaagcctagaataagaagtctcagctaattaastatgcttttttccccaaattcacattaagaaaaacttggatatgtcagagaatgcattctaagttcactcaacctaggagggagaaacataattttaaattaagagctgaagcattcttgtcctaacagaaagcaaggaaaacgaaatatcacaccacaggagggatttcacaaattagtgtcaacatcaaaaccttaaaataggcaaggagaatacagattcacaatgaactcttgtacttgttttgttcagagaagagatggttctgagagaatgacagtgaactaaccccagctggtttagttgatgctttcaaatgctgcttctgatcaactcctttagctacaataaattgatgaggattttggcatgtggtattagagatggttc

SEQ ID NO: 205348 - DNA, 467 bp, Homo sapiens
cagcccatgcaactacaaattcaatagatgtcgaacacagggtcaagcctagaataagaagtctcagctaattaactatgcttttttccccaaattcayattaagaaaaacttggatatgtcagagaatgcattctaagttcactcaacctaggagggagaaacataattttaaattaagagctgaagcattcttgtcctaacagaaagcaaggaaaacgaaatatcacaccacaggagggatttcacaaattagtgtcaacatcaaaaccttaaaataggcaaggagaatacagattcacaatgaactcttgtacttgttttgttcagagaagagatggttctgagagaatgacagtgaactaaccccagctggtttagttgatgctttcaaatgctgcttctgatcaactcctttagctacaataaattgatgaggattttggcatgtggtattagagatggttc

SEQ ID NO: 205349 - DNA, 465 bp, Homo sapiens
atatgtcagagaatgcattctaagttcactcaacctaggagggagaaacataattttaaattaagagctgaagcattcttgtcctaacagaaagcaaggaaaacgaaatatcacaccacaggagggatttcacaaattagtgtcaacatcaaaaccttaaaataggcaaggagaatrcagattcacaatgaactcttgtacttgttttgttcagagaagagatggttctgagagaatgacagtgaactaaccccagctggtttagttgatgctttcaaatgctgcttctgatcaactcctttagctacaataaattgatgaggattttggcatgtggtattagagatggttcttttttcctcttatttgcattgttcaatgtagtaaatactagctgtatatggctacttcaattcaaattaattacaatgaaatatacttcaatattgaattttttagtcactg

SEQ ID NO: 205350 - DNA, 465 bp, Homo sapiens
atatgtcagagaatgcattctaagttcactcaacctaggagggagaaacataattttaaattaagagctgaagcattcttgtcctaacagaaagcaaggaaaacgaaatatcacaccacaggagggatttcacaaattagtgtcaacatcaaaaccttaaaataggcaaggagaatacagattcacaatgaactcttgtacttgttttgttcagagaagagatggttctgagagaatgacagtgaactaaccccagctggtttagttgatgctttcaamtgctgcttctgatcaactcctttagctacaataaattgatgaggattttggcatgtggtattagagatggttcttttttcctcttatttgcattgttcaatgtagtaaatactagctgtatatggctacttcaattcaaattaattacaatgaaatatacttcaatattgaattttttagtcactg

SEQ ID NO: 205351 - DNA, 465 bp, Homo sapiens
atatgtcagagaatgcattctaagttcactcaacctaggagggagaaacataattttaaattaagagctgaagcattcttgtcctaacagaaagcaaggaaaacgaaatatcacaccacaggagggatttcacaaattagtgtcaacatcaaaaccttaaaataggcaaggagaatacagattcacaatgaactcttgtacttgttttgttcagagaagagatggttctgagagaatgacagtgaactaaccccagctggtttagttgatgctttcaaatgctgcttctgatcaactcctttagctasaataaattgatgaggattttggcatgtggtattagagatggttcttttttcctcttatttgcattgttcaatgtagtaaatactagctgtatatggctacttcaattcaaattaattacaatgaaatatacttcaatattgaattttttagtcactg

SEQ ID NO: 205352 - DNA, 419 bp, Homo sapiens
cgaattcattactgaaacaatgtatacatttcagactaggaaagtaactatttataaaagaaaagcttaaaacctgaagcagaaacaaaatcctgaaactgtaaaattgagtcaaactaaaatttaaaaaacaaagyaatgatataaagtatcatttgtccaaatgtgttctacaaaacgcttttttcttaaatatgtctgatgaaaaacaggttctaggagtaaaatatgtttgaaaaatgctgggttaaacaactgaacctatgaaggaaggaatagaacgtctcaagctcttcactctggaatcttttttacacggcaattaacaccatgcttcttcttggatttgtatttcagataaacacaatctgggaaatattttataatacagagggccacaccagattgaatattgcccc

SEQ ID NO: 205353 - DNA, 268 bp, Homo sapiens
catttttaaatacattaaataacaatatcttggggaaaatactttgatttctcttaggacgtggtatctgtcacattggtatcttattgctataaagagttttctttgtcagtctcaaggtctctgtcttcatattaaaagctggtcagttgtgcctgaattttaaagggaagagggtaagttmaggcatatccaatcatccgttccgatcatggactgcattgtatttcaggttgattttggtgtgtccttggttgagaggaggagt

SEQ ID NO: 205354 - DNA, 249 bp, Homo sapiens
atggtcatgagctgtgagtctagagacctgtgattgtcttcaggggcctgtggtcctcggctttcataggagttgtgggggcactggctcaaatagcatccaccaggattctaatcagaatatctcattcacagaaggcagtgggtgatatgacagyacagagggactctgtggggccagctgcatggagcactctgggagagtcactggcacccgtgctagacagatcttcattcaacttctggagca

SEQ ID NO: 205355 - DNA, 249 bp, Homo sapiens
atggtcatgagctgtgagtctagagacctgtgattgtcttcaggggcctgtggtcctcggctttcataggagttgtgggggcactggctcaaatagcatccaccaggattctaatcagaatatctcattcacagaaggcagtgggtgatatgacagtacagagggactctgtgggkccagctgcatggagcactctgggagagtcactggcacccgtgctagacagatcttcattcaacttctggagca

SEQ ID NO: 205356 - DNA, 563 bp, Homo sapiens
tcccacctcagcctcatgttgtagtgaactttgttatgcagtgtctcctattctacatgtgcaggagtatttttacagtatgtacctggagtggaattgcttggtcattgggcatgtgtgtgttcagctctattgagtggcatcataccgttctccaaagcagttgtaccaatctacaccctcaccagcagtgaatagtcttcccattgttcttcctcaatgaaactagatattcacagccttttaggtttttcctagagtatgaagtggtatctctttggggttttaatgtttatttccctgattagaattgtagttgagcatcttttattatgtttatggaccatttatgttctctcttctgtgaaattcctattcgggttttttgctcattttaaatgttgttgtttgtgtttttcttatataggaastcttcacgcattcaagatgcacatatgttgttcagaatagtacctgagacatagaaacaactttgtaagaatagctatcattatattaccattgtatttaatcctttgtttttatgtgttacaattatcttc

SEQ ID NO: 205357 - DNA, 253 bp, Homo sapiens
catgcactttaactcttacccatttcaaaaaagtatttacatatatcatacttcattttacttttttcttttcccaaatgcctgtattttgttgctggccctataggaccaattatttaattcattaaactttccctttctcattcccaactctgtttacactaacttttctgcagwtgcagtcagctttaccttccaaatctcccattaagttatatatttctgcaataaatttcttaatttttaagaattc

SEQ ID NO: 205358 - DNA, 418 bp, Homo sapiens
ttacactaacttttctgcagttgcagtcagctttaccttccaaatctcccattaagttatatatttctgcaataaatttcttaatttttaagaattctatttttttgaatatccattttatatcacaccttgttcttgttgtattatcttatcttccctctctgaggaaattaataattacttttttcccacactgcatagactctgtttactttcagttgttttgtttattttttgtttctgtgtttgttattggctgtacctagaatctcatgattgtttgttatctgtttscgttcaagagcaatacaataaatgtttacggtaagcttcaggttcttaggtaataattgtcaactgtggcttccagacagggcaatcaggtcgagaagttttcccagaaaagctcctcatgaca

SEQ ID NO: 205359 - DNA, 418 bp, Homo sapiens
ttacactaacttttctgcagttgcagtcagctttaccttccaaatctcccattaagttatatatttctgcaataaatttcttaatttttaagaattctatttttttgaatatccattttatatcacaccttgttcttgttgtattatcttatcttccctctctgaggaaattaataattacttttttcccacactgcatagactctgtttactttcagttgttttgtttattttttgtttctgtgtttgttattggctgtacctagaatctcatgattgtttgttatctgtttgcgttcaagagcaatacaataaaygtttacggtaagcttcaggttcttaggtaataattgtcaactgtggcttccagacagggcaatcaggtcgagaagttttcccagaaaagctcctcatgaca

SEQ ID NO: 205360 - DNA, 418 bp, Homo sapiens
ttacactaacttttctgcagttgcagtcagctttaccttccaaatctcccattaagttatatatttctgcaataaatttcttaatttttaagaattctatttttttgaatatccattttatatcacaccttgttcttgttgtattatcttatcttccctctctgaggaaattaataattacttttttcccacactgcatagactctgtttactttcagttgttttgtttattttttgtttctgtgtttgttattggctgtacctagaatctcatgattgtttgttatctgtttgcgttcaagagcaatacaataaatgtttacrgtaagcttcaggttcttaggtaataattgtcaactgtggcttccagacagggcaatcaggtcgagaagttttcccagaaaagctcctcatgaca

SEQ ID NO: 205361 - DNA, 302 bp, Homo sapiens
actattttgttctcataaaagctagactcttggagaagacagaaagtgcaayggcaggaagattaatgtggatcctagaatccagaaagttgtctagagactatttaaaacggttactgcaagaaagctcaaaaagagagtaatcattcagaataggaagagatagaaatccttaaacaattaaagtaacaataccaggtgtgtatagtcagagggagagattttgcctatattattctggggagagaaataaaatatttctgtataacatcatagaaatgtaaatggagatgttaaacttc

SEQ ID NO: 205362 - DNA, 302 bp, Homo sapiens
actattttgttctcataaaagctagactcttggagaagacagaaagtgcaatggcaggaagattaatgtggatcctagaatccagaaagttgtctagagactatttaaaacggttactgcaagaaagctcaaaaagagagtaatcattcagaataggaagagatagaaatccttaaacaattaaartaacaataccaggtgtgtatagtcagagggagagattttgcctatattattctggggagagaaataaaatatttctgtataacatcatagaaatgtaaatggagatgttaaacttc

SEQ ID NO: 205363 - DNA, 471 bp, Homo sapiens
atctcagctaatcaggaggctgaggcagaagaattgcttgaacgtggaaggcagagtttacagtgtgccaagatcacaccaccctactccaacttgggtgacagagcaagacgcagtctcaaggaaaaaaaaaaagctcgaaaaatgtttgcttattttggtaaaattattcattgactatgctcagaaatcaagcaaactgtccatatttcattttttgaaattacatattaaggatctaaaacaaaggataaaatatctgcaaaaatatttgcatttctggataaattagtttcctgatttaactccttgytgacactgaatctattttaaattaaacaaggtgctgataagacaaaagacaaagaaagaaattcaaaataaaattgaaagatgaaatcagagcttaccagagataaaatttcctctgacagtgtaaaagagatcttcatacaaaaatcagaatttata

SEQ ID NO: 205364 - DNA, 574 bp, Homo sapiens
aatctatatcagtaatgtgtgagaagtattagaataatgcttgtatttctggattggcatcgatttctattgagactggaaatgtaacagaagtgagcaaaaaagaatttaaattgtggatasttgagttttatacctaggagttcgagaaatacattttgttactatcaaagcagttggcacaagagtgtacaaaattccctaattgtgtctatgtggagaagacatagacaaacagagaatagcaaaacagaaatagcaaaaaagcacaaataaattttacctgtatttttaagtaaaagccaattagagaaggaaaacatgaaatttgtgttttatcaaaatttttctctttctcataatatagttgaaaatattactgcaaaaaatttgaagcactggtatgttcacaaaaaaagtaaaatataaggtcaaaaccatgggaatgcagggagcagacaaaatacacctaaacacggaaactgattttgccctacagacatgtagcaaaatgaatgagtgcagattcctactgtcatacatcacataggatagtaaagaaatacatagtttt

SEQ ID NO: 205365 - DNA, 574 bp, Homo sapiens
aatctatatcagtaatgtgtgagaagtattagaataatgcttgtatttctggattggcatcgatttctattgagactggaaatgtaacagaagtgagcaaaaaagaatttaaattgtggatacttgagttttatacctaggagttcgagaaatacattttgttactatcaaagcagttggcacaagagtgtacaaaattccctaattgtgtctatgtggagaagacatagacaaacagagaatagcaaaacagaaatagcaaaaaagcacaaataaattttacctgtatttttaagtaaaagccaattagagaaggaaaacatgaaatttgtgttttatcaaaattwttctctttctcataatatagttgaaaatattactgcaaaaaatttgaagcactggtatgttcacaaaaaaagtaaaatataaggtcaaaaccatgggaatgcagggagcagacaaaatacacctaaacacggaaactgattttgccctacagacatgtagcaaaatgaatgagtgcagattcctactgtcatacatcacataggatagtaaagaaatacatagtttt

SEQ ID NO: 205366 - DNA, 577 bp, Homo sapiens
tttaatctatatcagtaatgtgtgagaagtattagaataatgcttgtatttctggattggcatcgatttctattgagactggaaatgtaacagaagtgagcaaaaaagaatttaaattgtggatacttgagttttatacctaggagttcgagaaatacattttgttactatcaaagcagttggcacaagagtgtacaaaattccctaattgtgtctatgtggagaagacatagacaaacagagaatagcaaaacagaaatagcaaaaaagcacaaataaattttacctgtatttttaagtaaaagccaattagagaaggaaaacatgaaatttgtgttttatcaaaatttttctctttctcataatatagttgaaaatattactgcaaaaaatttgaagcactggtatgttcacaaaaaaagtaaaatataaggtcaaaaccatgggaatgcagggagcagacaaaatacacctaaacackgaaactgattttgccctacagacatgtagcaaaatgaatgagtgcagattcctactgtcatacatcacataggatagtaaagaaatacatagtttt

SEQ ID NO: 205367 - DNA, 205 bp, Homo sapiens
gtgaattcctcaaactcttgcatatttaaaatcacatttttgaaccttgatgcttgaagtgtagyttgggtaacagatgacctttaagccaattttggcatgcaaggggttgtttattaggcatcagcactgctgaaaatcgtggggatgcaggcttaatttcaacactattctaaatacttgaaagatattatataattcttta

SEQ ID NO: 205368 - DNA, 205 bp, Homo sapiens
gtgaattcctcaaactcttgcatatttaaaatcacatttttgaaccttgatgcttgaagtgtagtttgggtaacagatgrcctttaagccaattttggcatgcaaggggttgtttattaggcatcagcactgctgaaaatcgtggggatgcaggcttaatttcaacactattctaaatacttgaaagatattatataattcttta

SEQ ID NO: 205369 - DNA, 205 bp, Homo sapiens
gtgaattcctcaaactcttgcatatttaaaatcacatttttgaaccttgatgcttgaagtgtagtttgggtaacagatgasctttaagccaattttggcatgcaaggggttgtttattaggcatcagcactgctgaaaatcgtggggatgcaggcttaatttcaacactattctaaatacttgaaagatattatataattcttta

SEQ ID NO: 205370 - DNA, 205 bp, Homo sapiens
gtgaattcctcaaactcttgcatatttaaaatcacatttttgaaccttgatgcttgaagtgtagtttgggtaacagatgacctttaagccaattttggcatgcaaggggttgtttattaggcatcagcacygctgaaaatcgtggggatgcaggcttaatttcaacactattctaaatacttgaaagatattatataattcttta

SEQ ID NO: 205371 - DNA, 377 bp, Homo sapiens
tagtttgggtaacagatgacctttaagccaattttggcatgcaaggggttgtttattaggcatcagcactgctgaaaatcgtggggatgcaggcttaatttcaacactattctaaatacttgaaagatattatataattctttaataaactcctgtgtmtaaaaatggttcacattaactcaatatccatgattaaacatttacaaaatcaagacactgttatttagtggagacttgctggctattctatgagaggaggtattgttattgtaatctcatcctctcataaatatgtatcatattactcataaccagcccttcatattctattcctattttggtattttaaaataagatatctttgaaactcttgaatt

SEQ ID NO: 205372 - DNA, 377 bp, Homo sapiens
tagtttgggtaacagatgacctttaagccaattttggcatgcaaggggttgtttattaggcatcagcactgctgaaaatcgtggggatgcaggcttaatttcaacactattctaaatacttgaaagatattatataattctttaataaactcctgtgtataaaaatggttcacattaactcaatatccatgattaaacatttayaaaatcaagacactgttatttagtggagacttgctggctattctatgagaggaggtattgttattgtaatctcatcctctcataaatatgtatcatattactcataaccagcccttcatattctattcctattttggtattttaaaataagatatctttgaaactcttgaatt

SEQ ID NO: 205373 - DNA, 410 bp, Homo sapiens
gaattcctcaaactcttgcatatttaaaatcacatttttgaaccttgatgcttgaagtgtagtttgggtaacagatgacctttaagccaattttggcatgcaaggggttgtttattaggcatcagcactgctgaaaatcgtggggatgcaggcttaatttcaacactattctaaatacttgaaagatattatataattctttaataaactcctgtgtataaaaatggttcacattaactcaatatccatgattaaacatttacaaaatcaagrcactgttatttagtggagacttgctggctattctatgagaggaggtattgttattgtaatctcatcctctcataaatatgtatcatattactcataaccagcccttcatattctattcctattttggtattttaaaa

SEQ ID NO: 205374 - DNA, 419 bp, Homo sapiens
cttaaagatttcagacatgctgaaactgattgaagtatcatctgctacccgatagattaattatctctagttgtaggagtggatacatctttaatggtatatttttggttattgtcttatttttgatgtagtattctatcaataatttattaaacctggcatccttgggtgagcatagatttttcaactttggtgttatattgtgtttgcttttaaaaactgcttttgaggccaggtatggtggctyttgcccatatccagcactttgggaggccaaggtgggcggattacctcaggtcaggagttcaagaccagcctggtcaacatggcaaaaccatgtctctactaaaaacacaaaattagccaggcatggtggtgcatgcttgtagtcctaaccactcgagaggctgaggcaagag

SEQ ID NO: 205375 - DNA, 328 bp, Homo sapiens
tactctctaaattctagatttataatttagggtttaaattataaaatcattaaataagatacaagtgaaatatagtcaaatatccccttggaaaaaaattaagtggcctttaaagtgaggtattcatatatgtaattttacaatcctctagtgatagaattaattaaatatgccaccaaattgattaattcctacagtgttaaaagagaagcactaacaataccrgtgaccatgtaacatggatttaagctacaagtcatagaaatgtgacgagaagcctcagcgctgtaaaacagagggtggaagaaagcttttcctctctcaaatg

SEQ ID NO: 205376 - DNA, 328 bp, Homo sapiens
tactctctaaattctagatttataatttagggtttaaattataaaatcattaaataagatacaagtgaaatatagtcaaatatccccttggaaaaaaattaagtggcctttaaagtgaggtattcatatatgtaattttacaatcctctagtgatagaattaattaaatatgccaccaaattgattaattcctacagtgttaaaagagaagcactaacaataccagtgaccatgtaacatggatttaagctacaagtcatagaaatgtgaygagaagcctcagcgctgtaaaacagagggtggaagaaagcttttcctctctcaaatg

SEQ ID NO: 205377 - DNA, 328 bp, Homo sapiens
tactctctaaattctagatttataatttagggtttaaattataaaatcattaaataagatacaagtgaaatatagtcaaatatccccttggaaaaaaattaagtggcctttaaagtgaggtattcatatatgtaattttacaatcctctagtgatagaattaattaaatatgccaccaaattgattaattcctacagtgttaaaagagaagcactaacaataccagtgaccatgtaacatggatttaagctacaagtcatagaaatgtgacgagaagcctcagcgctgtaaaacagagggtggargaaagcttttcctctctcaaatg

SEQ ID NO: 205378 - DNA, 650 bp, Homo sapiens
gccttttggactttgcaatttctatgttttggaacctatttcttacagtttttctatgctaaactctgtcctggtcagttccagagtgtatgaagaacaaaatgatgtaattgtatgtgacctggctgtagtggaacaaatttgactcttaagtatgcaggctctaattttcctgtctggttttggtaagtattccttacataggttttttctttgaaaatctgggattgagaggttgatgaatgaaaattaatcctttcactttgttgtatataagtttgcaataattaggtcagagtggagttttaaggtcaygaaggaggctgatgacttacaaataatgggctctgattgggcaactactcatctgagttccttccatttgacctaattaagcttatgaaatttacactaagccatgagctcatctttaaaaagtcttattaaaagattttcagctgttccaaatgggacttattagtggaatgtgttttaaaggatcatatgagatgaatgaaaggtatttgatcctttctttccataataataaaatgatggtttggaaaaagaggctacagtctaaccacagtgctattattaggctttcttgttaaacataggtctaagcctaagtatgtcaatacaacaaa

SEQ ID NO: 205379 - DNA, 571 bp, Homo sapiens
tttcctgtctggttttggtaagtattccttacataggttttttctttgaaaatctgggattgagaggttgatgaatgaaaattaatcctttcactttgttgtatataagtttgcaataattaggtcagagtggagttttaaggtcacgaaggaggctgatgacttacaaataatgggctctgattgggcaactactcatctgagttccttccatttgacctaattaagcttatgaaatttacactaagccatgagctcatctttaaaaagtcttattaaaagattttcagctgttccaaatgggacttattagtggaatgtrttttaaaggatcatatgagatgaatgaaaggtatttgatcctttctttccataataataaaatgatggtttggaaaaagaggctacagtctaaccacagtgctattattaggctttcttgttaaacataggtctaagcctaagtatgtcaatacaacaaatacttactgtttcatttctagtaatgaaaaaaaaaaaacaagtctttctggcataaggatgattttcatctggttattttgaaacattt

SEQ ID NO: 205380 - DNA, 386 bp, Homo sapiens
gaattctgaggtcaggggacaagaatcacaagttccccagtgggagactgaggagrcagtgtcctttctgcccttggtctactggctaagaaccttcctcagcctgacctttccacattgcactttcagctctgtttgcaattttcctcctgagggattcctgctgagggaatcccagtgttcgatactgaaatctatacgttcctaatgggtggttaaaaaaaaaaacctcagcaagagaagcagaaaatgtttcctcttcctgaaaaactgtagaaaggcaggcaccattctgggtgggacatggtccttgcaaaagtctttatggtttttttttttattttgagatgaagttttgctcttgttgcccagactggagtgcagtg

SEQ ID NO: 205381 - DNA, 390 bp, Homo sapiens
agtgggagactgaggagacagtgtcctttytgcccttggtctactggctaagaaccttcctcagcctgacctttccacattgcactttcagctctgtttgcaattttcctcctgagggattcctgctgagggaatcccagtgttcgatactgaaatctatacgttcctaatgggtggttaaaaaaaaaaacctcagcaagagaagcagaaaatgtttcctcttcctgaaaaactgtagaaaggcaggcaccattctgggtgggacatggtccttgcaaaagtctttatggtttttttttttattttgagatgaagttttgctcttgttgcccagactggagtgcagtggcataatctctgctcactgcaacctctgcctcctgggttcaa

SEQ ID NO: 205382 - DNA, 389 bp, Homo sapiens
aaggaattctgaggtcaggggacaagaatcacaagttccccagtgggagactgaggagacagtgtcctttctgcccttggtctactggctaagaaccttcctcagcctgacctttccacattgcactttcagctctgtttgcaattttcctcctgagggattcctgctgagggaatcccagtgttcgatactgaaatctatacrttcctaatgggtggttaaaaaaaaaaacctcagcaagagaagcagaaaatgtttcctcttcctgaaaaactgtagaaaggcaggcaccattctgggtgggacatggtccttgcaaaagtctttatggtttttttttttattttgagatgaagttttgctcttgttgcccagactggagtgcagtg

SEQ ID NO: 205383 - DNA, 390 bp, Homo sapiens
agtgggagactgaggagacagtgtcctttctgcccttggtctactggctaagaaccttcctcagcctgacctttccacattgcactttcagctctgtttgcaattttcctcctgagggattcctgctgagggaatcccagtgttcgatactgaaatctatacgttcctaatgggtggttaaaaaaaaaaacctcagcaagagaagcagaaaatgtttcctcttcctgaaaaactgtagaaaggcaggcaccattctgggtgggacatggtccttgcaaaagtctttatggtttttttttttwttttgagatgaagttttgctcttgttgcccagactggagtgcagtggcataatctctgctcactgcaacctctgcctcctgggttcaa

SEQ ID NO: 205384 - DNA, 605 bp, Homo sapiens
acactctttaaaagctgattttgtcattttaactccctgatttttcacacacacacatacacccacacaaactctttaaaagctgatttttttcattttaactccctaatttttgttacgttagttttaactaaagtcagcccaactcccaaactttctcctttcagtttcttataaatttagaaaatcaaatcagttcttaaaactcagtgagaatggaactgattttggcttaaaatgcctaaaactttatttatttacttttatcttctcattcatatgtttctatcaggcaggcatactcagattayattttacatttctggtaaataaccacagtcaagtaaagggaaatataccctgaagtcataaaaagaaagaaaaaaataaaaacttattaatatgcacttacatgcaaaaacagatctccacatttccaagaagacatatttgtacaaaatgtaaatatcacattatgtgactgttatagataaaatttgaaaaatgtacttgcttttcatgtgtgcctcagatatttctttaatttaaagcatcgatctaagcttactcttccccaaactcaaaatcaaatggagtttctaaat

SEQ ID NO: 205385 - DNA, 515 bp, Homo sapiens
tataacagcatctaggaactttattgtagagtcactcactgaaaagcagatcaatttacaagttataaattgggagctgtgctccttaaataaaccatatttagggacataactacaaatctgaattgatctaaacttcaaatgcaaactcacaagtacagaaatgtattaccatagagattatgtgtgatgcttcgagttaccaaaatgtgtaggtgagactttccactgtattacagcacaaatatgacttaagtgaagtacctttatctaaatattctatagtcayaggctttcaaagcagacagtagctctgggtaatgtatcacaggttttgcaacagaagtaactgaggtccagagaatttaagtcacttccacaaaatcaccaagttagtccatgacagagctgcaattatgatgcagatttcctgtgtcctggtccagttttaatttagaagcttttctttcaaattatttcaacaattcattcatgaaagtaacagcctgtttagt

SEQ ID NO: 205386 - DNA, 516 bp, Homo sapiens
ctttaactttaccagggatagtaggaaaataagagaataaagaaagagaaaggtaagccccttctgaaaggtggcctcaggaaaatctgggactctcattcacacccggtgcctttgatcctttctctaaaaatgttttacactggggaaaaaaatccacaacattgcgtttaaggcaactacatactgattcatgtagatacatattatgttcatacagaacaagcctgaccccccagcttgagtatcttttttgtctgataacttatgatcatctggtaacttaagaaaaaaggacatatgtagatatatatagacagagatgatacagataaaatatttaatgaatgtgtagaagctattagagcatttgtgtgtatgtttcttataactaaagaagaataaaaagagaaaaagatacatttgtgttatgttctatttttccattcyctgttccaacaagacagtctttcttcattgaggagattttgctgtctcaggagaaggaagtggagg

SEQ ID NO: 205387 - DNA, 376 bp, Homo sapiens
tctaggaaactagttaaaataatctgtacatagcaagttatttgcccagtagtttatttttttattacagagatcttaatttctttcattaagattaaggatagtcttttaaactgtgtgttcattttgggaatgtcagcttatttttaattgtgttgtttgtttacttrtagtaaaaatgcatattctttatcacatcattgttcaatgtttgatatcatagtacagtcatttccaataaagtttatgccaaatgaagtttgagaagccttatgataaatcaaattatttcaagccacagaacctgttaaaagtagccacttggtagtgcaaaataaattgaaagtgatatgaaaatagtgacaaatggctgtgc

SEQ ID NO: 205388 - DNA, 376 bp, Homo sapiens
tctaggaaactagttaaaataatctgtacatagcaagttatttgcccagtagtttatttttttattacagagatcttaatttctttcattaagattaaggatagtcttttaaactgtgtgttcattttgggaatgtcagcttatttttaattgtgttgtttgtttacttatagtaaaaatgcatattctttatcacatcattgttcaatgtttgatatcatagtacagtcatttccaataaagtttatgccaaatgaagtttgagaagcctyatgataaatcaaattatttcaagccacagaacctgttaaaagtagccacttggtagtgcaaaataaattgaaagtgatatgaaaatagtgacaaatggctgtgc

SEQ ID NO: 205389 - DNA, 566 bp, Homo sapiens
agatctcaccttgctgagtctcgcttttctcatctgtaaaatgggaatatatgtcttacccacaaagttttttaagaaataaataatagggaaaaataaactgcatgcatggaacgtatacatggcagttgcttttgctattattatagtttcttcttccctgggggttcctgatctggggacccctgtacctgtctccgtgtggacctgatgttctcagtctggctgctgcagccgaacagacccgtgacccctttgaaacrcctcctcagcaagttgaacctttctctgggaatttcagagtgggttcactagctatgaggcctctgcttgttgctagatgccgagaaaacaaatattgttttagaaacattaataattgaaaagttttcagcagagaatcggccagcattaggggaattgaaaattaagactaagacactacctcaagctgatttcctgatgaataattcatggggccgatgcccacgaagacctggaggagaaaataccttctgtgcctgtcctccccatcactgccaccacgccgtcacctggacgtttcc

SEQ ID NO: 205390 - DNA, 521 bp, Homo sapiens
gagcttgtgggaggcttccaagaagaataccccaactcacctcttttcctagttgtcagctcaaactkatttcgccagtttgggggtaggaagacagatagtctacatgagaactggcttcacaggccagacttagtaggtctcaaactcgtagcccctgtgatgaatctggacctatagatatgttttactggaacaaaacaatgttttgtttaggaaaaaagttggaaataatcattgctgtggacctaattgtgtccctctgaattcctatgtggaaggcccaaccagaaatgtgatggtatttggagagggggatttagggaggtaattagatttagatgagttatgagggtgcggtcctcatgatgggattagtgtccttataagaagagacaccagagaacttgtactctcaagctctttctctctctctctccccctcaactcaccaccatatgaggacatagtgagaaggtgaccgtctgcaaaccaaaacaaagaggcctcaccagagacca

SEQ ID NO: 205391 - DNA, 401 bp, Homo sapiens
tcatttcttcactcaacaaacattcattgaccttcactttgtgccaggccctaagctagaggctgggggttggggaagggacagaaagacaagttaacaacctgagctatgagctgccctgcggagattcatgccagtctgggatccattgtaacaatggctgccattggttgcaggtctactatgtgcattgagtcaagcattttggacaaatgatcttgtttactcctcacaaccctaggagatactattatcatmcccattttatagatgatgacactgaggcttagaaaggttggttaagacacactttccaaggcatacagctagtgtgtggcagatccaagattgtgcccagggattctgaacccgaagtctattctatttgaccactgtgaatt

SEQ ID NO: 205392 - DNA, 476 bp, Homo sapiens
gtaatcctcatgtgttgagggagggacctgttgggaggtgattggattatggggacagttttccccatgctgttctcttgacagtgagtsagttctcatgagcgctggtcgttttaaagtatgtcattcccctttgcttgctctctctctctcctgccacattgtgaagaaggtacctgcttcccctttaccttctgccatgattgtaagtttcctgaggcctccccagccatgcagaactgtgagtcaattaaacctcttttgtttataaattacccagtctcaggtagtatctttatagcagtgtgagaatggaataatacactacctatgacctgtaaggcttcacttcaagacacttcaagatatctcctccttttaatcttaaaccaatgtgtaaccttcatgcattgatttacgattttgcctgtagtttctgctttcctgaagtttacccttgtctttaaaaaccctta

SEQ ID NO: 205393 - DNA, 476 bp, Homo sapiens
gtaatcctcatgtgttgagggagggacctgttgggaggtgattggattatggggacagttttccccatgctgttctcttgacagtgagtgagttctcatgagcgctggtcgttttaaagtatgtcattcccctttgcttgctctctctctctcctgccacattgtgaagaaggtacctgcttcccctttaccttctgccatgattgtaagtttcctgaggcctccccagccatgcagaactgtgagtcaattaaacctcttttgtttataaattacccagtctcaggtagtatctttatagcagtgtgagaatggaataatacactacctatgacctgtaagscttcacttcaagacacttcaagatatctcctccttttaatcttaaaccaatgtgtaaccttcatgcattgatttacgattttgcctgtagtttctgctttcctgaagtttacccttgtctttaaaaaccctta

SEQ ID NO: 205394 - DNA, 497 bp, Homo sapiens
gcattgccagcagaggctgggcaagcactcgcacactgaggctggtcctctcttgctgccctttgacctccatgtgaagagacccgggatagcctgctggatgacaagagaccttgtggagcacagttaagctggcccaactggtgtgtcccctggaaccagcctgctaacctgtgagtgaaccaccttagaccatccagctccagtgagccagcccagcaaacctattgaatcatgagctaaataaagtgacagttgttttaagccactrtgctttgggtggttcactatgcagtaagagtaaactgaaataataggcaagtattcagtgagtgcctaatctgtgccaagcattgaacttggccttggggatgtgtagccccgtgatgggcatgaaatccaggctggtcaatgagagcactccatcccctgatcacagcttcctgctggctggtctgccttttgcttggggtgggcaatccgtgctcttgtcttgc

SEQ ID NO: 205395 - DNA, 286 bp, Homo sapiens
gagttcatgtaattgcaactcctactgctttgccctctttccttcccatgtaccagccccggaagggagaggtgytagtttcccaatggggccagacagattgaaggaagagagaagccaatcacacccgccttcccagtgctagcttccagtccgacatagagtggatctgggaaactgcaagatcgatggttaaattgagttcagagttggatgactactttggtctggacacactatttattgaattgagactctattttaatctttcaacaaatatttactg

SEQ ID NO: 205396 - DNA, 578 bp, Homo sapiens
attctttctctgatttttaagagtctgatagttttagctgttaaaatttaaacctttgattcattctgagtaatttttgtatatggtgtgaggtagggattcaacattattcattcttttacatgtagatatccagttgtcccagcaccttttattgaaaaaactatccctttcccattgaataggcccttgccccaaattaatcaaccatagttatacggatttatttctggaatctaattttttccactgatacatatgccaatactgcactgtcttgattactgtagttttgtagtaagttttgaaactgagaagtgtgaattcttgaacttttactttttttaagattcaagatggaattcttggatttctatawgaattttgggataagcttgtcaattcctgaaaggagacaagctaggataagaatgctacaagaaaagaaaatcacaggtcaatatccctgatgagtaaaggtaagaaaactggataggcacatgcaaaagaataaaattggacacttggtttacaccatatacaaaagttaattcaaaatgtatttaaatcttaaatgt

SEQ ID NO: 205397 - DNA, 538 bp, Homo sapiens
ctgcagagagattctttttttgagacaggttcttgttctgttgcctgggctgaatatagtgaaggatcrtaggtcactgtagcctcgagcagcctcgaactcctgggctcaagtgatcctcctgcctcagcctcccaagtagctggaactacaggtgtgtaccactatgcctggctaatttctaaatttttttaaaagatggggactggctgcattgcccaggctggtctcaaactcatggcctcaagtgatctcacttcagcttcccaaagtactgggattagaggcatgagccaccacacccagctgcagacaggtgcttgatggaactttggttctgtctctgttagctgtgggcctccaaaattcatgcaatctctctgaacttgattttctttatcagaagaaagggggtcatgtacccacccaaaggaggattcagtcttatcaggcatttagggtggtgtaaaagtaattgcggttttggccattaaaagtaatgatctctattggctctacctcttatatgctgatatat

SEQ ID NO: 205398 - DNA, 484 bp, Homo sapiens
gaattcagaagaggctacttgagatcaggactaggaactgttcatatcccagtctatgtcaacaacaccccctagagttkgaatacagctaacacaatcttgcttggaatcttaccaaatgtttacccatacttaaaagctgtgatgaacaggctatctttttaaaaattctccaagttaatattaccacagttttttttatggctgtatataactctaattactgaagagttggtgaagcagccctagaactatgtttataaaacaaagaaactggccctatgggtcttccttcagcctacccctctgccaaggttagggtggtctgttatgttccagcatgtttagttggattccaaattttcagacaaaaactgtacctttctcctgtggttatttaacaaaattttttgcatctgtcatattcttgcccagctttaagccatattcttcctcacggtccttcattttcaaactacaccgc

SEQ ID NO: 205399 - DNA, 587 bp, Homo sapiens
acctgattcttcagtgccccaaaatcgaagaatatgaacaaacatcaagaccatccaggaaaacatgacctcgacaactaactaaatatggtactggggaccaaccaggagtgacagagatatgtaaacttttagacagagaattcaaaatagttgttttgagcaagctcaatgaaattcaagataacacagaaaaggaattcagaatcctatcagataaatttaacaagagattgaaataatttttaaaaattaagcagaaattctagagctgaaaaattctattgatgtactgaaaaacatatctgagtctcttaatagcagaactgatcaagcagcagaaagaaatggtgagcttgaaggtaggctatttgaaaatacacaatcrgggagacaaaagaaaaagaatagataagaattaagcatgcctgcaagatctagaaaatagcctcaaaagggcaaatctaagagttgatggtcttaaagaggaggtgatgaaagagataggtatagaaagtttattcaaagtaataataacagaaaacttcccagacctagagaaagatatcaatattcaattataggga

SEQ ID NO: 205400 - DNA, 584 bp, Homo sapiens
atgtttcagtggagaaaggcaggagaaagacagagtgaccttgcttctgtggatttctgattcgttaaggtgccatcttttggggtattgtattctgagtccgtacacggctttccaatgcccttagaaatagatcaaatttcttagcttagctaatcaggccctacatgatctggtggctccgactcccgtgacctcccytcgcaaatctacacctggctttaaatgcgctcctattttctatcttcagtggtcctttttcttgttcttaaataggccaagcagcttttagcctttatattttcagtttactttactgggattcccttcctccagatgattaacatggctggttcctttgttatctcccaacagtgagagtgaaggccatagttctctttccgcaaaaccctgattcctgtcctaattttgccacccacacacacatttgttatcaagtagctccttctgtcaaaatcatgcaagttgttctgaaatttcaatacaactcagccttctgtcctttcaagttcttctaacttccatgaaaagcttgctcaagaaacagctgacaatttcttggt

SEQ ID NO: 205401 - DNA, 584 bp, Homo sapiens
atgtttcagtggagaaaggcaggagaaagacagagtgaccttgcttctgtggatttctgattcgttaaggtgccatcttttggggtattgtattctgagtccgtacacggctttccaatgcccttagaaatagatcaaatttcttagcttagctaatcaggccctacatgatctggtggctccgactcccgtgacctcccctcgcaaatctacacctggctttaaatgcgctcctattttctatcttcagtggtcctttttcttgttcttaaataggccaagcagcttttagcctttatattttcagtttactttactgggattcccttcctccagatgattaacatggctggttcctttgttatctcccaacagtgasagtgaaggccatagttctctttccgcaaaaccctgattcctgtcctaattttgccacccacacacacatttgttatcaagtagctccttctgtcaaaatcatgcaagttgttctgaaatttcaatacaactcagccttctgtcctttcaagttcttctaacttccatgaaaagcttgctcaagaaacagctgacaatttcttggt

SEQ ID NO: 205402 - DNA, 552 bp, Homo sapiens
aaagatttttttttaccgttattcgcatacttccttaaagagattttcccagaagccctaattactcttgccagtgttggcagatgattactgtttttctcttggctaaagcaaagcagaataacttgaatttcagggagactgaggatgaagtgttgcctcattgtattgtgtcrggagcagctctaagaaactcaatcaaaccagctattcactgtacatgtaactactgttgaaacaacaactaagaatctagttcagattctgaaattttccccagaattggaactgctaaaagaagacctgtcagtatcttgaccaacatcagttccagggaaagcatctcttatttctcacactgaaatgttcttgatttgaggtagagtctgtccagtctactctctcatgttttttccagtctggtgcttgggctgtgggcccagtggctgatcatactcaatttgtccagctcagtttcaactgcatgagaggccagctgagcagcttcctctggagtttggagagagggctaaattgggagtgaaatttccc

SEQ ID NO: 205403 - DNA, 491 bp, Homo sapiens
agattttcccagaagccctaattactcttgccagtgttggcagatgattactgtttttctcttggctaaagcaaagcagaataacttgaatttcagggagactgaggatgaagtgttgcctcattgtattgtgtcaggagcagctctaagaaactcaatcaaaccagctattcactgtacatgtaactactgttgaaacaacaactaagaatctagttcagattytgaaattttccccagaattggaactgctaaaagaagacctgtcagtatcttgaccaacatcagttccagggaaagcatctcttatttctcacactgaaatgttcttgatttgaggtagagtctgtccagtctactctctcatgttttttccagtctggtgcttgggctgtgggcccagtggctgatcatactcaatttgtccagctcagtttcaactgcatgagaggccagctgagcagcttcctctggagtttggagagagggct

SEQ ID NO: 205404 - DNA, 548 bp, Homo sapiens
aagatttttttttaccgttattcgcatacttccttaaagagattttcccagaagccctaattactcttgccagtgttggcagatgattactgtttttctcttggctaaagcaaagcagaataacttgaatttcagggagactgaggatgaagtgttgcctcattgtattgtgtcaggagcagctctaagaaactcaatcaaaccagctattcactgtacatgtaactactgttgaaacaacaactaagaatctagttcagattctgaaattttccccagaattggaactgctaaaagaagacctgtcagtatcttgaccaacatcagttccagggaaagcatctcttatttctcacactgaaatgttcttgatttgaggtagagtctgtccagtctactctctcatgttttttccagtctggtgcttgggctgtgggcccagtggctgatcayactcaatttgtccagctcagtttcaactgcatgagaggccagctgagcagcttcctctggagtttggagagagggctaaattgggagtgaaattt

SEQ ID NO: 205405 - DNA, 462 bp, Homo sapiens
tgtccttcccctttacaaaactaagtcatgacctgagcctttttttagggtgtcctatgaagttttgttagaatagcaacgggcctcattttttccatttgcccatctatcctgtttgccctaactaaaatacagagaccatgcaaccttatarcttgatggaaaatttttacaagatctttttataccgaatgtttttacaaaatgcgtggtatctttgtttttaataattttaaactcgtgttattgatccttatgtaataacagttttgtactcaaaccaagcttgcctttaatcttgtctgtctccagcttctctccctctcccagacagctgaccacacaaatctgactgttttgttttagattccttcaagtgttcactaattcctttagagtaagtccctggaaatgatgtacaggtctctttatgaccttgcctcttcactcctgtcctgcctt

SEQ ID NO: 205406 - DNA, 584 bp, Homo sapiens
ggattactttctccaggaatttcaactgatgattagtcagattccacttgaccatttccagtggttaggattttggctggttttgaagcatcacggctctgactggagagctctaattgttagaaaggcgtgccatatacctagttaaaatatcttttctgaagctttctcctgttagtcttggtcaattcttttaaaagatctcagaaaaagtgtaatacttcttccagttgaacacccttcctgtgtttaggggcagacatctcatttgctctmagtcctgtcttatctaaaatttgcaggtatgtttaactttacaattatgaaatatttttagatgtctcattattctactccctagcaatacacagattttcagtatagcaccaacatttcattcatttaacagatagttactgaggccaggtaatgtgctgagttgaggattcacaatgaaaggtgatggagtttgtgatggcagaaatataggatggtttaaaagcacacagtaggaacacatagcccagtcaatgatagggagggtaaggaagagtatgctgaaatcttagggtgaaggcagggaa

SEQ ID NO: 205407 - DNA, 584 bp, Homo sapiens
ggattactttctccaggaatttcaactgatgattagtcagattccacttgaccatttccagtggttaggattttggctggttttgaagcatcacggctctgactggagagctctaattgttagaaaggcgtgccatatacctagttaaaatatcttttctgaagctttctcctgttagtcttggtcaattcttttaaaagatctcagaaaaagtgtaatacttcttccagttgaacacccttcctgtgtttaggggcagacatctcatttgctctaagtcctgtcttatctaaaatttgcaggtatgtttaactttacaattatgaaatatttttagatgtctcattattctactccctagcaatacacagattttcagtatagcaccaacatttcattcatttaacagatagttactgaggccaggtaatgtgctgagttgaggattcacaatgaaaggtgatggagtttgtgatggcagaaatataggatggtttaaaagcacacagtaggaacacatagcccagtcaatgatagggagggtaaggaagagyatgctgaaatcttagggtgaaggcagggaa

SEQ ID NO: 205408 - DNA, 586 bp, Homo sapiens
tgctatgttgcccaggctggagtgcagtggtgcaccatcacagctcactgcactcctggactcaagtgaacctctcacctcagcttcccaagcagctgagactacaggtacacaccaccatgcatggctgatttatttttttatagagatggggtttcgccatgttgcccaggctggtctcaaactcctgggctcaagcaatccacctgccttggcctcccarattactgggattacaggtgtgagccccgcttccggccaagccgtgatcttaaagcaattcatttataatgtctaaaagttggggggaggttctgattttgttatttaaaaaaaaatctcaagttagtgatacttgtgttgagaaactaagtaaattaaacactttttcccctagttattaaatttgaatagagtggaaataacaaaaagttatcattttaagcaagaattttgtttaatattttttctctttcatgtaatctgtatgaaattgctagtccttataaaagttgagcaatacattgctcctttgctttaagtattcttcagaaaattttgtaaataggaagaattaaagaagagg

SEQ ID NO: 205409 - DNA, 530 bp, Homo sapiens
tgagcaatacattgctcctttgctttaagtattcttcagaaaattttgtaaataggaagaattaaagaagaggtattagcttatctatggagtttgttaaaatctatgtaaaaagaagagaggctgtgatgttacatgtggaagacaactaaaacagaccaactgtagggcagcaaatgaaagaaraaagtaggtcagcgagccccctggcgaacaacaaattgctattatttaaaaggatggtcagagagtaaaactgcctgtgaacaagaatgcttaagtgaacaatggtaaatctgatagaaaagcagggtcagagcaaaacagttgcaaagctcagagtgtaaactgcatgtcctcaggtcaagcagaggatgaaaagcagaacaatctcctcattcaagaaacttcctggcggccagcaagctgagtaatgagaaacaaactgagtggaggccttccacagagtaagtagaagcaaacagcctcaggatatggagggaatcgagcagattttgagactataaact

SEQ ID NO: 205410 - DNA, 520 bp, Homo sapiens
tgtttataccaccttgctatcttgtaccgttctttaaaaagcctaattttggtctttaggactaaattatctctcagaactccactccatctgctgactttatttcagtttggtcttttggatacaaaagtgctgcctctgcagcccactctccaccctccaagcctctgcttgtgtattctgttcatgtgttaattctgaacagcatgtcaggactacctgctcagatgccagccttacctggttctctgatcatagtgtcacactgtagcaataagtcatccactgatttcacagccttgcctatttatttgattcttccagatcctagccaaattaaacactartcttacctcagtcatatctgttcacctgtcatccacaagccaatacttaaacttcggcaaaaagcacagtataaaacacatgcaaaactgacaggaaatttcaagagaaaaacattttaatatagaagatttttccacttcatttattaatctcagtgtactctgcatacatt

SEQ ID NO: 205411 - DNA, 520 bp, Homo sapiens
tgtttataccaccttgctatcttgtaccgttctttaaaaagcctaattttggtctttaggactaaattatctctcagaactccactccatctgctgactttatttcagtttggtcttttggatacaaaagtgctgcctctgcagcccactctccaccctccaagcctctgcttgtgtattctgttcatgtgttaattctgaacagcatgtcaggactacctgctcagatgccagccttacctggttctctgatcatagtgtcacactgtagcaataagtcatccactgatttcacagccttgcctatttatttgattcttccagatcctagccaaattaaacactaatcttacctcagtcatatctgttcacctgtcatccacaagccaatacttaaacttcggcaaaaagcacagtataaaacacatgcaaaastgacaggaaatttcaagagaaaaacattttaatatagaagatttttccacttcatttattaatctcagtgtactctgcatacatt

SEQ ID NO: 205412 - DNA, 599 bp, Homo sapiens
taattttccctcatctatattctcttaattattttacctttattatagtgcttattaaactataacttgtattatggctgtaaaaatatctgtctgctccattgagagcaggggccatatcttattaaattttttaacccctacaatgcctacttctccacttacgtgaatataactacccagcatagtgtctagcatgtaatagacatatacgagggagttaaacatgttttacaaactttaaagattttaattgaatattatcaycagaaaaatctccataaagcattattaacatgatgttatacaagttctccactgcccactccatcaagtgcaaacttctttttcttttgcttttttaatctaacatatttattaccaattcctaaaacaaatcctctattccaggtatgctggaatctcaattgacgtcaatcctcatccttcaaaaatccctactctaatagttttggcctaaatagggatgccctcttccgctcctttccaaatcttacctagattctaagttcggctttggccctacctaatctaagataactgaatagatcactttgtcatcagtccaataattacct

SEQ ID NO: 205413 - DNA, 414 bp, Homo sapiens
aaactttcatgatttcaatttgctaccacctggggtaaagggctttggaacaccaagttcctgaagctccttaatttcttggcaagacttaagtgaattctaggatactcgatgcagtcagtttagtgctaatagatttttaaagacaaatrcatttaacatttacactcgatgggctttttaaaaacaaagcaattacttacatggcattaattatatgagcagcctccttctgacaatccaaatttttgtcttccagagtcatttctgaatatctacacattaggttctgaaaaaaagatcaaccctgacatatcttaaaggctcctctttagggatgaaagggaataaattaccaagaatcttttcagatttggggtgcttttgaccatggcagggagcctgagaacaaag

SEQ ID NO: 205414 - DNA, 524 bp, Homo sapiens
gacatatcttaaaggctcctctttagggatgaaagggaataaattaccaagaatcttttcagatttggggtgcttttgaccatggcagggagcctgagaacaaagcatgctagttttccctgggttatgtaaaattmcatgtagcttttccaagaagatcttgcagggtcaggctcctgcctgtctctccagcttcatcttgcactgcttgctctctcactcccttttgccaatcatgggcaggcctactttcagctacaagaagacacaagctttttccaacctcccagactgtagaggacagtatctacactcccagggccagtgcaaggtttaggcaagtgagatacctcaggcacaaaatctaagagggcaccaaaaaactcagtagccaagataaataattttaatgaacattattgttaaaaatcaaaattaatgtcaaaaaactataaagaatacaatagcaaaactttaaagataggatccaaccctgaacttgcacaattccacctcacttacct

SEQ ID NO: 205415 - DNA, 593 bp, Homo sapiens
acagagggcaggcatttctcaggcctccagcccaaggtagaactgtggagaaggtatggacaattcctctcacctcccctcaagccctaatatgaacagtttatgatatgaaaccctccctggaggtctatccttcatctagcaggttctcagggtggatcacaaactcttcttgccaaaggtgctggcacagccaatggctcctttgtgatgcacaacccaggcaactcctgttactggtctttgccatgtggcccctgtcctgggcactgaggcacctgcctttcttcatcagtctcattcccctcactaacacaatgagtcctctatgttgtaagtcagaagcagggtcaggtcttcctcaaactattggccactgtcagcatatcaggagtgtgcctacacctggctcaggggtgaggttaccttgaaaaagtgactgcaggatatcctcaagaagtgaggaccaggagaaagcaggaatctccagtaacaccaaacacaacttctctctgcttttccaycttcaaatctggggtaggacacctccttccacagtcatatttacggactcagatttccaagtatggctc

SEQ ID NO: 205416 - DNA, 599 bp, Homo sapiens
aagctttcaactgattggatgaggcccactcacattatgacattatcaagagtaatctgctttactcaaagtctactgatataaaaatattaattgcatcttaaaaacaccttcacagcaacatctagactggtgatggaccaaactaccatggcctagccaaatagacayataaaattaactatcacaggatctaacaggagaattattttgcaacttgaaatctgacagagaataaagttgccaaacagaactcagatcttccatgcaggctgcaaaagtccctaacagtagaattccaggcctcttctagtactaagaaacatcttgacatttagatgttgactttttggcaagggtaattaacagtttcttaacaaagatggcctaatagaaacagttccagtctacagctcccagcgcgagtgatgcagaagatgggtgattctgcatttccaactgagctttgaagacagcagtggttctccaagcacggagtttgagatctgagaatggacagactgcctcctcaagtgggtccctgacccccgagcagcctaactgggagacacatcccagcaggggccgactgacacgtc

SEQ ID NO: 205417 - DNA, 603 bp, Homo sapiens
atacttgaaagtaaacccctcactccaggaactagtgctcagctggcaaaactaacagccctcactcgggcactagaattaggagaaggraaaaagggtaaatatatatacagactctaagtatgcttacctagtcctccatgcccatgcagcaatatggagagaaagggaattcctaatttcgagggaacacctatcaaacatcaggaagccattaggagattattattggctgtacaggaacctgaagaggtggcagtcttacactgccatcatcatcagaaaggaaaggaaagggaaatagaagggaaccgccaagcagatattgaagtcaaaagagctgcaaggcaggaccctccattagaaatgcttatagaaggacccctagtatggggtaatccactccgggaaaccaagtcccagtactcagcaggaaaaatagaatagggaacctcacgaggacatacttccctcccctccagatggctagccaccagagaaggaaaaatattttgcctgcagctaaccaatagaaattacttaaaacccttcacctaaccttccacttaggcattgatagtacccatcagatggccaaattat

SEQ ID NO: 205418 - DNA, 603 bp, Homo sapiens
atacttgaaagtaaacccctcactccaggaactagtgctcagctggcaaaactaacagccctcactcgggcactagaattaggagaaggaaaaaagggtaaatatatatacagactctaagtatgcttacctagtcctccatgcccatgcagcaatatggagagaaagggaattcctaatttcgagggaacacctatcaaacatcaggaagccattaggagattattattggctgtacagraacctgaagaggtggcagtcttacactgccatcatcatcagaaaggaaaggaaagggaaatagaagggaaccgccaagcagatattgaagtcaaaagagctgcaaggcaggaccctccattagaaatgcttatagaaggacccctagtatggggtaatccactccgggaaaccaagtcccagtactcagcaggaaaaatagaatagggaacctcacgaggacatacttccctcccctccagatggctagccaccagagaaggaaaaatattttgcctgcagctaaccaatagaaattacttaaaacccttcacctaaccttccacttaggcattgatagtacccatcagatggccaaattat

SEQ ID NO: 205419 - DNA, 588 bp, Homo sapiens
cacattctataaggttttactctattacatttgtttctatccaaccttaaagctatgattgatacttatttaattttctgcttaattgatttgttccaaatctgagccatgatgacccaagcaaggccacttaaggatgccctctgccttattagcatgacctttagtataataactactatatgatttatatttagctaagtgatgatccatgggatgacatatagccttcccaggcggtttacttattttgagatgtccgtgggtgctggttttccccatgaatacctgacgttctgggactaattttccccctatttatattacgtttgcttaggatgccatgtcaaagtggcttgttgggcaggtgttrgacagcacccagcttaatttttcaaattggatataatctttgaaattttagttagtgacttgtcgtacagaaggaacactctaaattattaaatatgcctcagggtggagaatcagcacatcttcattcagtattagattcattctaattatcctctagaactcagaaattagtgagaactgcaggcatctttattcctgagagcaagtattaga

SEQ ID NO: 205420 - DNA, 509 bp, Homo sapiens
tactcactgtataggtaaaatatcattattaattttggtatttggaaactatgatggaacctatagaggccaagggagaacttccccttcaccctctgaaggttctctgaaaagtaaactgacaaaggcagattaatagaagaaatggtatacaaatttattaatgtgtacaggggagaaccacagaataattactccaaccacttaatggggtacagaagtttatataacatcttgagattacagaaataattggggctcagagcatggccaaaamcagatgatgatggtaagacaggttatgggaggaagagagaggaagcctggctagcaaaggtggtctttttatgtagatgaaacctcaaagatagcagccctcagagagaataaatggtaaatgtttcagacttttaaatgtgccagattctcagttaatctttccaaaattgaaaaagggagagcctcagagaaagcctggctgcatcaaggcagattttctcgacagatgc

SEQ ID NO: 205421 - DNA, 630 bp, Homo sapiens
ctattcagacacacaaaaaaatgtactttgaaacattggagaatacattttaaaagaacatatgttcaagacgaaggatttaaaaagaatgaaaaagtttgtgtcagttcgcaaacatctgttaattgtctcctgtgtgtctatcccttatcacgtcctggttatacatcagccaagtccctgcttcaagaactgaggcagccagaaacgtaaatgatgaattgcgataacatttactgggaacccacaggagtaatcacttagtgaaacccaaagagaaatgggaaattttcagggggcaatgatatttgagatttaaaagatgaacagaggcttgccaggtatagaaagagamaaaagagtgagcacacccccattctccccgcaaaaatcacaaatgcatgaaacaacagtcataaggaagaactccaagtactcttcatgaggcttgcaatgaaacttaaagtataaagaggagctattatgttagcccaacttaacgtcacagaggaccttatctaccatgctgaaaaatttgaaactaaatctgtaggtcatgggtatctctgagaggttttatttagaagaaaatttctttgaaagagctaccactgggtggaaaacaaaggt

SEQ ID NO: 205422 - DNA, 587 bp, Homo sapiens
ctaatgacaatgttttgcatactgaaaaattgctaggagagtagattttaaatgttctcaccacaaaataaaaatgataagtatatgtggtaatagatatgctacttagcttgatttagccattacacaatgtatacatatttctaaacatcatgtttgacatcataaatatgtacaatgtttatttttttttttaaaaagagaacacctagcctacaagcccttgtttcagactttttccagagaagctgtrctaagacagttgatacctagaaatgaccgtacagcacagactctcagcatggggattcaagaatcaggtcacttggcttctagccgcagtacaattggccctgtcactcagctcacaagattcagcacatctattagtattagaggtttccatggtgattggatgccagcctcaataaaagaatcatgacagaagcaaagagcagtttagagcaaggctggtccttgcgtgacagaaaactgctcattgttggcaaaggaactccttgcctaatagagactggacttctgacgatggggtatcaattaactatgtaacctgagtctacatggtc

SEQ ID NO: 205423 - DNA, 542 bp, Homo sapiens
aaatgctcatacaatgctggtgggaatgtgaagtagttcagtcacagtggaaagcagtttggagatttctcaatgaaatagcactaccacttaactaagcaatcccattactgggtatatatccaaaagaaaataaattattctaccaaaaacacacaagcactcatatgttcattacagcactattcataatagcaaacacatgcaatcaacccaggtgttcatcaacggttgattgaataaaggaaaatatggtacatgtacactatgaaatactatgcaaccataaaaaagaaagaaatcatgtctttagaagcaacatggatgcaactgaaggctattatcctaatcaaattaatgcaggaacagaaaaccaaataccacatgttatcatttataagtgggaactaagcattggctattcatggacayaaaaatggcaacaatagacaatggggactgctagaagggggaggaaagtcaaggggcaaggattgaaaaactattgggtactatgctcactacctgtgtgacaggattac

SEQ ID NO: 205424 - DNA, 210 bp, Homo sapiens
caagagtgtttttacaaattatgtactaggctgcatgtgggagtacaatgcacaataaaactaggtcccygccctcaggctgttacaataaatttcctggcagatatttggatcccaggcagagtaggtgggtaagaagtaggcaggtgccaggctgtgctgcctgacatgcaatgcatgctcagtaaacactctctcttctcagtctta

SEQ ID NO: 205425 - DNA, 410 bp, Homo sapiens
gagcccttaggagaacaagttctgcaaaatatagacccaattttccatcaagggaagaatttgaccagttgggtggaagggrcactcagagaggaggaaggggtgttacacaggagagtgaggctgggctcagtggctcacacctgtaatctcagcacttcaggaggtggaggaaggaggaccatcacttgaggccaggtgtccaagaccagcctggagaacacagtgagaacctgtctctacaaaaaaattttaaaagataggagaatgactcctaaatcccttagctaggtctgaaggcatgcagggaggggaggggcttatgatctgcttccctcttgaatccctgggaggaagccatctcctccacactccttgccagccatgggcagctgcactagagtagcaat

SEQ ID NO: 205426 - DNA, 375 bp, Homo sapiens
cccaattttccatcaagggaagaatttgaccagttgggtggaaggggcactcakagaggaggaaggggtgttacacaggagagtgaggctgggctcagtggctcacacctgtaatctcagcacttcaggaggtggaggaaggaggaccatcacttgaggccaggtgtccaagaccagcctggagaacacagtgagaacctgtctctacaaaaaaattttaaaagataggagaatgactcctaaatcccttagctaggtctgaaggcatgcagggaggggaggggcttatgatctgcttccctcttgaatccctgggaggaagccatctcctccacactccttgccagccatgggcagctgcactagagtagcaat

SEQ ID NO: 205427 - DNA, 623 bp, Homo sapiens
ataaactgattacccacaaatacataagtggtaattctctgtttaactctctttcttttccttttgggtggagccctttgaggaatccccttggcctgcatctcatcatttatgaaatttctaagtgtgygtcgaatgtaaatatgagccaagtcctgtagattcctgacagtgattccttacagatttgtagtggtgagggttagatttaattttatataaggtttgaataattgttaagcttatgtaacctgatctgaatttgcacttcctctatgaaaacttcacttatctaataaggaaatcaaatactttgtagacctatttaccttacttttgttgcaatcactgttgctgggttgctgtatatatattccgggcaatatatgagtgcaataacaatacaaaatattgaataatttagcttttaaaaatcccacaaattttatgaaattttacagccctgctacttttgcttttgaatctcttgccaaaagacacgagtaaaatatctgcttctctcatagagattttaagagcacagcaagtgaattattaaaataggaagtatgtacttaatacaactctttatatggaccctttacattttcagtattttaaaa

SEQ ID NO: 205428 - DNA, 623 bp, Homo sapiens
ataaactgattacccacaaatacataagtggtaattctctgtttaactctctttcttttccttttgggtggagccctttgaggaatccccttggcctgcatctcatcatttatgaaatttctaagtgtgtgtcgaatgtaaatatgagccaagtcctgtagattcctgacagtgattccttacagatttgtagtggtgagggttagatttaattttatataaggtttgaataattgttaagcttatgtaacctgatctgaatttgcacttcctctatgaaaacttcacttatctaataaggaaatcaaatrctttgtagacctatttaccttacttttgttgcaatcactgttgctgggttgctgtatatatattccgggcaatatatgagtgcaataacaatacaaaatattgaataatttagcttttaaaaatcccacaaattttatgaaattttacagccctgctacttttgcttttgaatctcttgccaaaagacacgagtaaaatatctgcttctctcatagagattttaagagcacagcaagtgaattattaaaataggaagtatgtacttaatacaactctttatatggaccctttacattttcagtattttaaaa

SEQ ID NO: 205429 - DNA, 490 bp, Homo sapiens
aactgattacccacaaatacataagtggtaattctctgtttaactctctttcttttccttttgggtggagccctttgaggaatccccttggcctgcatctcatcatttatgaaatttctaagtgtgtgtcgaatgtaaatatgagccaagtcctgtagattcctgacagtgattccttacagatttgtagtggtgagggttagatttaattttatataaggtttgaataattgttaagcttatgtaacctgatctgaatttgcacttcctctatgaaaacttcacttatctaataaggaaatcaaatactttgtagacstatttaccttacttttgttgcaatcactgttgctgggttgctgtatatatattccgggcaatatatgagtgcaataacaatacaaaatattgaataatttagcttttaaaaatcccacaaattttatgaaattttacagccctgctacttttgcttttgaatctcttgcca

SEQ ID NO: 205430 - DNA, 593 bp, Homo sapiens
actgattacccacaaatacataagtggtaattctctgtttaactctctttcttttccttttgggtggagccctttgaggaatccccttggcctgcatctcatcatttatgaaatttctaagtgtgtgtcgaatgtaaatatgagccaagtcctgtagattcctgacagtgattccttacagatttgtagtggtgagggttagatttaattttatataaggtttgaataattgttaagcttatgtaacctgatctgaatttgcacttcctctatgaaaacttcacttatctaataaggaaatcaaatactttgtagacctatttaccttacttttgttgcaatcactgttgctgggttgctgtatatatattcygggcaatatatgagtgcaataacaatacaaaatattgaataatttagcttttaaaaatcccacaaattttatgaaattttacagccctgctacttttgcttttgaatctcttgccaaaagacacgagtaaaatatctgcttctctcatagagattttaagagcacagcaagtgaattattaaaataggaagtatgtacttaatacaactctttatatgga

SEQ ID NO: 205431 - DNA, 536 bp, Homo sapiens
cttgaattcctggtgaccacatgtttttatctggaaaacctggggaaagttatctgtcccatctaccctgcttttttttgttttgttttggttttttgttgtttttttttttctcggttggagctgctgtttagatgatgcttttactatgtaggagagagtttttgttaaggatatatttgargattggcttttccatattgtctttcattctttgaccttggcaaactgtacagtagattttcatgatcattgcatatttcttgtcattgaaatgtatcttttatgtttttaaatgcattcattttacactcatgactttatcattgactttaagaggtagaaataaaaaatgaaaataaaaaaatgaatgagatccacacacccgcgtgtgtgactatcacggcaatggcgacacccacaggcattgccggcttcacggagagggcctggaaaatcaagactatcatggaggttcagttccacactccacccttccagggtggtttctccctgaaatcgtgtgtgaacccaga

SEQ ID NO: 205432 - DNA, 545 bp, Homo sapiens
gaattcctggtgaccacatgtttttatctggaaaacctggggaaagttatctgtcccatctaccctgcttttttttgttttgttttggttttttgttgtttttttttttctcggttggagctgctgtttagatgatgcttttactatgtaggagagagtttttgttaaggatatatttgaagattggcttttccatattgtctttcattctttgaccttggcaaastgtacagtagattttcatgatcattgcatatttcttgtcattgaaatgtatcttttatgtttttaaatgcattcattttacactcatgactttatcattgactttaagaggtagaaataaaaaatgaaaataaaaaaatgaatgagatccacacacccgcgtgtgtgactatcacggcaatggcgacacccacaggcattgccggcttcacggagagggcctggaaaatcaagactatcatggaggttcagttccacactccacccttccagggtggtttctccctgaaatcgtgtgtgaacccagagagaaacttcca

SEQ ID NO: 205433 - DNA, 545 bp, Homo sapiens
gaattcctggtgaccacatgtttttatctggaaaacctggggaaagttatctgtcccatctaccctgcttttttttgttttgttttggttttttgttgtttttttttttctcggttggagctgctgtttagatgatgcttttactatgtaggagagagtttttgttaaggatatatttgaagattggcttttccatattgtctttcattctttgaccttggcaaactgtamagtagattttcatgatcattgcatatttcttgtcattgaaatgtatcttttatgtttttaaatgcattcattttacactcatgactttatcattgactttaagaggtagaaataaaaaatgaaaataaaaaaatgaatgagatccacacacccgcgtgtgtgactatcacggcaatggcgacacccacaggcattgccggcttcacggagagggcctggaaaatcaagactatcatggaggttcagttccacactccacccttccagggtggtttctccctgaaatcgtgtgtgaacccagagagaaacttcca

SEQ ID NO: 205434 - DNA, 545 bp, Homo sapiens
gaattcctggtgaccacatgtttttatctggaaaacctggggaaagttatctgtcccatctaccctgcttttttttgttttgttttggttttttgttgtttttttttttctcggttggagctgctgtttagatgatgcttttactatgtaggagagagtttttgttaaggatatatttgaagattggcttttccatattgtctttcattctttgaccttggcaaactgtacagtagattttcatgatcattgcatatttcttgtcattgaaatgtatcttttatgtttttaaatgcattcattttacactcatgactttatcattgactttaagaggtagaaataaaaaatgaaaataaaaaaatgaatgagatccacacaccygcgtgtgtgactatcacggcaatggcgacacccacaggcattgccggcttcacggagagggcctggaaaatcaagactatcatggaggttcagttccacactccacccttccagggtggtttctccctgaaatcgtgtgtgaacccagagagaaacttcca

SEQ ID NO: 205435 - DNA, 536 bp, Homo sapiens
cttgaattcctggtgaccacatgtttttatctggaaaacctggggaaagttatctgtcccatctaccctgcttttttttgttttgttttggttttttgttgtttttttttttctcggttggagctgctgtttagatgatgcttttactatgtaggagagagtttttgttaaggatatatttgaagattggcttttccatattgtctttcattctttgaccttggcaaactgtacagtagattttcatgatcattgcatatttcttgtcattgaaatgtatcttttatgtttttaaatgcattcattttacactcatgactttatcattgactttaagaggtagaaataaaaaatgaaaataaaaaaatgaatgagatccacacacccgcgtgtgtgactatcacggcaayggcgacacccacaggcattgccggcttcacggagagggcctggaaaatcaagactatcatggaggttcagttccacactccacccttccagggtggtttctccctgaaatcgtgtgtgaacccaga

SEQ ID NO: 205436 - DNA, 545 bp, Homo sapiens
gaattcctggtgaccacatgtttttatctggaaaacctggggaaagttatctgtcccatctaccctgcttttttttgttttgttttggttttttgttgtttttttttttctcggttggagctgctgtttagatgatgcttttactatgtaggagagagtttttgttaaggatatatttgaagattggcttttccatattgtctttcattctttgaccttggcaaactgtacagtagattttcatgatcattgcatatttcttgtcattgaaatgtatcttttatgtttttaaatgcattcattttacactcatgactttatcattgactttaagaggtagaaataaaaaatgaaaataaaaaaatgaatgagatccacacacccgcgtgtgtgactatcacggcaatggygacacccacaggcattgccggcttcacggagagggcctggaaaatcaagactatcatggaggttcagttccacactccacccttccagggtggtttctccctgaaatcgtgtgtgaacccagagagaaacttcca

SEQ ID NO: 205437 - DNA, 531 bp, Homo sapiens
tccaaacttcaaacaattctaacctcttcactctgttccaatagccacagggtgggtaactgcttcgtgtagtcagtacctttttggtaacttaattttctttttagcctttgcagttacttagctaattattatttatatctggttaacaattctttgtattaatttttttctgatgaaccagttggtatgatttctatctcttgactagactgggactgaaaaaaaaatctaaaactgaaaatgaacaacagcaatacacatctcctgaatacaaatatagagttaaaatatcagttaaaactactaaaagagttgtaggtagttagtgctggttgtttttgtttgttttgttttgtctggagtagaacacttatttcaaaagaaatctttcaagaaagcactgtatttaaaagataaagtggaacttctstcatggataggttgaatctggtcattaaccagagatctgcaacctaaggcacctccttggaaacctatagagagaagccagaaaacatttacaacatg

SEQ ID NO: 205438 - DNA, 434 bp, Homo sapiens
gaattcccttttactgtgattctttatctctagatttttttttcagaaatcttcaraaaggtaaagaaaaagtagcaatgcccgtttttctttcctatattttctttctctactgcattcttgagactactatggaacatggctctgtataagaaaaatattgtccacatttcaaaggcattgctcccttgggaatttaattggtagcttgattgtgagaatcccaatgactttaaaaaatttttttttttcatatacaagctgtagaaacaataactctttacttgtgcatgagtcataacaatttacaaaacattttagtttgcactcatctcattatgactcacaacaaagtgggaagcagtatcaacattttctttatagagatgaaaagacaaactcagattaagtttctgctttgaaggtacaaaagt

SEQ ID NO: 205439 - DNA, 406 bp, Homo sapiens
tctagatttttttttcagaaatcttcagaaaggtaaagaaaaagtagcaatgcccgtttttctttcctatattttctttctctactgcattcttgagactactatggaacatggctctgtataagaaaaatattgtccacatttcaaaggcattgctcccttgggaatttaattggtagcttgattgtgagaatcccaatgactttaaaaaawttttttttttcatatacaagctgtagaaacaataactctttacttgtgcatgagtcataacaatttacaaaacattttagtttgcactcatctcattatgactcacaacaaagtgggaagcagtatcaacattttctttatagagatgaaaagacaaactcagattaagtttctgctttgaaggtacaaaagt

SEQ ID NO: 205440 - DNA, 431 bp, Homo sapiens
agatttttttttcagaaatcttcagaaaggtaaagaaaaagtagcaatgcccgtttttctttcctatattttctttctctactgcattcttgagactactatggaacatggctctgtataagaaaaatattgtccacatttcaaaggcattgctcccttgggaatttaattggtagcttgattgtgagaatcccaatgactttaaaaaatwtttttttttcatatacaagctgtagaaacaataactctttacttgtgcatgagtcataacaatttacaaaacattttagtttgcactcatctcattatgactcacaacaaagtgggaagcagtatcaacattttctttatagagatgaaaagacaaactcagattaagtttctgctttgaaggtacaaaagtagtaagcgataatgctggaacttgaatt

SEQ ID NO: 205441 - DNA, 484 bp, Homo sapiens
agtttctgctttgaaggtacaaaagtagtaagcgataatgctggaacttgaattctttttcacttagaaatttcttcaaaatgaatragttcatgtcctttgtacggacatggatgaaggtggaaaacatcattctcagcaaactaacacaggaacagaaaactgaataccacatgttctcactcataagtgggggttaaacaatgagaacacatggacacagggaggggaacatcacacactggggtctgctggggttggggggcaagggaagggagagcattaggacagatgcttaatgtatgtggggcttacaacgtagatgacaggttgataggtgcagcaaaccaccatagcacgtgtatacctatgcaacaaacctgcatgttttgcatatgtatcccagaacttattaagtcaaatttaaaaaaaagaaaagaaaatcagtctctctctctcaagacagattgtgttattgagagac

SEQ ID NO: 205442 - DNA, 652 bp, Homo sapiens
ggcaacaccctcacagacacacccaggcacgatactttgcatccttcaatccaatcaagttgacaatcaatattaaccattaccaaatatgataagtagattttttcagaatggtcaaacttattctatggaattcaaggaatatcttggggctttcatgggagaaggataggatagcacatgaaactgaggtcaacacaaatacatttgatttcaaagttaaggaaggttattatctgaaggggcacagagtcgcacatagagagacacctgctgaactgctatcatgcacggccttagctgcttcaggctacgtaagctgggaagcttgaaaataaaagatcagtaatttcctagttacagatcataatttttctcagtcacgttgtcattatccagtctattcaatattacgatacttgaaatgtcttcattttctttttcrtcttcatgcctcacaatcagtaagttgcaaagctttgccatttggaccagaaataagcccattcctgcttttccactgtgagtgtcaatgccatattttaggccctgtcttctcttgcctgaaatttctgaatagttttctggtaggttttttctgtctctagttttgtattactctagaatatcatatatgtgatggccaaaatga

SEQ ID NO: 205443 - DNA, 530 bp, Homo sapiens
tcctaatgtgtacatctacacagttacttkcctgctgtcaggtgaggctgtttctatggataagccaggaaatttttgccttttcaggtggtaggattataatgtgcttattttctctgtgttttagagaaaagagtgcaaataaaatgccagtttcttagatgtaaataacacaatggctttgcccatggtgtgaaaataaagggttaaatgaatgaacattttaattgatagagtgttgtattgacctgacccatagtgtcactaaagcaggattatcacagagtacagcaaaggacaccaaaatgagagttaggattgtgttctggtttcagtttgtgggatactgaccaataaaatcctcaagagctatttccttcactgtaaaatgagctcaatagaaccattttgaaggcatcttgagattgaataagattacacacatcagtgctccactgagtcataattggaacctgaggaaaatagaaaaatcagtaatactgatcttatttttatttaaaattatattt

SEQ ID NO: 205444 - DNA, 471 bp, Homo sapiens
tctagaagtcaattactaatggaacgtgtttgttggtcactgcccaaatttctcaaaccttggaatcagattgaagctgccttcatgtcctgttgcactttgattttctagtagtaacttgctttttatcacagcaactgcagaaaatgcaacttggcaattctatggcatccttaaaagggatgtggtgcgatctaaygttgaaactgaactacctctagctagtagattgcccagtatttgctaaatgatgccgtgtctcccttgaaatttttaagtaccctgtggtgctcctgtgagtttttgttggtgctttagggggtgctctggcacacagcttggaaactgcaggcataaaatatttcttttccataccgaagtatggtggttttctcaaggaaaagcactagtacaatttttgagctgcaagctgaactagctgcttttatcaaaaaacaggatttttatttc

SEQ ID NO: 205445 - DNA, 615 bp, Homo sapiens
tttaaggcttatctgggtgggctcaatgtaataacaagggtctttttaagaggagcatcagagacggggtagaagatgtggtgatgggaacagagttgagatagattgggagaaggggagtaggagggaagggaaagggaaagagaagggaggaggagagagagatgagagaaagagagggaaagagaaggaggatgatctacttctatgttcttctgtatttgtcccaaactggttttctcctggaccrctattttttaaatagaaaagttctacctggagttatttgtcctaaaatggatggagaggattactccttaattctccttcgatgactggtacacaatctgaagaattcttttagaacttggactggaggtatgcatataaatgtgctggatttaagttgatctgtgctagatgatggtagcatagcagtaagagtgagcagggcagtgaaaagtcggtctcagagaagtttctgtctaggatcaggaaatgttgtcctcctgaggagagtgtgttaataaccccctgagattttaaatattccctggctttgtgtcaaatatgccattcttcagagaagctgagtctatacgcagtcacgtgaca

SEQ ID NO: 205446 - DNA, 542 bp, Homo sapiens
gggttgtgagagcatccttccatccagagagtcactgaagaagcaaacactccctgttgtgctatgaaaatacttttgacgtgttaagaacttatactggtctctttgcaactcattcatactaaggaaatgttcctagacgtgaaaaaacaacattacatataattatatgttcagaacagattggttagttttgtactcaaatttcaccctttcatttttcttttactggaaatgaaaaaaaactaagaaatatacatatacatatatatgtgtgtatatataattttatacacacatatatatatatacacacatatatgtgtataaaattaaaatctggtacctatctaccagactattcatggaattctttaatcagtaaataagattcacttataattatcactttttttttttttactacagaagctttgaaacagctcctactckttaagcaatctcctatgtattgtgctgttaatttaatgaagaaattaaatctttcttagtatatttaggaataaagttcccaagttttg

SEQ ID NO: 205447 - DNA, 606 bp, Homo sapiens
tggattttgggaaggaagtgaaaaggggttaagtattttatcccataatatcaagcgtgagtattatcatctcataatatcaagcgtacacactaattttttttctgttttataagagacagkgtcttactctgctacacaggctagagtgtggtgggatgctcatagctcactgcagcctcaaactcctaggctcaagtcatcttctcacctcagcctcctaggtccaggcccagctcattttaaattttttttgtagagacaggtcttgctatgttgtccagtctggtcttaaactcctggcctcaaagtctcctcctacctttgcctcccaacgttctggggttacagggatgagccacctcacttgacccataccattattgttaatgataacattgatcacttggttgaggtagcctttgtcaggtgtctccattatcatgtttttttccttgcattcctccttttcatgctaaattcattggaaattagtaactacacccaatccatacttaagaagtggacagaatatttacataaattacatggaatttttctacatgggagatttgtctttttcccttcattcatttattaatttat

SEQ ID NO: 205448 - DNA, 565 bp, Homo sapiens
gatctttcatatatcccaaatagaatagttatatctggggttattgtgaatattatataatataaagcacctacaaagtgctttgtgaactacaatacacattataataacaggtaatattattcttattaacattcattttggaagggtcaaatattttgaatgccagtggaaacaatttaaatcaacctcctggtttccttctacctctggataatccttcatctgttagtgacagctggagaagtaatagtaatcacagtcatgtgtaaatcatgggttttcagtgttacttatagattaaagggtctcttatttcaagctaccagcagcagaatatgttgtcatgataggtgtttaaaatattaatctagatttttttctataagggccaattatttgtctaggcactcaaaatacaaaattaaaactattgcacctttccttaaagaccatctagtgtaataaagaaggcatgcatattagtgggttatcttaatactatatgatgaatacatcagtgagagttaaggcagrggtacagtgggaacacagaggctggcct

SEQ ID NO: 205449 - DNA, 463 bp, Homo sapiens
agaccaagacaaatcacattctgtgttatataacaacctcagtgcatttaaacagaactgaaatcatatgaaccatattccctaatgacaatggaaccaaagtagaaatcaataacaggaaaacctccaaacacataaaaactaaagaacacatttctaaataatccatgggtcacagagcaatacctaagggaaattttttaaaaattgaactgaataaaaataaaaaccaaacaaatygaaatttgtgggatataactaacacaatgctgagagagaagtttatagcctacattagaaaagaaaggaaatctcaagttaataatataagctccaacctaaggaaccaaggaaaagaggagcaaaataagctggaaaacaagcagaagaaataaaacaaaatgagaacaaaaaaaaaatgaatttggaatttattataataaacatctatttcttatattat

SEQ ID NO: 205450 - DNA, 403 bp, Homo sapiens
gattataaacttctcactttttcagacacttcaagattttcctcattgctgtgcctttgtgtgtggttattcctttgattagaattccctttctcagttttctacccccaraacactgactcatacctgaaggctttctattatatgtagtagttaagatttgaacactagcttggcctttgctgtgtggctttcagaaaattatcatacatcttgaagctgaatttctccttttttaaaatattggaataatgaaaatatctagcttcatgtagtttggctctgtatccccacccaaatctcatgtcaaattataattcccaatgttggggaagggacctggtggaaggtgattggatcgtgggggcggatttcccccttgctgttcttatgaaagtgagtg

SEQ ID NO: 205451 - DNA, 403 bp, Homo sapiens
gattataaacttctcactttttcagacacttcaagattttcctcattgctgtgcctttgtgtgtggttattcctttgattagaattccctttctcagttttctacccccaaaacactgactcatacctgaaggctttctattatatgtagtagttaagatttgaacactagcttggcctttgctgtgtggctttcagaaaattatcatacatcttgaagctgaatttctccttttttaaratattggaataatgaaaatatctagcttcatgtagtttggctctgtatccccacccaaatctcatgtcaaattataattcccaatgttggggaagggacctggtggaaggtgattggatcgtgggggcggatttcccccttgctgttcttatgaaagtgagtg

SEQ ID NO: 205452 - DNA, 574 bp, Homo sapiens
gactgttggtttccaacatatatgcaaatagataagtacagaaataaatgtagatgtgtgcatatgtatgtgcaaacatacatacatttcttagttctctctgttgagtctagaagcaatgacaccctagaagcaatgagcacacctagaatcgagatcttggtttcaaaattccattctccattaaaggaaaccagggcttctcagagaaatgtctttttccaaagttagggcaaaaagttacaaaagcctagaacatcttctggaaaaagaaagtaagaaaatgctaaaaaatcccaggggaatattgaaaaacatagatgagycaatgtgaaggtgctcccagtggccaaatctgggacaatgtgaccaataaaaataagaatagtaatggattgtaaatcatagaataaaataaatacccttgagtacatactaatataaaaattgaataagtaaataattggaggagaatagacagcttttccttgaaggagaattccaattaacaaatgtagatagaaagatgaagacagaaaatcaccatttggcaaataccacaatagtaactgtt

SEQ ID NO: 205453 - DNA, 192 bp, Homo sapiens
aggggtgagaggcagcccgcaggccccaacggctgtcttggaaagggagaagggactcctggtcctttgggtacatgagaatgttcacaaaatgggtggtacacagcaatacttggaraagagtgatagaagttgctggagctagattttttttttttttttaatctcagtgaagaatcagagacatctgcc

SEQ ID NO: 205454 - DNA, 520 bp, Homo sapiens
ccaggaacttggaggctaattgagaagwtgaatctgtatttgtggaatagtacctaaaattttgaccctgggcccaggaggtctgggtttgaatccttgcactgccaatttactggttctacaatctttttttttttttttggagacagagtctcactctgtcacctaggctggagtgcagtggtgtgtgatctcagctcactgcaacctctgcctccagggttcaagcgattcttgtgctcccaagtagctgggattacaggtgtgcacaatgcatggctaatttttgtatttttagtagtgacggagtttcactatgttggctaggcggatcttgaactcctgggctcaagtaatccacccgtctcagcctcccaaagtgctgggattacaggcatgagccaccacgcccggcctgatcctacaatcttgcttagccagtttttccttcagtaaactgacatcacagagttatgagagtgaaataaataatagacgtgaactggctttgaaatttgta

SEQ ID NO: 205455 - DNA, 460 bp, Homo sapiens
ggtcctccaggaacttggaggctaattgagaagatgaatctgtatttgtggaatagtacctaaaattttgaccctgggcccaggaggtctgggtttgaatccttgcactgccaatttactggttctacaatctttttttttttttttggagacagagtctcactctgtcacctaggctggagtgcagtggtgtgtgatctcagctcactgcaacctctgcctccagggttcaagcgattcttgtgctcccaagtarctgggattacaggtgtgcacaatgcatggctaatttttgtatttttagtagtgacggagtttcactatgttggctaggcggatcttgaactcctgggctcaagtaatccacccgtctcagcctcccaaagtgctgggattacaggcatgagccaccacgcccggcctgatcctacaatcttgcttagccagtttttccttcagt

SEQ ID NO: 205456 - DNA, 520 bp, Homo sapiens
ccaggaacttggaggctaattgagaagatgaatctgtatttgtggaatagtacctaaaattttgaccctgggcccaggaggtctgggtttgaatccttgcactgccaatttactggttctacaatctttttttttttttttggagacagagtctcactctgtcacctaggctggagtgcagtggtgtgtgatctcagctcactgcaacctctgcctccagggttcaagcgattcttgtgctcccaagtagctgggattacaggtgtgcacaatgcatggctaatttttgtatttttagtagtgacggagtttcactatgttggctaggsggatcttgaactcctgggctcaagtaatccacccgtctcagcctcccaaagtgctgggattacaggcatgagccaccacgcccggcctgatcctacaatcttgcttagccagtttttccttcagtaaactgacatcacagagttatgagagtgaaataaataatagacgtgaactggctttgaaatttgta

SEQ ID NO: 205457 - DNA, 431 bp, Homo sapiens
ttttatcctttatctactttattcccattctaaatttcttaaatctgtgtagaaattggtaacatgggaaaagtatcttgaacattgctgacacaggccttcagcactcaataaatgttaattgactctaaatgtyatagttctcccttttacatttttttctgttttttcttggtttcattttgtattttaaggcatcaaggcttttataagagtggtatatcatagatttccccccccaccagccttcttagtgatgcctaatactcttttagctttctgattttagtgtttttatttaaatagctaatctagaatgaattctggagtatatctctatgaggtctgagttttcatttaggtacagttaggtttgtttcctaaatggatttctttgtatttatctgcatcaaaacttgtgttccattttg

SEQ ID NO: 205458 - DNA, 457 bp, Homo sapiens
tattttaaaacagattttcttcaaggaggaaatacagaatataatggagctttattgagatgtggttaatatacaataaacagcacatgtttaaagtatacaattggtgagttttgacatatgtrtacatctgtgaaacaatcatcacagtccagccaatgaatacacccatcacaccaaaaggatcatgtgccacttggtaatctctccctcctgcacttccctgccttatgcccatccacatgatatacttcctgttgttatagattattttgcattttctagacttttacataaatggagttatacaatatgtactcttttttgcctgccctcttgtacttcatgtaattagtttgagattcatccatgttatagcatgtatcaatatttcatttattttattgttccttagaatgagtagtattccattgtacaaatttaccacaatttgttt

SEQ ID NO: 205459 - DNA, 607 bp, Homo sapiens
accaaaaaaaccccttgggcagtaagcagatgttgccaggaacccattagctctggggcttctctaggagtttcctgggcattcgtgttttaggtgggagcagccagctcagactctttgaagtctgtaaatccatgctgctagtaagagatgccactttgttttttgttttgttttgagaaggagtctcactctgtcacccaggctggagtacagtggcacgatctcggctcactacaacctctgcctcctgggttcaagcgattctcctgcctcagcctcctgagtagctgagattacagaaggccaccatcacgcccagctaatttttgtattttagtagagatggggtttcaccttgttggccaggctggtctcgaactcctgtcctcaactgatccacctactcagcctcccaaagtatattgggattacaggcgtgagccaccatgcttggccaagatgccactttggatctyttgctctaccagatatgtgctaggcacttaagtatcacttgatcctccctgcctccggcgaggtaggtattatctacattctacagatagaatgctgatgctcagagagcctgggattttcccaggac

SEQ ID NO: 205460 - DNA, 490 bp, Homo sapiens
gctcgctgccactcacctcctgctgtgcggcctggttcctaacaggccacagactgctatgggctgtggaccgctattggttcgtggcccygggggttggggagccctgctatagataacgtgaaagcacttttaaaaaaatgcaagtcattgaagagtgcaaataagttattgttgaattttttcttccaagtctcagtagtgttctagtttttctatccccattttatagacgggcaaaatgaagcttcagaggacaactaatcctatgccaaatgtggaccagagtgaaaaccagggtgatttcccaatccctggcctcttactttgctgaagggtagcttcagtggaggatgcccgcatctgctaacaggcaacatgctcttccctctccaaggggagccaatgaggatgatagacatcaggaagacaccaagcaggatctgacctccagtagaaggtgctgcatccaacctcacccctgacccct

SEQ ID NO: 205461 - DNA, 608 bp, Homo sapiens
ggggaactatgttcaggaattcaagaaaccaagagagaaaaacagtcacacaaaccattcaccagtgacaaaggagtcagcaaactgttggaaaacagagagaamttgtaataatgaaaaaaggacagagtttagtgaccaatcacttattttctttaaaaacacataaccacattaactttttgctttatacaaccatctagaaactataaaacagtaccacattgtgcatttaacctacttatcaagaagggaacttcataagtcataagaattctacccatataggaaggaaaaaggagacagctaatagcatagtcacagatacaacatgagtccaagcaagcatcaattcttcgacatcaccttttccatttaccagagtggagactgagaaagagagtgagggagaaaaaagagggaaggaagcacccacagaggactaatcacaatccatagttacttttgacaactatagctcagggtttcatagaatagtatcatttgaccaacacagtgtggtggagggagaggggtgaaggaaacacaaatagaaggagagagtttgaacagaaaaatacaattttccccctattcccctcctaaat

SEQ ID NO: 205462 - DNA, 583 bp, Homo sapiens
ctagtttaacatacttacctcataaacaagaatccactatagtctggttgcagacaattatatagctagttagtgaaagagctgggattagaatttacattcacattcaggattaccagttcattgtttaatttctttcaaggtctaatcatggtatttatcctttactaaaatatctgagtacagatatttttgattttttgactttttaattcagcccctcttgtctttttattaatacatagaaaaaatcctaaaataattcctaaagaattattcctaaagaattatctatgttttctgattgaaatggcacttgattttaacaaatattagatgaaataaatgaaaggagaagtcttcttgatgcaatcaagcagagtcagccactcyttctcctttgtcttttcatgacacttttcatttagtcaagtatttattcattcatcccagaaacattaagtctactatagaccagtaattatgcttggaagtgaagaatatggacacctaagcacattattataatacagtgtgataactgctataatggtagtttatatagggtaaaaaaagattaaga

SEQ ID NO: 205463 - DNA, 583 bp, Homo sapiens
ctagtttaacatacttacctcataaacaagaatccactatagtctggttgcagacaattatatagctagttagtgaaagagctgggattagaatttacattcacattcaggattaccagttcattgtttaatttctttcaaggtctaatcatggtatttatcctttactaaaatatctgagtacagatatttttgattttttgactttttaattcagcccctcttgtctttttattaatacatagaaaaaatcctaaaataattcctaaagaattattcctaaagaattatctatgttttctgattgaaatggcacttgattttaacaaatattagatgaaataaatgaaaggagaagtcttcttgatgcaatcaagcagagtcagccactccttctcctttgtcttttcatgacacttttcatttagtcaagtatttattcattcatcccagaaacattaagtctactatagaccagtaattatgctkggaagtgaagaatatggacacctaagcacattattataatacagtgtgataactgctataatggtagtttatatagggtaaaaaaagattaaga

SEQ ID NO: 205464 - DNA, 506 bp, Homo sapiens
agttctagtgttctataccacagtaggatgactacagttaacaataatatacagtttcaaatagctagaaggatagtgagtgttaccaacacaaatgataaatgtttgagatggatatcctaattactttgatctgatcacatatacagaacatcactatgtaccctataaatatgtataattatcttgtatcaatttttttaaagaatttttgtatgtatattaataagtaacattagactacagctttattgagtgtgatatttttcagaattatgctagttttgtaaagagaaataagatgctttccttctacgtttccaaacggtttaaatggcacaaaccattccttgaaggtttgaaaggttttacaaagtttcacttgtgaaaaaactgtggtctgacacttcaaagacaactttccctattcctgcaatagttcttagtccataatttagagtgtctgccttcttgcatttatyttgttaatttctaatttcctaaaa

SEQ ID NO: 205465 - DNA, 259 bp, Homo sapiens
gggggagtgggctttgggaatcttaccagctgctaccctcagaagtggccaagcttygttagttatttaatattcattcaggttacagttacatatgcatcattgtccatttagttatagcccctaattatacagtattattttatcttagtaatttcagttccaagaacagcattttataagatatttatggtattgtattaaataccacatgctagataacataatgccgtctgaatataagaataggaaacttata

SEQ ID NO: 205466 - DNA, 459 bp, Homo sapiens
tagaacccatcactccttcctgcttttctatgcctcccttttggcatgggaatgtctattctatgcctttttcatcattgtaatttggaagaatatgacttttttggttttacatgttcayagatggagagaaatttttcctcgggatgaactgtatgtacctggagtctcactcatatcttattaaaatgatacttaggtgatactttggattttagactttagatttgatgttggaacaaattaagacttcaagggctgttgcaatagaatgaatgtgctttgtataatgtatgagaaggacatgaattttgagagcagtggcaaaatactgtgaactcaattttgatgtttccgcccaaatttgtatgttgaaacactaatccccaatgtgatgatatttagaggtaggcccccttttggagtaattagagttagattaggtcatgggagccctca

SEQ ID NO: 205467 - DNA, 485 bp, Homo sapiens
gccaaatcatatttcattgtatgaacatatgttattttctttatctatttatctgtcaatggaaacttgaattgtttcyctatctttttgttgttaataatgctgcaataaacatgaaagtgcagataccactttgagatcctgatttcattcttttgaatatatactcagaaatggctctgctgaatcatataatagttctatttttaattatatgaggttggccatattgattgatttctaacctgcaccatttaacattcctgccaacagtgaacagaaattctaatttcttcatatccttgccaacacttattatctttttatttttgacaatagccatcataacagatgtgaacctggagaacattatgctaagtgaaataaaccagtcacatggcaaaaacttcatgattctgctgatgtaaagtcaaactcatagaagtagagaatggaatgatggtttccggggaggacgaaggaga

SEQ ID NO: 205468 - DNA, 312 bp, Homo sapiens
gacaatatagagtctgctgtactctgaagagttggcaaaaaatgactaacaatgtttatctttctccatgaagatgaatagagtccaccaaaactgtctgcctttagcttcctcttaaagggataggatagaagatagagcctgaactgaaaaatttagtcatgaatctcaacattcaccaaatctctaaagataatacgctgcctgcattcaytcaatgaggcctcaatctcttcgtcaggcaagatcacaacgggttttttttaatttggtgagagcctcagtttgacagaaagtttagaaaagcagttg

SEQ ID NO: 205469 - DNA, 583 bp, Homo sapiens
tcgtaaaacaaatagaaaatatgtatataaaagtgtgtagacacacacacacaccccatcttctagaacacctacaagaaactaacaatgattgcctcttggagggaagtaaacagtggaaagacaggaaaaggaaaatagaaacatagtttttaatgtacagtcttttgaacatttttaattttgtatcaattgcatgtattacctattcagaaagtaaataaactttaataaataataaatgaatggaagtatcatgaataccctatatggcatactctgaggacattaagtataatattctacaaatatttatcaaatgcctactatgagcctactgtcgtaggcagtagggacacagcagatcttaccttcaagtaacttactttctaatgatggtaatatttctaaatatgtcaccttctctcctcaytccaaagtcttcagtggatccccagtcccgtagtctcaaacgtaatcatatcagttgcttggagaccccatgacctcacactccttccttttcctttatttacttcctttgtcagcctttgatccagggaaacctgatgacttgctgctc

SEQ ID NO: 205470 - DNA, 609 bp, Homo sapiens
aagctttcccaggtgcaaggtgtaagctggtggtggatctaccattctcgagtctggaggatagtggtccccttctcacacgtccactagtcactgcctcagtggggaatctgtgtagggcctccaactccacatttttcctctgcactgccctaatagaggttttctgtgggggcttcactcytgcagcaggcttctgcctggacacccagacctttccatacatcctctgaaatcaaggtagagaatgccaagtctcttttactgttgaattctgcacacaagcaggcttaacaccacaggacgccaccaaggcttatggcttccattctcaaaagtggaagctcaaactgtacctgaatccctttgagccccagatggacctgaagtggctggattgtggaaagcaatgtcccaaggctgtgcaaggcagtggggccctgggcatgatccacaaaaccatttttgcttcctaggcctccagttctatgatgggaagggctgccaaaaaggtctctgaaatgcctttttcccattgtcttggccgtcagcatttggcctgcttttagttatgcaaatttctctagcaagtggttactcctcagcctg

SEQ ID NO: 205471 - DNA, 432 bp, Homo sapiens
attaattcctacaactggacagtaatagtgacacaasctattaaaacctctggaatacagaaaaggtagtattaagaggaaagttcatagccttaaatgcctacctcaagaagtctgaaagagcacagaaaatctcaagtcacacctcaaagaactagagaaacaaaaatagaccaaaaccaaacccagcagaagaaaagaaataaccaagatcagagcagaactaaatgaaattgaaaaaaaaatacgaaagataaataaaacaaaaagctgagtctttgaaaagataaataaaattgatagaccattagcaagattaaccaagaaaagaagagaaaagatccaaaataagctcatttagaaacaaaacaggagacattacaatcaacaccacagaaatacaaaagatcattcaaggctactgtgaacaac

SEQ ID NO: 205472 - DNA, 568 bp, Homo sapiens
ggtcagtggccagcaagtaaacaggagctccrtccttcaccacaggacactgcattctataataccaacaagccgaattagcccagaatcaagttgtctcccagagcctccagaaaggagcatacttgctaataccttgatttcagtttttaagactcagatagaaaaaccagctgaacccactggatttttaatgtatagaattgtgagataaatttgtgttgccaaaagttgcaatgttttgggcaactttttatggcagccatagaaaactaatacaaatatgatctcttccctcctggagcttatattccagagggctaaataacaatcacgtaagctgacaaatgagtaaaataattgccaagtgtagtaaaataattgacctgtgagaaataaggaaatagatgaagcagagaatagcacaggggacctagatactaagagctgttggtaaaagtgatatttaagccaactaaaaggaagagaaggagctggctgctcaaagatgcagaacaagagcatcccatgcagaggggacagatatgcaaagaccttgaggtgtgaa

SEQ ID NO: 205473 - DNA, 568 bp, Homo sapiens
ggtcagtggccagcaagtaaacaggagctccatccttcaccacaggacactgcattctataataccaacaagccgaattagcccagaatcaagttgtctcccagagcctccagaaaggagcatacttgctaataccttgatttcagtttttaagactcagatagaaaaaccagctgaacccactggatttttaatgtatagaattgtgagataaatttgtgttgccaaaagttgcaatgttttgggcaactttttatggcagccatagaaaactaatacaaatatgatctcwtccctcctggagcttatattccagagggctaaataacaatcacgtaagctgacaaatgagtaaaataattgccaagtgtagtaaaataattgacctgtgagaaataaggaaatagatgaagcagagaatagcacaggggacctagatactaagagctgttggtaaaagtgatatttaagccaactaaaaggaagagaaggagctggctgctcaaagatgcagaacaagagcatcccatgcagaggggacagatatgcaaagaccttgaggtgtgaa

SEQ ID NO: 205474 - DNA, 568 bp, Homo sapiens
ggtcagtggccagcaagtaaacaggagctccatccttcaccacaggacactgcattctataataccaacaagccgaattagcccagaatcaagttgtctcccagagcctccagaaaggagcatacttgctaataccttgatttcagtttttaagactcagatagaaaaaccagctgaacccactggatttttaatgtatagaattgtgagataaatttgtgttgccaaaagttgcaatgttttgggcaactttttatggcagccatagaaaactaatacaaatatgatctcttccctcctggagcttatattccagagggctaaataacaatcaygtaagctgacaaatgagtaaaataattgccaagtgtagtaaaataattgacctgtgagaaataaggaaatagatgaagcagagaatagcacaggggacctagatactaagagctgttggtaaaagtgatatttaagccaactaaaaggaagagaaggagctggctgctcaaagatgcagaacaagagcatcccatgcagaggggacagatatgcaaagaccttgaggtgtgaa

SEQ ID NO: 205475 - DNA, 568 bp, Homo sapiens
ggtcagtggccagcaagtaaacaggagctccatccttcaccacaggacactgcattctataataccaacaagccgaattagcccagaatcaagttgtctcccagagcctccagaaaggagcatacttgctaataccttgatttcagtttttaagactcagatagaaaaaccagctgaacccactggatttttaatgtatagaattgtgagataaatttgtgttgccaaaagttgcaatgttttgggcaactttttatggcagccatagaaaactaatacaaatatgatctcttccctcctggagcttatattccagagggctaaataacaatcacgtaagctgacaaatgagtaaaataattgccaagtgtagtaaaataattgacctgtgagaaataagsaaatagatgaagcagagaatagcacaggggacctagatactaagagctgttggtaaaagtgatatttaagccaactaaaaggaagagaaggagctggctgctcaaagatgcagaacaagagcatcccatgcagaggggacagatatgcaaagaccttgaggtgtgaa

SEQ ID NO: 205476 - DNA, 661 bp, Homo sapiens
agggcaaatgttgctttgttttgttttttaagtattagtgtttttaactaatattataaaaattcaaacagtgcaagggacatcaattttgtctccttctcactctaaatttccagtttcctcattctctctctctcagaaacaaccgctactcctggtttcaatgtaatcgttcagagttagtttgcacatttacaaagatttctatatgtgtttttatatatttgtcgttcttaaattttttactcaacygagtatataacatccatgctgttctattccttgctttttcaacctacttcttggaaatgtctacataaaggtatatatatatgtctacttcgttctttttaatggcaacatttcattctataatatgtacactccaaaatgtacttgttctatctcctttggttgatatttgcatggttttctcttctttctgttaaaaacaacgcaacaataaatactatatagtattagtattagtatatatattttactaatatataaaactctatggttacctaaatatagaatttttgcacacgtttaaatatatctgtaaaatcattttctcaaatggaaattttagaggaaaatatctgcagatgttttgacagatattactgcattgctttcctaacaattggtaccaatg

SEQ ID NO: 205477 - DNA, 661 bp, Homo sapiens
agggcaaatgttgctttgttttgttttttaagtattagtgtttttaactaatattataaaaattcaaacagtgcaagggacatcaattttgtctccttctcactctaaatttccagtttcctcattctctctctctcagaaacaaccgctactcctggtttcaatgtaatcgttcagagttagtttgcacatttacaaagatttctatatgtgtttttatatatttgtcgttcttaaattttttactcaactgagtatataacatccatgctgttctattccttgctttttcaacctacttcttggaaatgtctacataaaggtatatatatatgtctacttcgttctttttaatggcaacatttcattctataatatgtacactccaaaatgtacttgttctatctcctttggttgatatttgcatggttttctcttstttctgttaaaaacaacgcaacaataaatactatatagtattagtattagtatatatattttactaatatataaaactctatggttacctaaatatagaatttttgcacacgtttaaatatatctgtaaaatcattttctcaaatggaaattttagaggaaaatatctgcagatgttttgacagatattactgcattgctttcctaacaattggtaccaatg

SEQ ID NO: 205478 - DNA, 579 bp, Homo sapiens
gtttgcacatttacaaagatttctatatgtgtttttatatatttgtcgttcttaaattttttactcaactgagtatataacatccatgctgttctattccttgctttttcaacctacttcttggaaatgtctacataaaggtatatatatatgtctacttcgttctttttaatggcaacatttcattctataatatgtacactccaaaatgtacttgttctatctcctttggttgatatttgcatggttttctcttctttctgttaaaaacaaygcaacaataaatactatatagtattagtattagtatatatattttactaatatataaaactctatggttacctaaatatagaatttttgcacacgtttaaatatatctgtaaaatcattttctcaaatggaaattttagaggaaaatatctgcagatgttttgacagatattactgcattgctttcctaacaattggtaccaatgtaagcaatcaccagtaatgtataacataacctatttcccataaatagttgtcaacacatgtacacttaaacttaattttccttgtctaattgaaaggtta

SEQ ID NO: 205479 - DNA, 533 bp, Homo sapiens
gcaatggcacactcttagctcactgcagccttgacctcctgggctcaagccatcctaccacctcagcytccctagtcgtggggactgcaggtgtaaaccaccacaccctgctaatttttgtaatttttgtagagaaggagtttcactatgtttcccaggtttgtcttgaaatcctaggctcaagcaatccgcccacctcagactcccaaagtactgggatttataggcatgagcctccgcacccagcctcatctcaatttttctaagaaaaacctttgtccaagggagagccaaccttgtatgaggtaaatatgggccaccacccacatatatggtaagatttaaagtaaacttctacttgctctcaaaatatagataccactctgtcttagctcaggtctctagaaacagattctgaggggagatttgtagggagtgttagggaagcatgttcagaaacaacacctgtaagggagtgagggaagcagggctgggcagagagaggagtcaaatcatgatgctgttgcaagaga

SEQ ID NO: 205480 - DNA, 533 bp, Homo sapiens
gcaatggcacactcttagctcactgcagccttgacctcctgggctcaagccatcctaccacctcagcctccctagtcgtggggrctgcaggtgtaaaccaccacaccctgctaatttttgtaatttttgtagagaaggagtttcactatgtttcccaggtttgtcttgaaatcctaggctcaagcaatccgcccacctcagactcccaaagtactgggatttataggcatgagcctccgcacccagcctcatctcaatttttctaagaaaaacctttgtccaagggagagccaaccttgtatgaggtaaatatgggccaccacccacatatatggtaagatttaaagtaaacttctacttgctctcaaaatatagataccactctgtcttagctcaggtctctagaaacagattctgaggggagatttgtagggagtgttagggaagcatgttcagaaacaacacctgtaagggagtgagggaagcagggctgggcagagagaggagtcaaatcatgatgctgttgcaagaga

SEQ ID NO: 205481 - DNA, 533 bp, Homo sapiens
gcaatggcacactcttagctcactgcagccttgacctcctgggctcaagccatcctaccacctcagcctccctagtcgtggggactgcaggtgtraaccaccacaccctgctaatttttgtaatttttgtagagaaggagtttcactatgtttcccaggtttgtcttgaaatcctaggctcaagcaatccgcccacctcagactcccaaagtactgggatttataggcatgagcctccgcacccagcctcatctcaatttttctaagaaaaacctttgtccaagggagagccaaccttgtatgaggtaaatatgggccaccacccacatatatggtaagatttaaagtaaacttctacttgctctcaaaatatagataccactctgtcttagctcaggtctctagaaacagattctgaggggagatttgtagggagtgttagggaagcatgttcagaaacaacacctgtaagggagtgagggaagcagggctgggcagagagaggagtcaaatcatgatgctgttgcaagaga

SEQ ID NO: 205482 - DNA, 568 bp, Homo sapiens
gctctgtcgcccaggctggagtgcaatggcacactcttagctcactgcagccttgacctcctgggctcaagccatcctaccacctcagcctccctagtcgtggggactgcaggtgtaaaccacyacaccctgctaatttttgtaatttttgtagagaaggagtttcactatgtttcccaggtttgtcttgaaatcctaggctcaagcaatccgcccacctcagactcccaaagtactgggatttataggcatgagcctccgcacccagcctcatctcaatttttctaagaaaaacctttgtccaagggagagccaaccttgtatgaggtaaatatgggccaccacccacatatatggtaagatttaaagtaaacttctacttgctctcaaaatatagataccactctgtcttagctcaggtctctagaaacagattctgaggggagatttgtagggagtgttagggaagcatgttcagaaacaacacctgtaagggagtgagggaagcagggctgggcagagagaggagtcaaatcatgatgctgttgcaagagaggcttcagctgac

SEQ ID NO: 205483 - DNA, 533 bp, Homo sapiens
gcaatggcacactcttagctcactgcagccttgacctcctgggctcaagccatcctaccacctcagcctccctagtcgtggggactgcaggtgtaaaccaccacaccctgctaatttttgtaatttttgtagagaaggagtttcactatgtttcccaggtttgtcttgaaatcctaggctcaagcaatccgcccacctcagactcccaaagtactgggatttataggcatgagcctccgcacccagcctcatctcaatttttctaagaaaaacctttgtccaagggagarccaaccttgtatgaggtaaatatgggccaccacccacatatatggtaagatttaaagtaaacttctacttgctctcaaaatatagataccactctgtcttagctcaggtctctagaaacagattctgaggggagatttgtagggagtgttagggaagcatgttcagaaacaacacctgtaagggagtgagggaagcagggctgggcagagagaggagtcaaatcatgatgctgttgcaagaga

SEQ ID NO: 205484 - DNA, 586 bp, Homo sapiens
tggccaggttagcatgaacagctgtcccctcagctgcctttcaattagttgagaaggtggaggctgcctgctaagtcaggtttgggatgcactgaggctctaccagtggatgtggtgtataatgagcggggcccattgccgagcagttggttctgcagcacgcagttgagggaatcgaataccacagggctcctgcccccatctgcatcccctctcttccttggcttgctgcatccaataccattcccatcagcacaaaraaaaagaaatacacaatgaaagatgagacacacacctgcctgctttaactctgggttttaaaaaggggctctcctaacagggagccaaggcatcggagtgacacagagaggtcaggcaagtgaaggccatagtccttgaaggcctgaccccaagaagggtacccttcatccatggtttagccttggcagatcacagcccttctcattttacaacctgggagccgggtgatgatgcattgaaagggtggtgactgtaagaataacagttcaaagtgagagcattagagccaggctgcaggtgcaggggagttagaaaggtgggcctg

SEQ ID NO: 205485 - DNA, 513 bp, Homo sapiens
ctttaattagtgacatcagctagatcagcttgatgagaaggagccaatgctgctgatctcatgcaagcctccttctctgccaccaatgccattcatgggcccattgcaccagcattagagtgaagaaagaggatggctgagtcattctgcctacatggttttgcagtgcctcctctgtgttgcttgctctgggggtattgacttgacatacaaagatccttccactttgggtcttgctcttatgtcttactacatgcctcttccccagatttctttatcttagatcttccaattttgctcttttaggtcttttagctaccagtcagtgcttttrctactatccaggccacttctttgaaacgaattcagtaatcaactgtgcttctcacagctctgcccactgcagggacttctcttcaccattgtcttttaggtccacttctgatggggttctagtatagcagaactacatttatagcaagtactacatattgtgctgatccatctgcgaat

SEQ ID NO: 205486 - DNA, 581 bp, Homo sapiens
tatactattcacattcccatttacattgtttaagttttcattatttcttatacacatggatactctgtaaacaaacagctctgcaattgattctctttatttcactctttccttattttaatccatcctagattgcaaatcagataaatctttctaaaatgtacctttaatatgccagctccactgcttargaaaaaaaattcattaatgatttttccttgtcaatgaagaaaatacagactcttcagcctggttaataaagcgccaagctaatgttcctttgttatttaccctcatcccattatacctgctttttgcttccaattacactactcccagttctacggacacactatgcctcatatgccatcctcatcaatcttagactttaaagtctatcttaagaagtgtcagtaaatccattttatcccagaactgtaaaacctgcttaacgaaaattaataacctccccctttgctattctaggccctttgtttgtagaagcacttgtaatactgtattgagttattgtataattatccgtattcctaattacactgtaaagctttgaaagctgaaac

SEQ ID NO: 205487 - DNA, 376 bp, Homo sapiens
aaatagatcattctacttccaggcaactttaactatttaaaagcaagctcctcattataatgacctgaaaatttcatacttatctaatactcttgatattagtctctgaatctaggcaatctgaccccatttccatatataaagtcattcatgtaacctaaccactacccgccttctacaaaggccctcaacccattaaattatttgtraactgagatttttaatttcactatccttgttcttcttcctttagtgagctttggtttgtcattctctttgaaagagtggagctcaagatacaacctcttttcttggagagtggtcataattaactgttgtgtagggaagctaaccacttaggtacatccggggatgc

SEQ ID NO: 205488 - DNA, 487 bp, Homo sapiens
tatacagatgaatgtatgtaaaatatatgcacgaagtcattgcaatccatcaaaatctacttgttaattatatttttataagctctactaatatactcatagtgtttactataatagggttgtttagttaaaatacataaaaatcaaaattaatacagttacatttaaaacattttcaaaaattcaaagtactgattctccaaaggataattaaaagtcttaaaagaaaaaaatccaatatctgaagaaaaacccatcttcatttcagtatattcatttttaaaagtctggctttaaagacgttctgtaatcattagggtcccattaaatatacagcaggtgttcagagatttggctatttaagatttaaagtgcartaaggtacctgagccaaataagccacgggacttgacttactccctgaccatatgagagtttcccctatggccaaatttgccttctggaacaaaatttaccctcaactgaa

SEQ ID NO: 205489 - DNA, 551 bp, Homo sapiens
tagcatttctatacatgaacaacagccaagccaacaggcaattcagtaatgcaatcccattcacatttgtcggaaaaagaataaaatacctaagaatacagctgatcagagaggtaaaaaatatctacaataagaatttcaaacaaatcagagatgacataatcaaatgaaaaaatgttccatgttcatggataggaaaaatcattattattaaaatggccatactgcccaaagcaatgtatggattcaatactattcctaataaattatgaacaacattcttcagcttttacaataataaacaaaagccattttaaaatacayatagagccaaaaaaggtcttgtatagaaaaacaatcctaaatcctaaatccaaaaagaacaaagctggaggcatcatgttacccaacatcaaacacagggctataataaccaaaacagcatgtactggtagaaaaacagacatagccaatagaagtcaatagagagtttagaaatactgctgcacggttataaccatctgatctttgacaaagctgacaaaaacaag

SEQ ID NO: 205490 - DNA, 607 bp, Homo sapiens
ttttcctggggtgccgtgtgccctagaggctactctgagaaaatggttactctaaacctgtcctgacaaagctttacaatgagccttaaaataattaattttatcttcaagtaacttaacggctgagaaaaaaaagaaaataagaaaataaagtccaacaatctttaggaatgacaaaaactggtacttaatataaaatttatagtactcagaatccaataaaaaaacttacatatagtatacagaaatagacccagaaatgaaatgaaagagatgatggaattaacagacaagaactttraaatctttgttataaatacatgaatttgaaaaatatggatataataaaaagaaaaacaaaaataaaaatttaacaaaacagaaattttagagattagaaatttcattatctgaaatgaatattttgctacaaggtgttaccatcagatttgctactgaagaaaaagatcagtgaacttgaagatgtagcaatagaaactacccaaaatgaatcctagagagtaaaatggctgaaaaaattaaaaagtattagtgacctacatgaaaatataaaatattctaatctacatggtctcataattgggaa

SEQ ID NO: 205491 - DNA, 607 bp, Homo sapiens
ttttcctggggtgccgtgtgccctagaggctactctgagaaaatggttactctaaacctgtcctgacaaagctttacaatgagccttaaaataattaattttatcttcaagtaacttaacggctgagaaaaaaaagaaaataagaaaataaagtccaacaatctttaggaatgacaaaaactggtacttaatataaaatttatagtactcagaatccaataaaaaaacttacatatagtatacagaaatagacccagaaatgaaatgaaagagatgatggaattaacagacaagaactttaaaatctttgttataaatacatgaatttgaaaaatatggatataatraaaagaaaaacaaaaataaaaatttaacaaaacagaaattttagagattagaaatttcattatctgaaatgaatattttgctacaaggtgttaccatcagatttgctactgaagaaaaagatcagtgaacttgaagatgtagcaatagaaactacccaaaatgaatcctagagagtaaaatggctgaaaaaattaaaaagtattagtgacctacatgaaaatataaaatattctaatctacatggtctcataattgggaa

SEQ ID NO: 205492 - DNA, 631 bp, Homo sapiens
attgagttaagtttatgttctacaaatcatgcgttttatttttcaataacaaaagttaactaaatttcccaaaatagcttatacattatttattcctctgagtttaatatttgtcttggtaaaatgtattcttttaaaatatttttgtttactttttttgttttaatttatttttgagggtccttagtaggtgtatatatttatgggggggtacataaaatgttttgatacaggcgtacaatgtgaaataagtacatcatggagaatagggtatccatcccctcaagcatttattgtttgtattataaacaattcaattgcactcttttaattattttaaaatgtaccattaaattattgactatagttaccctgttatgctatcaaatagcagatcttattcattctattttttttaatccrttaaccatccccactccccacaacagccccccactaccttcccaacctctggtaaccattcctctaatctctatgtccatgagtttaaatattttgatttttagtgagaacatgtgatgtttgtctttctgtgcctggcttatttcacttaacatcatgatctcaagttccatattcttatgaatttttggattccagtgagggtgtg

SEQ ID NO: 205493 - DNA, 611 bp, Homo sapiens
catctaagacctgccattctccagtcatgtaatctttgataagttttwtatatatatatataaacttgatttatatatttgaaaaataagaataaaattaatagccctgtaagcactttagaacttgagatgcaaacagctatgtatttcaatgtactttaaaaattataatgtagtgtataaatttgaattatacttattatttattgcttgatatcttgtcacagaattaaaagataaaaataaaatagtcactatttaaacttaactcatatctacatatcaattttgttccaatggggaagcaagttggcagtagaaaagtaatgaagagtagactattcaatgagatgtattcagaaaataataaaaattttcttctttacaccactgcaattgcaatgatttccactctaggatgtttcatcttacaagcaaagtcagcaataggttttttaaaatatttttaatttatgtgggtacatggtaggtagatacattgatagggtacataagatattttgatataggcatgcaatatgtaataatcacattgtgaaaaatgagtatccaccccttcaagcatttatcctttgtgttacaattaaatt

SEQ ID NO: 205494 - DNA, 620 bp, Homo sapiens
catttccactttattcagatggtcatataatcagtgtgagaatgtcagagttttcagaaagtttgaggtgattggtcttgacaatgacttccagaatttccacattgtaaatatgatcaggtaagtgaaatgacagttttcactgagtttggagagagtctttccatcatttagctctgccttgggatgtcataattcccatatcatttaggtcaccctgcttcaccgaaattcagttaattaattgtgattggttgggatttgagcattcactagaatttgcattttttggcatctagaagacagtatctgtaatggcaaaaagagtaccttgggctttgtaaacagagaagaaatagctcagaagkgtcagaattccaaccccatgttcacctgtactggttctacatttatatcctttaccaaacaaacttcctaggggaagtactatcagagatttttatatagtgttgtttgatagaaaatagttctcagtgaatatgctagcaaatgtttctctgagacaagcacacatgcatcagtggtcccttaagatagctggacagattcaggagttgttatgccattccctcattgtatgtgcagcttacagaagtttg

SEQ ID NO: 205495 - DNA, 620 bp, Homo sapiens
agcaattctacttctgtgtatatacccccaagaatgaaaatcacagtctcaaagagatttgtacgcttattgtctgagtccctttaggctgttataaaaaaatacccatcaactgggtagcttataaacaacagaaatttatttttcacaattttgagacctgagaagtctaagatcaaggcactcatcctttcagtgtcacgtgagggtttactttctgtttcataggcagtgctttctcactgtgtccttacatggcggaaggagtgaatcagttctctagacctctttcacaaagggctctaatctatctgagaggtctttaccatcatgacctaatcacctcctgraaactccaccttctaatgccatcacattgttgattaggtttgcgtatacaaattttcagagggtgcaaacattcagaccatagcactcatgtacataggagcattattcatagtagttaaaatgtggaagtaatccaaatacccatggacagatgaatggatacgtaaaatatggtatatgcatacaattttattcagcctttattcaataggaaggaaattttgatgtatgctacagcatgtataaactttgaggactttatgctagcc

SEQ ID NO: 205496 - DNA, 510 bp, Homo sapiens
tagtaattttatatactactttttcacaaatatgtcttactactcaaacattaattccgcatttacttgcaaggcaaatgctgtagcaattttttttttcacttactgtactcatctaatagtttggagttgaaaattaggcccttggatacatgtgttgccaagtcacatctcacaagtaatggtttgtgtaacatttcctaatcttaccactaagcattagaaatgctaaatctttgtttttaaattaaaaaatggttttcaggaaaaaaaatctgtagtttattgatacttttatcatagggaatacataaaataaatactggaatttagagcttgtaaatcctgtgggctaggcttaagggtatactatttaattcccatataatttaagagctagaaacttcccaatcagcagaataagacagaggtctccagagaattctgagttatatttcactctcttccatttggttattayttttctctgtcaggatatgtgaagagaag

SEQ ID NO: 205497 - DNA, 666 bp, Homo sapiens
ctgaccgttatttaaaccccagcccttttagaaattaattttggcaagagttttaagtaaacagctggcttaaatcactactcatctttatgttgcagatggctgtaccatgactaatataccccaatgtaaagatctggtaacaytctgattcacttacttggatcagccaccatttacccttgtagtaaagatggaatacaatgagtgacctttcaaaatggtattgggatagtaggtttcccaaaggcaagagcaatagaaagacaaaattcatacactatttcactgaagctagaattccatcaatgataggaaacactaccatttatgtaataccaataaataaaagatgctgctaatgaaaatattacactatccttccacttgtagtttcattttatattaaaatagatttttagacataataatgttatgctttcacttacataagaaggaaaatataagtgaaatatatttgttaaaatgtcattaaaatacttcaacattccgtgtctaactcttctgaaactcttcaacttagagtgtgcatgtgtttatgtgtgtgggtgtgtatgtgttttcacatattattctctgccagcaggagttttagaattacagcatttcttaaaagagtgttcatcattgtatctgaaattttct

SEQ ID NO: 205498 - DNA, 666 bp, Homo sapiens
ctgaccgttatttaaaccccagcccttttagaaattaattttggcaagagttttaagtaaacagctggcttaaatcactactcatctttatgttgcagatggctgtaccatgactaatataccccaatgtaaagatctggtaacactctgattcacttacttggatcagccaccatttacccttgtagtaaagatggaatacaatgagtgacctttcaaaatggtattgggatagtaggtttcccaaaggcaagagcaatagaaagacaaaattcatacactatttcactgaagctagaattccatcaatgataggaaacactaccatttatgtaataccaataaataaaagatgctgctaatgaaaatattacactatccttccacttgtagtttcattttatattaaaatagatttttagacataataatgttatgctttcacttacataagaaggaaaatataagtgaaatatatttgttaaaatgtcattaaaatacttcaacaktccgtgtctaactcttctgaaactcttcaacttagagtgtgcatgtgtttatgtgtgtgggtgtgtatgtgttttcacatattattctctgccagcaggagttttagaattacagcatttcttaaaagagtgttcatcattgtatctgaaattttct

SEQ ID NO: 205499 - DNA, 567 bp, Homo sapiens
  misc_feature (1)...(567): n = A,T,C or G
aagatatttgcttggagtcagttatctatgaaaatagtctctgttaactttaaaaatcagttccaccaaactacactgcatgtaacagataatccacagttaatgatcaataacattatctggttgcttgcagattctgatttcctcacatttgtccagcttctgattttaaaagggatttgtctttctatttagtgaagcaatatgtggaaaactattttgtaaatcaatttctcagctctttcctcctgctggagatgtagcttttaagggcatatgtgaaatattggacttgcttttcattatcacctgctaattaccaactgtgaagaatgtattacctgataatgacacatggtaaaactttgatcaaagctttccctggtacacagaagtaacagtgtgaatgtcttygttttcagcgactacgttgtcacaaaagggggaaaattttagaggcatctaattccataaaaccaccatttcctctgtatacccccaaaaatatgtaagaatctatttttttcatctatgagatcatgagggngaaaatcaccttcatatgga

SEQ ID NO: 205500 - DNA, 573 bp, Homo sapiens
tgctacatgcctaggcagatatctagacattcagaacacctgcttgcctggttcctggttcagcagtctgagtccccacagcattcctgtgcagagatcttggtacaaggggtccctttctgctccatgtaccatctgacagatctccaggcatctgagatcagaaaccatctaaaacctgctgaaaccatcttctggattagaagtttaagcttcccaccccccttcaatttgtgtgcagagaacttaatgctgaggtgatttctcagctctatgcctargcacagctctgggtgcttgttgacttcccactggcttctcccacagtgttggtgcttgtgctttccatcaggggaccagtaggaggatctgcccagtccaatctcacatttcatggttcgtgtcccttgggctaagaagcaagctcagaatactgtgcattccatatatcagaccattatctgaggcaacagaaagcttctgccaacaaataaaaaatgaagtgtatacgcacccatgttggccatagtcagctcttacctattagtgccatctgtgggcttgtgggtcaaa

SEQ ID NO: 205501 - DNA, 573 bp, Homo sapiens
tgctacatgcctaggcagatatctagacattcagaacacctgcttgcctggttcctggttcagcagtctgagtccccacagcattcctgtgcagagatcttggtacaaggggtccctttctgctccatgtaccatctgacagatctccaggcatctgagatcagaaaccatctaaaacctgctgaaaccatcttctggattagaagtttaagcttcccaccccccttcaatttgtgtgcagagaacttaatgctgaggtgatttctcagctctatgcctaggcacagctctgggtgcttgttgacttcccactggcttctcccacagtgttggtgcttgtgctttccatcaggggaccagtaggaggatctgcccagtccaatctcacatttcatggttcgtgtcccttgggctaagaagcaagctcagaatactgtgcattccatatatcagaccattatctgaggcaacagaaagcttctgccaacaaataaaaaatgaagtgtatacrcacccatgttggccatagtcagctcttacctattagtgccatctgtgggcttgtgggtcaaa

SEQ ID NO: 205502 - DNA, 531 bp, Homo sapiens
ttaagttcaaccttccacaaatccctaagacatgaacacaatgcacccaagctctttgctaaggcataacatgagtgaggatttgttccagttgccaataaatttctcatgtccatctgagagcttgtcagcctggacttcactgtctatatttctatcagcrttttggtcacaaccactcaactagtccctaagacattccaaaccttctttcttcttcctgtattcttctgagctctccaaactcttccaatttctgcttgtgacacagtttccaaagctggttccacatcttcaggtatctttatagcaatgccccacttctagtaccaattttctgttagtccatttgtgttactgtaaagaatacttgaggctggatagtttataacaaaaagaggtttattttggctcacagatctgcaggctgtacacgaagcatggacccagcatctgctcctgtgaggcctcacgaaacttccaatcacagcagaaggtgaaggggatgccagaaaatcctatggcaagaga

SEQ ID NO: 205503 - DNA, 644 bp, Homo sapiens
ggtggctttctcaaatgccagttgtactagtaatgtaccagatggttatgcaggttcaaggtctactgagtatccagggtagtgtggacaatggtggtagcagaggttgcataaagcttgtgtccttcctgagtgactttaacacactcctgatccaattctgtagtgattacacacacacacatgatcacacacacacacgcacacatgcatatgtatacataatataagcaatataaatataatccttygtttgggcatgtgatacaataaaagtgaaaagtaaaaggctgaagtcatgaacacagataaaaccatcagaactgatcaaagaaaaagtgtaaagaaactcccccaaaaatattttgtttgaaaaaagtaaaaataattatatgtataattgaattttagaaatcaaaatgtttttttctatttctgtgaaaaatgacactgaaaatttgataggaattgcactgaatctgtagatcactttaggtagtacagaaattttaacaatattagttattccagtccattaccacgaaacgtctttccctttatttgtgtcttcttcaaattctctatcaatatttctaccatgtatatataaatcaaaacatcagattttaccgaataagtataca

SEQ ID NO: 205504 - DNA, 644 bp, Homo sapiens
ggtggctttctcaaatgccagttgtactagtaatgtaccagatggttatgcaggttcaaggtctactgagtatccagggtagtgtggacaatggtggtagcagaggttgcataaagcttgtgtccttcctgagtgactttaacacactcctgatccaattctgtagtgattacacacacacacatgatcacacacacacacgcacacatgcatatgtatacataatataagcaatataaatataatccttcgtttgggcatgtgatacaataaaagtgaaaagtaaaaggctgaagtcatgaacacagataaaaccatcagaactgatcaaagaaaaagtgtaaagaaactcccccaaaaatattttgtttgaaaaaagtaaaaataattatatgtataattgaattttagaaatcaaaatgtttttttctatttctgtgaaaaatgacactgaaaatttgataggaattgcactgaatctgtagatcactttaggtagtacagaaattttaacaatattagttattccagtccattaccacgaaacgtctttccctttatttgtgtcttcttcaaattctctatcaatatttctaccatgtatatataaatcaaaacatcakattttaccgaataagtataca

SEQ ID NO: 205505 - DNA, 537 bp, Homo sapiens
aaacagactttaagccaataacagaaaaagaaaaaagacaaaggaggtcacagcataaagataaacagtttcattaaacaaaaagacttaactgccccaaatatatacacacccaacattggagcactgaaattcataaaacaaacacatctagacctgagaaaagacttagaaaaccacacaacaatagtgggggacttcaacactccactgaacgcactaaacagatcaytggggcagaaaacttacaaagaaattctggacttaaacacaacacatgaaaaattggagctaatagatatccacagaatatttcactcatcatccagagattatacattctttttctcttcacacagagcatactccaagacccaccacatgctcagcaataaaacaagtttcaataaattaaaaaaaaataaaaattataccaccatactcttggaccacaatggcataaaaatagaaatcagtaccaataagatctctcaaaaccacacaattatatggaaatttaaaaatttgctcctgaat

SEQ ID NO: 205506 - DNA, 632 bp, Homo sapiens
tttgtgaataaactaaaaccacagtacattacactgtaaaagaacaaatgtaatggtaggtaaataatatatcaatttaaaaagccaccaaatttaaatgtgaaatatgatcttgtattgaacaattgaacactggggtaaaaaataagttgctctaaagaacattatcggaataattatcaaaacttaagtgaaacctgtacattaggtaatagtattttattaacattaaattttctgttttgtgataattttggaaatttcacattaaagtgtttagtgagaaagggatctattgctttctacttagtctrtaacgattcagaaaagaataacaaatcaaatgtggcaaaatgtcaacaattgctgaatctaggtgaagggtataaataaattctttgaacttttgtacttttcatggtcacatttatgtaaaaaatgttgcaaaataaaaatgattatcataaagtcaaaaaaaatgaaaaacgaaagaaaaatgcaaaacaaagcaagcccaatccatctagcagtgtgtggatgtggtcctttctcaaaagagaagttaattttaatgattctttgaggttatgtgaagctttctcagctggctattaacagtgaatttataacag

SEQ ID NO: 205507 - DNA, 632 bp, Homo sapiens
tttgtgaataaactaaaaccacagtacattacactgtaaaagaacaaatgtaatggtaggtaaataatatatcaatttaaaaagccaccaaatttaaatgtgaaatatgatcttgtattgaacaattgaacactggggtaaaaaataagttgctctaaagaacattatcggaataattatcaaaacttaagtgaaacctgtacattaggtaatagtattttattaacattaaattttctgttttgtgataattttggaaatttcacattaaagtgtttagtgagaaagggatctattgctttctacttagtctataacgattcagaaaagaataacaaatcaaatgtgrcaaaatgtcaacaattgctgaatctaggtgaagggtataaataaattctttgaacttttgtacttttcatggtcacatttatgtaaaaaatgttgcaaaataaaaatgattatcataaagtcaaaaaaaatgaaaaacgaaagaaaaatgcaaaacaaagcaagcccaatccatctagcagtgtgtggatgtggtcctttctcaaaagagaagttaattttaatgattctttgaggttatgtgaagctttctcagctggctattaacagtgaatttataacag

SEQ ID NO: 205508 - DNA, 299 bp, Homo sapiens
tttctacttagtctataacgattcagaaaagaataacaaatcaaatgtggcaaaatgtcaacaattgctgaatctaggtgaagggtataaataaattctttgaacttttgtacttttcatggtcacwtttatgtaaaaaatgttgcaaaataaaaatgattatcataaagtcaaaaaaaatgaaaaacgaaagaaaaatgcaaaacaaagcaagcccaatccatctagcagtgtgtggatgtggtcctttctcaaaagagaagttaattttaatgattctttgaggttatgtgaagctt

SEQ ID NO: 205509 - DNA, 632 bp, Homo sapiens
tttgtgaataaactaaaaccacagtacattacactgtaaaagaacaaatgtaatggtaggtaaataatatatcaatttaaaaagccaccaaatttaaatgtgaaatatgatcttgtattgaacaattgaacactggggtaaaaaataagttgctctaaagaacattatcggaataattatcaaaacttaagtgaaacctgtacattaggtaatagtattttattaacattaaattttctgttttgtgataattttggaaatttcacattaaagtgtttagtgagaaagggatctattgctttctacttagtctataacgattcagaaaagaataacaaatcaaatgtggcaaaatgtcaacaattgctgaatctaggtgaagggtataaataaattctttgaacttttgtacttttcatggtcacatttatgtaaaaaatgttgcaaaataaaaatgattatcataaagtcaaaaaaaatgaaaaacgaaagaaaaatgcaaaacaaagcaagcccaatccatctagcagtgtgtgkatgtggtcctttctcaaaagagaagttaattttaatgattctttgaggttatgtgaagctttctcagctggctattaacagtgaatttataacag

SEQ ID NO: 205510 - DNA, 541 bp, Homo sapiens
ttctctgggatctctgaccttgaggggcactgacttgatcccagaaggaatgctcctacatatggtgtctggtgacccctttttgggtaatctcacccagtttgggggcatgggaatcaggatccatttatcaaagtactttggctaacccataggtggagggggtgtgctacactaggggtaaacccacttgtctgggctgcccrgattcttcagagctagtaggggaaagactaagtctgctggtccacagagatcacagccatccctcccgctagggattcaggcccagggagatctgagttctgtccccagtcttctggctggagttgatggagttcttgcagggaggccccgcccagtaaaaagggatgggtgggtgtctggcctaaagaggcagtctggccagggtctgccacagccagcttcagtgatggctgcctctcctcccccagggagctcagatggcttagacagcaggcagccacagtgatgtcggctgccccaccccctgggaactcggtagtcttaggcagattct

SEQ ID NO: 205511 - DNA, 436 bp, Homo sapiens
gctttgaatacttttgtgggattaaacaaactcatttaaaaatatatacctgggatacataatttcaggtccacccaatatctcagtactgtatttggaaaaaaagtcagaatattccattaaaaaaaagaagaaaaactgaaaaatgaaaactcttcaatgaattgccagtgtctcttagaatcaagttaaaaattataatatgaaccaaaaggtcccacaggattcagtccttgcccgcacatccagaccctcccmttacactatctcccatgcctctagttcaaaatgttatccaaatgtcagaggttcactctaggtcccattgctcactgcacagaaagccaatcactgagacaatgagtattgccaagaaagaaggctgtttattttcatgacagtggccagagagatgggagacaagtctcaaatctgt

SEQ ID NO: 205512 - DNA, 603 bp, Homo sapiens
ttattcttgtctgtttctgtgccttttcttgtaatgatggcctgccatactgtattcagaacctgtccaatttttgagtcctacctctaagcctctgactggtgattgagttctggttacctgcagtgagaattgactggctccggaacctgaccgtctttgtgggcttctgtgtctaacttgcatagacagtaacattttcatattccagtrgctgacagagcatccttaggacctaactaacaccttatgtgctacagaaagcttacctgtcccagatactgttatcaattgccactgcttcccaataatatgttctgccttctgtatgttattttctttcagaaaataagtaaggcctctgcccacctggataacatttataagcctttaaaaaatttgtctgtcattgcaatgctgtggagatcactgtgaactacagagaggctaaccaggacctatgatataaccgtgtcctgctctgttcctaccatgtactcaagcttcacaacacaaggggctgtgactaagatgagtgtttgtagtctataaacattagtagataatattttacaagttaatggaattctctaaaagtttgtc

SEQ ID NO: 205513 - DNA, 473 bp, Homo sapiens
agccatgttaacgagtgtgttatagtctcccattatggtctttatgtgcatttcgctaatgaccagtgatgttgatctctcctaatgtgcttattggtcatttgtatatcttctatataaacacattaaaacagttgtcaatttttaattttggttgtttgttattttgttgttgaattgtaagagttttaatatagtctagatcragcttgtccaacccatggcctgggccaacatgtggcccaggatgggtttgaatgtgccccaacacaaattcctgaactttcttaaaacattgtgagatttatgcatgggcctttttagtttttgttttttaggtcaccagctatcactagagttagtgtcttttatgtgcagcccaaaacaattcttcttctggtgtggcccagggaagccagaagattaaacacttatggtctaaataataattcttattttatacataatttgaa

SEQ ID NO: 205514 - DNA, 580 bp, Homo sapiens
gaattctgttattagaagatccagaaaaatgtagatttaatttgaattagtcttatttttatttctttttcttttttttttttggtggcggagagcagggcatcctagtcttttcagtggctttggcatctgcagttctttctttggtctcatatggcaacaataattgagatatagagtggcacartagatttgaatgatgagtacagaatgaacaaggcctctgtcttgaataagctggtcttgaagaatataaacagaaagtgatacatttcttagattaccagttaaaaagaagaggaaatgctggctagaagagaaagagtcattaatctaaaacaactgaactgagttgatgtgcctgggaacactgttaaagagaatattttaatagtgtaagaaaaaaatgttaagtcagtttcaagtcagtttgaaacattctgggttgaataaaattatcaagatatttttagttaatatcttattgaagatgtttctcagagcttttgaaatgctataggccacatgaataggtatacaggacagcaatttccctgacaatatgaccatcatcctgttg

SEQ ID NO: 205515 - DNA, 585 bp, Homo sapiens
tgaattcctccctagagcgaggtgctgcaggtttcaggkgggttaaagactggcaagaagagactacagcaccaacctgccataggatcagattaacctttttattcaagaacttaagaaatcaaaaatttccatcataattaaggttgccacacagagcaagcacagacctcagcagagctttccttggtctttcagagtccccagtgaggagcagtgggcagtagctgccaacagattgtaggagattgttctggacctgcaaacctcctcactattgcccttttacaatccagctgaagtcagcattcagaatgaatttaacacaaactgtatacgaacttccatctaaagaactgcttataagcatcacgttttctggctgaccaaactgagcactggtaaggccacatattcaatggcgggaaaagcaaagtctgtaccagctgtcccaaccataatctctgcctacagcattctagccaaacagctccgctttctatactggagagaccatgttccattcatcagtatttgttccctgaactggagcctggcgctccgtacatgtttgctgtatcaacc

SEQ ID NO: 205516 - DNA, 594 bp, Homo sapiens
gatttttttaaatctgtgataatttcaccgtttaaggttttctacagaaatttcctttatttcttttgatgtgttaaatattgttcttttataatcactgactcattaattccagaatatgtggagccctgtggtccactgccgatytaaactatttcttctagtaataattcatgttgacctgtcttgctgcatgtctggacactgaacagtatttaatcaaatctaagatacaaccaattataagacataacatttatttcaggtagtactaagaaagaaaaaacaatgtcaaccaaagtatataatgacttctatggcttagaatttttacttcttactggaagctttttatgtaactagatacacatttttatcatgttgctcttatacaaaaaggaaaatataaaaccggttaagatatttctaataactcacattcagaatctgaatcttctgaatcatttttcccacccagggtcatagatttttcagtttttccaaaaagtgctgctacctgtgctactaaaaacaaaggtgatgttgtatttcttctttctttcttttcttttttctccaattaagcccacagtg

SEQ ID NO: 205517 - DNA, 464 bp, Homo sapiens
gaattcaacagcactataaaatatcatccaccataattatgatggattttttcctggaatgcaagaagggttcaacatgtgaaaatcaatataatatgcttaattaacaaaacaattaaaataacgtgttcatctccgtagatggagaaagagcatttgatgaaattcaacattctctygttagaaaaacacttgaaaaaataggaatagaaggaaattattccaacagaataaaggccatatgtaaaaacccacagctcacatcatattaatgaagaaaaactgaaatcccttcttctaagatcaggatcaggaacaaggcaaggatgcctttatgaagtacataaagtcctagctaaaataattcagcaagaaaaagatacaaaagggatccaaaatggaaaggaagaagtaaaattttttctattcacagaaaacatcatcttatatataaaaaaacccta

SEQ ID NO: 205518 - DNA, 302 bp, Homo sapiens
tatagtcaaatgatctttgacgagggtgcyaaaactatacaatggagaaaggacaatttcttcaacaaatattgttgggaaaactggatatccatatgcaaaagaatgaaagtgaacccttatcttacactgttcacaaatgttaactccaaatggattgaagacttaaatgtaagaactaaagctgtaaaactcctacaagaaaacataaagaaaggctttattacattggtcgtggcaataattccttggatttgacaccaaaagcacaggcaatcaaatcaaaaataggttagggtgat

SEQ ID NO: 205519 - DNA, 302 bp, Homo sapiens
tatagtcaaatgatctttgacgagggtgctaaaactatacaatggagaaaggayaatttcttcaacaaatattgttgggaaaactggatatccatatgcaaaagaatgaaagtgaacccttatcttacactgttcacaaatgttaactccaaatggattgaagacttaaatgtaagaactaaagctgtaaaactcctacaagaaaacataaagaaaggctttattacattggtcgtggcaataattccttggatttgacaccaaaagcacaggcaatcaaatcaaaaataggttagggtgat

SEQ ID NO: 205520 - DNA, 302 bp, Homo sapiens
tatagtcaaatgatctttgacgagggtgctaaaactatacaatggagaaaggacaatttcttcaacaaatattgttgggaaaactggatatccatatgcaaaagaatgaaagtgaacccttatcttacactgttcacaaatgttaactccaaatggattgaagacttaaatgtaagaactaaagctgtaaaactcctacaagaaaacataaagaaaggctttatyacattggtcgtggcaataattccttggatttgacaccaaaagcacaggcaatcaaatcaaaaataggttagggtgat

SEQ ID NO: 205521 - DNA, 302 bp, Homo sapiens
tatagtcaaatgatctttgacgagggtgctaaaactatacaatggagaaaggacaatttcttcaacaaatattgttgggaaaactggatatccatatgcaaaagaatgaaagtgaacccttatcttacactgttcacaaatgttaactccaaatggattgaagacttaaatgtaagaactaaagctgtaaaactcctacaagaaaacataaagaaaggctttattacattggtcgtggcaataattccttggatttgayaccaaaagcacaggcaatcaaatcaaaaataggttagggtgat

SEQ ID NO: 205522 - DNA, 593 bp, Homo sapiens
ataattttagatagtgaagatttctgtattcaaatgccacatggaaaaagtactaaggggaatgaggagatgagtcatatggaatgccgaagagacagaagaaggcaggcagagaaaataacaaggattaaagacactggagtaaaatcatgctttctatatttcaaaacaacagcaaggacactagtgtgacagagcaggagtgaccaatgggaggctggagattttgtcagagatattgtcaaggctcaggatcgtacagggacttgtaagcctggaaaggactttgaattttattcagaatgagatgagaagccattgaaaagtttttaagcagatgagcaaaataatccaccttgtattttaagaggagcattctaccttctctgtggaatagagaggtggaagggcaaagcttgaagcagagagagcagtgaacagtgtactgtaatattcttatgtgagaaatagtggagggaaygagagatggtcagctttaaactgccatttgctctctgtatcagggctcagggactttcagactttccagggattccttacagtttttacattcgtttctcagttgcaaacat

SEQ ID NO: 205523 - DNA, 555 bp, Homo sapiens
aaaacatttgggacagtaatgaagatacagcaaatgaattgttttaatatataatcaaggcaaagttatcatcagaattataggaaaaaatccactaaatttggtttatgagaaattcatgattcattgtataccttgatactgggcttaaagcagcaatcctaattccagatctaccttcaagtctgggtcagtgttctcaaatgctgccagtttcatgtcaggactggcttaatattgaaggtaactgagcattgctaatgtctgactggagctgaaagaggccaaaagcagggttataactttgggaaaactgacctggtgttaacttccataccttccatttcaaacgggaaagtatcgcaattagaagctattagcagtcttatctaataacttgtggataattcctttttttcctttttttaagagtcagrgtctcactctctcacctaggctggagtgcagtggtgcaattgttatggaatctttggggtgtcgattttctggttggaaaactgtggttggtggcatctttgcccgagttcttgtcct

SEQ ID NO: 205524 - DNA, 594 bp, Homo sapiens
tggtattgtcaaacttcttaataattgtggggagaatagatgtgtagtgtcttgggcattttcctgattactaatgaggttgagaaattttttacattttgcgggctttctcttttgtgaaatccctattgatgtattttcccaattttctgttgggttgctawttttaaaattaattcattgcagttccttatacttagttgataagatgttaatatttcataggttttaggtactgcaaatatcttctaatttatagtttacttttcacttttttactttcattttttaatttctattttttttttgagacagagtctagctctgttattcaggctggagtgcagtggcttattgaaacctccacctcccgggctcagatgattcttgtgcctcagcttcctaagtagctgggattacaggtgtctgccactaatgccaagctaatttcttgtatttttagtagagacagggtttcaccatgttggccagcctggtctcaaactcctaacctcaggtgatgtactgttgggattacaggcttgagacactgtgcccagcctatctttccactttctgatgtaaaaagttctt

SEQ ID NO: 205525 - DNA, 594 bp, Homo sapiens
tggtattgtcaaacttcttaataattgtggggagaatagatgtgtagtgtcttgggcattttcctgattactaatgaggttgagaaattttttacattttgcgggctttctcttttgtgaaatccctattgatgtattttcccaattttctgttgggttgctatttttaaaattaattcattgcagttccttatacttagttgataagatgttaatatttcataggttttaggtactgcaaatatcttctaatttatagtttacttttcacttttttactttcattttttaatttctattttttttttgagacagagtctagctctgttattcaggctggagtgcagtggcttattgmaacctccacctcccgggctcagatgattcttgtgcctcagcttcctaagtagctgggattacaggtgtctgccactaatgccaagctaatttcttgtatttttagtagagacagggtttcaccatgttggccagcctggtctcaaactcctaacctcaggtgatgtactgttgggattacaggcttgagacactgtgcccagcctatctttccactttctgatgtaaaaagttctt

SEQ ID NO: 205526 - DNA, 594 bp, Homo sapiens
tggtattgtcaaacttcttaataattgtggggagaatagatgtgtagtgtcttgggcattttcctgattactaatgaggttgagaaattttttacattttgcgggctttctcttttgtgaaatccctattgatgtattttcccaattttctgttgggttgctatttttaaaattaattcattgcagttccttatacttagttgataagatgttaatatttcataggttttaggtactgcaaatatcttctaatttatagtttacttttcacttttttactttcattttttaatttctattttttttttgagacagagtctagctctgttattcaggctggagtgcagtggcttattgaaacctccacctcccrggctcagatgattcttgtgcctcagcttcctaagtagctgggattacaggtgtctgccactaatgccaagctaatttcttgtatttttagtagagacagggtttcaccatgttggccagcctggtctcaaactcctaacctcaggtgatgtactgttgggattacaggcttgagacactgtgcccagcctatctttccactttctgatgtaaaaagttctt

SEQ ID NO: 205527 - DNA, 265 bp, Homo sapiens
tcaggaggctgaggtgggaggattgcttgagtcaaggaggtgaagtctgaagtgggccaagatcatgccactgcaatccatcctgggcaacagagtgagaccttatctcaagaaaaaaaaaaaggtttawaggacagactgactctcttattacaagccaatgcttatttgccattccataaatcctagggcacctcttaagaattatgctaaatctactctacctgtgctctataaatggattcactattgtagatgccactaa

SEQ ID NO: 205528 - DNA, 265 bp, Homo sapiens
tcaggaggctgaggtgggaggattgcttgagtcaaggaggtgaagtctgaagtgggccaagatcatgccactgcaatccatcctgggcaacagagtgagaccttatctcaagaaaaaaaaaaaggtttataggacagactgactctcttattacaagccaatgctyatttgccattccataaatcctagggcacctcttaagaattatgctaaatctactctacctgtgctctataaatggattcactattgtagatgccactaa

SEQ ID NO: 205529 - DNA, 265 bp, Homo sapiens
tcaggaggctgaggtgggaggattgcttgagtcaaggaggtgaagtctgaagtgggccaagatcatgccactgcaatccatcctgggcaacagagtgagaccttatctcaagaaaaaaaaaaaggtttataggacagactgactctcttattacaagccaatgcttatttgccrttccataaatcctagggcacctcttaagaattatgctaaatctactctacctgtgctctataaatggattcactattgtagatgccactaa

SEQ ID NO: 205530 - DNA, 635 bp, Homo sapiens
tgtgcttcagtggaactccccacggtggctgagagtgaatgaaaggtgtgctgagaagacatgacacagtcgtcatttcacggaggaatcatagccatcgatcttggcaagaggacccctgccctgaatcctgggcttgagaaagtgcctctctggccctccactgactgtaccctggcccacccagagctctcaccctctcttctaggacacacgctgggcactcaggcccctggctaaatgtgcctgagcctgcatggcctcttccctgggtccatttcaaagtgcaaactgtgtttgtccaaatggtgaccaaggctctgctctctgaaggggtgagaattgtggatggagcttgcatggggcctagggagtcccamacacaggggtacgcaaggcttctcaagtaaggacagggctagctatgatgaaagaaaaaagtttagcctggggctgaggatcagctctccctttactaccacattcccgtgcagagcaccaagaaatcagagaattctacactcgacttcgaccttgtgggttattatggcggtatatttattgaagtagaagaatagaatgtatttagctattttttagcttcatttataattcataattatttagacataatg

SEQ ID NO: 205531 - DNA, 388 bp, Homo sapiens
ttagcctggggctgaggatcagctctccctttactacyacattcccgtgcagagcaccaagaaatcagagaattctacactcgacttcgaccttgtgggttattatggcggtatatttattgaagtagaagaatagaatgtatttagctattttttagcttcatttataattcataattatttagacataatgcaaatatgggctggaattcatgttctgatttttgtggccttgagctaaggaaaagggacccaggaaatgggctttatgtgcttggatggcttcatggaatccccaacttcattagcttctgtgatgactcaagattgttactaaaatccactttgtattatctttaaaaaccaagggatattatgtagcttagca

SEQ ID NO: 205532 - DNA, 388 bp, Homo sapiens
ttagcctggggctgaggatcagctctccctttactaccrcattcccgtgcagagcaccaagaaatcagagaattctacactcgacttcgaccttgtgggttattatggcggtatatttattgaagtagaagaatagaatgtatttagctattttttagcttcatttataattcataattatttagacataatgcaaatatgggctggaattcatgttctgatttttgtggccttgagctaaggaaaagggacccaggaaatgggctttatgtgcttggatggcttcatggaatccccaacttcattagcttctgtgatgactcaagattgttactaaaatccactttgtattatctttaaaaaccaagggatattatgtagcttagca

SEQ ID NO: 205533 - DNA, 388 bp, Homo sapiens
ttagcctggggctgaggatcagctctccctttactaccacattcccgtgcagagcaccaagaaatcagagaattctacactcgacttcgaccttgtgggttattatggcggtatatttatkgaagtagaagaatagaatgtatttagctattttttagcttcatttataattcataattatttagacataatgcaaatatgggctggaattcatgttctgatttttgtggccttgagctaaggaaaagggacccaggaaatgggctttatgtgcttggatggcttcatggaatccccaacttcattagcttctgtgatgactcaagattgttactaaaatccactttgtattatctttaaaaaccaagggatattatgtagcttagca

SEQ ID NO: 205534 - DNA, 649 bp, Homo sapiens
atgcttcctgggctgacttatgaagaaagtagttctttttcattaattttacaaaccaagactgaatgtcagaaattttaggccaggaaaagtcaaattcacttaatggaaccttgggttgcttcaggtaacaaacaaaacccaattcttctgggcaaaaactgagcaaggcatgccctctttcgtttaggtccctggctattgtccccccacgatgaacatattccttagggtcatctggaggataatactgaacaatccagccaggaatatctagctctctccctgcctcatctgtacacaatatccctgaatctgcattacagaactggaaaaaatgtaattctacacgtaattttgcttctggaaatgaatggctgaggtaggcaagtcaatgtagttccgcaactcatagtggtattttayggacctacaggatgaaaagaagaccatcagtttcttctttcagttcttaaggaatataaagagcaaaaggaatcctttttcagagggacgaacaacatatccccgcttgagactatccactgttgcagtagctttatcattatcaacaccagcatacatttgttcctttttttttttttggagaaatccttgccaggtcttcaagtttttgagtttgtgtggc

SEQ ID NO: 205535 - DNA, 396 bp, Homo sapiens
tttgctcttaaagccattcaaactgattggatgaagcccacccagattatgaaagataaccctctctacttaaagtcaagtgcttgtagatggtaagcacatctataaaataccttcacagtcagacctagattagtgtttaattgaaccaccagatactatagactagccaacttgacacataaaactaaccatcgcagacagttccttccttatacgaatctttctaagagcaaagaacytttcccagaagccccccaccagacttcctctcagttttcattggccagtgctgggatttgtacttctcaggaaatcaaccccttacaaagagaataagatcaagattgcgtttaaatcaattggattttagccgagccatgtgtggaagagtcg

SEQ ID NO: 205536 - DNA, 535 bp, Homo sapiens
ctatgctgcccttggaggcgtggaaaatggcttccgcgagtttacgagaagagggaaacactctttgtgattgaaaacacacccgcacccacacacaatttctaagttttcttaacaagataaagacgggataatttaatactcagggaattctttgttaatgattccattcgtcctttattatcatccataatggtttaaaaattatagtctaattggtgtcttatgatttgatcaaattcaacattacgaaatttaatcaataagaaaggtctctgttgttcatgactctaaaaataaacttgatgaaaaatatgagaataaatttgtttcttccctgcagtttatggtgctctcaccatacatgtgttttctgtttggaaggctgacctttactttccttgtcgcctcaggctcatcagtttcaaccaataataataataatcatgtgggtgtgagtatgtatgtrcctgtgtatatgccttagtttaataatcatttctatgcatgcacatccatttgaaattactgtcaa

SEQ ID NO: 205537 - DNA, 509 bp, Homo sapiens
tcttttctcttgctagggtgaacctactatttcctgaatccaatggctyccaatattttgaatgtttctgcattttccttatcgtttcattaaacaacttctcagttattggacacttttaagtccattcacatctaaaaatgcctttattttgctctcaaacttgatggatttttttgtatgaaatataggtttaaaataaatgacctgagcttccagttttacttccagcatctgaagagctcagaagtcatcactctcgtcctcacaacaagaaaaaagctgaacacattaataatcaataacttttcttggaccatattgagaattgaagtcccagggcaaaccaccttataaaatctggagagactagcaaattcagagtcacagccaagatatttctacctagagcaacagtcactaaagccttaaacttaaatctttatcactaaagatattcacatgaaagtgaatatctcctagggctgcacactcatgggttttacttc

SEQ ID NO: 205538 - DNA, 570 bp, Homo sapiens
aatccaacaaatattgcttcagaattttttttcaaatttcacaattttttttggaagttcatgtgaaaaatcaatagaagaaaagatccaagaaaataaggatgagaggcaattccattgttaaatactttgtttataatttatcatcaacctaaagtaatcacaaaaggcactaactactcaaagagaaaagtaagtattcttagatatacatgtgaattagtatttagtagggtagcactgcaaatttttcaataaaaaaacagattaattcaataaattgtttactattttaaaaataacaaatcttaattccctaccacatacaatattgcaaaataaaatccagrtggattacagagagaaaatgatgaaacataaatatataagaaaactaaaagtgctgatttgaacatttgcacaatgatagggtaagaaaaatttttaagcacttaaaaagtatttacatattaaccaaactgttttttctgaaaaccagagaaagataactaaaattatcaacaagaaaatatttttaagagattaatgaaaagatacaattatccacaa

SEQ ID NO: 205539 - DNA, 613 bp, Homo sapiens
aagatttttcaggatttctcttttagaaaaagagaatagaaagatacaaggttgagaaagataaaggacaatttgggggaaaatggtggtgagctaggacagaagtttactgtaattatgcatggaatcttcttttgacattctttgagaattttctataaagagttaaactgytttttaaataaaaactatttaaagtttttattttatttagctttcttgctggtggtctttaatgagactcctgccaattcaagctacatgcattttgaaacctttggtacataactggcatgagattgaatgttttattcctaaataaatattttgtaagataattttagattggtagaaataagttctgttttcactttcataatataaacagaattcttaacatttacaccgtgttattttctgtgactcaattgtttgtaatagaccaggtagtgaatatttagacatttttttgctactgaagtaaatagataataaaatattttaatgataaatttgtttgaagttttgttttaaattttactgtgacagcatcaactggcaagataaaagagcacgaaatccattccgtgttaatcaactgaccaaagaacgt

SEQ ID NO: 205540 - DNA, 481 bp, Homo sapiens
caccctcacagacacactgagaataatgtttaaccaaatgtatgcataccctccggcctagtatagttgacagctaaaattaaccatcctggaacactaagcttttctattgcccatattgaygcctcagagatatttattttaaaaagatagtatggtacatggatattagagaatagaggttttggttggatttgagcaagtggggagaggatggctacttgggagaacaaaggaaacctgagtttcaagcagaattccaagtcaaacatttgataggtagtgggctgatgggggaagcaagaagggcaaaggaaaccctatgtctattctgcagttttgtacttccttactctccactttagtattcaaaagattttattagccacctgacttatgaaggcattgtactaaagagagatatccttaggaaccttccaaattcagtaaagaaactctgacatgcttatgatcacaatac

SEQ ID NO: 205541 - DNA, 481 bp, Homo sapiens
caccctcacagacacactgagaataatgtttaaccaaatgtatgcataccctccggcctagtatagttgacagctaaaattaaccatcctggaacactaagcttttctattgcccatattgatgcctcagagatatttattttaaaaagatagtatggtacatggatattagagaatagaggttttggttggatttgagcaagtggggagaggatggctacttgggagaacaaaggaaacctgagtttcaagcagaattccaagtcaaacatttgataggtagtgggctgatgggggaarcaagaagggcaaaggaaaccctatgtctattctgcagttttgtacttccttactctccactttagtattcaaaagattttattagccacctgacttatgaaggcattgtactaaagagagatatccttaggaaccttccaaattcagtaaagaaactctgacatgcttatgatcacaatac

SEQ ID NO: 205542 - DNA, 579 bp, Homo sapiens
ggtctccagctgaggggagattatggtactctcagcctccacaatcatgcgaatcaatgccttataataatttgatcaatctctctctagatagagagatagatagatcccactggttctctttctctggagaaatctgggtgataatatgtggaaarttccctttcttcttcattcacatcatcatattcactaatcagaacctcgtttctcaagtttgtgtggccttttgaacacacgtattttagttcttcctgggataagaacttttggcaatgtaaaaaacatcagtacctaaaatccagcctgcatggatgcatcatgttgccatttttctctgaggatttgataatctcctggggctaggcttgcagaaaaatccagaatggcacatttaatttgaatttcagataaatggcatgatttttaaagtataattatttgaaaatattgcataggacatacttatatgaaaaatatattcattattggaatttcaaatttcactggatatcctgcttttttatttgttaagtctggcaaccctaccagggacacagtcagtgagtggtacagatc

SEQ ID NO: 205543 - DNA, 454 bp, Homo sapiens
aataaaaacagaatgctttacttcttcctttccaacctggatgccttcgatttccttttcttgcctagttgtactgactggaaactccagtgcaatactaaataaaattggtaaaagtgggcatcctagccttcttcctaatatgagagagaaagctgtcagtctttcacattaaatatgatactggcctacatttttgatagaygccctttatcaattttagaaaattcccttttatttccagttttccatgacagtttatcatgaaagtgtgacagatttttgtcaaatactttcctgtgtctgttgagatgatcatgtggttcttgccctttattctaccaaaatggctatcaaaagacaaaattacaacaaatttagtttaagtatttcagttggccttgtttttaattctggaagcaccaaaacttcattccataaaatagaataagtg

SEQ ID NO: 205544 - DNA, 594 bp, Homo sapiens
taaacctgtaagcttttcaaaaacaccactgagtcatttctttatacaactctagttgtttattccaactgaccagttgatgtctatgatatgtagaataaattgtaatctgattgcaaatgcattaataaacaatttaagcccagttaatggctacacttttatgcatttatttttcatttgtaggcaaatatctagcctctttggccmtaacaatgaataaaatacatgaggaccagttatttgccatggatagatatagagacaaaacatcagagttctacaaacctattttgaaaagtcagcatcctgactccagaggctaagtactgtatttcaattacaattatttttaaatgatgtgacattcatgtaataactctatagtaacagtctgtctgaaaaactcaagacatgtgtcacaatttatatgtttatccaactttagttatattcaaaggcttcatatatgtaaaagagctattctcataatactggaggaatattagtttccaatttcaactctcctatactacaacaaactttatgccttaaaacaacaaatatttattatcttgcagttgtggagttcag

SEQ ID NO: 205545 - DNA, 452 bp, Homo sapiens
caacagagtagaaaaggaagtgttgctaaggaaagatccagcagtctgcagttagaagggcaagtcttggaagtgacagtgttcctttgagtggaagagcaggctaacttaacaagggacttttacacttgcagtaagtgcaattctgtctagcaggttgataattaaacttaacagcaagtcacaaatatgattctttccttctcaggttatagacagtgagatgatgactwagatgcttataactagaataacactaaaataaatcagattctttagaacaatatgtaaagataattgtgaagaaattaagatttttatacaggttcaatggataaaactcaaaatcatagtttagtgaaaaaaaaaaaacaaaactcatagcttagtagagtaatttgaagaatttttttatctgtccattggagaagtattactccaaatgctactta

SEQ ID NO: 205546 - DNA, 603 bp, Homo sapiens
aaattctgcagtattcaatatgcatgtaaacaataactgagaaattggtacttataatgtgactgtagtcattagcataatttgatggttaaaaacccttgcgacctaggtagttttggccatttattaataataaaagctaagactttttaaaaaattgaaagagatagataakagacatatggtcctatccattctttgaaaatataggattctgaataaggcagtgatacagtttgcccaaagtcacatagtcattggcaaagctaggctaaaagccaggcttttgaggtttaatttggtactatattttatgatgccatcatgcttgccagattacttcttactcatttttatttttagcataatttgagagtctttactttttaacttctctacttaaaaagaagcccttatcatgtgtcatcactttttagaatagatattgagttttgtagatgtcatatatgaatatcatcattaaagataataaaattcttgttttaatatgtaaataagaattgtagaatgtagaatcatatacaatgatattgaaattagactacagttccagctatgatttgaaaatctcactaatattac

SEQ ID NO: 205547 - DNA, 545 bp, Homo sapiens
gacagggaaaaatgatagtttaggatttgatcactcaggtatggtgacaattcgcattaatttgtgacttttagatactgaaattgattttaccactaaagtagaaaatttcaaactgaataaggtatgcgcacatcaatctaataaatgtggatgatcaaagcaaaccagatgctttacaaacatctcctctcatttatgtgaggggtgtatagcatytcttaaactccttatattatctctaaatcacaacatttagtccatgccacgctcatttgactactagtaaattcagttaagatcatattttacggagtcttctcttctactgagttttaggtaagctggaatatttggtcttgagttcatattgaacactgcttgcccaagccaacatggcttttctgaagtgtttcttttgttcctatgcctattcttttgttcttatacaggaatgctttgctgtggctctcaatgcttttagtattctggtctgctttctcccctctatttgtccacccaatgcccaattctcctgccatcaa

SEQ ID NO: 205548 - DNA, 545 bp, Homo sapiens
gacagggaaaaatgatagtttaggatttgatcactcaggtatggtgacaattcgcattaatttgtgacttttagatactgaaattgattttaccactaaagtagaaaatttcaaactgaataaggtatgcgcacatcaatctaataaatgtggatgatcaaagcaaaccagatgctttacaaacatctcctctcatttatgtgaggggtgtatagcatttcttaaactccttatattatctctaaatcacaacatttagtccatgccacrctcatttgactactagtaaattcagttaagatcatattttacggagtcttctcttctactgagttttaggtaagctggaatatttggtcttgagttcatattgaacactgcttgcccaagccaacatggcttttctgaagtgtttcttttgttcctatgcctattcttttgttcttatacaggaatgctttgctgtggctctcaatgcttttagtattctggtctgctttctcccctctatttgtccacccaatgcccaattctcctgccatcaa

SEQ ID NO: 205549 - DNA, 556 bp, Homo sapiens
atacaatgtgtatgtatgtgtgtgtataaatatatatgatctatagtaatagatcataaaatgtggccatatgaataatttaaaatatgacaaaaatacataaaggcattaattaggtcttctctggacctcakggtgttcacattcactgccatcaagtgaattggtaactttttagaaatttccagaaccagtatagaaactggcttgagtagctaaaagacaacccaaaccccaagaaatactctgagcagagtaaaataatccacatcattaattttattaatcaagaataggctaagaaaacaagaaatctaaattctgaacaaaggtgaacaaaaagaattatagaagcagcatctaagactacaacactagatttacaagcagtctgtataataagctcctcaccattccttccagatccccttaacccctggttcccaacagagtcactacaaacacacaggcacaggcatagatacatcacctttgcccactctctctgcttactctctctgagacactaaggatgacctgggtaaatgaagaaatt

SEQ ID NO: 205550 - DNA, 556 bp, Homo sapiens
atacaatgtgtatgtatgtgtgtgtataaatatatatgatctatagtaatagatcataaaatgtggccatatgaataatttaaaatatgacaaaaatacataaaggcattaattaggtcttctctggacctcagggtgttcacattcactgccatcaagtgaattggtaactttttagaaatttccagaaccagtatagaaactggcttgagtagctaaaagacaacccaaaccccaagaaatactctgagcagagtaaaataatccacatcattaattttattaatcaagaataggytaagaaaacaagaaatctaaattctgaacaaaggtgaacaaaaagaattatagaagcagcatctaagactacaacactagatttacaagcagtctgtataataagctcctcaccattccttccagatccccttaacccctggttcccaacagagtcactacaaacacacaggcacaggcatagatacatcacctttgcccactctctctgcttactctctctgagacactaaggatgacctgggtaaatgaagaaatt

SEQ ID NO: 205551 - DNA, 600 bp, Homo sapiens
caaattcattaatcttttaggaagtaaacaaatccagtatgaagaattttattaaaatcatttcataatatagaacaaaaaagcttgatctaaggactggggagatttcccttcaataacaagcaaactatatatatatatgtataggcatctactagaaagtggcttttaatgctgagcaaatgggtattgactctactttcacagcgaatagaatcaaggcctacactacccaatagaactttctgcagtgacgaaatgctttgtatttgcagtgtctgatacaatcataagtagtcaatgtggctattgaacacttgaaaagtggatagattgattgaagaacaaatttttttaaatgtctaagtaaatttatatagccttatgtgactactggctactttattgacagcacaaatccggacagccaatctaacaaccaagaaagtatttaactactaattataagtgttctgaaagaaaaataatgtgaatgataaagctaagctgggggaccttactagcctgggacataatggtcagaaacgagtttcctgaggaagtcatmcctcagctaatatctgaaaagtgagtaggaat

SEQ ID NO: 205552 - DNA, 405 bp, Homo sapiens
cagtaaccagcaaggaattaaggttttgggtccaagatctcacagggaactaaaccctgccaggaaccagctgtgtgatcttgaarggatatcctttcaggtagatctttgatggcttaggtcctagcccacaactttgctagagcctgtgagagaactgaagcagagaactcagcaaagatgcatctgagttctcgatgtgctgaagctgagagatagtagtattgtcacttcaaaccattaagtttggggataatttgttatgaagcaaaagataactaaacttaagctattctttcctctaggctgaaagaatgaagtgctcccaatcagcctctcccctaatctcttgatctcacaccttgcctgatttgctgcatcagttttcttctctttccttttcac

SEQ ID NO: 205553 - DNA, 484 bp, Homo sapiens
acaggatattgctatattgtcaatcatatcaatggaacttgaagttgttgatttgcttcccacttaaaaaatgaatataaattaaaatgcaaatgaatgataaatgcaagcccatttgtaacctagaatatgactcatttaaaaaaaaagtaggacaatgagccaatcatgaggaaggtaagatgtcaataggtactcacttttagctcactttgtactcaaactaatgatcaggataataaggcttgcgtgcaccagttgaaaactgtgactttttttttttttttttttttttactgtatctcaaaagaaaacagcataatagatcttgcacggkgggtgagctacatgcaaattagtcaaaaattttggttgactaagaattatatttaccaattgaatgtcatttcctacatgaattatcataaggcaattgaaaagtagtatcataaggcaattgaaaagtagtacttaaagtagtcac

SEQ ID NO: 205554 - DNA, 555 bp, Homo sapiens
tccaaattctggtcctggatcaatctgatgatycttaactcctctaactgcctatgtagtgaaagagaggtacaagtaacaattatagttataccctccatcctcctaatatttcatcattgtaagacgcagttatcagctgaaagtacataaaagctgcaattaattttagaaaatcattgatagcaccaaatattctacgtactttttctttatgctcgtattcattttctacacaaatgtctagtgtgcctaattttgtgccgttctagtaacagccacagcttacctggcaacttcatttttctccattcctcaggcccgattgcttccctcccctagtttcaggatggattttctcttagtgatcccataatcttttcatccattcatcttggtttccacaatttcattagagatacagatatatatctgagcctcagaaattaaaaaatgttttaattattttctcaggagacttcttaactccccttttaaaccagccaatgtcaataggttgaggaagaggaagagagccaaggggcagaaggaaga

SEQ ID NO: 205555 - DNA, 371 bp, Homo sapiens
tttatattatctttgaaatctccagaaagctacccttctgctcacaatagcataattcatatagcaccacggtgccacataagttgtacagacctatttgagaggttggcaagcaaaaataaataactttgatacacatttatattctaagctgaaaaatatgttaattaaagtctacatataatgcatatggagcaaaagatttagagataaaatacaaagttaattgtagttgaatgtcaagagagggggartttaaagatttccatgagtggttatttcttagttattatccctttgtgcaataagaggcactggagaaattactgaacaatagaaaagatcctggtgaggttagacgaccctgaaca

SEQ ID NO: 205556 - DNA, 564 bp, Homo sapiens
ttctgtctatttcatgagaaatcctctggcttttatcattgaatcactcaaacactattaaccacctaaaatttatttacttattgaatactgaataggttccaggaattttcttaagtgtagggattgagtagtggaaaacaaaaagtgttttgtgtattttcctggtgtttacaagcagatgggragggctggcattacatttttgaacaaaagagtgatgggtgtttttagggaccatgaaaaggggtgtggaagtgtatatccagctatctctcctgggctggatgatcaaggaattgcttctggtgaaagaatatttaaactgagaccagaaataggaattagccaggtgaacatgggcagaagaacatttaagtagcaggaaacctatatgaaaatctggcatcaaaaaaataatggtagattaattaaagaaaataaaaattaagaagacaggactgtaaatgggatatgtgtctgaatttttttctattgcccagaacttgccatgatcacctgtcctgccttctttccagttacacccaatccactcttccttct

SEQ ID NO: 205557 - DNA, 564 bp, Homo sapiens
ttctgtctatttcatgagaaatcctctggcttttatcattgaatcactcaaacactattaaccacctaaaatttatttacttattgaatactgaataggttccaggaattttcttaagtgtagggattgagtagtggaaaacaaaaagtgttttgtgtattttcctggtgtttacaagcagatggggagggctggcattacatttttgaacaaaagagtgatgggtgtttttagggaccatgaaaaggggtgtggaagtgtatatccagctatctctcctgggctggatgatcaaggaattgcttctggtgaaagaatatttraactgagaccagaaataggaattagccaggtgaacatgggcagaagaacatttaagtagcaggaaacctatatgaaaatctggcatcaaaaaaataatggtagattaattaaagaaaataaaaattaagaagacaggactgtaaatgggatatgtgtctgaatttttttctattgcccagaacttgccatgatcacctgtcctgccttctttccagttacacccaatccactcttccttct

SEQ ID NO: 205558 - DNA, 391 bp, Homo sapiens
agagatctatgctaagtgaaaaagtcagtccaaaaagttgcatactgtatgattccatttatataatgttttgaaataacatttacagaaatgaatggattggtggttaccagaagttatgggcaggagagratggagagaaagaagtggcagtaattatcaaagcggaaggtgagaaataattgtgttgatgaaacaattaggtaccttgactctggtagtggacacacaaacttacacatgcgataatattgtaagggattaaatacacacacgtatacaacaaagtaaaagtgaaactgaagaaattggaataagatggatggaatgtatcaatggcaatatcctggatgtgatattttactactgttttgcaagatattaccattgg

SEQ ID NO: 205559 - DNA, 391 bp, Homo sapiens
agagatctatgctaagtgaaaaagtcagtccaaaaagttgcatactgtatgattccatttatataatgttttgaaataacatttacagaaatgaatggattggtggttaccagaagttatgggcaggagaggatggagagaaagaagtggcagtaattatcaaagcggaaggtgagaartaattgtgttgatgaaacaattaggtaccttgactctggtagtggacacacaaacttacacatgcgataatattgtaagggattaaatacacacacgtatacaacaaagtaaaagtgaaactgaagaaattggaataagatggatggaatgtatcaatggcaatatcctggatgtgatattttactactgttttgcaagatattaccattgg

SEQ ID NO: 205560 - DNA, 586 bp, Homo sapiens
acatgaatggacctgggtacattatgctaygcaaaataagccaggcacagaaagacaaacactgtgtgtttgcacttaaatggagaatttaaaaagcctgaacttatagaagcagagtgtacaatggtaatgaccaggcctggaggtagaaaaaatgagaagttgttcaaagagtacaaactttcagttataagataaataagttttgggggtctaatgtacagccttaagatgtagttaataacagtgttttgtatgcttaaaatttgctacaacagtaggagacctcaaatgctctcactacaaaaaacataaccatgtgaggtgacaaaaatgttcatcaacttaattgtattaaacatttgacaatgtatatcatatttttataatgtacacaatacataattatgcaatttttattggtcaaaaattaatgttatgtacacatgcatatattcatataagtgtgtatatagacatatataaaacatatacatatatatcaattacatatgttgttatgtatataattgtgtgtgtgtatatatatatatatatatacatatatacacacacatacatatca

SEQ ID NO: 205561 - DNA, 586 bp, Homo sapiens
acatgaatggacctgggtacattatgctatgcaaaataagccaggcacagaaagacaaacactgtgtgtttgcacttaaatggagaatttaaaaagcctgaacttatagaagcagagtgtacaatggtaatgaccaggcctggaggtagaaaaaatgagaagktgttcaaagagtacaaactttcagttataagataaataagttttgggggtctaatgtacagccttaagatgtagttaataacagtgttttgtatgcttaaaatttgctacaacagtaggagacctcaaatgctctcactacaaaaaacataaccatgtgaggtgacaaaaatgttcatcaacttaattgtattaaacatttgacaatgtatatcatatttttataatgtacacaatacataattatgcaatttttattggtcaaaaattaatgttatgtacacatgcatatattcatataagtgtgtatatagacatatataaaacatatacatatatatcaattacatatgttgttatgtatataattgtgtgtgtgtatatatatatatatatatacatatatacacacacatacatatca

SEQ ID NO: 205562 - DNA, 586 bp, Homo sapiens
acatgaatggacctgggtacattatgctatgcaaaataagccaggcacagaaagacaaacactgtgtgtttgcacttaaatggagaatttaaaaagcctgaacttatagaagcagagtgtacaatggtaatgaccaggcctggaggtagaaaaaatgagaagttgttcaaagagtacaaactttcagttataagataaataagttttgggggtctaatgtacagccttaagatgtagttaataacagtgttttgtatgcttaaaatttgctacaacagtaggagacctcaaatgctctcactacaaaaaacataaccatgtgaggtgacaaaaatgttcatcaacttaattgtattaaacatttgacaatgtatatcatatttttataatgtacacaatacataattatgcaatttttattggtcaaaaattaatgttatgtacacatgcatatattcatataagtgtgtatatagacatatataaaacatatacatatatatcaattacatatgttgttatgtatataattgtgtgtgtgtatatatatatatatatayacatatatacacacacatacatatca

SEQ ID NO: 205563 - DNA, 501 bp, Homo sapiens
cacgatttcagggagaaaccaccctggaagggtggagtgtggaactgaacctccatgatagtcttgattttccaggccctctccgtgaagccggcaatgcctgtgggtgtcgccrttgccgtgatagtcacacacgcaggtgtgtggatctcattcatttttttattttcattttttatttctacctcttaaagtcaatgataaagtcatgagtgtaaaatgaatgcatttaaaaacataaaagatacatttcaatgacaagaaatatgcaatgatcatgaaaatctactgtacactttgccaaggtcaaagaatgaaagaaaatatggaaaagccaatcctcaaatatatccttaacaaaaactctctcctacatagtaaaagcatcatctaaacagcagctccaaccgagaaaaaaaatacaacaaaaaacaaaacaaaacaaaaaaacagcagggtagatgggacagataactttccccaggttttccagataaaaac

SEQ ID NO: 205564 - DNA, 501 bp, Homo sapiens
cacgatttcagggagaaaccaccctggaagggtggagtgtggaactgaacctccatgatagtcttgattttccaggccctctccgtgaagccggcaatgcctgtgggtgtcgccgttgccgtgatagtcacacacgcrggtgtgtggatctcattcatttttttattttcattttttatttctacctcttaaagtcaatgataaagtcatgagtgtaaaatgaatgcatttaaaaacataaaagatacatttcaatgacaagaaatatgcaatgatcatgaaaatctactgtacactttgccaaggtcaaagaatgaaagaaaatatggaaaagccaatcctcaaatatatccttaacaaaaactctctcctacatagtaaaagcatcatctaaacagcagctccaaccgagaaaaaaaatacaacaaaaaacaaaacaaaacaaaaaaacagcagggtagatgggacagataactttccccaggttttccagataaaaac

SEQ ID NO: 205565 - DNA, 501 bp, Homo sapiens
cacgatttcagggagaaaccaccctggaagggtggagtgtggaactgaacctccatgatagtcttgattttccaggccctctccgtgaagccggcaatgcctgtgggtgtcgccgttgccgtgatagtcacacacgcaggtgtgtggatctcattcatttttttattttcattttttatttctacctcttaaagtcaatgataaagtcatgagtgtaaaatgaatgcatttaaaaacataaaagatacatttcaatgacaagaaatatgcaatgatcatgaaaatctactgtacastttgccaaggtcaaagaatgaaagaaaatatggaaaagccaatcctcaaatatatccttaacaaaaactctctcctacatagtaaaagcatcatctaaacagcagctccaaccgagaaaaaaaatacaacaaaaaacaaaacaaaacaaaaaaacagcagggtagatgggacagataactttccccaggttttccagataaaaac

SEQ ID NO: 205566 - DNA, 536 bp, Homo sapiens
agaattctacagaaactggaagtttctctctgggttcacacacgatttcagggagaaaccaccctggaagggtggagtgtggaactgaacctccatgatagtcttgattttccaggccctctccgtgaagccggcaatgcctgtgggtgtcgccgttgccgtgatagtcacacacgcaggtgtgtggatctcattcatttttttattttcattttttatttctacctcttaaagtcaatgataaagtcatgagtgtaaaatgaatgcatttaaaaacataaaagatacatttcaatgacaagaaatatgcaatgatcatgaaaatctactgtacactttgccaaggtcaaagaatgaaagamaatatggaaaagccaatcctcaaatatatccttaacaaaaactctctcctacatagtaaaagcatcatctaaacagcagctccaaccgagaaaaaaaatacaacaaaaaacaaaacaaaacaaaaaaacagcagggtagatgggacagataactttccccaggttttccagata

SEQ ID NO: 205567 - DNA, 518 bp, Homo sapiens
gaagtttctctctgggttcacacacgatttcagggagaaaccaccctggaagggtggagtgtggaactgaacctccatgatagtcttgattttccaggccctctccgtgaagccggcaatgcctgtgggtgtcgccgttgccgtgatagtcacacacgcaggtgtgtggatctcattcatttttttattttcattttttatttctacctcttaaagtcaatgataaagtcatgagtgtaaaatgaatgcatttaaaaacataaaagatacatttcaatgacaagaaatatgcaatgatcatgaaaatctactgtacactttgccaaggtcaaagaatgaaagaaaatatggaaaagccaatcctcaaatatatccttaacaaaaactstctcctacatagtaaaagcatcatctaaacagcagctccaaccgagaaaaaaaatacaacaaaaaacaaaacaaaacaaaaaaacagcagggtagatgggacagataactttccccaggttttccagata

SEQ ID NO: 205568 - DNA, 381 bp, Homo sapiens
aacctcattttttaaaatactgaaaatgtaaagggtccatataaagagttgtattaagtayatacttcctattttaataattcacttgctgtgctcttaaaatctctatgagagaagcagatattttactcgtgtcttttggcaagagattcaaaagcaaaagtagcagggctgtaaaatttcataaaatttgtgggatttttaaaagctaaattattcaatattttgtattgttattgcactcatatattgcccggaatatatatacagcaacccagcaacagtgattgcaacaaaagtaaggtaaataggtctacaaagcatttgatttccttattagataagtgaagttttcatagaggaagtgcaaattcagatcag

SEQ ID NO: 205569 - DNA, 496 bp, Homo sapiens
tcattttttaaaatactgaaaatgtaaagggtccatataaagagttgtattaagtacatacttcctattttaataattcacttgmtgtgctcttaaaatctctatgagagaagcagatattttactcgtgtcttttggcaagagattcaaaagcaaaagtagcagggctgtaaaatttcataaaatttgtgggatttttaaaagctaaattattcaatattttgtattgttattgcactcatatattgcccggaatatatatacagcaacccagcaacagtgattgcaacaaaagtaaggtaaataggtctacaaagcatttgatttccttattagataagtgaagttttcatagaggaagtgcaaattcagatcaggttacataagcttaacaattattcaaaccttatataaaattaaatctaaccctcaccactacaaatctgtaaggaatcactgtcaggaatctacaggacttggctcatatttacattcg

SEQ ID NO: 205570 - DNA, 496 bp, Homo sapiens
tcattttttaaaatactgaaaatgtaaagggtccatataaagagttgtattaagtacatacttcctattttaataattcacttgctgtgctcttaaaatctctatgagagaagcagatattttactcgtgtcttttggcaagagattcaaaagcaaaagtagcagggctgtaaaatttcataaaatttgtgggatttttaaaagcyaaattattcaatattttgtattgttattgcactcatatattgcccggaatatatatacagcaacccagcaacagtgattgcaacaaaagtaaggtaaataggtctacaaagcatttgatttccttattagataagtgaagttttcatagaggaagtgcaaattcagatcaggttacataagcttaacaattattcaaaccttatataaaattaaatctaaccctcaccactacaaatctgtaaggaatcactgtcaggaatctacaggacttggctcatatttacattcg

SEQ ID NO: 205571 - DNA, 575 bp, Homo sapiens
ctcattttttaaaatactgaaaatgtaaagggtccatataaagagttgtattaagtacatacttcctattttaataattcacttgctgtgctcttaaaatctctatgagagaagcagatattttactcgtgtcttttggcaagagattcaaaagcaaaagtagcagggctgtaaaatttcataaaatttgtgggatttttaaaagctaaattattcartattttgtattgttattgcactcatatattgcccggaatatatatacagcaacccagcaacagtgattgcaacaaaagtaaggtaaataggtctacaaagcatttgatttccttattagataagtgaagttttcatagaggaagtgcaaattcagatcaggttacataagcttaacaattattcaaaccttatataaaattaaatctaaccctcaccactacaaatctgtaaggaatcactgtcaggaatctacaggacttggctcatatttacattcgacgcacacttagaaatttcataaatgatgagatgcaggccaaggggattcctcaaagggctccacgcaaaaggaaaag

SEQ ID NO: 205572 - DNA, 381 bp, Homo sapiens
aacctcattttttaaaatactgaaaatgtaaagggtccatataaagagttgtattaagtacatacttcctattttaataattcacttgctgtgctcttaaaatctctatgagagaagcagatattttactcgtgtcttttggcaagagattcaaaagcaaaagtagcagggctgtaaaatttcataaaatttgtgggatttttaaaagctaaattattcaatattttgtattgttattgcactcatatattgcccggaatatatatacagcaacccagcaacagtgattgcaacaaaagtaaggtaaatagrtctacaaagcatttgatttccttattagataagtgaagttttcatagaggaagtgcaaattcagatcag

SEQ ID NO: 205573 - DNA, 558 bp, Homo sapiens
tattttaataattcacttgctgtgctcttaaaatctctatgagagaagcagatattttactcgtgtcttttggcaagagattcaaaagcaaaagtagcagggctgtaaaatttcataaaatttgtgggatttttaaaagctaaattattcaatattttgtattgttattgcactcatatattgcccggaatatatatacagcaacccagcaacagtgattgcaacaaaagtaaggtaaataggtctacaaagcatttgatttccttattagataagtgaagttttcatagaggaagtgcaaattcagatcaggttacataagcttaacaattattcaaaccttatataaaattaaatctaaccctcaccactacaaatctgtaaggaatcactgtcaggaatctacaggacttggctcatatttacattcgaygcacacttagaaatttcataaatgatgagatgcaggccaaggggattcctcaaagggctccacgcaaaaggaaaagaaagagagttaaacagagaattaccacttacgtatttgtgggtaatcag

SEQ ID NO: 205574 - DNA, 582 bp, Homo sapiens
aatatgagtaatattcacaatctctagttggaagaggtagtgttttctcagaaatgatgcattcctggagcaaggtcattttatgtttggtttgttaaatatctatttccattttgacaaaccactggaaaatcccagcttcacaaggactctccatgagaatgatcaaacaaaagaacacccataacacaaaatcaaaacaagggtggtccaggcgtcacattaaagactcattaccaagttttcttagaagagataaagaacacaaagttacttttatgtgatggaaaacagagagaaagagtaaatggaacaataaatgttgggcaacaacagtgaaaaccaagctgtggaaaaaaatgaatggaaatgttttgtttggtattgatttcctatcctgatatcagaaagtatgggaaagaacaaagcacatttttttgagacaaatagaacatraaacaaatgaatgttaaagactattttacagtgctaacaaaactatttgtgacttgttttttccatttaaaaatacgattttgtacaattacatttatataaattattgaaataaaattgtaaaga

SEQ ID NO: 205575 - DNA, 542 bp, Homo sapiens
agatctacaccacataaaaatgcacagaacacaygcacacgcatacacacatacaaaaatgaatgcatacaaaacggttgcaatctgagtaagctttctgaattgtacctatgtcagtttccaggttttgataatgctctatagctatgtgagatgtcaccactggaattagtgagtagtacctaagacatccctgtaccttttgcaacttcctgtgaatctataattatttcaaaagaaacttgaaagtcatagcagactttcacttcaaagaggaaaaaaactgaagattaatgaaattgttgaagaacatcaaatactcaatagtctgtatgagagctgtattctgtccactcacagcacagctgtcatttagccttttcctgacgtgccctggaggacttgagctcctcttgcattgccaaggccaatagtgtttatttgttactaactttgtactgaaccccccaaaaatgaaaagtgattgaataatcatttataatagcaactagtaattttacttataaagagacaatagtggt

SEQ ID NO: 205576 - DNA, 542 bp, Homo sapiens
agatctacaccacataaaaatgcacagaacacatgcacacgcatacacacatacaaaaatgaatgcatacaaaacggttgcaatctgagtaagctttctgaattgtacctatgtcagtttccaggttttgataatgctctatagctatgtgagatgtcaccactggaattagtgagtagtacctaagacatccctgtaccttttgcaacttcctgtgaatctataaytatttcaaaagaaacttgaaagtcatagcagactttcacttcaaagaggaaaaaaactgaagattaatgaaattgttgaagaacatcaaatactcaatagtctgtatgagagctgtattctgtccactcacagcacagctgtcatttagccttttcctgacgtgccctggaggacttgagctcctcttgcattgccaaggccaatagtgtttatttgttactaactttgtactgaaccccccaaaaatgaaaagtgattgaataatcatttataatagcaactagtaattttacttataaagagacaatagtggt

SEQ ID NO: 205577 - DNA, 542 bp, Homo sapiens
agatctacaccacataaaaatgcacagaacacatgcacacgcatacacacatacaaaaatgaatgcatacaaaacggttgcaatctgagtaagctttctgaattgtacctatgtcagtttccaggttttgataatgctctatagctatgtgagatgtcaccactggaattagtgagtagtacctaagacatccctgtaccttttgcaacttcctgtgaatctataattatttcaaaagaaacttraaagtcatagcagactttcacttcaaagaggaaaaaaactgaagattaatgaaattgttgaagaacatcaaatactcaatagtctgtatgagagctgtattctgtccactcacagcacagctgtcatttagccttttcctgacgtgccctggaggacttgagctcctcttgcattgccaaggccaatagtgtttatttgttactaactttgtactgaaccccccaaaaatgaaaagtgattgaataatcatttataatagcaactagtaattttacttataaagagacaatagtggt

SEQ ID NO: 205578 - DNA, 542 bp, Homo sapiens
agatctacaccacataaaaatgcacagaacacatgcacacgcatacacacatacaaaaatgaatgcatacaaaacggttgcaatctgagtaagctttctgaattgtacctatgtcagtttccaggttttgataatgctctatagctatgtgagatgtcaccactggaattagtgagtagtacctaagacatccctgtaccttttgcaacttcctgtgaatctataattatttcaaaagaaacttgaaagtcatagcagactttcacttcaaagaggaaaaaaactgaagattaatgaaattgttgaagaacatcaaatactcaatagtctgtatgagagctgtattctgtccactcacagcacagctgtcatttagccttttcctgacgtgccctggargacttgagctcctcttgcattgccaaggccaatagtgtttatttgttactaactttgtactgaaccccccaaaaatgaaaagtgattgaataatcatttataatagcaactagtaattttacttataaagagacaatagtggt

SEQ ID NO: 205579 - DNA, 583 bp, Homo sapiens
ttgtgaaccctttgagacctatggtgaagtaggaaatatcttcatataaaaactacacagaaacattctgagaaatttttttgtgatgggtgcattcatctcacagagttgaagctttcttttgctagagcagtttggaaacagtcttattgtagaatccccaaagggatatttctgagcccatwgaggcctttggtgatataggaaataccttcacatgaaagctagacagaagatttctgagaaacttcttttcaatgagtgctttcatctcaaagagttgagcatttcttttgactgaggagtttggaaacactctttttgcagaatctgcaaatggataattggagtgttttgaggcctatggtgaaaaaggaaatatcttcacataacaactaaacagaagttttctgagaaactactttgttacgcatgcattcatctcacagagttgaaactttcttttgattgagccgtttgtaaacagtctttttgtataatctgcaaatggatatttagagcgctttgaggcctatagtgaaaaaggaaatatcttcacaaaaaaagtagaaagaaacactct

SEQ ID NO: 205580 - DNA, 505 bp, Homo sapiens
gaattctgagaaacttctttgtgatgagtccattcatctcacagagttgaaacattctttgatggaccagtttggaaacagtctttttatagtatctgcagrgggatatttttgagcggcttaaagactatggtgaaaaaggaaatatcttcacataataactagacagaagcattctgagaaacttctttgtgatgtgtgcattcatcttacaatgttgaacgtttcttttgattgagcagtttggaaacagaacttttgtagaatctgcaaagggatatttgtgagcccattgattcctatggtgaaataggaattatcttgaaataaaaactaggcagaagatttctgagaaacttctttgtgatgtgtgctttcatctcacagagttgaaaatgtcttttgattgagcagtttggaaacagtctttttgtataatctgcaaatggatatttggagcactttgtggcctaaggtgaaaatggaaatatcttcacataaaaac

SEQ ID NO: 205581 - DNA, 505 bp, Homo sapiens
gaattctgagaaacttctttgtgatgagtccattcatctcacagagttgaaacattctttgatggaccagtttggaaacagtctttttatagtatctgcagggggatatttttgagcggcttaaagactatggtgraaaaggaaatatcttcacataataactagacagaagcattctgagaaacttctttgtgatgtgtgcattcatcttacaatgttgaacgtttcttttgattgagcagtttggaaacagaacttttgtagaatctgcaaagggatatttgtgagcccattgattcctatggtgaaataggaattatcttgaaataaaaactaggcagaagatttctgagaaacttctttgtgatgtgtgctttcatctcacagagttgaaaatgtcttttgattgagcagtttggaaacagtctttttgtataatctgcaaatggatatttggagcactttgtggcctaaggtgaaaatggaaatatcttcacataaaaac

SEQ ID NO: 205582 - DNA, 420 bp, Homo sapiens
aattatgttgtctgcaaacagaggtagttggacttctctttctatttaaatacgctttatttctttmtcttgtctgattgctccagaaaggacttctaatactaggttgaataggagtggtgagagagggcatacttgtcttgtgcgggtttcaaggaggatgcttccagattttgcccatttagtataatgttgtctgtgagtttgtcataggtggcctttattattttgaggtatgttcctttgatacctcatttactgagaagttttaaaatgaagctttgttgaattttactgaaagccttttctgcatctgttgagacaatcacgtggttcttatctttagttttatttatgttacaaatcacattttattaatttgcccatgatggaccaaccttccattccagggaagaagct

SEQ ID NO: 205583 - DNA, 589 bp, Homo sapiens
gcttctctaattctttcagttatgatgttaggttgttaatttgagatatttctaattttttgatatgagcattacttcttatgccctactctaacttttgtccctctagaaaactcagaactatgctttctaaaccaattcaaactttttcagtgaatcaacctggtctccctgagacaaagttagcaattttccattacacatggttctctttctctgtaagaatatctaatgcaacaatgcaagtgtttctttccctcctggtaatgcaggraactccttttggctgagaccaagacttaaaaccttgttctctcaacattaatgatcgatttagagagcctccatttttacagaaaagatatacaaacaccaatgaaaataaatatgaaattatatgacatacaattatattgttgaaagactgaataaataaatgaactaagctgtaagaaaaaaagatgatgatattaaatgatatagaagtaaaaacctgggctggtatagcataattaatgtatcagtaaagtatgtaccttttagaagtggcaggaagacagcatagagagtgagacctgaccaaaagctt

SEQ ID NO: 205584 - DNA, 589 bp, Homo sapiens
gcttctctaattctttcagttatgatgttaggttgttaatttgagatatttctaattttttgatatgagcattacttcttatgccctactctaacttttgtccctctagaaaactcagaactatgctttctaaaccaattcaaactttttcagtgaatcaacctggtctccctgagacaaagttagcaattttccattacacatggttctctttctctgtaagaatatctaatgcaacaatgcaagtgtttctttccctcctggtaatgcaggaaactccttttggctgagaccaagacttaaaaccttgttctctcaacattaatgatckatttagagagcctccatttttacagaaaagatatacaaacaccaatgaaaataaatatgaaattatatgacatacaattatattgttgaaagactgaataaataaatgaactaagctgtaagaaaaaaagatgatgatattaaatgatatagaagtaaaaacctgggctggtatagcataattaatgtatcagtaaagtatgtaccttttagaagtggcaggaagacagcatagagagtgagacctgaccaaaagctt

SEQ ID NO: 205585 - DNA, 538 bp, Homo sapiens
tttgtgtataaatttatgggttccaagtgcaattttgctgtaagcacggatggcatagtggtgaagtcagggcttttagggtatccatcactggaataatgcacattgtacccattaagtaatttctcactgttcacctcttccatcccctcaccctgctgagtctccattatcattccactctctacatcaatacctacacatcttttagcacccgcttatgagtgataaaatacgatgtttactctgtgtctggtttgtttcacttayaacaatggcctccagttccatccatgtgtctgcaaaaattatgattctattgttttttacgcctgaatagtatttcattgtgtatattttctacattttctttctccaattatttgttgatggacattaggttgattttatatctgtgctactgtgaatagtgttgcaacaaatataaaagtacagttatatttctgatacattgatttttttttcctttgcaaaaatactcagcggtgggattgctgaatcagacagagccaattga

SEQ ID NO: 205586 - DNA, 538 bp, Homo sapiens
tttgtgtataaatttatgggttccaagtgcaattttgctgtaagcacggatggcatagtggtgaagtcagggcttttagggtatccatcactggaataatgcacattgtacccattaagtaatttctcactgttcacctcttccatcccctcaccctgctgagtctccattatcattccactctctacatcaatacctacacatcttttagcacccgcttatgagtgataaaatacgatgtttactctgtgtctggtttgtttcacttataacaatggcctccagttccatccatgtgtctgcaaaaattatgattctattgttttttaygcctgaatagtatttcattgtgtatattttctacattttctttctccaattatttgttgatggacattaggttgattttatatctgtgctactgtgaatagtgttgcaacaaatataaaagtacagttatatttctgatacattgatttttttttcctttgcaaaaatactcagcggtgggattgctgaatcagacagagccaattga

SEQ ID NO: 205587 - DNA, 538 bp, Homo sapiens
tttgtgtataaatttatgggttccaagtgcaattttgctgtaagcacggatggcatagtggtgaagtcagggcttttagggtatccatcactggaataatgcacattgtacccattaagtaatttctcactgttcacctcttccatcccctcaccctgctgagtctccattatcattccactctctacatcaatacctacacatcttttagcacccgcttatgagtgataaaatacgatgtttactctgtgtctggtttgtttcacttataacaatggcctccagttccatccatgtgtctgcaaaaattatgattctattgttttttacgcctgaatagtatttcattgtgtatattttctacattttctttctccaatyatttgttgatggacattaggttgattttatatctgtgctactgtgaatagtgttgcaacaaatataaaagtacagttatatttctgatacattgatttttttttcctttgcaaaaatactcagcggtgggattgctgaatcagacagagccaattga

SEQ ID NO: 205588 - DNA, 590 bp, Homo sapiens
cacccataattgagtttgcttccaccaaccccaacagcaagaattccagtcctgctgctgcaaagtaagtgtcactctgattttattactgctgtgtaaygcagttttagactcttgggttttcacttaatgttctaaaaaagtattaaagagaaaatatttttatggtgatgagcccatccactgcagccatctcaacatcataccaattataagccctatcatttaaaaagaaaactgttagtttaacttatttatccaaatatcagtattagataaacatgtttgtcatcagactttggatttatgggttaaatagcatataaatatgattagagccttaaagtttacacttttctggtttgctcaaattttattcaaaataacatatgtctttcaaaaaaattgttagtatatatttttaaatgaacattaaaatatatattttccaaaaacaaaatacagctcccattggtaaatgatgatgttgagatacaacagacaacttctcttgggaaccatttaatcagtgctcacttttgcactctttccagaaatgtcaatggctttaaaatgcaaaagtatattat

SEQ ID NO: 205589 - DNA, 590 bp, Homo sapiens
cacccataattgagtttgcttccaccaaccccaacagcaagaattccagtcctgctgctgcaaagtaagtgtcactctgattttattactgctgtgtaacgcagttttagactcttgggttttcacttaatgttctaaaaaagtattaaagagaaaatatttttatggtgatgagcccatccactgcagccatctcaacatcataccarttataagccctatcatttaaaaagaaaactgttagtttaacttatttatccaaatatcagtattagataaacatgtttgtcatcagactttggatttatgggttaaatagcatataaatatgattagagccttaaagtttacacttttctggtttgctcaaattttattcaaaataacatatgtctttcaaaaaaattgttagtatatatttttaaatgaacattaaaatatatattttccaaaaacaaaatacagctcccattggtaaatgatgatgttgagatacaacagacaacttctcttgggaaccatttaatcagtgctcacttttgcactctttccagaaatgtcaatggctttaaaatgcaaaagtatattat

SEQ ID NO: 205590 - DNA, 521 bp, Homo sapiens
acctagccttggaggtcctagaatacaacttctgctccatcctgttggtaaagcaagtcattgtgatcagcacagattcaagaaatgggagattcgactctaactctccatgtaaagagcagcatgttcatgcagggaggaaagaaattgagggcatmatcttgaagactatcatattacaccattattccaactaatgaacattatgttttagatgggtagtactagctactcatctctcccccagaaacccaagctaagcatggacatattgaagagaatgtcaacaccattaaaaaaactctagaaaaatcacatgtgatgactgaggttaattcagtctgtcaattacatcaatataattccctcttgtaaccctaaatatggtgaagcagaattgaattctacaaaagtctttcatctgttttcctatggaataattaacaaacccaataaatgtataaatagtatgaagtccaatttattttagatttttacctcttaatttcaaagcttataga

SEQ ID NO: 205591 - DNA, 525 bp, Homo sapiens
tatgctcactaccttggtgatgggatcaataatatcccacattgcttagcatcacacaatatatccaggtaataaacctgcaaatatactccctgaatctaaaaawtttaaggcagagacagaataagagggcagaagagaagcctacattctcatccaccacacaaaaacaccaaattttcacaattcactacattcaagaagcactgtctaagggactaaaaattgggtgagctatcacagtgcctggtgttaacttcatatcattgaaacagacattggagaagataaacaaataaaagacggtctagaagcaaggatgccacctctttttcaaccaccagtagtggctacatcgtgcagagatagtatgtttgtgagagggagagcatagtttgtgaggctttgcaataaactcagtactaccctgtcacagtgaaaagcagaaccagactgtactcagctgacatctcccaatggggggagcacttgtattggccttacaaagaggaatacctcccatcc

SEQ ID NO: 205592 - DNA, 525 bp, Homo sapiens
tatgctcactaccttggtgatgggatcaataatatcccacattgcttagcatcacacaatatatccaggtaataaacctgcaaatatactccctgaatctaaaaattttaaggcagagacagaataagagggcagaagagaagcctacattctcatccaccacacaaaaacaccaaattttcacaattcactacatycaagaagcactgtctaagggactaaaaattgggtgagctatcacagtgcctggtgttaacttcatatcattgaaacagacattggagaagataaacaaataaaagacggtctagaagcaaggatgccacctctttttcaaccaccagtagtggctacatcgtgcagagatagtatgtttgtgagagggagagcatagtttgtgaggctttgcaataaactcagtactaccctgtcacagtgaaaagcagaaccagactgtactcagctgacatctcccaatggggggagcacttgtattggccttacaaagaggaatacctcccatcc

SEQ ID NO: 205593 - DNA, 525 bp, Homo sapiens
tatgctcactaccttggtgatgggatcaataatatcccacattgcttagcatcacacaatatatccaggtaataaacctgcaaatatactccctgaatctaaaaattttaaggcagagacagaataagagggcagaagagaagcctacattctcatccaccacacaaaaacaccaaattttcacaattcactacattcaagaagcactgtctaagggactaaaaattgggtgagctatcacagtgcctggtgttaacttcatatcattgaaacagacattggagaagataaacaaataaaagacggtctagaagcaaggatgccacctctttttcaaccaccagtagtggctacatcgtgcagagatagtatgtttgtgagagggagagcatagtttgtgaggctttgcaataaactcagtactaccctgtcacagtgaaaagcagaaccagactgtactcagctgacatctcccaatkgggggagcacttgtattggccttacaaagaggaatacctcccatcc

SEQ ID NO: 205594 - DNA, 633 bp, Homo sapiens
ggctacatcgtgcagagatagtatgtttgtgagagggagagcatagtttgtgaggctttgcaataaactcagtactaccctgtcacagtgaaaagcagaaccagactgtactcagctgacatctcccaatggggggagcacttgtattggccttacaaagaggaatacctcccatcccagtattgggagcttcagtttttacaagtcttgccgtgatgtgttgacgtgctattggactctaagagaacttamggggcagtctaggccacaaggacttcaattattaggcaagtcatattccgagctgggctcagagccagttgaatgtggagggtggggagaatgaggtctactgagacagcaaccagagaagctaagggagtgctcacaacaccactaacccactcccacctagcagcagccacacaacacagagaaacctgtgaatttgggagagggagcgcacagtgattagaggaaccagaataaaaaacagtgacaaccaggtaatacaccatgggcattgggctctgagaagcgctaacttcaggggtgacccagtacatttccagctgtggtagctgtggtgaaagacttctgtttgagaaaagcaggggggaaagtaaagggacc

SEQ ID NO: 205595 - DNA, 633 bp, Homo sapiens
ggctacatcgtgcagagatagtatgtttgtgagagggagagcatagtttgtgaggctttgcaataaactcagtactaccctgtcacagtgaaaagcagaaccagactgtactcagctgacatctcccaatggggggagcacttgtattggccttacaaagaggaatacctcccatcccagtattgggagcttcagtttttacaagtcttgccgtgatgtgttgacgtgctattggactctaagagaacttaaggggcagtctaggccacaaggacttcaattattaggcaagtcatattccgagctgggctcagagccagttgaatgtggagggtggggagaatgaggtctactgagacagcaaccagagaagctaagggagtgctcacaacaccactaacccactcccacctagcagcagccacacaacacagagaaacctgtgaatttgggagagggagmgcacagtgattagaggaaccagaataaaaaacagtgacaaccaggtaatacaccatgggcattgggctctgagaagcgctaacttcaggggtgacccagtacatttccagctgtggtagctgtggtgaaagacttctgtttgagaaaagcaggggggaaagtaaagggacc

SEQ ID NO: 205596 - DNA, 633 bp, Homo sapiens
ggctacatcgtgcagagatagtatgtttgtgagagggagagcatagtttgtgaggctttgcaataaactcagtactaccctgtcacagtgaaaagcagaaccagactgtactcagctgacatctcccaatggggggagcacttgtattggccttacaaagaggaatacctcccatcccagtattgggagcttcagtttttacaagtcttgccgtgatgtgttgacgtgctattggactctaagagaacttaaggggcagtctaggccacaaggacttcaattattaggcaagtcatattccgagctgggctcagagccagttgaatgtggagggtggggagaatgaggtctactgagacagcaaccagagaagctaagggagtgctcacaacaccactaacccactcccacctagcagcagccacacaacacagagaaacctgtgaatttgggagagggagcgcacagtgattagaggaaccagaataaaaawcagtgacaaccaggtaatacaccatgggcattgggctctgagaagcgctaacttcaggggtgacccagtacatttccagctgtggtagctgtggtgaaagacttctgtttgagaaaagcaggggggaaagtaaagggacc

SEQ ID NO: 205597 - DNA, 591 bp, Homo sapiens
gtccctgagtccaggcctagggtcttcttggtcagcatttctgcacttgccctgggccaaaggtcgagtcccaggcattgcagaatttatctcaagataattaaagagtccttgggctttaagtgagaaagtgatgatgatttggtggaaaccccccatgggccagtagtgttggcagtcatagaagaggctcttctgcctgaagacaggggaaggaagagtagaaaatactttgtcttattccctaagtgcaaggttagctacaataaaatagaagagcakgtaaattttgaagatcctatgctttaatctgtggctcccaggtagcatctgtggacccactcatggctaggggaacttgccaccctataggcagagacacaatcctggctgactttgctatctattaatcacagagtcctagggctttgaataaacttatatggtagccaagtagtggttgcagtgggccttgcgtgagaccaagttctgtgcctacttcaggtgtgaaccagcacagtctcagtggtggtggccacaggagtgcttatgttacccaaaccccagctccacatgtctcagcacagaaag

SEQ ID NO: 205598 - DNA, 418 bp, Homo sapiens
ctccaccacccttctctgcccccgactttctttccttaattgaaacccctaaatgtcctctttgcacccaaagcttacctgctcttccttccctatattcttggccacacacaaaaatctgatgctctggcaaatgcaaaaatggggagaaggcaggggaatcatttctcttcccttacgtaagcactgagggtaatgtcattccattgtgtgaggaataaaaaaatgaggcatagagagctgccatgatttgcctrgaccaatgaagctgtcatggcagaagtggaacaaaggtttaggtgtcccgaatgtcagtccagctcctatgccttcagaacgtgctgtggagggagacactgggggacccactcatgctgagcactcagggttacccaggttctgacagtggggatgtgac

SEQ ID NO: 205599 - DNA, 418 bp, Homo sapiens
ctccaccacccttctctgcccccgactttctttccttaattgaaacccctaaatgtcctctttgcacccaaagcttacctgctcttccttccctatattcttggccacacacaaaaatctgatgctctggcaaatgcaaaaatggggagaaggcaggggaatcatttctcttcccttacgtaagcactgagggtaatgtcattccattgtgtgaggaataaaaaaatgaggcatagagagctgccatgatttgcctggaccaatgaagctgtcatggcagaagtrgaacaaaggtttaggtgtcccgaatgtcagtccagctcctatgccttcagaacgtgctgtggagggagacactgggggacccactcatgctgagcactcagggttacccaggttctgacagtggggatgtgac

SEQ ID NO: 205600 - DNA, 418 bp, Homo sapiens
ctccaccacccttctctgcccccgactttctttccttaattgaaacccctaaatgtcctctttgcacccaaagcttacctgctcttccttccctatattcttggccacacacaaaaatctgatgctctggcaaatgcaaaaatggggagaaggcaggggaatcatttctcttcccttacgtaagcactgagggtaatgtcattccattgtgtgaggaataaaaaaatgaggcatagagagctgccatgatttgcctggaccaatgaagctgtcatggcagaagtggaacaaaggtttaggtgtccygaatgtcagtccagctcctatgccttcagaacgtgctgtggagggagacactgggggacccactcatgctgagcactcagggttacccaggttctgacagtggggatgtgac

SEQ ID NO: 205601 - DNA, 520 bp, Homo sapiens
ttcacatttccctttgttctttgcactcctgccattgccatgagaagaaggyaccctggcaggccccgaccccaggaggatcagagacacttggagcagatgcagctcaaccaccacatttcgagctgaaacctcccaagcaacccatgctcatgagtgagaaatggtggcctatggtcgtaggcctctgaggtgtgggattacttgttacaaagctagagttaattaatagagatttctacctcacatccctacaaatcaaataacaaaggaaataaaatatgaaaagcagatttccaatttttagaagaaaacagaggacatattttatgacactaagcagagagaaaaattttatatgacacaaaacacagacaccgtaaaataaattactgataaattcattcagttgtattaaatgtagaagctttgatctgacaaaagaggcgatgaataaagttaaaagacaaagacagtgcatgatatgatttggctgtgtgtccccacctaaatctcatct

SEQ ID NO: 205602 - DNA, 520 bp, Homo sapiens
ttcacatttccctttgttctttgcactcctgccattgccatgagaagaaggcaccctggcaggccccgaccccaggaggatcagagacacttggagcagatgcagctcaaccaccacatttcgagctgaaacctcccaagcaacccatgctcatgagtgagaaatggtggcctatggtcgtaggcctctgaggtgtgggattacttgttacaaagctagagttaattaatagagatttctacctcacatccctacaaatcaaataacaaaggaaataaaatatgaaaagyagatttccaatttttagaagaaaacagaggacatattttatgacactaagcagagagaaaaattttatatgacacaaaacacagacaccgtaaaataaattactgataaattcattcagttgtattaaatgtagaagctttgatctgacaaaagaggcgatgaataaagttaaaagacaaagacagtgcatgatatgatttggctgtgtgtccccacctaaatctcatct

SEQ ID NO: 205603 - DNA, 449 bp, Homo sapiens
gaattctggattcatctggaagatattgttraagggaaaagcaactttcaggagagtatgtatggactgctatttgtataaaattgcaaaaacagaccaaaaaaatactatccattcttcatggacatgcacactaggtattaaacatggatgggaagacacacattgacttcagaatagtgggagggtggtggtaactggactggaaaaggggcatataacttgagcttcagcttgaatattatggctgaatccgtaatgttttcttcccttaaactctggagcaaatgcatccaaatgttaccacatttgaattttaactgggaggtacaagaaagtttaataccattatcctctacgcagtcctgtgtgtttgtaatattgagccatattttttaaacacttgactcagcatgaaaggaagcttgcctacatggtaacaatggtta

SEQ ID NO: 205604 - DNA, 178 bp, Homo sapiens
cagaattctggattcatctggaagatattgttaaagggaaaagcaactttcaggagagtatgtatggacwgctatttgtataaaattgcaaaaacagaccaaaaaaatactatccattcttcatggacatgcacactaggtattaaacatggatgggaagacacacattgacttcaga

SEQ ID NO: 205605 - DNA, 178 bp, Homo sapiens
cagaattctggattcatctggaagatattgttaaagggaaaagcaactttcaggagagtatgtatggactgytatttgtataaaattgcaaaaacagaccaaaaaaatactatccattcttcatggacatgcacactaggtattaaacatggatgggaagacacacattgacttcaga

SEQ ID NO: 205606 - DNA, 449 bp, Homo sapiens
aagatattgttaaagggaaaagcaactttcaggagagtatgtatggactgctatttgtataaaattgcaaaaacagaccaaaaaaayactatccattcttcatggacatgcacactaggtattaaacatggatgggaagacacacattgacttcagaatagtgggagggtggtggtaactggactggaaaaggggcatataacttgagcttcagcttgaatattatggctgaatccgtaatgttttcttcccttaaactctggagcaaatgcatccaaatgttaccacatttgaattttaactgggaggtacaagaaagtttaataccattatcctctacgcagtcctgtgtgtttgtaatattgagccatattttttaaacacttgactcagcatgaaaggaagcttgcctacatggtaacaatggttatctttaggtagcagaattc

SEQ ID NO: 205607 - DNA, 422 bp, Homo sapiens
tttcaggagagtatgtatggactgctatttgtataaaattgcaaaaacagaccaaaaaaatactatccattcttcatggacatgcacactaggtattaaacatggatgggaagacacacattgacttcagaatagtgggagggtggtggtaastggactggaaaaggggcatataacttgagcttcagcttgaatattatggctgaatccgtaatgttttcttcccttaaactctggagcaaatgcatccaaatgttaccacatttgaattttaactgggaggtacaagaaagtttaataccattatcctctacgcagtcctgtgtgtttgtaatattgagccatattttttaaacacttgactcagcatgaaaggaagcttgcctacatggtaacaatggttatctttaggtagcagaatt

SEQ ID NO: 205608 - DNA, 449 bp, Homo sapiens
aagatattgttaaagggaaaagcaactttcaggagagtatgtatggactgctatttgtataaaattgcaaaaacagaccaaaaaaatactatccattcttcatggacatgcacactaggtattaaacatggatgggaagacacacattgacttcagaatagtgggagggtggtggtaactggactggaaaaggggcatataacttgagcttcagcttgaayattatggctgaatccgtaatgttttcttcccttaaactctggagcaaatgcatccaaatgttaccacatttgaattttaactgggaggtacaagaaagtttaataccattatcctctacgcagtcctgtgtgtttgtaatattgagccatattttttaaacacttgactcagcatgaaaggaagcttgcctacatggtaacaatggttatctttaggtagcagaattc

SEQ ID NO: 205609 - DNA, 422 bp, Homo sapiens
tttcaggagagtatgtatggactgctatttgtataaaattgcaaaaacagaccaaaaaaatactatccattcttcatggacatgcacactaggtattaaacatggatgggaagacacacattgacttcagaatagtgggagggtggtggtaactggactggaaaaggggcatataacttgagcttcagcttgaatattatggctgaatccgtaatgttttcttcccttaaactctggagcaaatgcatccaaatgttaycacatttgaattttaactgggaggtacaagaaagtttaataccattatcctctacgcagtcctgtgtgtttgtaatattgagccatattttttaaacacttgactcagcatgaaaggaagcttgcctacatggtaacaatggttatctttaggtagcagaatt

SEQ ID NO: 205610 - DNA, 542 bp, Homo sapiens
cagcatgaaaggaagcttgcctacatggtaacaatggttatctttaggtagcagaattcaagactgcttcttttttcttttcttcctacttgtatgttatctctatttccctgtgtgaggatttatgactgttgtgatgaaaaggctagtattctaactccctgcatcataagcacacaccgtgccctggctggcaggatggggaggagggagcrtgtctgttcacctggccagccctaggcaactctgcagagaaagacacaggcacttcccctctgcagccaaagagttaagaaggctcgatgtgaaatgaatcattccaggggagctaaatcccgaccttatctaattctgtatcctgaggctgattaatttaaactcaaaaataaaataaacatcatctttaaatagggattaaatactcagcggggtccttagttgaacaaactgacatacactttatgttatggattcaaggggcccagggtggggcgagggctatctgtggggatgctagctgagctaatcagagaaaatcgcca

SEQ ID NO: 205611 - DNA, 542 bp, Homo sapiens
cagcatgaaaggaagcttgcctacatggtaacaatggttatctttaggtagcagaattcaagactgcttcttttttcttttcttcctacttgtatgttatctctatttccctgtgtgaggatttatgactgttgtgatgaaaaggctagtattctaactccctgcatcataagcacacaccgtgccctggctggcaggatggggaggagggagcgtgtctgttcacctggccagccctaggcaactctgcagagaaagacacaggcacttcccctctgcagccaaagagttaagaaggctcgatgtgaaatgaatcattccaggggagctaaatcccgaccttatctaattctgtatcctgaggctgattaatttaaactcaaaaataaaataaacatcatctttaaatagggattaaatactcagcggggtccttagttgaacaaactgacatacrctttatgttatggattcaaggggcccagggtggggcgagggctatctgtggggatgctagctgagctaatcagagaaaatcgcca

SEQ ID NO: 205612 - DNA, 528 bp, Homo sapiens
agcttgttctctccttccaccatgtgaggacacagctaggaggtgtcctctgtaagatacaggtcctcaacagacacctaatctgccactactttgaccttccacttgccagcatccagacctatgagmcaaaatttctgctgcttataagccccctaggctaaggtattttgttacggcagcccaaatggaataagacagcctctgaccatcttgagcaactcacttatctgttgaactctccacagatttaactgtgatgaaatcccttcaacagatgtatattgaacacctactatgtataaggacacactgtgttattagatagggtataaagaaagtcacagttccccagaggtaggcactgccatagctgaagagccaacccaagttgctgttgccagtgggggaagggctgggtgtcagagaagaagagaacttgccaaagtccatgtctgcagcaatattggaacgtctaatggatggttcccaaagtggtgactcctcatcttcttacaaaaactcgta

SEQ ID NO: 205613 - DNA, 556 bp, Homo sapiens
agactttattttctattactgtaaaaagtggcacaggaattttgataggaagttgaattaatctacagattgctttggataatatggcacttagacaatattcttctaatccataaacatgtmatatatttacatttatttgtatcttctttaatttttttatcaatatattttattttttattgtaaagatctttcaccacattggttaaatttattgctaagaaatctattatttggttgctattgtaaatgagatttttttcttttttactggtttgttgctagcatatataaacaaaactgatatttgtatgttaattgtatattctgcttcttttctgagtgcatttattagatgcactatttatatatagatgcattaaacgcattatttaaatgtactatttatgttttttatatataacattatgtcatctacagacagtgacgttatttcttcttttcaatttggatcttttagtttttcttgcttaattatttgatataggacttaattattctagtaggacttccagttctatgttaaaatagaa

SEQ ID NO: 205614 - DNA, 193 bp, Homo sapiens
tattctgcttcttttctgagtgcatttattagatgcaytatttatatatagatgcattaaacgcattatttaaatgtactatttatgttttttatatataacattatgtcatctacagacagtgacgttatttcttcttttcaatttggatcttttagtttttcttgcttaattatttgatataggacttaat

SEQ ID NO: 205615 - DNA, 380 bp, Homo sapiens
gcattggatattgttgggttcctataaatattattgagctatgttctaggatgcagttaaattatctggaaagattttggttctttgatggttwtctttgaggtcttgttaagtaggaccttagcagcctcagcctagatctaatcttccacactactgaggcaactcttttctgagtgttccatcaaatggtccgggaagtataagatttgtccactgttgctggtgggaagcaacaaatatgctggttctgtgggaggttcaagcattgttctttctgttaccttcaggtattttttcccccagacttgtagtttacacacatacacgtgctgatcagtatttagctgaagactctggaggttttttgttttgtgtct

SEQ ID NO: 205616 - DNA, 380 bp, Homo sapiens
gcattggatattgttgggttcctataaatattattgagctatgttctaggatgcagttaaattatctggaaagattttggttctttgatggttttctttraggtcttgttaagtaggaccttagcagcctcagcctagatctaatcttccacactactgaggcaactcttttctgagtgttccatcaaatggtccgggaagtataagatttgtccactgttgctggtgggaagcaacaaatatgctggttctgtgggaggttcaagcattgttctttctgttaccttcaggtattttttcccccagacttgtagtttacacacatacacgtgctgatcagtatttagctgaagactctggaggttttttgttttgtgtct

SEQ ID NO: 205617 - DNA, 380 bp, Homo sapiens
gcattggatattgttgggttcctataaatattattgagctatgttctaggatgcagttaaattatctggaaagattttggttctttgatggttttctttgaggtcttgttaagtaggaccttagcagcctcagcctagatctaatcttccacactactgaggcaactcttttctgartgttccatcaaatggtccgggaagtataagatttgtccactgttgctggtgggaagcaacaaatatgctggttctgtgggaggttcaagcattgttctttctgttaccttcaggtattttttcccccagacttgtagtttacacacatacacgtgctgatcagtatttagctgaagactctggaggttttttgttttgtgtct

SEQ ID NO: 205618 - DNA, 579 bp, Homo sapiens
accaacaccaggctcagcctgggttctccctccttgagctgtggcctagaaatggtttgccttctggtcaccacacstgggcagtccagagtcacaagaaactctaggccatgtggcagaatgcccactgtccccacttcaccacactgtactctctccatccagtgctagctgtagccacgctgcctcacagtccagaatgctagccagagaccaagctttctgcagcaccttggctggggctcacagataagaatggccaagcagtgctcccagaagactgcagatgccatcaatcagttttacatcagcgaggcactgagaatctctggacaccagaagtgtcctatgttgccagagctgaactctcaaatgaagactccagaaggccctgaaatgtgggcaagctcccatcattgcctgtctgtggccacaaggacacagattctttccatggctggtgagatatccagcacactggggactctgtaaagccccttttcaactttaggccttagctgagctctccatttacctcagaccaggcagtgcacattatgggggacaccactgggtgct

SEQ ID NO: 205619 - DNA, 579 bp, Homo sapiens
accaacaccaggctcagcctgggttctccctccttgagctgtggcctagaaatggtttgccttctggtcaccacacctgggcagtccagagtcacaagaaactctaggccatgtggcagaatgcccactgtccccacttcaccacactgtactctctccatccagtgctagctgyagccacgctgcctcacagtccagaatgctagccagagaccaagctttctgcagcaccttggctggggctcacagataagaatggccaagcagtgctcccagaagactgcagatgccatcaatcagttttacatcagcgaggcactgagaatctctggacaccagaagtgtcctatgttgccagagctgaactctcaaatgaagactccagaaggccctgaaatgtgggcaagctcccatcattgcctgtctgtggccacaaggacacagattctttccatggctggtgagatatccagcacactggggactctgtaaagccccttttcaactttaggccttagctgagctctccatttacctcagaccaggcagtgcacattatgggggacaccactgggtgct

SEQ ID NO: 205620 - DNA, 590 bp, Homo sapiens
ctgtctttttgtttgtttatttagcctggtaggacaatgtcagaaatttccttggtcatagggaatataaaacatagtgtgaacaaaagcagcaataaagctacaaactattttttggtgtatttgcttaagtataagatagctgattggggctttatcatgtaacgttagtttgcttagttttcattatgtttgttaaacttgaattgtgaataaatatatggctgattcacattgtaattaaactgcacattgacataaactgtacattaaaagttgctgcacacagtcatccaaaataatacttaggtaaaaccaaaaatactataaaccaatctcaaggaacctaccctaaaataaaaatacagttaaaatggaattgcaaaactagaatgggagaaatatttaccsataaaatcttgtttggaacattgatataacactagaaaagaatttttctaaataaccacaatgttcaacagtgactgtgcatctgtgaagaccaggcattttgaatcattgccctgtggtgtgtggcagtacaattttacagaaatgaactacaataattaataaaattctctaatggg

SEQ ID NO: 205621 - DNA, 351 bp, Homo sapiens
taccagttaatagagatactgtatgcatttatatacactctgattttataggaatggaggcatattacacacatgcctctgcacccaggttttttactttgtaacatatcttggacatcagttttgagcatctttttaaaatttattttttaaaaatagctgcatagtattctatcatatgaataaccataatttcaataaacagtaaggtgataatcattaatgtgatygacaaacattaaggtgatttctagacttttgttaattaaaaaggtggtataatactttctcccattcatacataattccaggcttcatgagtatgtctgtagggtaaatttctggaaatga

SEQ ID NO: 205622 - DNA, 351 bp, Homo sapiens
taccagttaatagagatactgtatgcatttatatacactctgattttataggaatggaggcatattacacacatgcctctgcacccaggttttttactttgtaacatatcttggacatcagttttgagcatctttttaaaatttattttttaaaaatagctgcatagtattctatcatatgaataaccataatttcaataaacagtaaggtgataatcattaatgtgatcgacaaacattaaggtgatttctagacttttgttaattaaaaaggtggtataatactttctcccattcatacataattccwggcttcatgagtatgtctgtagggtaaatttctggaaatga

SEQ ID NO: 205623 - DNA, 351 bp, Homo sapiens
taccagttaatagagatactgtatgcatttatatacactctgattttataggaatggaggcatattacacacatgcctctgcacccaggttttttactttgtaacatatcttggacatcagttttgagcatctttttaaaatttattttttaaaaatagctgcatagtattctatcatatgaataaccataatttcaataaacagtaaggtgataatcattaatgtgatcgacaaacattaaggtgatttctagacttttgttaattaaaaaggtggtataatactttctcccattcatacataattccaggcwtcatgagtatgtctgtagggtaaatttctggaaatga

SEQ ID NO: 205624 - DNA, 556 bp, Homo sapiens
aaattttataaatggcagacattacatttccagatagctttgtgataaccaaaaaagaattgatttattagcaatttttatcacattgaaacaaaatatcatttttgataaatatcattattgttatgtatttaaaacatctcatgtaataagaaatcatactttagatggggccaagctggccgattataagcagctgtggactgtggctctcatggagagcaatgaaaactgcaagtgaattctgcacattcaattgaggtattcagkttcttgcattgggactgactaggcagagagctcctcccacagagagtcaggaaaagcaagtagggcaatggcccacctaggtgtggcacagagctagccgagcccccactcgcaagcaaggtaggccatgagtgattgtccgactctgcccgggaaaccatgcttctcctgtggatctttgcaacctgcagatcaggaagtcccctcatgagctcagccaccacggccttgggtctgaagcacagagctgtgtggagtgtcagcagagtgctcactggcttactga

SEQ ID NO: 205625 - DNA, 556 bp, Homo sapiens
aaattttataaatggcagacattacatttccagatagctttgtgataaccaaaaaagaattgatttattagcaatttttatcacattgaaacaaaatatcatttttgataaatatcattattgttatgtatttaaaacatctcatgtaataagaaatcatactttagatggggccaagctggccgattataagcagctgtggactgtggctctcatggagagcaatgaaaactgcaagtgaattctgcacattcaattgaggtattcaggttcttgcattgggactgactaggcagagagctcctcccacagagagtcaggaaaagcaagtagggcaatggcccacctaggtgtggcacagagctagccgagcccccactcgcaagcaaggtaggccatgagtgattgtccgactctgcccgggaaaccatgcttctcctgtggatctttgcaacctgcagatcaggaagtcccctcatgagctcagccaccacsgccttgggtctgaagcacagagctgtgtggagtgtcagcagagtgctcactggcttactga

SEQ ID NO: 205626 - DNA, 556 bp, Homo sapiens
aaattttataaatggcagacattacatttccagatagctttgtgataaccaaaaaagaattgatttattagcaatttttatcacattgaaacaaaatatcatttttgataaatatcattattgttatgtatttaaaacatctcatgtaataagaaatcatactttagatggggccaagctggccgattataagcagctgtggactgtggctctcatggagagcaatgaaaactgcaagtgaattctgcacattcaattgaggtattcaggttcttgcattgggactgactaggcagagagctcctcccacagagagtcaggaaaagcaagtagggcaatggcccacctaggtgtggcacagagctagccgagcccccactcgcaagcaaggtaggccatgagtgattgtccgactctgcccgggaaaccatgcttctcctgtggatctttgcaacctgcagatcaggaagtcccctcatgagctcagccaccacgrccttgggtctgaagcacagagctgtgtggagtgtcagcagagtgctcactggcttactga

SEQ ID NO: 205627 - DNA, 386 bp, Homo sapiens
caggaagtcccctcatgagctcagccaccacggccttgggtctgaagcacagagctgtgtggagtgtcagcagagtgctcrctggcttactgaggaatgcatggaaacccaggagttttgcatactctgccccgagaattccagcaaattgggagatatatccgtgcattcccctaggaagggggctgaatgcagggagccaagtgacatcattctgaggccccactcccacagcacctcacaagacccattggcttggaattccagctggccagcagcagcaggctggagacagccagaggtggactgagttcccagggggaggggtagcagctctatgtgtggtttgagttggctgctctagactgctggcaccagggaccagg

SEQ ID NO: 205628 - DNA, 386 bp, Homo sapiens
caggaagtcccctcatgagctcagccaccacggccttgggtctgaagcacagagctgtgtggagtgtcagcagagtgctcactggcttactgaggaatgcatggaaacccaggagttttgcatactctgccccgagaattccagcaaattgggagatatatccrtgcattcccctaggaagggggctgaatgcagggagccaagtgacatcattctgaggccccactcccacagcacctcacaagacccattggcttggaattccagctggccagcagcagcaggctggagacagccagaggtggactgagttcccagggggaggggtagcagctctatgtgtggtttgagttggctgctctagactgctggcaccagggaccagg

SEQ ID NO: 205629 - DNA, 386 bp, Homo sapiens
caggaagtcccctcatgagctcagccaccacggccttgggtctgaagcacagagctgtgtggagtgtcagcagagtgctcactggcttactgaggaatgcatggaaacccaggagttttgcatactctgccccgagaattccagcaaattgggagatatatccgtgcattcccctaggaagggggctgaatgcagggagccaagtgacatcattctgaggccccactcccacagcacctcacaagayccattggcttggaattccagctggccagcagcagcaggctggagacagccagaggtggactgagttcccagggggaggggtagcagctctatgtgtggtttgagttggctgctctagactgctggcaccagggaccagg

SEQ ID NO: 205630 - DNA, 386 bp, Homo sapiens
caggaagtcccctcatgagctcagccaccacggccttgggtctgaagcacagagctgtgtggagtgtcagcagagtgctcactggcttactgaggaatgcatggaaacccaggagttttgcatactctgccccgagaattccagcaaattgggagatatatccgtgcattcccctaggaagggggctgaatgcagggagccaagtgacatcattctgaggccccactcccacagcacctcacaagacscattggcttggaattccagctggccagcagcagcaggctggagacagccagaggtggactgagttcccagggggaggggtagcagctctatgtgtggtttgagttggctgctctagactgctggcaccagggaccagg

SEQ ID NO: 205631 - DNA, 475 bp, Homo sapiens
gggctctgctgcagccgtgggagtccccaagttggataaacaatttttctttatgtgaccaaaaagcaaggcataggccttgggtaatcttgtcccaaaactggggygcattccaaggccagtagcctaattttctaagcagatagaccaggtggcctcagggtggccttgatgtcttagagctattgctgctaccacttttctagcaggcaaagctaataaactaacattagaacggcacctacaggttttcgaccccacaccaagggaaggtggtcctagaagctaaagtgaagcagtggataatacgagaacatttatgaaagtatcagaccttattgctagaccctccagacataacccttaaagcctgccaaaccataaacccagctacttatctgccagagtccacaggtgcttctagcctttctggcatacaggttgtattagtctgttctcatgctgctaataaaga

SEQ ID NO: 205632 - DNA, 475 bp, Homo sapiens
gggctctgctgcagccgtgggagtccccaagttggataaacaatttttctttatgtgaccaaaaagcaaggcataggccttgggtaatcttgtcccaaaactggggtgcattccaaggccagtagcctaattttctaagcagatagaccaggtggcctcagggtggccttgatgtcttagagctattgctgctaccacttttctagcaggcaaagctaataaactaacattagaacrgcacctacaggttttcgaccccacaccaagggaaggtggtcctagaagctaaagtgaagcagtggataatacgagaacatttatgaaagtatcagaccttattgctagaccctccagacataacccttaaagcctgccaaaccataaacccagctacttatctgccagagtccacaggtgcttctagcctttctggcatacaggttgtattagtctgttctcatgctgctaataaaga

SEQ ID NO: 205633 - DNA, 544 bp, Homo sapiens
aaagactcatcaattacaacaatatgtcatcaatctaggacaggtgcaaaggcactctgtgaatatggaaacaagagtcttcycctcccacatgggaggaaaattcagtttcagctcagctaaggatttagtcttactaaagttgtgggaggaagttctccagctgaccagctttccccaacatggaaaggaccacagcaaggacacctgagctccccaacagacgttcagcgccaagggagtcacaggtgggtacacctgtgtggaagtaaagctgttgcttattctgggagcagaatccgaggctgaggcaggtgggcgccgggctatttcagcgttggtggagggcgggctgggtagctgtgtgtctgctgctccttctcgcgtttctcctgcctctgtaatcccaccttagccatgagggaaatagtgctcacgcaggccaggcagtacgggaaccagatcggcgccaaggttgtatttgactccataaaaattaaaattttgtatgagagaaaaatgcctcaaagtcaaaagtcaacag

SEQ ID NO: 205634 - DNA, 544 bp, Homo sapiens
aaagactcatcaattacaacaatatgtcatcaatctaggacaggtgcaaaggcactctgtgaatatggaaacaagagtcttctcctcccacatgggaggaaaattcagtttcagctcagctarggatttagtcttactaaagttgtgggaggaagttctccagctgaccagctttccccaacatggaaaggaccacagcaaggacacctgagctccccaacagacgttcagcgccaagggagtcacaggtgggtacacctgtgtggaagtaaagctgttgcttattctgggagcagaatccgaggctgaggcaggtgggcgccgggctatttcagcgttggtggagggcgggctgggtagctgtgtgtctgctgctccttctcgcgtttctcctgcctctgtaatcccaccttagccatgagggaaatagtgctcacgcaggccaggcagtacgggaaccagatcggcgccaaggttgtatttgactccataaaaattaaaattttgtatgagagaaaaatgcctcaaagtcaaaagtcaacag

SEQ ID NO: 205635 - DNA, 544 bp, Homo sapiens
aaagactcatcaattacaacaatatgtcatcaatctaggacaggtgcaaaggcactctgtgaatatggaaacaagagtcttctcctcccacatgggaggaaaattcagtttcagctcagctaaggatttagtcttactaaagttgtgggaggaagttctccagctgaccagctttccccaacatggaaaggaccacagcaaggacacytgagctccccaacagacgttcagcgccaagggagtcacaggtgggtacacctgtgtggaagtaaagctgttgcttattctgggagcagaatccgaggctgaggcaggtgggcgccgggctatttcagcgttggtggagggcgggctgggtagctgtgtgtctgctgctccttctcgcgtttctcctgcctctgtaatcccaccttagccatgagggaaatagtgctcacgcaggccaggcagtacgggaaccagatcggcgccaaggttgtatttgactccataaaaattaaaattttgtatgagagaaaaatgcctcaaagtcaaaagtcaacag

SEQ ID NO: 205636 - DNA, 541 bp, Homo sapiens
gactcatcaattacaacaatatgtcatcaatctaggacaggtgcaaaggcactctgtgaatatggaaacaagagtcttctcctcccacatgggaggaaaattcagtttcagctcagctaaggatttagtcttactaaagttgtgggaggaagttctccagctgaccagctttccccaacatggaaaggaccacagcaaggacacctgagctccccaacagacgttcagcgccaaggkagtcacaggtgggtacacctgtgtggaagtaaagctgttgcttattctgggagcagaatccgaggctgaggcaggtgggcgccgggctatttcagcgttggtggagggcgggctgggtagctgtgtgtctgctgctccttctcgcgtttctcctgcctctgtaatcccaccttagccatgagggaaatagtgctcacgcaggccaggcagtacgggaaccagatcggcgccaaggttgtatttgactccataaaaattaaaattttgtatgagagaaaaatgcctcaaagtcaaaagtcaacag

SEQ ID NO: 205637 - DNA, 550 bp, Homo sapiens
caattacaacaatatgtcatcaatctaggacaggtgcaaaggcactctgtgaatatggaaacaagagtcttctcctcccacatgggaggaaaattcagtttcagctcagctaaggatttagtcttactaaagttgtgggaggaagttctccagctgaccagctttccccaacatggaaaggaccacagcaaggacacctgagctccccaacagacgttcagcgccaagggagtcacaggtgggtacacctgtgtggaagtaaagctgttgcttattctgggagcagaatccgaggctgaggcaggtgggcgccgggctatttcagcgttggtggagggcgggctgggtagctgtgtgtctgctgctccttctcgcgtttctcctgcctctgtaatcycaccttagccatgagggaaatagtgctcacgcaggccaggcagtacgggaaccagatcggcgccaaggttgtatttgactccataaaaattaaaattttgtatgagagaaaaatgcctcaaagtcaaaagtcaacagactggggaaatagatc

SEQ ID NO: 205638 - DNA, 536 bp, Homo sapiens
caattacaacaatatgtcatcaatctaggacaggtgcaaaggcactctgtgaatatggaaacaagagtcttctcctcccacatgggaggaaaattcagtttcagctcagctaaggatttagtcttactaaagttgtgggaggaagttctccagctgaccagctttccccaacatggaaaggaccacagcaaggacacctgagctccccaacagacgttcagcgccaagggagtcacaggtgggtacacctgtgtggaagtaaagctgttgcttattctgggagcagaatccgaggctgaggcaggtgggcgccgggctatttcagcgttggtggagggcgggctgggtagctgtgtgtctgctgctccttctcgcgtttctcctgcctctgtaatcccaccttagccatgagggaaatagtgctcacgcaggccaggcagtamgggaaccagatcggcgccaaggttgtatttgactccataaaaattaaaattttgtatgagagaaaaatgcctcaaagtcaaaagtcaacagac

SEQ ID NO: 205639 - DNA, 478 bp, Homo sapiens
aaccctgtgctcacagaaacatgtgctgtgtcgactcaaggtttaatggatttagggatatgcaggatgtgctttgttaaacaaatgcttgaaggcatcatgcttgttaaaagtcatcaccactccctactctcaaggacccagcgacacaaaacactgctgaaggccacagggacctctgcytaggaaagtcaagtattgtccaaggtatctccccatgtgatagtctgaaatatggcctcatgggaggggaaggacctgaccatccaccagtccgacacctgtaaacggtctgtgctgaggaggattagtaaaagaggaaggcctctttgcagttgagataagacaaagccatctgtctcctgctcgtccctgggcaatggaatgtctccttgtaaaacccgattgtatattccacctactgagataggagaaaactgccacagggctggaggtgagacatgctggaggcaatact

SEQ ID NO: 205640 - DNA, 478 bp, Homo sapiens
aaccctgtgctcacagaaacatgtgctgtgtcgactcaaggtttaatggatttagggatatgcaggatgtgctttgttaaacaaatgcttgaaggcatcatgcttgttaaaagtcatcaccactccctactctcaaggacccagcgacacaaaacactgctgaaggccacagggacctctgcttaggaaagtcaagtattgtccaaggtatctccccatgtgatagtctgaaatatggcctcatgggaggggamggacctgaccatccaccagtccgacacctgtaaacggtctgtgctgaggaggattagtaaaagaggaaggcctctttgcagttgagataagacaaagccatctgtctcctgctcgtccctgggcaatggaatgtctccttgtaaaacccgattgtatattccacctactgagataggagaaaactgccacagggctggaggtgagacatgctggaggcaatact

SEQ ID NO: 205641 - DNA, 478 bp, Homo sapiens
aaccctgtgctcacagaaacatgtgctgtgtcgactcaaggtttaatggatttagggatatgcaggatgtgctttgttaaacaaatgcttgaaggcatcatgcttgttaaaagtcatcaccactccctactctcaaggacccagcgacacaaaacactgctgaaggccacagggacctctgcttaggaaagtcaagtattgtccaaggtatctccccatgtgatagtctgaaatatggcctcatgggaggggaaggacctgaccatccaccagtccgacacctgtaaacggtctgtgctgaggaggattagtaaaagaggaaggcctctttgcagttgagataagacaaagccatctgtctcctgctcgtccctgggcaatggaatgtctcmttgtaaaacccgattgtatattccacctactgagataggagaaaactgccacagggctggaggtgagacatgctggaggcaatact

SEQ ID NO: 205642 - DNA, 519 bp, Homo sapiens
tagttcaagccatgggtcacacatgcctcattatactctcctccctttggttttaattttaatttcaatttcaatttttaatttatttttgtgggtgcatagttggtgtatatatttatgggggtacatgacatactttgatgtagtcatgcaatgagtaatacrtaataaaaaacggagtatctctccccacaagcagttatagcttgtgttataaacaatccaattatactcttttagtttttttacatgtggaattatttttgactataatcaccctgttgtgctatcaaatgctgtcttattcattctttctaacaatttttttttacccatttagcatccccactattctcttgtttcctccctgtccttgccagcctctggtaaccatccttatactctctttttctatgacaccaattgttttgaattttagcacccacaaataagtgagaacatgtgacatttgtctttctgtgcctgacatttcacttaacataaagactttcatttcca

SEQ ID NO: 205643 - DNA, 553 bp, Homo sapiens
ttattgcaaatggcaggctctcattctttcttacagctgaatagtactccattgtgtatatgtaccatattttctctatccagtcatctgttgatggacatttaggttccttccaaatcttggctattataaaccctgctgtagcaaacatgagagtgccaataggtctttgattaaccaattttatttcttgtaggcatatactgagcagtggaattgctggaacatatagtagctctatttttagttatatcaggaacatccaaactgtccttaaatgtgctcccaacagcagtgtacaagggttcccttcactccacatacccaccagcattttttttttcactgtcttctggataaaagccaccttaattggggtgaaatgatatctcattttgggtttgatttgcatttctatgatgatcagtaatgtggagcacctttycatttgcctgtttcacatttatatgtcttcttttcataaatgtctatttaaattttttgtccactctttatttgggttattacttttttctatagaattttttgaact

SEQ ID NO: 205644 - DNA, 574 bp, Homo sapiens
ataaatttcagaattttttttctatatctgtgaggaatgtcttcttcttttttttttttagatggcgtcttgctctgtcacctagactggagtgcagtgatgtgacctcgacacactgcaacctccaccacctgggttcaagcaattctttgactcagcctcctgagtagctgggattacaggcacctgycaccatgcctggctaattttttgtacttttagtagaggaggggtttcaccaagttggccaggctgatcttgagctcttgacctcatgatccaccaactttggcctcccaaagtgctgggattacaggcatgagccattgcccctggcctgttattttgatagagatggcatgaaatgtatagattgctatggattgtatggacattttaaaaatactgattcttccaatctgtgaacataaacatatctttccaattttggggtcctttttcatgtcttttatcagtgttttacagttttaattgttgagaacttttatttctttggtaaattcccacacattttatttgtggctactgcaaatagtattacatttttgaattc

SEQ ID NO: 205645 - DNA, 572 bp, Homo sapiens
tgtgatgtttccatataaatttcagaattttttttctatatctgtgaggaatgtcttcttcttttttttttttagatggcgtcttgctctgtcacctagactggagtgcagtgatgtgacctcgacacactgcaacctccaccacctgggttcaagcaattctttgactcagcctcctgagtagctgggattacaggcacctgccaccatgcctggctaattttttgtacttttagtagagkaggggtttcaccaagttggccaggctgatcttgagctcttgacctcatgatccaccaactttggcctcccaaagtgctgggattacaggcatgagccattgcccctggcctgttattttgatagagatggcatgaaatgtatagattgctatggattgtatggacattttaaaaatactgattcttccaatctgtgaacataaacatatctttccaattttggggtcctttttcatgtcttttatcagtgttttacagttttaattgttgagaacttttatttctttggtaaattcccacacattttatttgtggctactgcaaatagta

SEQ ID NO: 205646 - DNA, 612 bp, Homo sapiens
tcagcatagtttggctattatggtgtgtgatgtttccatataaatttcagaattttttttctatatctgtgaggaatgtcttcttcttttttttttttagatggcgtcttgctctgtcacctagactggagtgcagtgatgtgacctcgacacactgcaacctccaccacctgggttcaagcaattctttgactcagcctcctgagtagctgggattacaggcacctgccaccatgcctggctaattttttgtacttttagtagaggaggggtttcaccaagttggccaggctgatcttgagctcttgacctcatgatccaccaactttggcctcccaaagtgctgggattacaggcatgagccattkcccctggcctgttattttgatagagatggcatgaaatgtatagattgctatggattgtatggacattttaaaaatactgattcttccaatctgtgaacataaacatatctttccaattttggggtcctttttcatgtcttttatcagtgttttacagttttaattgttgagaacttttatttctttggtaaattcccacacattttatttgtggctactgcaaatagtattacatttttgaatt

SEQ ID NO: 205647 - DNA, 612 bp, Homo sapiens
tcagcatagtttggctattatggtgtgtgatgtttccatataaatttcagaattttttttctatatctgtgaggaatgtcttcttcttttttttttttagatggcgtcttgctctgtcacctagactggagtgcagtgatgtgacctcgacacactgcaacctccaccacctgggttcaagcaattctttgactcagcctcctgagtagctgggattacaggcacctgccaccatgcctggctaattttttgtacttttagtagaggaggggtttcaccaagttggccaggctgatcttgagctcttgacctcatgatccaccaactttggcctcccaaagtgctgggattacaggcatgagccattgcccctggcctgttattttgatagagatggcatgaaatgtatagattgctatggattgtatggacattttaaaaatactgattcttccaatctgtgaacataaacatatctttccaattttggrgtcctttttcatgtcttttatcagtgttttacagttttaattgttgagaacttttatttctttggtaaattcccacacattttatttgtggctactgcaaatagtattacatttttgaatt

SEQ ID NO: 205648 - DNA, 652 bp, Homo sapiens
gaggctcccaagtctcaactacttgcatttggtaaacccacaggcctaacaccacatggaagctaccaaggttatggcttgcaccctctgaagcagtgactggagttgtaactgggtcaacttgagctacacctggagctgaagcagtggccaggatgcagggagccttgttccaaagctacccaaggcagcaggtcctaggcctgatcccagaaactattctcttcttttaggcctcagggcctatgatggggggctgccttttagatttctaaaatgccttcaattcctctttcccattgtcttggctatcaacacttgcttttttttaggttatacaaatatctctaacaagttgttgacccatatcctgcttgatttcctctcttataaaasctttgtatatttcagccacacgactaggctgctaattttcaaggttttacactatgcttcttttgtaagtataagttactacttattttattattttttttttttgctagatcatgtgagcataggttgttagaagcagccaggccacatcacaaatttttccaacagaaaacctaaatcatcaatttcaaattcaaacttttatatatccctagggcatgacagaaattcagccaacaactttgctaagacaaca

SEQ ID NO: 205649 - DNA, 562 bp, Homo sapiens
cttatgattctacaggctgtagagaagacatagcactggaatatgcttctggggaggtctctggaagtttacagtcatggcagaagttgaagcagaatcttgcacatcacagggcaaaaagaaggagcaaaaaacagaagggcgagttgttacacagttttaaataaccagatcttatgggaactcactcactatcaggaggatagcaccaaatgggatggtgctaagccatttatcagtaatccaccccaatagttaaatcacctttcaccaggtccatctccaacattgagaattacatttaaatatgagatttgggaggggacacacattcaaaccctatcagaggagtctttatgctttttccaatataagattatatcrttggcaaaaaaaaaaaaaaaaaaaaggtgatttgacttcttttccagttgggatgcggtttattgctttcttctgtctgattgctccagataggactttcagcattatgttgaataacagtggtaaaagtggacattcttgtcatcttccagatttaagaggaaaggcttttagtttt

SEQ ID NO: 205650 - DNA, 562 bp, Homo sapiens
cttatgattctacaggctgtagagaagacatagcactggaatatgcttctggggaggtctctggaagtttacagtcatggcagaagttgaagcagaatcttgcacatcacagggcaaaaagaaggagcaaaaaacagaagggcgagttgttacacagttttaaataaccagatcttatgggaactcactcactatcaggaggatagcaccaaatgggatggtgctaagccatttatcagtaatccaccccaatagttaaatcacctttcaccaggtccatctccaacattgagaattacatttaaatatgagatttgggaggggacacacattcaaaccctatcagaggagtctttatgctttttccaatataagattatatcgttggcaaaaaaaaaaaaaaaaaaaaggtratttgacttcttttccagttgggatgcggtttattgctttcttctgtctgattgctccagataggactttcagcattatgttgaataacagtggtaaaagtggacattcttgtcatcttccagatttaagaggaaaggcttttagtttt

SEQ ID NO: 205651 - DNA, 562 bp, Homo sapiens
cttatgattctacaggctgtagagaagacatagcactggaatatgcttctggggaggtctctggaagtttacagtcatggcagaagttgaagcagaatcttgcacatcacagggcaaaaagaaggagcaaaaaacagaagggcgagttgttacacagttttaaataaccagatcttatgggaactcactcactatcaggaggatagcaccaaatgggatggtgctaagccatttatcagtaatccaccccaatagttaaatcacctttcaccaggtccatctccaacattgagaattacatttaaatatgagatttgggaggggacacacattcaaaccctatcagaggagtctttatgctttttccaatataagattatatcgttggcaaaaaaaaaaaaaaaaaaaaggtgatttgacttcttttccagttgggatgcgktttattgctttcttctgtctgattgctccagataggactttcagcattatgttgaataacagtggtaaaagtggacattcttgtcatcttccagatttaagaggaaaggcttttagtttt

SEQ ID NO: 205652 - DNA, 562 bp, Homo sapiens
cttatgattctacaggctgtagagaagacatagcactggaatatgcttctggggaggtctctggaagtttacagtcatggcagaagttgaagcagaatcttgcacatcacagggcaaaaagaaggagcaaaaaacagaagggcgagttgttacacagttttaaataaccagatcttatgggaactcactcactatcaggaggatagcaccaaatgggatggtgctaagccatttatcagtaatccaccccaatagttaaatcacctttcaccaggtccatctccaacattgagaattacatttaaatatgagatttgggaggggacacacattcaaaccctatcagaggagtctttatgctttttccaatataagattatatcgttggcaaaaaaaaaaaaaaaaaaaaggtgatttgacttcttttccagttgggatgcggtttattgctttcttctgtctgattgctccagataggactttcagcattatgttgaataacagtggtaaaagtggacattcttgtcatcttccagatttwagaggaaaggcttttagtttt

SEQ ID NO: 205653 - DNA, 541 bp, Homo sapiens
tccctgggataaatcccacttggtcattattaattayctatttatgtattgtttaattcactttgctaggtgttttgcaaatttttgcaccaatattctcagatatgggcctgtagtttgctttttttaatatgtctttgtctggttttgatatcagggtaatactagcctcaaagaatgagtttggaaatgttctttccttctctagttttcagtctggtctaaacagacttttttattaaggctttaattttgttaattgttatttgtctgttcaggttttagatttattcctagttcaatcttggtaagttgtgtgtgtctaagaatttcgtctaggttttctaatttgttggcataaaattgcagatagtattcactaatgatcctttgcttttctgaagcgttacttgtaatgtctcctttatcacctctgattttactaatttgtatcttttctgtttttcagttaccctgtttaaatatttgtcaatagttttacttttcaaaaaatcaactttgtctttcattaattctttac

SEQ ID NO: 205654 - DNA, 541 bp, Homo sapiens
tccctgggataaatcccacttggtcattattaattatctatttatgtattgtttaattcactttgctaggtgttttgcaaatttttgcaccaatattctcagatatgggcctgtagtttgctttttttaatatgtctttgtctggttttgatatcagggtaatactagcctcaaagaatgagtttggaaatgttctttccttctctagttttcagtctggtctaaacagacttttttattaaggctttaattttgttaattgttattkgtctgttcaggttttagatttattcctagttcaatcttggtaagttgtgtgtgtctaagaatttcgtctaggttttctaatttgttggcataaaattgcagatagtattcactaatgatcctttgcttttctgaagcgttacttgtaatgtctcctttatcacctctgattttactaatttgtatcttttctgtttttcagttaccctgtttaaatatttgtcaatagttttacttttcaaaaaatcaactttgtctttcattaattctttac

SEQ ID NO: 205655 - DNA, 336 bp, Homo sapiens
taattttgttaattgttatttgtctgttcaggttttagatttattcctagttcaatcttggtaagttgtgtgtgtctaagaatttcgtctaggttttctaatttgttggcataaaattgcagatagtattcactaatgatcctttgcttttctgaagcgttacttgtaatgtctcctttwtcacctctgattttactaatttgtatcttttctgtttttcagttaccctgtttaaatatttgtcaatagttttacttttcaaaaaatcaactttgtctttcattaattctttacattattttcattattttaactttatctacttatgctctaatc

SEQ ID NO: 205656 - DNA, 485 bp, Homo sapiens
ttgcataattcctaacggccgtgagattttcagagtggtcaatgagcactggctgtaacttaaagtcaccaactgcagtggtccttaaagagagtcagcccatcctttgaagttttgaagccaagtgtggacatctctctagcgatgaaaattttacatcttcactatgcttaatcatttctagctctggacttcaagtgagagacgtgcaattcttcctttcatttgagctctttgaggccactgtgcttactaattaacacccgccggcggatgtcatcctcctccctcctcaatcgagttcacccacaccggggcatggggaacagggcttgccgcaccccacacaccctrcatgcctggggctctcccacagggggctttcgtgagccagggagcaaggcggtcccaccgctccagcctagccaggctgcgcaggcagaaggaatctctcaacgtgccccggcacgcggggattttgtgtt

SEQ ID NO: 205657 - DNA, 306 bp, Homo sapiens
gcattttttactttagaattccaackttttctggttaaaatttttccaaacagattccttgtatttgaagacaaataattttttagttgaactgcttaagcagttaaataaggccatggaagtttctcgaacttatgggaatccatgagaaaatctgacattatgttctattctcttggaaggtagaaatatcgtttgacttctgttttgctgacaagaaatgtcctgagcaagactacctgggacaatgacctcacacatggaaaacgttggagcccatctgtttccaatctgcttttttccaaa

SEQ ID NO: 205658 - DNA, 306 bp, Homo sapiens
gcattttttactttagaattccaactttttctggttaaaatttttccaaacagattccttgtatttgaagacaaataattttttagttgaactgcttaagcagttaaataaggccatggaagtttctcgaacttatgggaayccatgagaaaatctgacattatgttctattctcttggaaggtagaaatatcgtttgacttctgttttgctgacaagaaatgtcctgagcaagactacctgggacaatgacctcacacatggaaaacgttggagcccatctgtttccaatctgcttttttccaaa

SEQ ID NO: 205659 - DNA, 587 bp, Homo sapiens
tttccaccaatgattctgttttatcctgataaaggaagcagctttcagtaatagaatttaaacatgtgaatgaatgttcccatattgattcttgttgagaaaggttcacataaagaggctggtgtttcatacagccaaaatggtatttaaaacatatattatctatttgttttatacagacacatactattaaattgagtatgttgtaaacaaatatgttgttatgctgaatatgttaatatttatgaaaagttaaaggggtgccttacatttgagaaaaacatgaaatctatgatacagtatacatggtgatcttcatgcttaatgagacataccacaygcaagctgctgatatattggccagtgatctttttgtaagataaataaagataaagaatcatctattttcattttaattattttaaataatatattaggtgtatttaatatattttaattatatacaaaataatttgtttatttaattaaaattttaatttattgtcatgaatagtttattaaaacctgtaactacaaataacttccacattactttgccatattaaccaacagatctgggttatggt

SEQ ID NO: 205660 - DNA, 587 bp, Homo sapiens
tttccaccaatgattctgttttatcctgataaaggaagcagctttcagtaatagaatttaaacatgtgaatgaatgttcccatattgattcttgttgagaaaggttcacataaagaggctggtgtttcatacagccaaaatggtatttaaaacatatattatctatttgttttatacagacacatactattaaattgagtatgttgtaaacaaatatgttgttatgctgaatatgttaatatttatgaaaagttaaaggggtgccttacatttgagaaaaacatgaaatctatgatacagtatacatggtgatcttcatgcttaatgagacataccacacgcaagctgctgatatattggccagtgatctttttgtaagataaataaagataaagaatcatctattttcattttaattattttaaataatatattaggtgtatttaatatattttaattatatacaaaataatttgtttayttaattaaaattttaatttattgtcatgaatagtttattaaaacctgtaactacaaataacttccacattactttgccatattaaccaacagatctgggttatggt

SEQ ID NO: 205661 - DNA, 587 bp, Homo sapiens
tttccaccaatgattctgttttatcctgataaaggaagcagctttcagtaatagaatttaaacatgtgaatgaatgttcccatattgattcttgttgagaaaggttcacataaagaggctggtgtttcatacagccaaaatggtatttaaaacatatattatctatttgttttatacagacacatactattaaattgagtatgttgtaaacaaatatgttgttatgctgaatatgttaatatttatgaaaagttaaaggggtgccttacatttgagaaaaacatgaaatctatgatacagtatacatggtgatcttcatgcttaatgagacataccacacgcaagctgctgatatattggccagtgatctttttgtaagataaataaagataaagaatcatctattttcattttaattattttaaataatatattaggtgtatttaatatattttaattatatacaaaataatttgtttatttaattaaaattttaatttattgtcatgmatagtttattaaaacctgtaactacaaataacttccacattactttgccatattaaccaacagatctgggttatggt

SEQ ID NO: 205662 - DNA, 567 bp, Homo sapiens
cactcataacaacaatgcacaagtgttccctgttctccacaccttcatcaacatgctatctttgtctctttaatgaaagccgtaataataaatgtgaggtgatatctcattgtggttttgattttgcattttcctgatcattagtaatgttgaacatttcttcatatacctgttggtcatttgtatgccatccttgaaggcatgtcgattcaagtccttaaaccatgtttttaaatgtttgtcttcttaatattgagatatttgatttccttatatacttkgaatattaacctcttatcaggagtgtgacttgcaaatatgttctttccttctgtaggttgtctctttattctgttgattttttcatttgtagtgcagaagatttttgcacagtcccatttgcctatttttgcttttgttgtctctgcttttgaagtcatttctaaagcattattgtccagattaatgtcaaaatacctttccctatgttttcttataacagttttacagtttctatcttaagtttacattttaatccattttagatttatttttgtataggatgtg

SEQ ID NO: 205663 - DNA, 593 bp, Homo sapiens
tcaaggatgaatctcaaaattattatgctaagtcttagaaaaacaaagaaaacaaaatggagtactactatatgattccctctatataaaagcgtgtacatttattattaataaaattgacaaaaaagaagattagtagttgccttgacccctggtggagaatgtggaaggtgacagggaaaatgagagtttgatttataaagggacttgacaaaaggattggaggtgatggatatcttcattatcttcattaaatttttttcataaatatatgcacattcaaaactcaacaaactgtacactttatagaagtgaagttgactgtaaatccttattgttcaataaagcaatataaagacaaaaagtttttaagagtgtcagtgtgaattctaggcaatggaattccaatttttatgaaacctcataactgaaatttccctgtgacactaaagagaaacagtaactgtgtgatttaattaaagttttgatttctactctgcatcttcttagttatcataaacccataatacytacttatatgtgagtgctctgggcaagaccttggaggttagactcaatctcatttgaatgat

SEQ ID NO: 205664 - DNA, 570 bp, Homo sapiens
atcagtaatacaatcttattggcaataactacacaataaaataaaatacttcagaatacattttaaccaaagaggtgaaagatctatacactgagattgatgaaagaaattaaacacaaaaaaatggaaagatatcccatattcatgaattggaagaacmaatcttgttgaaatatctatactccctaaagcaatctgcagattcaacacaatccccatcaaaatttcaatgatattattaatagaaatagaaaaaaattctaaacattttttgaaaacacagaagaccctgagcagccaaaacattcttgaacaaaataaacaaaactggagacatcatattacctgatttcaaaatctacctcaaagctatagtaattcagacagtatgatgctggcataagaacagatacatagttcagtggaatagagaaaaaccaaaaaataaatctaagcatatgcatttaatttatttttgacaagtgcctcaataatgcacagtgggaaaaggatagtctcttcaataaatggtgtatggaaaacggaatatccacatgcaaaataatgaaa

SEQ ID NO: 205665 - DNA, 570 bp, Homo sapiens
atcagtaatacaatcttattggcaataactacacaataaaataaaatacttcagaatacattttaaccaaagaggtgaaagatctatacactgagattgatgaaagaaattaaacacaaaaaaatggaaagatatcccatattcatgaattggaagaacaaatcttgttgaaatatctatactccctaaagcaatctgcagattcaacacaatccccatcaaaatttcaatgatattattaatagaaatagaaaaaaattctaaacattttttgaaaacacagaagaccctgagcagccaaaacattcttgaacaaaataaacaaaactggagacatcatattacctgatttmaaaatctacctcaaagctatagtaattcagacagtatgatgctggcataagaacagatacatagttcagtggaatagagaaaaaccaaaaaataaatctaagcatatgcatttaatttatttttgacaagtgcctcaataatgcacagtgggaaaaggatagtctcttcaataaatggtgtatggaaaacggaatatccacatgcaaaataatgaaa

SEQ ID NO: 205666 - DNA, 570 bp, Homo sapiens
atcagtaatacaatcttattggcaataactacacaataaaataaaatacttcagaatacattttaaccaaagaggtgaaagatctatacactgagattgatgaaagaaattaaacacaaaaaaatggaaagatatcccatattcatgaattggaagaacaaatcttgttgaaatatctatactccctaaagcaatctgcagattcaacacaatccccatcaaaatttcaatgatattattaatagaaatagaaaaaaattctaaacattttttgaaaacacagaagaccctgagcagccaaaacattcttgaacaaaataaacaaaactggagacatcatattacctgatttcaaaatctacctcaaagctatagtaattcagacagtatgatgctggcataagaacagatacatagttcagtggaatagagaaaaaccaaaaaataaatctaagcataygcatttaatttatttttgacaagtgcctcaataatgcacagtgggaaaaggatagtctcttcaataaatggtgtatggaaaacggaatatccacatgcaaaataatgaaa

SEQ ID NO: 205667 - DNA, 417 bp, Homo sapiens
tctttgcaaaagctgaaatctgctatctacaatattgtagtagtccccaaaattgtctatgttctttattttttacttttttgtaataggtcattttattataaaattagttgactcctggwtcgtagcactgaaatattagagcttagttgtgcaatactgcaatttgcttggtgaacccttatgttcctgttaagccaagaactgtaacaaagctaaagtatcaatttgcaatgctctgtagtttctgaggataccagcaaatcatctatagtttgaataattataaatccctctggttggaaacatttctctaagttctataaatgactagaaaatattgtaggaaaatcccaaaacccttgaggaaacaattgtgataaatattgggttcttccataagtgaaagcaaataag

SEQ ID NO: 205668 - DNA, 589 bp, Homo sapiens
tgatttagtaatttcactattgagtatccaaaggaaattaaatcagtgtcttaaagcgagatatatgagatatgagatatatgaatcctcatatttgttgtgatgttatttacaataggcaagatatggaaattatctaagtgttgctgaatgaataaatggattaaaaatatcatatttattatacacaatggaatatattcagtagtgaaaaataagaaaatcctgtcatttgcaatgacatggataaacctagaggacattatgctaagtgaactaagctaaacacagaaagacaaatactgtgtgatcccacttatatgtggaatataaaacatatgaatttatataagcagacagaataatagttgacaggggctgaggatattgaccaaataatacaaattttcagttacaggatgartaagttctgaggatctaatgtaggtatagcgaccacagttttactgtattgtttacttgaaatttgctaaaagagtagatcttaagtatcttcatcacacacacactcagacaaacctgcacacacacacaatggtaactgtgtgagggaatcaatgtgttaatt

SEQ ID NO: 205669 - DNA, 589 bp, Homo sapiens
tgatttagtaatttcactattgagtatccaaaggaaattaaatcagtgtcttaaagcgagatatatgagatatgagatatatgaatcctcatatttgttgtgatgttatttacaataggcaagatatggaaattatctaagtgttgctgaatgaataaatggattaaaaatatcatatttattatacacaatggaatatattcagtagtgaaaaataagaaaatcctgtcatttgcaatgacatggataaacctagaggacattatgctaagtgaactaagctaaacacagaaagacaaatactgtgtgatcccacttatatgtggaatataaaacatatgaatttatataagcagacagaataatagttgacaggggctgaggatattgaccaaataatacaaattttcagttacaggatgaataagttctgaggatctaatgtargtatagcgaccacagttttactgtattgtttacttgaaatttgctaaaagagtagatcttaagtatcttcatcacacacacactcagacaaacctgcacacacacacaatggtaactgtgtgagggaatcaatgtgttaatt

SEQ ID NO: 205670 - DNA, 583 bp, Homo sapiens
gttgtagggattagacaatttcatatctttttttttttttggatggagtctcactctgtcacccaggctggagtgcaatggtgcgatcttggctcactgcaacctctgcctcctgggttggagcaattctcctgcctcagcctcttgagaagctagattacaggtgtgcaccaccacaaccagctaatttttgtatttttagtagagctggggtttcgccatgttggccaggctggtcttgaactcctgacctcaggtgacccacgcacctaggcctcccaaagtgctgaaattacaggtgtgagctaccgygcccagccaaatttcgtattttttttatggacacaattcaacccctaatactgacaatccaatctaaaattgtagctgacatctctattcctttatctaattcattttcctccatggtatgtatcactgttttacattctattttagtaattaatttttttgttaatttaataaaatgaggaaagacatttcagtttatttttgctccacattctattctcagtgcaaaaaaagaaacacaatgtagttgttgtgcattcatgataaatac

SEQ ID NO: 205671 - DNA, 583 bp, Homo sapiens
gttgtagggattagacaatttcatatctttttttttttttggatggagtctcactctgtcacccaggctggagtgcaatggtgcgatcttggctcactgcaacctctgcctcctgggttggagcaattctcctgcctcagcctcttgagaagctagattacaggtgtgcaccaccacaaccagctaatttttgtatttttagtagagctggggtttcgccatgttggccaggctggtcttgaactcctgacctcaggtgacccacgcacctaggcctcccaaagtgctgaaattacaggtgtgagctaccgcgcccagccaaatttcrtattttttttatggacacaattcaacccctaatactgacaatccaatctaaaattgtagctgacatctctattcctttatctaattcattttcctccatggtatgtatcactgttttacattctattttagtaattaatttttttgttaatttaataaaatgaggaaagacatttcagtttatttttgctccacattctattctcagtgcaaaaaaagaaacacaatgtagttgttgtgcattcatgataaatac

SEQ ID NO: 205672 - DNA, 583 bp, Homo sapiens
gttgtagggattagacaatttcatatctttttttttttttggatggagtctcactctgtcacccaggctggagtgcaatggtgcgatcttggctcactgcaacctctgcctcctgggttggagcaattctcctgcctcagcctcttgagaagctagattacaggtgtgcaccaccacaaccagctaatttttgtatttttagtagagctggggtttcgccatgttggccaggctggtcttgaactcctgacctcaggtgacccacgcacctaggcctcccaaagtgctgaaattacaggtgtgagctaccgcgcccagccaaatttcgtattttttttatggacacaattcaacccctaatactgacaatccaatctaaaattgtagctgacatctctattcctttatctaattcattttcytccatggtatgtatcactgttttacattctattttagtaattaatttttttgttaatttaataaaatgaggaaagacatttcagtttatttttgctccacattctattctcagtgcaaaaaaagaaacacaatgtagttgttgtgcattcatgataaatac

SEQ ID NO: 205673 - DNA, 436 bp, Homo sapiens
acaagtgtactcctcccccaaataataatagctagtatttttcaagcatttacacttgatacacttttrcaaaagacttacacattttaaacatttattgcttacaatattctaataagacaagtgctactgttatgcctattttgcaaggaaggacattgaggcccagagatgtcagatgtcatctttcaaataaggaagctagtggcggtagtgacccctttcaccagttctggtcaagattatatgtgcacaattgttcaattctgctgcaaaagacaaaaaatgtattacatttgcggactgaatgttttgggttaaaaggcattgaaggcttgatttaataaagccaactgtttgacatatatgattttacttaataacctatcctaaaagacaacaaagagtgctttctctttttatcaagaagatactt

SEQ ID NO: 205674 - DNA, 436 bp, Homo sapiens
acaagtgtactcctcccccaaataataatagctagtatttttcaagcatttacacttgatacacttttayaaaagacttacacattttaaacatttattgcttacaatattctaataagacaagtgctactgttatgcctattttgcaaggaaggacattgaggcccagagatgtcagatgtcatctttcaaataaggaagctagtggcggtagtgacccctttcaccagttctggtcaagattatatgtgcacaattgttcaattctgctgcaaaagacaaaaaatgtattacatttgcggactgaatgttttgggttaaaaggcattgaaggcttgatttaataaagccaactgtttgacatatatgattttacttaataacctatcctaaaagacaacaaagagtgctttctctttttatcaagaagatactt

SEQ ID NO: 205675 - DNA, 629 bp, Homo sapiens
aagcccaaacatctaccttgatctattctgctagacctgaaaactaagctccaaatgcaaacgtatgttgtagaatacaaaatgcttcgggaaggccaaataacaataataattgatctcctaggaagaaatttgcatttttaaaaaaatctttagatattaacatttcatttgaggattccaaaatagaagctatgtttgatctttaatagagtgattttatatttagtaggacatcatcaagtgtgacctactaatcataatcctttatattgctctcttatcaggcttgtttcagcttgtgttgtttctttttctatttattattattgctaatacattaatgagatcaactcattataaagcacattacacaaccttacaactttcatcaaggtgtacagtctttgataatggtatttttaataaaattattttttaaaagacttcttattttatatgcagctttacttgttgttagtgccatrtagatttatataatgtaatgtacatttgtttctttttatagcaaatttgttatcagcatgacagatgctctttaaatgagtgggtttttctatctcgtcttagcaaacaactaatgtaatgtattctttattactcatgct

SEQ ID NO: 205676 - DNA, 489 bp, Homo sapiens
taactgtaagtattgaatgaaatgaaaattagagtgcaggctttgggggataactggatattcacaggrcaaccagtgatgtataaaatatatataattgccaaattgttcataataaattataaaactataagaggtttcaaaaatagaagtgaattacaatgataactaaagagtcattcatggaggtgatgcaatttaatatctctccaagttagtggaatttgcctaaatccagaaagttagttaagtgtattttatgtagcaaagaatacaaagacaatctgtctctgggaatggaaaagacctgcctgatccagttaaaatatatatgtggagaaattgttatgaataaattttgctaaaccttatggtaccgtattataacatttaagtgtgataagcaaaatgtattaaaagtttaaggcaaccacacataaaagaatgaaagacacagaaaagttctgcctataaatatagtcagaaagt

SEQ ID NO: 205677 - DNA, 432 bp, Homo sapiens
tctttatacctctttaaggacaacttatgaattgttggttaagtcaaaaaaaagcttattggtttctgtttttatttgagaagcttttktggttgcttgttttttttaataagctttatgttcaaaatttggcttaattaaaagctgatatttaagctaaatatatttttaaagacctatttgctttttctcttttggatcttatttcttccctgagtatttttttttcagtcaaatgaatcccttttttaagcattgatgttccatttctttgttgcttccttccttgttggcataacttttgttgagaaaaatgtaaaacctcattgacattattgggaagtttaaaatctcctcaaattgtcttctctaatacttattctacaatttacttctactatgccttccttttttgctacctttgatatctca

SEQ ID NO: 205678 - DNA, 432 bp, Homo sapiens
tctttatacctctttaaggacaacttatgaattgttggttaagtcaaaaaaaagcttattggtttctgtttttatttgagaagcttttttggttgcttgttttttttaataagctttatgtkcaaaatttggcttaattaaaagctgatatttaagctaaatatatttttaaagacctatttgctttttctcttttggatcttatttcttccctgagtatttttttttcagtcaaatgaatcccttttttaagcattgatgttccatttctttgttgcttccttccttgttggcataacttttgttgagaaaaatgtaaaacctcattgacattattgggaagtttaaaatctcctcaaattgtcttctctaatacttattctacaatttacttctactatgccttccttttttgctacctttgatatctca

SEQ ID NO: 205679 - DNA, 437 bp, Homo sapiens
acagcttctttatacctctttaaggacaacttatgaattgttggttaagtcaaaaaaaagcttattggtttctgtttttatttgagaagcttttttggttgcttgttttttttaataagctttatgttcaaaatttggcttaattaaaagctgatatttaagctaaatatatttttaaagacctatttgctttttctcttttggatcttatttcttccctgagtatttttttttcagtcaaatgaatcccttttttaagcattgatgttccatttctttgttgcttccttccttgttggcataacttttgttgagaaaaatgtaaaacctcattgacmttattgggaagtttaaaatctcctcaaattgtcttctctaatacttattctacaatttacttctactatgccttccttttttgctacctttgatatctc

SEQ ID NO: 205680 - DNA, 439 bp, Homo sapiens
tctttatacctctttaaggacaacttatgaattgttggttaagtcaaaaaaaagcttattggtttctgtttttatttgagaagcttttttggttgcttgttttttttaataagctttatgttcaaaatttggcttaattaaaagctgatatttaagctaaatatatttttaaagacctatttgctttttctcttttggatcttatttcttccctgagtatttttttttcagtcaaatgaatcccttttttaagcattgatgttccatttctttgttgcttccttccttgttggcataacttttgttgagaaaaatgtaaaacctcattgacattattgggaagtttaaaatctcctcarattgtcttctctaatacttattctacaatttacttctactatgccttccttttttgctacctttgatatctcatgaagaa

SEQ ID NO: 205681 - DNA, 541 bp, Homo sapiens
gttgggaacaattaaactcgatattctataacatttgttgcattgccatcttgaaattatctataccttgttctattttgcattacacagtggatgagtcttttacaacaaatacaattaaaaagatcattttactcacataaattattcctgacataagagcttagaagtggctacagtcacttttttatagaataattgtcatttgtcctatattggcaagaaaatgaaatatatgcttgaaaatatagaataaaaacaaaaagaagtcttcagtagaattatacataactgttaagaaaattattgaatagttgtaagtatggatacattttgtcagttcagtattattctatatgtagttaataagatcattttctagctagttagaaggtgatgatcaacacttaatagttttttgcattgctttttctaatgataaatagtttggttaccttcttttatcttgagtggatggggaaaccaaatgaaatacatattgtttaatctacttttgtcytcattagcaaaatgatacttc

SEQ ID NO: 205682 - DNA, 613 bp, Homo sapiens
atctgaaagtcaggactttataggaaggtttattcagaagagcatcactcctccctaatgctttctctactattkacatttacttattctcacccacaccctgcagataggcaaatgcatgagcttttgctaattccttcggatttgtttgtttgcttttttgttcatttcctaaatgagtaaatatatgcagttgctcctatatcctctttcttgcatgaaagggaatacacttttggtactcttctatttgctttttcttttctcactgaaacatatattgtgggctttacttcatgttagtttgtagggagctttttcactgtattttatagttgcaaataattctattgtatgtttctatcatacttgatttgactactcttccacgtatgagtatttgtgttgtttcaaatatttttgcaatagtacaacgctataatgaataactggggtagatatatgttcatattgctgaaaaacattccagataatacatagatatgggactgctcagtcaaaattaagtaaaaatgtaattttgtaagattatgtcaaatttacttccagaaggcttgtatcattttgcattcttagcaacagtgtctcatat

SEQ ID NO: 205683 - DNA, 648 bp, Homo sapiens
cttcttttcagtagcatcaaaacatttggagtgccagctgaaaaaaatgatttagcaattatgaagtgagtgttggatccatgctgtaccattttgagtagtaccagctctctaaaattgcaccatgtcagaaaatagcattataatactgtgggtgagcaagaatattctgcattctctaacacctgggcataatggggagcagacttaatgacctcccactatgctcccttacctggtggaaggtattcctaaccacttctagtgttctttctgtgtattttctagtaaatgtctaaactgaagtaaagttttctgtctaatttgtcatgattttcttacttcattctaagtaagtcaccatgattttcaccactccatataattattatttcagagacattttcaaataggamccattatgtacatctccttcaaaaggtcagcttaacttatagaattagtcaactgagggtcaggctctagaatagctgtaattaacaaacttttcttagcctttgtccagagggcagaaacaaggacttatctaccactattttgattccagaaaggctcttaggtcacatttattgctgtgtttatttggaactagtatgccacttctgggtcttactgacctattatata

SEQ ID NO: 205684 - DNA, 559 bp, Homo sapiens
taattagaatataggtcaaaatatatttttccttatccaaggaattattatatattttgatcagactggtaaatacatggatatatacatttgtgaaaactcattaaactttacatttgaagtagatgttttattattgcatacaaattatacttcaataaagtcgattacatatgttacttctaaaaagtggtcatatatatgaaaactttaatagtctacattattagcttaggtaataaatagttgatatacatgcataattactggcaaataatttaarcaaccaattttacacttttatacatggttattgaatgaaataattatgcttttcaaattggtcaattattattatttttgatgtgatggttgggtttttattatttatgctcataagttctctgataatagtttttaaaacacaaattacatgaaaaattctgaaagcataatttgcctttagaactctatatgtaaaatgtagctgatatttatgagaagcaaagatttaaattatctgcagatgatttaacaaataatttagtgttttcagaac

SEQ ID NO: 205685 - DNA, 603 bp, Homo sapiens
atagtgaaccaatgtcaacttctgaaatttgataaagaaaccattgtcttgcaagttgctaactttttgggaagtgggaggattggaatatagtaactgtataatctttgcaagtctccagtaaatctaaaattatttttatggaaataatacatagtagtgattcttttttaacatataaaatgtaggtcagttgatccatcttaaaaatctgctgagactttttgataagaatgcattaaatgtgtaggtcagtttggggtgcattgccatttataattgtaagwcttctatcctttggcatagtatatctctctattcattctggccttctttaatttctatcagcaatgttttgtaactttcattttataggtcttacacaatttttgttaatttattttaaaatattttatttttaaaactttttaaatggaatcgttaagtctttcatcctttctaattttccatctacgtgttccattaatcattgcttctttttttgccgcctcaaatctgttcaggagtccatctgttatttatcttcatttcaattgttgtacttctcagatgtaacttttacttctttttcataactatatt

SEQ ID NO: 205686 - DNA, 603 bp, Homo sapiens
atagtgaaccaatgtcaacttctgaaatttgataaagaaaccattgtcttgcaagttgctaactttttgggaagtgggaggattggaatatagtaactgtataatctttgcaagtctccagtaaatctaaaattatttttatggaaataatacatagtagtgattcttttttaacatataaaatgtaggtcagttgatccatcttaaaaatctgctgagactttttgataagaatgcattaaatgtgtaggtcagtttggggtgcattgccatttataattgtaagacttctatcctttggcatagtatatctctctattcattctggccttctttaatttctatcagcaatgttttgtaactttcattttataggtcttacacaatttttgttaatttatttwaaaatattttatttttaaaactttttaaatggaatcgttaagtctttcatcctttctaattttccatctacgtgttccattaatcattgcttctttttttgccgcctcaaatctgttcaggagtccatctgttatttatcttcatttcaattgttgtacttctcagatgtaacttttacttctttttcataactatatt

SEQ ID NO: 205687 - DNA, 575 bp, Homo sapiens
cagacatagggaacatatgtacttctaggctgtctgatatctaacatcaactgtactcaaagatggtgaatttgcttttagaaaagttagaatttggggaggatttaaataataaaaattaatcaattataatatgaataaaaactgagattaaaacttttatctatcctctttatactgctaacagaattggaaacatgagtagtcaataaatattaatttcatttaaatgatgaataatagaagtaaaaatggaattagatattggaactgccttgtctatcttaccgttgaataaaaacaaaagccagcctaattggtttttttgtttatgattttcaaatcataaatgaccaaataggacatcaatgttggtcattttttttcatactgtgtaagtccattcttgacaatgcaatagccagttattttttaaaacttacaggattttaaatataggacatgcaayagccagttattttttaaaatttctgatttcccatcaataagaaaaaaaaaaggaattgaattgtttaccttgacattgagcacgcaaatttatttggtttgttttc

SEQ ID NO: 205688 - DNA, 421 bp, Homo sapiens
attttaactgtatctagtttactttcaggagtatttagtgcctggaacaaaaatragtagaacaaaggaataccctaggagtgtgatcacaacagcaagctgccggccacatcctgggccatacacttattagccttggcataataaatgatgtagtgtgacagagggggagttttagagtatcaaattgaaaggactgccattccagagctctaagcatttttcttctaccctttctgaatggatagaagtaggtctttacctgagtaaaatatgaatgtgaataatgtgccactacaaattaataaggatatatcaaggatatagtgaaaataaaagaaaagctattccatataggactgtaatataacatgtgcttcaaagcttggatttttaaaagaatcaaacaaaatctcactta

SEQ ID NO: 205689 - DNA, 421 bp, Homo sapiens
attttaactgtatctagtttactttcaggagtatttagtgcctggaacaaaaatgagtagaacaaaggaataccctaggagtgtgatcacaacagcaagctgccggccacatcctgggccatacacttattagccttggcataataaatgatgtagtgtgacagagggggagttttagagtatcaaattgaaaggactgccattccagagctctaagcatttttcttctaccctttctgaatggatagaagtaggtctttacctgagtaaaatatgaatgtgaataatgtgccactacaaattaataaggatatatcaaggatatagtgraaataaaagaaaagctattccatataggactgtaatataacatgtgcttcaaagcttggatttttaaaagaatcaaacaaaatctcactta

SEQ ID NO: 205690 - DNA, 646 bp, Homo sapiens
attttttaggatacaaaataaatcatacactataacagatgtcttcaaccctaggtatgcctactctcaaggaataaaaagatgttccaaagaatatgtagcactgatactttactgagwattgtgttccagatctttaacttcctaacgtatttctgtctaaaactgatgtgttgaaagttctgaagtttagatttaccaatggttccgaagtttcttttccattttgcacaattgcctttttttccccaagcttccaaagaaggacaaattgatcaacctcgcagagtcctatccacagtctcatcgatattcgtgggcacccatcaacaaaaggacaaaaaagaatgcatagctcctgaggaagggtatagtggcagcaaagcaacatgatctggttaaaaaataactgagaatcagtaacagtctcatcatagagctctgtgtaccatatctatctacctgtctcttgtcttgaccatctctctctctttctctctctctgcctttctctctctccccatctttatcttcattctatttgccatctatctatcatctatcttagaatttgaattcagaaaggagatgtgattggacttgtattagcacaatcattttaaagtgaatcccactatgaaatgtt

SEQ ID NO: 205691 - DNA, 561 bp, Homo sapiens
actcgactttctaaaacaagtcttgaaaatgcttacatatgattcaaatacattgctaaatttgagctgtgtctatacaaatatcagtataacttactgtttaaggggacaggtttttaagtcagacttttttastttaattctagttcaactattgaaccactacccatcattaggcaagtcaaatacttctccaagccacagtttcctcatttttaaaagtggagaaaataattgtaactagccaacctatttgttttgaggattagatgagatagtctatgcaaagttttagtatatttcctagctatgagtaagcattctataagtgttccttatctttattattgatttattctttgatctagcaaaaaacaaatgtgttccatttcttaaaaatcagtacaaggtccacattttcttatgtcttctctaaatatttagcctatattgattttcgtctttcctgaattgcatttagattttctaccccattaatatatcatgcagtgttatgtatttttaaaggcataagctgtgtcactcataatggaatataag

SEQ ID NO: 205692 - DNA, 561 bp, Homo sapiens
actcgactttctaaaacaagtcttgaaaatgcttacatatgattcaaatacattgctaaatttgagctgtgtctatacaaatatcagtataacttactgtttaaggggacaggtttttaagtcagacttttttagtttaattctagttcaactattgaaccactacccatcattaggcaagtcaaatacttctccaagccacagtttcctcatttttaaaagtggagaaaataattgtaactagccaacctatttgttttgaggattagatgagatagtctatgcaaagttttagtatatttcctagctatgagtaagcattctataagtgttccttatctttattattgatttattctttgatctagcaaaaamcaaatgtgttccatttcttaaaaatcagtacaaggtccacattttcttatgtcttctctaaatatttagcctatattgattttcgtctttcctgaattgcatttagattttctaccccattaatatatcatgcagtgttatgtatttttaaaggcataagctgtgtcactcataatggaatataag

SEQ ID NO: 205693 - DNA, 535 bp, Homo sapiens
acattccactaaaacgtaagtggttggcttgatagaatgaaaatacaggaaggggaggtgtaatacaggaactgctgtttttaatttttaaagcgtaacaggattattgactttaaaaactttatacaaayacacccttaaaaataaataataaagatgcacacatataaagtaatataaactctaataaacataataaaattatggtaataagtgaaggaaattatgaattctgtcaggaagaagtgaaaacatttctagaaaaaaattgcatatgagtggggtttgactagcacacctaacagcatacaattctgcatttgagccgtctccatacagttggtcaattgttattgccatgtgaccccaatgaaatccatatatcccaaaggatgataattaagttaatctgtacatgtacattgaggtagttggatgaatgctgcaggggtttgctccaaatacaaatcataattatgtcttctgatactactgttagaattttctgcctgtgaaagcttcctttctaccaact

SEQ ID NO: 205694 - DNA, 388 bp, Homo sapiens
gaaaacatttctagaaaaaaattgcatatgagtggggtttgactagcacacctaacagcatacaattctgcatttgagccgtctccatacagttggtcaattgttattgccatgtgaccccaatgaaatccatatatcccaaaggatgataattaagttaatctgtacatgtacattgaggtagttggatgaatgctgcaggggtttgctccaaatacaaatcataattatgtcttctgatastactgttagaattttctgcctgtgaaagcttcctttctaccaactgtatttctttcctcatgcctcaggaaagttacttttctcccactaatattccacactagagaggagcagtaggttttaactgcagcacatatgtttgaag

SEQ ID NO: 205695 - DNA, 521 bp, Homo sapiens
aaaggtagtaatggtgagcaaggaaaattataaaacttatagaagaagataaataattaggtattaaatactgaataaaataacaaatatgagggattataatatgttaataataaaatgttgatactgtaataaaaacgttgaataggtaagggagmatttagggaagactccaagattctttaagtattagcaaaaggtgcaaagacaatgactgcatttaggctttgcttggcaaaatataaagttatttgttttaatcagaatcaattatattaagtgctgctacggacaaaactggcaatagcagtggcttaataataagaatttatttctaacttacacaaagtctcatgggagtcaagcagctttcttccatcttaaatctatcttctgtggcaaatgtgtcctgcaaggatactgcggcagtgaaaaagaggtacactgccttttaatcgtttcatcttgaaaacaaactaatcacttcttctaattgtccaccacctcaaatgcctccactg

SEQ ID NO: 205696 - DNA, 521 bp, Homo sapiens
aaaggtagtaatggtgagcaaggaaaattataaaacttatagaagaagataaataattaggtattaaatactgaataaaataacaaatatgagggattataatatgttaataataaaatgttgatactgtaataaaaacgttgaataggtaagggagcatttagggaagactccaagattctttaagtattagcaaaaggtgcaaagacaatgactgcatttaggctttgcttggcaaaatataaagttatttgttttaatcagaatcaattatattaagtgctgctacggacaaaactggcaatagcagtggcttaataataagaatttatttctaacttacacaaagtctmatgggagtcaagcagctttcttccatcttaaatctatcttctgtggcaaatgtgtcctgcaaggatactgcggcagtgaaaaagaggtacactgccttttaatcgtttcatcttgaaaacaaactaatcacttcttctaattgtccaccacctcaaatgcctccactg

SEQ ID NO: 205697 - DNA, 540 bp, Homo sapiens
atctcacaggtgctctgatctgtagtcggcattcctggctgacttcaatcacagctggctggactgctgaagtaagacaccattatgaacagctcatgtaattgggtgagactgagttaagccataatgaactaaagtaaataaataaaggaagatgatttttaaaaaatgaatacatgaagtaggggaaaagttctgctgctataatttctcctcatgacttatttcttgatggtaaataaaaagagagataaatagacaatttcaattaccacataaaagaaagcaattttggggggatctatatttaaaagttttatgtcatataatttctcagagaccatatgttttctcttataaactataagaatatattaaaccaaagtacctgacacamcaggatacatataagacagttaatagatgcttcctcattcacattagtgtggaccttcctaaagaatgtacttcctaaaggaatgtactttgtatgtatttccttaaaaaacaactctacattttaaaacaaaagtaatagta

SEQ ID NO: 205698 - DNA, 490 bp, Homo sapiens
aacaaggagaggcttcccattgcctccccattttttgctttggattatcattgtgtgtgcattgaacttttggagctggtgcagccaccctgtgactgctgtggaggcacttctaacaccctgatccttaatgtgacagagtcaaagcggggaggtccctgtgtttttacgttatcaacagtttatgcagctcaccaattctaggagtacctacttctttactttgggttaaatgagacagtaaattattctacgacatamgctatctttagtctattattgactattaaaggcattctccctaataccttctaagataccgcagctcagagacttcaagtaaccttcccatgattacacagctgctaaatgagatttttctgaactcaatcccagatttttggatgtcgcgtttcttttcagagtccagtgaccatttcataaactcatgacagctttccagcttgcttaatatttgatcctaggtagg

SEQ ID NO: 205699 - DNA, 490 bp, Homo sapiens
aacaaggagaggcttcccattgcctccccattttttgctttggattatcattgtgtgtgcattgaacttttggagctggtgcagccaccctgtgactgctgtggaggcacttctaacaccctgatccttaatgtgacagagtcaaagcggggaggtccctgtgtttttacgttatcaacagtttatgcagctcaccaattctaggagtacctacttctttactttgggttaaatgagacagtaaattattctacgacatacgctatctttagtctattattgactattaaaggcattctccctaataccttctaagataccgcagctcagagacttcaagtaaccttcccatgattacacagctgctaaatgagatttttctgaactcaatcccagatttttggatgtcrcgtttcttttcagagtccagtgaccatttcataaactcatgacagctttccagcttgcttaatatttgatcctaggtagg

SEQ ID NO: 205700 - DNA, 621 bp, Homo sapiens
ctggttgcaggaaaacaagctcgggctcccactgattccacattatggtgaattgtatarttatttcattacatattacaatgtaataataataatagaaataaaatgctcaataaatgtaacgggcttgaatcatcctgaaaccatccccccaccctggtctgtggaaaaattgtcttccaagaaaccagtccctggtaccaaaaaggttggggactgctgttcttgggatatcttgttgagtatttaactttatttttctctttcttgttccaagatttatgtaaatgtctggcgatccttggtccctatttatatgttaaaggaagtaataatgcccaatgccaaggtcttcatttctaataccattcttcaataagaggatccagggttccttacaaaaatagtctatcctagggttggaacagggaatatgcaagacaagtagcttatagtgccagaaagtgagaaagctaaaaaaaaaaattacaccaatgggggtgtatcaaaggaaagtaagagatagcagaacaagcttccagtggccaacactgaaacattttgagcaacaaaataaatatttgggttggattatcaaccaaagtgtaaaataaatatcca

SEQ ID NO: 205701 - DNA, 508 bp, Homo sapiens
acaccaatgggggtgtatcaaaggaaagtaagagatagcagaacaagcttccagtggccaacactgaaacattttgagcaacaaaataaatatttgggttggattatcaaccaaagtgtamaataaatatccacaagtcatataaatataaatataaataattaaataaataactggggaaagagacacctctcccatgtaggagaattcccaaaaatttatgtagttactctgacctcagctttccactcctgaagtgtggccggtgcacagtaactttttccaataagtacagcacaaaaaaggcgaaagaggagtaactttacagccaagaaacctaaaacacaatatttcagccaggtgatcaaggttaacattatctgcggcaagtcatgttgacaccatgtattcttgatatgacacgttaaaaatagcacttcatttctgtgtttttcctccaaaaataccatagtcctggtctaatcataagaatagcatctgacaaatc

SEQ ID NO: 205702 - DNA, 623 bp, Homo sapiens
attatgtggtttattattttgcagatatttaatgtggtacatgataaaatgttactttttctactaatcttatttatgtagccgaaaatctagaaaaatgtttttcttattactagctgaaaatatagtaaagtgtttcttagtggaacttgacaagataattttacaactgtttgctcgctttaagtccatgttaaatmtttgtttctaagttgtggaaagccttcatccatcctatcggattcttccatatttattaacaacacttgtcctttgctatttcccacattcatatataagtatgttcaaattcttctactttaaaaacacaaacacacttttctatattccctaatcataatcaagccataccaggttatttgcaatcttcagtcctttgcctgtggatctgtttttgcttggaatacagtcctcttcctcatctcaatattatttcatcagtctgcaatatgtgaccttgaaatgcatctcctatgtgaacactatttttccccttcgctccagtctcatttgtactcttccactgtgttgttccctagcctcctgcgattacccccatcatagtgattatcatcttttctaagtatttacttttatgtacc

SEQ ID NO: 205703 - DNA, 623 bp, Homo sapiens
attatgtggtttattattttgcagatatttaatgtggtacatgataaaatgttactttttctactaatcttatttatgtagccgaaaatctagaaaaatgtttttcttattactagctgaaaatatagtaaagtgtttcttagtggaacttgacaagataattttacaactgtttgctcgctttaagtccatgttaaatctttgtttctaagttgtggaaagccttcatccatcctatcggattcttccatatttattaacaacacttgtcctttgctatttcccacattcatatataagtatgttcaaattcttctactttaaaaacacaaacacacttttctatattccctaatcataatcaagccataccaggttatttgcaatcttcagtcctttgcctgtggwtctgtttttgcttggaatacagtcctcttcctcatctcaatattatttcatcagtctgcaatatgtgaccttgaaatgcatctcctatgtgaacactatttttccccttcgctccagtctcatttgtactcttccactgtgttgttccctagcctcctgcgattacccccatcatagtgattatcatcttttctaagtatttacttttatgtacc

SEQ ID NO: 205704 - DNA, 623 bp, Homo sapiens
attatgtggtttattattttgcagatatttaatgtggtacatgataaaatgttactttttctactaatcttatttatgtagccgaaaatctagaaaaatgtttttcttattactagctgaaaatatagtaaagtgtttcttagtggaacttgacaagataattttacaactgtttgctcgctttaagtccatgttaaatctttgtttctaagttgtggaaagccttcatccatcctatcggattcttccatatttattaacaacacttgtcctttgctatttcccacattcatatataagtatgttcaaattcttctactttaaaaacacaaacacacttttctatattccctaatcataatcaagccataccaggttatttgcaatcttcagtcctttgcctgtggatctgtttttgcttggaatacagtcctcttcctcatctcaatattatttcatcagtctgcaatatgtgaccttgaaatgcatctcctatgtgaacactatttttccccttcgctccagtctcatttgtactcttccactgtgttgttccctagcytcctgcgattacccccatcatagtgattatcatcttttctaagtatttacttttatgtacc

SEQ ID NO: 205705 - DNA, 544 bp, Homo sapiens
cactttttcaaaatatataatctttatttgtcagttaaatatttaaaatataaaagtagagagaaatttctaaaattaatcatttaagcttctatggtaggaaattagaggaagaagagcaacttaaacctaaagcatgcagaagaaagaaaataataaaatttagaaataaaaccactgaaataaaaaacaggaaagcaatagagataatcaacacaactaaaaggtggcactttgaatgatcaaaattaataaacttcttgttaggctaaccaagaaaggatcctcaattatgattatcagaaatgaaggaggtttcattactactgatgctacagatgttcaatgaaaaakaaaagaatactaagatcatctctatgcccagaaattttataactcagatgaagtaaatcaattctttaagagacagaaaatactaaaattcacataaggaaaaacagataattgaggtagttcttgtcctgggttgaactgtgcccctcaaagacatgttaaagccctagaccctgctacctgtgaatgt

SEQ ID NO: 205706 - DNA, 415 bp, Homo sapiens
ccaaatattcaccaatagttttgcagccttattccctgataatagaaagttatctttaacctcttcccactacatttatcccttcactatgggacaacaactgagactagattctattcagaccagcacaagtttggaaatttctctttactttctctccagatgcccagatgtaagagtgtgtggtaggggaagaaacatttatttttaccttcatatcctccattcctaaatattaaataccatccttgttataaaatgtaaaagccaacacgaattatagatttatttggattttaggagactaactagagacgatcacttccatggcaagggaggatatttgtgtattgtaatatacrgaactgtaagtgcactcaacatttgttctgtggtgttgtttttcattaaccag

SEQ ID NO: 205707 - DNA, 633 bp, Homo sapiens
tgtgactctgtctctcatgcaagcctgaacttggagaatgttcctcctgtgaggatgttgtcaccctgatgtgttccagaaagaccatgtatagttgcacccacaccaagctcccatgggagaagtctcagctgtgcctgttgtggtggacaatgtagggagaagggtctccaagaccgttcacacatgaacaccaggcctatctgactgttgagttagagttgcagactttccctgctaagcccatcactgcaactgtgactctgctgaaaattcccaccagtgtaaagatctggtgctgaagatctactgtctggattcttttgtccccatgaggtgttcttttgatgtggtgcagtcccctttcccctaggagtaggagaccctggagccagactactgtaaatgttgttgcttctctgggcctagcctcccagtgaggttgccacactttagattggtastggagaaagtctacagtgaatccaatgatgtgacctgtcctcaagtctcctagcaatgggtttcagcaccaactttaatggggtggcaggggaatgacatagattctatgggattctttggtttttgatagccttagtatgttgactttctcaaatgtcagttggagta

SEQ ID NO: 205708 - DNA, 477 bp, Homo sapiens
tggtgaggacagcaccaagccatgagggatctgcccccatgacccagacacctcccaccaggcctcatctccaacactggggattacatttcaacatggcattgtggggaacaaatatccaaacttgatatatcagactctgaatagccgaaacaactttgataaagaacaaagctgaaagactcatacttcctgactttaagacttactacaaagctacagtaatcagamaagcatggtactggcataaagatagacaagtaaaccaatgaaaccaaatagagagcctagaaattaaccctaacatgtatggtcaaataatttgtggcaacggtgctaacacaatttaatggggaaaaaacagtcttttcaaaaaatgatgctgagaaaactggatatccacatgcaaaataattattgaattcggcccttacttaatagcatattcaaaaattaactcaaaatcatcaagaccta

SEQ ID NO: 205709 - DNA, 615 bp, Homo sapiens
tgtgttaacttaaataaagtaaattaaactgcctggtttaatagctggcacattttgtgagctccataaatagtagctgtttattgactttatttcttttaaagaccagatgatgactctctccagaacctcttgtgcagctttcaccactaaccccaggtagattgcaccttcatgcctctcctaatggttatacaacttgcccttgcacattgttgtgtactgatttatttaacatctctcttgtacttcctatgagctctttgagtttagtgactgtcttatttatctttgcaacccaagcaattcccacagagcctggcaataacattcaccaacaaatgcttgctggtggattcaatgtgtygatgggtttgaagactgtgacaaggctacgggaggactctatagtacaaccaaagctatatttggataaagccaactgcaaactaatgaaacacccagggtatccctgctagagttccagatggtcatggtgacgtggaatagttacgaccatttcatgaaagatgaggtttaaaagggctacaagcactaaagcaagttttttgtttgtttgtttttgtttttttgccatatatgattcaagagacc

SEQ ID NO: 205710 - DNA, 547 bp, Homo sapiens
cgttaggtaatacatgggtgctggtgaagccaaggacaatttactggaggtttaacagagttcagaggaagtggaaaggcattcagggagcactgtaagagcaaaactaaattgtaaattgtgtggaataatgaggtgagttgaggaacattaggaaatgtggcaaattggggactatggtggtggtctgtggaaaatgtaaatactacatcttcaaaaatgtttacttagtatatagtacatgccagccatgccaggcactgtggtgggtgctggggaatcactggagagcaagatccatgaactttacaatctaggaagcaacattttccattacgaaggcacaacaaagagtaaatgtgatgagagaccaagcatcaagagctatgygagcatcacagaagcatctagcccagcctcagaagagtagtcaaggaagtttttacaaaagctgtgatgcttcagctggacctaaaggaaaattaggaattaggagagaagaggagtattcagggtggaggagggactagcatgtgcaaatgtacag

SEQ ID NO: 205711 - DNA, 537 bp, Homo sapiens
attaagttctacttgtctatttttggttttgttgcaattgcttttggagacttagccaaaaaatgtattgccaaggctgacgtcaggaatagtatttcctcaattgtcttccaggatttttatagtttgaagtcttacatttaaatctgtaatccattttgagttaatttttgtatgtgatgaaaggtagggggtccaactccaatcttctgcatatggctcgccagttattccagcatcatttaccgaataggaaatcctttccccattacttgctttcatcagccttgttgaatataagatggttgttttcaatttaaatgtgacatktctatgtttttttatgtcatagatattgggtttggttttgtttttgctattaattctgcttgatattctctaggattcctggatctgtgcctaggtgcctgttaataaaatgttttcagccattattacttcaactgtttcttctgcattgttctttctttcttattcttctggtatcctgtttaagttgtctcataattcttggat

SEQ ID NO: 205712 - DNA, 576 bp, Homo sapiens
ccaagggacatcctagctccttactatcctagttacctcctctggtctctgtctggtttctcaatctccattttaaaatgtcatgttatgaactagaaacagacttaagaactaaggaatactagaaaattaaaggttttatcaaatgaactctttgcaaagaaagaactggcatcctcagggtacttagggaggttgtttggaagaagcatattttaaatcacgacatgcaagggaagtgaacatcagtgaatgaaaaactatcaggatggctttcctgatagggggaaatgggagggggaagggctgggtggtagaaaattgtactagccaaaacagaaagataaatgtgagagaggagagtgaagcgaaaaaaaggcttagaaaggtccactgtctttatcttggccatttaagttctgagatcatccaggcattacctttcattttggagatgcagagatgacctgtgacttgtaggcagttaaaattacttagggacactttctaggactagaattcagatctcctaatttctagtctagtgtmaaacggtctgaaaattaagttgaaatg

SEQ ID NO: 205713 - DNA, 602 bp, Homo sapiens
tttctgtgtctgtcttgtttcacttagaataatgtccttcagattcatctatgttgtcacaaatggcaaaattttcttctttcttaaagctgaataatgtccctttgtacatatgtaccaatatcccattgtatacatgtttcacagtcttcatccatccatctyttgatgaacacttaaagctgaataatgtccctttgtacatatgtaccaatatcccattgtatacatgtatcacagtcttcatccatccatctcttgatgaacacttaggttgtttccatatcttggctattgtgaataatgttgcaatgatgtgggtgctgatatctctttaagacactgatttcatttcctttggatgtatttctggaagtgggattgtgtattgtatgacagttttatttttcatttatattgaaacctccgtactgtttttgataatttctgtaccaatctatatttccaccaatagtgtgtaatgattccttttctccatacctccaccaacagttatctcttatctttttgatgatagccattttaacaggtacaaaatgacattttttattgcatttatctggtgattggtaatgttgagc

SEQ ID NO: 205714 - DNA, 536 bp, Homo sapiens
aaactaaaagaattttgcacagcaaagaaaacaatcagcaaaataaaaagacaacctagggaatgagggaatatatttgcaaaccatatatctgatgagggcttattagctaaaacatataaagagtgcacaaactcaatagtaaaacaaaaccaaaaaccacaaataacctaattaaaaaatgggcaaaggaactgaagagacattttcccaaagaagatayacatatttttttttaaatttgacctccttttagatttgacctcctgtttatggggtcaaataggccacaataggatagggcaataggatagaacctagctgttggatttactttaagtgtgagcttgatttaatttctggaccaattcttggctttggtgattctgccttatattataactgtgggtaggaggcatgaaaactctagatccctctcattaaatttgtgacataccagtggatgggttcccttcctagttcttttcagaaaagaaaccatacagagaataaataacataatgactaccaatatc

SEQ ID NO: 205715 - DNA, 569 bp, Homo sapiens
cagtagtctcagaagagaaaatatagtgttatttaccttaaaaaggaggtagagagagagagagatcaggtagacataagtgtaagacctcaaactatgaaagtactacaagaaaccattggggaaactctccaggacatcaaactgagcaaagcccaaaagcacaggcaaccaaagtaaaaatggacaaatgggatcccatcatgttaaaaagcttctgtacaacaaaggaaacaatcaactatgtgaagagacaactcatgggatgggagaaaatatttgcaaactagtcatctgacaagggattaataaccataatatatgagaagctcagacaactcaataaaaatctaataatccaattaaaacctggggaaaacatctaaataggcatttcccaaagcagacatacaaayggcaaacaggtatatgaaaagatgatcaacattattaattatcagagaaatgcaaaaaaaactacaataagatgtcatttcacctcagttaaaatgacttatattaaaaagacaggcagtaacaaattctggtaaaaatgtggagaaaagagg

SEQ ID NO: 205716 - DNA, 569 bp, Homo sapiens
cagtagtctcagaagagaaaatatagtgttatttaccttaaaaaggaggtagagagagagagagatcaggtagacataagtgtaagacctcaaactatgaaagtactacaagaaaccattggggaaactctccaggacatcaaactgagcaaagcccaaaagcacaggcaaccaaagtaaaaatggacaaatgggatcccatcatgttaaaaagcttctgtacaacaaaggaaacaatcaactatgtgaagagacaactcatgggatgggagaaaatatttgcaaactagtcatctgacaagggattaataaccataatatatgagaagctcagacaactcaataaaaatctaataatccaattaaaacctggggaaaacatctaaataggcatttcccaaagcagacatacaaatggcaaacaggtatatgaaaagatgatcaacatyattaattatcagagaaatgcaaaaaaaactacaataagatgtcatttcacctcagttaaaatgacttatattaaaaagacaggcagtaacaaattctggtaaaaatgtggagaaaagagg

SEQ ID NO: 205717 - DNA, 445 bp, Homo sapiens
gtaggctagattatgccttcataactaacaacctccatgatttcagaaacttgcaacaatatagatttattttctatgaatgctrtatgtttgccatgggtcagctgtgagttctgttccacattcctcattcctggatccaggttaatgaagcagcctccttcccaaacattgtcatttgccatcacaaaaggaaaaaaaaaaaagcatgcatcaaattgtgcacttgctctcaaacctttgtaatgagcttaactggcaaaagcaaatttcacagatataaataaatccaaggaagtggagaagtaaaatctaaaaatctaattatattccagagaagaataaatagaaataattgtctaatggtagtaataactatcaccttctttctaaatgtgtacctaacctgggctttttaaataaaattactcttcagtttgaaatt

SEQ ID NO: 205718 - DNA, 445 bp, Homo sapiens
gtaggctagattatgccttcataactaacaacctccatgatttcagaaacttgcaacaatatagatttattttctatgaatgctatatgtttgccatgggtcagctgtgagttctgttccacattcctcattcctggatccaggttaatgaagcagcctccttcccaaacattgtcatttgccatcacaaaaggraaaaaaaaaaagcatgcatcaaattgtgcacttgctctcaaacctttgtaatgagcttaactggcaaaagcaaatttcacagatataaataaatccaaggaagtggagaagtaaaatctaaaaatctaattatattccagagaagaataaatagaaataattgtctaatggtagtaataactatcaccttctttctaaatgtgtacctaacctgggctttttaaataaaattactcttcagtttgaaatt

SEQ ID NO: 205719 - DNA, 402 bp, Homo sapiens
tcttaaaaaggtatttgccatcctaggcttttctttttatagtatcacagaatgttagtgtagaaggtattctaatagaactagattttccacttacaatgcctgcattgtcctatcaaggtaaacaagccaaaaaaggagatttctagcccagactatgggggraaagggagttcagagttcagaatcccctcctagtcagaacctgcagatcctttcagcattctcctgcccaaaactttatttttaaaataaaatatattgagcatctttaaagagctaaagacactttaaagtaatagacactttaaagagatgcagtaagattcttattcttatgtcataggtaaagagactaaggctcagagagggatgctttgtcaaggaagtaaggagaggcag

SEQ ID NO: 205720 - DNA, 585 bp, Homo sapiens
gctttgccatgctattttgttgagttccacccagtctgaacttgcaggcctccttagcgctgtcaggggaaaacagtgtactcaagcatcagtaatggtggatgcccctccccccaccatgctcgattgtcccaggtcaacttcagactgctgtgctggcagtgagaatttcaagcaagtggtccttagcttgctggcctctgtgggagtgagacctgctgagtgagaccacttggctccctggcttcagccctccttcccaggggagtgaattgttctgtcttgctggagttccaggcaccattggggtacggaaacaaacaaacaaacaaatgaacaaagaaaaaaaagattgcagctatgttggtgtctgcccgaacagctgctcaattttgggcttgaaacccagggccctggtggtggaggcacactaggaaatctccyggtctgcagattgcaaaaacagtgggaaaatcatagtatctgggctggatagcacagtccctcacagcttcccttggctgggaaagggaggccacctgcaccttgcacttcttgggtgaggtgatgccccaccctgcttct

SEQ ID NO: 205721 - DNA, 533 bp, Homo sapiens
tggggttgctttcgctggcagtaaccatatgctggtggctgaggagtgagcccttcacttctgcttcaggtatttcttggcatttctctgttgaatttcagtgttatcttgtaggtgacgtagttaaaatgtaattttctattccctattttgttctttcttagtagagraggtgagtacaagatgcttgtagtcagccatcttgatgccccttctcatgttatttattaattacttctacattatctgcttcttaatttgaaactgtgtgtataaaagcacttggtaccagctcatgtattattgaaaccaagaaattggattttgtactacagactgtggccctcacgctcaccttggagaagcgtactttgcggactctttcagagattggcagccttgagtatccttctactgtacttcctcctgtgtgcctgtagtccttccatcttttttgttgttcagagtttcagctctctcctactttcattaaagaagaaacttgtgtttttgcatgtcatttttgcatttgg

SEQ ID NO: 205722 - DNA, 649 bp, Homo sapiens
tgctagggtgggcattaacagaataccacaactggatggcttagaccccagaggccacaagtccaaaatcaaggtgtctgctggcttggtttctcctgagacctctcttcctggcttttagaaggccaycttctctctgtgtcttcacattgtcttttctctgcacacatgcagtacacaggtgtctggtgtccaaatttccttttataaggacaccagtcagatttgactagggtccaccctgagggcttcattttaactcgcttacctctacaaaggctctgtcttcaaatacagttacattctaaggtattgggagttaagatttcaacatatgaatttggagggcacaattcagccatatcaggtttcagtgaaatttagaatgtagagaaatggttcttcctttttccttctctctccatgatacagacgggcatttgaagtcaagtgtttggtaacttctctggcccccccaacggacacccatcactgagaattcctatgcacctctgaaagctaggcatgggttactcctgtgttggttgtggcttcctctttccagagacacccacagacgccacactaaatgctgtttgtggagccattatattcagcacacatatgcagacacacaagaaccctccac

SEQ ID NO: 205723 - DNA, 627 bp, Homo sapiens
ggacattgaagactgtgagctctgcagccacacttgatgagtgcacatcctgactctgcctaacttcttagctgtgtggccttgggtgaactacttaacttctctgtaccttacttcccttgtctccaacatatatttgacaaaaatagtacatatttcaaagtgttcttgtgagggcttaatgagttagcacacacacaaaaaatacttagaacaaagtagggtatataggaaacgatcaataaaaactagctcttattactgttatttaactgccatggtgggtgggcaggtctctatgatactcaataaatatatgtgaagcaaatgcattattattacaacattaattttccacattttcatgttcattcagtcattacatatatttcacttaatccaccaaaaagatagcactgttcatcccattttgtatatgagcaaaccgataacaagaaagtttaagaaatttgaccaaagttacacaactaatgtgcagagtaacttaagatctctctctctctctctccctctctctctctctctgtatctctctctcttcactttattaccttgtcttgtaattagtactgtctccaaactcccyatcccttccgctccaaaaca

SEQ ID NO: 205724 - DNA, 452 bp, Homo sapiens
acacacaactaaaagtccatgaaaatgttccaataaaattatttatgaaagcaaacactgggatgcatttgacccacttaccaaaccctgcttcatacacatttctgagtttaatcttcatgatatccccacacatttgtcatgttgattcctgttttaagatctggaaatggactctatgsaccaaattagggtcagcatgtttcagagaggaagaaaatggtaggaacatcagtcttgggaatgggaattctttttattgttggaggatgtttcatgcctgggcttcctgctgtcctccctctattcacattagcctgcatatctgcatagtagtttatggtagattcaaagccctttaatagacgaccagacaatgagttttaaggtgcttcctagaagatgacaacaatgatgttgttacttactgttacttgtttggctcacaagtt

SEQ ID NO: 205725 - DNA, 493 bp, Homo sapiens
tgcctactgtttccttctaagtccttaccaaaccacagtgcatgcatgtgtcaagggcctccctacacctatcaccaattccaccaccccacccctaaaacacatttatgtttttaggagttgagactcttgctctatttctgggtgactttcaataataccattaataagatatatctgaatagttctactaaaaagtacaatctttttttagctaamattaactccataacttttaaaaagtgtggataagttcaggtcctgacataaatctaaagcaatgtttgaatacaagtgaaagctggttatgttagagtgtatcaaatagttccattcattaatgggacatttatttagtgcctcttatgtgtcaggcactagggataaaacatttttaaaaggctctattgcttcgcctctgaactaactttactgctgattattacacttagagttgctttgtctttcctagagtgactttataagctacttc

SEQ ID NO: 205726 - DNA, 562 bp, Homo sapiens
tgtctgtctggcacaaagtctaccttaggtagaacatgaaacattatatgtttagatattttcagctatgcaaaggatcctattccaaaagaagaatacaacaattagaaagtcatatcccctttcttggaactaaaagcactttgaataatgtttgaaatttgtaattttcagtcatacctgaattttatttatattttttcatagttgcattctatttttgcctgtcacatccaaaataaagaaatgtttactacttctgtttgtcttattactctaagatatgtagtgttttattgactcacattcttttacatttagatttaacatctttaaatgtggatgcaaattaaaactgctggcaggmtgggtgccatggctcacacccgcaatttcagcaccatgggaggccgagatggaggattgcttgagcccaagaggttaaggatgcagtgaactgtgattgtgccactgcattccagcctgggcaacaaagtgtcccccgtctaaaaaaagttaaaaaaaaaaataaaattgatggcgtgtgattatttaattggca

SEQ ID NO: 205727 - DNA, 526 bp, Homo sapiens
agaagtgataatatcaattcaaaagagtgaagagactaacagaagaggacacaagagaacctgtaagtatgtatgagagagagcatgcatataagggagaagaatgcagggaggtacgatgtatgaatgtcaagtcagcaaattcattctccactaaatataaaaatccttttatgtagtccctgactcaaatttcagtaaaatttcacttagaaacgttttttaaaattttaatatggcacaattattgaaataataattaaatgaattaccttgggacctagcaatccaggttgatcagagaggacagtagccaattccttcagtgcagatcttaaaaacttgcgtctttctctgtgcattgaaccactayggggaaagacaccataatagtttatctgcttctactaaaattattattggcaattaaagtaactagcattataggtgcaacttccaaagtctttttttaggaagccaaagttcctataaaaatcatcttctatgtgtctatcgttaagtgagt

SEQ ID NO: 205728 - DNA, 628 bp, Homo sapiens
ccctcactccttggctcatggctctccatcttccatcttcagatatagcaatggcagatcaagtcctttgttatgcttcatatatctctaactttacttttctgccttctgctggtgrttagagctcattcgattttatcaggcccatgaggataatctgagatagttccttattctaaagtcagctgagtagtaaccctaagttcatctgccaagttccttcacggcagtacctggattggttgattggattaccaatcagtcaaaccaggggacagaaatcttggaggcctctttaggctgggcgcagtggttcatgccagtaatcccagcactttaggaggctgaggagtgcagctcacttgaggccaggagtttgagaccaggctggccaatatggggaaaccctgtctctagtaaaaatataaaaattagccaggcatggtggtgcacgcttgtaatcccagctacttgggaggctgaggtgggaggatcacttgaacctgggaggcagaggttggagtgagctgagatcgagccactgcactccagcctgggtgatagagcgagactttgtctccaaaaaaaagaaatcttggaggcctttttagaagtctgtctactgtgt

SEQ ID NO: 205729 - DNA, 628 bp, Homo sapiens
ccctcactccttggctcatggctctccatcttccatcttcagatatagcaatggcagatcaagtcctttgttatgcttcatatatctctaactttacttttctgccttctgctggtggttagagctcattcgattttatcaggcccatgaggataatctgagatagttccttattctaaagtcagctgagtagtraccctaagttcatctgccaagttccttcacggcagtacctggattggttgattggattaccaatcagtcaaaccaggggacagaaatcttggaggcctctttaggctgggcgcagtggttcatgccagtaatcccagcactttaggaggctgaggagtgcagctcacttgaggccaggagtttgagaccaggctggccaatatggggaaaccctgtctctagtaaaaatataaaaattagccaggcatggtggtgcacgcttgtaatcccagctacttgggaggctgaggtgggaggatcacttgaacctgggaggcagaggttggagtgagctgagatcgagccactgcactccagcctgggtgatagagcgagactttgtctccaaaaaaaagaaatcttggaggcctttttagaagtctgtctactgtgt

SEQ ID NO: 205730 - DNA, 603 bp, Homo sapiens
cttccatcttcagatatagcaatggcagatcaagtcctttgttatgcttcatatatctctaactttacttttctgccttctgctggtggttagagctcattcgattttatcaggcccatgaggataatctgagatagttccttattctaaagtcagctgagtagtaaccctaagttcatctgccaagttccttcacggcagtacctggattggttgattggattaccaatcagtcaaaccaggggacagaaatcttggaggcctctttaggctgggcrcagtggttcatgccagtaatcccagcactttaggaggctgaggagtgcagctcacttgaggccaggagtttgagaccaggctggccaatatggggaaaccctgtctctagtaaaaatataaaaattagccaggcatggtggtgcacgcttgtaatcccagctacttgggaggctgaggtgggaggatcacttgaacctgggaggcagaggttggagtgagctgagatcgagccactgcactccagcctgggtgatagagcgagactttgtctccaaaaaaaagaaatcttggaggcctttttagaagtctgtctactgtgtatgt

SEQ ID NO: 205731 - DNA, 603 bp, Homo sapiens
cttccatcttcagatatagcaatggcagatcaagtcctttgttatgcttcatatatctctaactttacttttctgccttctgctggtggttagagctcattcgattttatcaggcccatgaggataatctgagatagttccttattctaaagtcagctgagtagtaaccctaagttcatctgccaagttccttcacggcagtacctggattggttgattggattaccaatcagtcaaaccaggggacagaaatcttggaggcctctttaggctgggcgcagtggttcatgccagtaatcccagcactttaggaggctgaggagtgcagctcacttgaggccaggagtttgagaccaggctggccaatatggggaaaccctgtctctagtaaaaatataaaaattagccaggcatggtggtgcacgcttgtaatcccagctacttgggaggctgaggtgggaggatcacttgaacctgggaggcagaggttggagtgagctgagatcgagccactgcactccagcctgggtgayagagcgagactttgtctccaaaaaaaagaaatcttggaggcctttttagaagtctgtctactgtgtatgt

SEQ ID NO: 205732 - DNA, 573 bp, Homo sapiens
aggtgcattaaaagagcttgaagcaaaaaaagttaaataaatgataaagtcagtcatgttataattagataaaatctaactatatacagtgtattattctgttctcaggctgctaatgaagatatacccaagactgggtaatttataaagaaaagagttttaattgactcacagttccatatagctgaggaggcctcacaatcatggtggaaggcaaatgaggagcaaagtcacaccttacatggcattaarcacaagaatgtgcaggggaattcctttataaaaccatcagatcttgtgagacttattcactatcacaagaacagcatgggaaagaaccacttccatgatttaattacctcccaccaggtccctcccatggcacatggaaattatgagagctacatctgagatgagatttgggtggggacacaagagtcaaaccatatcagacactaatacaagtaaaagacaatagaaaatatcaagcgcaaaacttgaataaatttttaaaatatgttagaggcaagatggctgactagacacagccactgaagaactggaatattggga

SEQ ID NO: 205733 - DNA, 540 bp, Homo sapiens
taggtggggagaaaaagctgtgagcagatctctgggatgcccacttgccatggtcagtggagcagatttgatgatctgagagtggtaagatccgtctctccccacggtgcacactgcctcctgtccttacttctggttcctgctgtgatagaatgcaagcagacagtaggagaaaagatgggaacttctcacttattattgcagtagacttccctttggtacmcaatgaaatatgtttggctcgtgttccatttttcttagttcaccctgaaccttttattttgaaaaatactcctttaaattttagggagctggatggaccttttctactttccagtgatgatagcagatgcctttttatactgattgagttatttcaaagtgaaatttagatatctaagagagtcgagtgtcttgtcccagaagcaccactctttacacttgatttttaaaaggattttaaatagaaatatttataaagaatttgtgagctcatgggaatggaagcaataataaaagtagggagcagggaaataaatc

SEQ ID NO: 205734 - DNA, 594 bp, Homo sapiens
actcgactcagtttcaaatatccgctgccaagatgatgttcattgttgtccatcattgcttggcaagtgatgacgaagagataaatatcatcaaccctaatatactcaaaaagtttgtaataacctatttatagattacatataaaagaatgttkagtaaaaaggggaggaaagcctttgacaagaatgttttttaacttacaaatgtgggtgtgaaagaaaatatcacattattttattttctatgaatcaacgttttatttcaagtccctactccttcaaaatagtgagaaatcctaccacggagagcattgtcccgcttcccttaatagctgtgagattcagagtattgaaatattgggagtgggagatacagaactacttgtaggagagagacccccattgattattatgaggacatgcaatatcctttatctatactatatgccttcttaaaaaatcttacagtgttgtcttctaacaattcatttcatcccccaaatggaggttctgttaacatttttcttgcatgcagtgcaaacctagatatttttggtgaaaattcctccaggatatccaaatcataggtagttg

SEQ ID NO: 205735 - DNA, 570 bp, Homo sapiens
tccatgtgtttgcatagttttgagagttccttttggagttgatttccaattgtatttcactgtggtctgaaagagcacttgatataatttcaattttcttaaatttattgagacttgttttgtggcctgtaatgtggcctatcttggagaatgttccatgagctgataaayacagtgtatattctgcaggtgtttggtagaatgttatgtaaatatctgttcagtccatttgttctaaggtatagtttaagtccactgtttctttgttgaatttctatcttgatgacctgtctaatgacatccgtagagtattgaagtcccccactattattgtgttgctatcgtatttcttgtctagtagtaatagttttataattgaggagatccagtgttaggtgcatatatatttaggattgtgatatcttcctgttggataattccttttattattttataatgttcctctctgctctttaaactgctgttgctttaaagtttattttgtttgatagaagaatagctattcctgccctcttttggtgtccatttgcatggaatgtctttttccac

SEQ ID NO: 205736 - DNA, 579 bp, Homo sapiens
tatttgtcatcatttgaatacattttatttttaaccaacttggatctctcagactctgagaaatttatyaatataaacatttctgtcatatgtttctcatatttcttacatttttatctttgtattttggtgatttttaatttggatgatatagttttgggacatgtaaagttaaatatgtataactttattggagtaaaaatttacccccaatattttgcttactattttaaattcaattttttgagattaatattagttacctttctttctttttcttgtatagcatacctaacaaatgtttggcttttttgcctatttaattttgatttgagtgtgttgatttaagtttaagtaataacatattgtaatttctgtttcaagatagtgagctgagcacatgcttcactcttaccttcctgtaacaaatatctagaaacaatataatatttaaacaacaggaaaacaaaaaacaaataggctctttcccaggaccagatgttgtgacaaggtcccaaaagttagaaaacagataaaatttacaaggtaagcctcagccaaggacacacatagaaaatt

SEQ ID NO: 205737 - DNA, 529 bp, Homo sapiens
cttgtgcagggagactcccattattcaaaatcatcagatccggtgagacttattcactatcataagaacagcatgggaaagatgtgcccccatgattcrattacctcctaccaggtcccttccacaacatgtgggaatttaaggtgagatttggttggggacacagccaaaccatattaatggagataactaactagacctacatgtcaatattaacattaaaaatacctactatttattctgcatttacaatgtgtagttactgttctaaatattccacttatgctcacatatttaatcctcataaaaaccttatgtggtcagcactgtcattaatcccatttaaagacacaaggagcttaaataatgtgctatatttcatctagctaatatgtgaccaagataggatttgaattcaaatagtctagttccaaagtccaaggtttaaaccatgatgcttcacttccttcaaactccaaggtaactactacatacaaaactaaattgacatatgatcgaagtgacaggt

SEQ ID NO: 205738 - DNA, 608 bp, Homo sapiens
aaataaaatttcaagtgaaggataatttcaattttagagaaagtatttatgaaacatggaaaattatgggaagttacatacttttattttataatgctcacatttatctgatgaaaaactgaatgaaaacagcatagagtagaaaactcatggtcaattttacacctgagcaatatattaaggtataagcaaactaaaatatttctgtttgagagtgtgtgtgtgtgtgtgtgtgtgtgtgtgtgtgtgtgtgtatgctttacaaatatggctgaatactcacactcagtaagacctataatattgatctgaaatcttcggtcatgtaagctcagggaagtatttctctaccataggtttaattactggttttgatcattaaaaacaccaattatctttagttcaactagcatttgctgtccttactttaatgccttttttctttatgtgctttaggaaattatctgtattttttttctgcatgttactgattacatttcctagagtattattatatttcctgcttgcattacaygtttattttgcaaattttgcatttactcatttcttttcttattacgtgtagctttttaaaaaatctctatttt

SEQ ID NO: 205739 - DNA, 569 bp, Homo sapiens
aatcacttttttcacacattcagataccaggtattattaacggcattcagcacatttcctctatgctttggtgaatccaggagagatgaggtgactacatttaatggtatgagcttgagtacatgcttttggttccctggagtactaaacatctaatctcattaattttttcttatgttgtatacaaaggtgttgactgtgcatttcacaatatttaattaaagttcttagacctttcttttttaacatttctaccaaaagatatttcaatacatatgggaaggcaagtagaaatcacacagttggcaagtaaagaagccagaggttggtgttaaaattgaagccttataacccagtgtcccaaaacttttcataaccttctgatttaaaccgtattagccatgcccacttgacctatgactttctaaaatttctctagtcttcctttacagaacaactagatattatcaccacattgttgaaggcgtacatttttaaaamaatatatatagtgtcctgtgaaagcttgatgacatttctggaaaaagacataacatttttaaagaaat

SEQ ID NO: 205740 - DNA, 374 bp, Homo sapiens
tttattaataatgctggttgtagaacaaagataaagttataattcctgttaaactattttcaaggattgttatctatcattaaaatgatgtaatgataaatttatttaaataggcagtatcctctttgatccaaacagctttccatatagaaataactcatatggagaaatatgtatygacagattcctttcaatcctagtattcaatgctcctaaagctattatgtcaactaggaggcattttagtagatataaagttcataagactgtcaaattggttctccacatctgagaaatctgcatgcattttaatagagagttaatatattaagacattccaatttgttctttccaggaagttggattaaatgaag

SEQ ID NO: 205741 - DNA, 595 bp, Homo sapiens
ttatttttaatatatcaagtaattcagaaattaagcctttgatgttacagaaaaatgttataatgtttaatgccaagaagagtatctgaaaatgaaaatatataatatttcagaatttatttcaccaatgaaatcactgggcagcatatttccatataactttatgtataatgtataaagcaagctttgacatttttttaggtagttaatatcaaaagagaaactataaaattttgtctgcagctgtctatggaatctcattgataagtgataatgaagtcccaagccctgtattttctctaatttttaaaaaatggatatactggaaaatacatttaaagagatcttttggagtagccaaaatggtattaaatacatgtttttcagaattgttttaattgatcacaacttctatggaaccctttaaagttgctttttgaggcaaattttgagtaactagattgtcagtgtcctctttcatttacctaagttggcattaaataatgtttgkctgttttaaaagaacaatttactctcataaaagaaactattggtctgaggtactcaaaataatatactacaaattccgaaagag

SEQ ID NO: 205742 - DNA, 618 bp, Homo sapiens
tgctcccacaatacatgacctcccccagtatcaacatcctccactagagtggtacatttgttacaattcatgaacctacattgttacatcattatcacccaaagtccatagtttacacgaggatatactcttggtttcatacattctctgggtttggataaatgtataacgacatgtatccatcattatattatcatacagaatagtttcacttccctaaaaatactctgtgcttcatctgttaattttttcctcccctccactaattcctggcaaccactaacatttttactrtctccatagttttgcctcttgcagaatgccatattgttagaatcatatagtatattgcctttctttcacttagtaacgtgtttatattgcctccatttttatggcttgataggtcatttctgtttagtgttgaataatatgctattatctggatatactagtttatccattcagctatcaatggacatcttagttgcttcaaatttttggcaagtaagaataaagctgctataagcatccatgtgaaggattttttgtgtggacctaagttttcaacatctttgggtaaacaccaaggggccccattgctgggttatatggtaa

SEQ ID NO: 205743 - DNA, 583 bp, Homo sapiens
catttttaaaccgattttttgaatgtttgtcctagtattgaattgacattaaactctattacttatatctgttcatctcatagaaaacagaatactataagcattgtgtacatgaacctcaagcttttttttttaatttgtgaattctaattctgtttttgaagatcacaaaataaatattttgtttaccatatgacaggtcttcactggctctaatrtgtccacaatttttttttcaggatatacatcctcggaaaagcaaaatatgaataattttataagttttcatttttggtagtatagaattatttatgtcactctatctctatccctgaaaacaactaaaaaaaacaaggttaatacgatatttatagcaactttattcataattaccaaaacttggtagcaaccaaaatgtctttcagtgggtgagtggaaaaataaattgtggtatgtctagacaatggaacgttatgcagtgctgaaagaaatgagctatcaagcacgaaaacacacagaggaaacttacatgcatatgattaagtgaaagaagtcaatctctaaaggcaacatactttaccat

SEQ ID NO: 205744 - DNA, 583 bp, Homo sapiens
catttttaaaccgattttttgaatgtttgtcctagtattgaattgacattaaactctattacttatatctgttcatctcatagaaaacagaatactataagcattgtgtacatgaacctcaagcttttttttttaatttgtgaattctaattctgtttttgaagatcacaaaataaatattttgtttaccatatgacaggtcttcactggctctaatgtgtccacaatttttttttcaggatatacatcctyggaaaagcaaaatatgaataattttataagttttcatttttggtagtatagaattatttatgtcactctatctctatccctgaaaacaactaaaaaaaacaaggttaatacgatatttatagcaactttattcataattaccaaaacttggtagcaaccaaaatgtctttcagtgggtgagtggaaaaataaattgtggtatgtctagacaatggaacgttatgcagtgctgaaagaaatgagctatcaagcacgaaaacacacagaggaaacttacatgcatatgattaagtgaaagaagtcaatctctaaaggcaacatactttaccat

SEQ ID NO: 205745 - DNA, 621 bp, Homo sapiens
ttacatagatggctaatacttcattaatcaaataagctgctttattataaaacatatgtggaaatcaattacaggaatgttttccatacttacttgagaaaagtaggtgaacgttagttgtattagtcttaataccaattataacaaatgacaatacttttagtgtgttattggaccttggaaatttctcattgygaaatgattatttttgcttatggatattgttggcaaataaagtgtattgatttatgtttcctattgtaactgtgctactttaaggatactctacttgagagagtaactcttagttactggtctcctttctttttctctgaaaagcttgatgattcttctcattagctgagtgacaatgatattaagaagaccggaaaatctaatgttgatagacattcataacacttatattctgacatgtgtataatcaccttgctaatcattacaagttttctttcctatttctgtataagttgcatatgtgtgtatatttattttcttctgagtcaccccagggtcaattgcctgtttttactttcctacagggaagtgtatgttcacagcagaagtattattacagttggactaaaaaacctattgttagtg

SEQ ID NO: 205746 - DNA, 336 bp, Homo sapiens
gaggaggatgcgaaggaggttttgacctggggaaaagggcagcaatgaggtgtggctgtagctaataagggaactgggcaggtggggataattaaaaaagagtgcataaaagaatgttttctaagttggcaacagagttggggagttttaagaggtttagaagcctggccrtcaatacccatgacagttatggtggcaagggaaacaggcccttgaaaagaaggtaatgtggagtgggtagcctctgtattgactaagaaggggatggacttaccctccactgtgagagttacccagagcatctgtgatggtcctgtaggcttccgaggtgattgg

SEQ ID NO: 205747 - DNA, 500 bp, Homo sapiens
tgtggctgattgccaaaagtgagattaactctccactcaaaactgtgtgataagttgagactggtgacatgacaatcaccagtaggctgtgaaaagagttattacctatataggrggattttctgggtaaagtaggacaggctcaagacagtttaggtaacttgagggaagcagagagagtgagttaatttttagtatggctaagaggtgggaatgggaagatttcatgcctgtgcaaatgggtctgagcttcagtgatatgaatgttctgctagtaccatggaagcaggtatgtaaactttttaattggcttggctagatgtaggacaaaagaggaagggggaggataggcttgtaagctgtcagtagtgaaacatcaaaaatggagtctttctctttattatagccatatctatctccattccactaattctatgttgcatttcattattatttggtaacgtattttctaatttcctatgtatttcttttttgaccta

SEQ ID NO: 205748 - DNA, 580 bp, Homo sapiens
aatgggtgcagcacactagcatggcacatgtatacatatgtaactaacctgcacattgtgcacatgtaccctaaaacttaaagcataataataattaaaaaaaaaaaaaagaatttagggagagcctgagataggcactatttcaaacagtttggtcatatttgattcttctcagaatcaaaacacactttttcatgagtactttacaaaaatattgcaaatacatagaaatactttgtaagaattggyccaatatgaatgcttcaaaaacataggtaattttagtgttaatctgcaatgagaatgcaatttaatgataaccatttaaataaatatatcaataaaataaaatgtatatgttgcaaacagaatattctatctgaaaaaaaaagaaatattcatatcttcttacctcaagaccatactcctaaaatcctaacaatgttttttattgctccagaagttgaacatggcctaaaacacttttcttggtctagtccttggctaacagtcaagtatcatactttcacatgctctcccctttgtgctttctatgtctattaaatattgtttgggagag

SEQ ID NO: 205749 - DNA, 563 bp, Homo sapiens
ggtttggttggccaaggtgtgagcaggtacctggagaagtaatagaagaccaggagggaaggaagggcaatatgtaactatccttggatagcttaattaaagaaggaaaggacgtttattgcccagactcatggagaagataattcaggtataaataacacagagtgcaaagtctctgagtcaaaaatgtttattattttacacaaacagaactgaggccagtgttgcttgatcttargaactcagttgattttatgagggcatttgaaagaagcaggtaggagccagatggtaaaggaccttgtgggccatgataaaaatcttcagaatatattcagagtgcaatgggagctatggaaatattttaagcaggggaatgaggtcttccaattcacattttaacacattttcactggctcctatgtagagaacggattttgagaaataaggatggaacacagaggaaccactggcagcttataagatgtgtaagattgtaagaatccagctgagagatggtgtagacttgacataacacacagctgcaaagacacagaatttat

SEQ ID NO: 205750 - DNA, 561 bp, Homo sapiens
caatcttcaggtttgatgtttggactttttgaagtgtttgatgcaagtcaatgtttccatctgcttgaaaggagagacttgttttagatgctaatctggctatgttcaaataaaacatgggtggagaatctgtatgtgttttgagtgtggttactagtttcccattcacttgaaaattactaccagtgtccaagtttgttgtactactcaatctttcatkaaaatttcctgtagtgctggctcagaattgacatttagttaacaaaatttgtggagtcattgtattatgggcacaatgttccagccatcagagagctcttttgtgggcacagtgtaaatataccctctttaatctatgatgtgattaatgaccaggctttgcatttcattgttgctttgcatcactatcaagaaaaataaagcattcacattactttccaaaggtcacagaaaagaagttattttcttgttaagataaactttaataaacatattttaagcttgcttatctcagaatatttatggtatagaattttagaacagtcacaaacagaaatttca

SEQ ID NO: 205751 - DNA, 579 bp, Homo sapiens
tcagctgtccctgcctagcggtcaaacacctccctatgaaatgtgggcgaaattagtgtctattattctagagaagctatagaaactttttaacagtcttatagaaaagcctaaaatactctatttttcctaagacacttgcagtatggttgtgaatacaaagctaatactctagaaatatttgcaagatttttatggatcggaagagacttaagggtcaataatttcattccttagctgaactgatgaatatttactaagkgtctaatatttggaaagtgctgggctagggcttaaataaaactgaaaccaaatgcagatatcattacagtcactacttgaatctctctgatttgggagaatttactacaccttcaaaagtcccattttcattgtttttgtaaatcttggggtctccatgttattttaaataaatatgccttcctggcagagcaatatcagtctttaaagaatggaataaattacagaattccaatgttgaagacaggcttacagttccttccatcattctgactttctatcatttgctcttagttccttttatgacattgttaccag

SEQ ID NO: 205752 - DNA, 499 bp, Homo sapiens
gttgatctgagtgattggcgcctgcattcactcgcccattcattcacctcctgtgcttgtcaccaggctacaaaaacgaagccaccacccctctctggtgccaaaatgtcagtttggggaaagctggagctcccttctgagagccaaatttatttttttttatggaagagattcccctgtaaattctgggaaagtttgagagaaagctccaggagtagtgacraagcaaaaggactgggtgaacagaaggggcatcggagattgtcctgtctgcctgcagccagctggggaacagagaaggtgagtggggacagagcccacaggtcctgcaggtgtccaggaaccaaccagtgatgagcagtaaccaatttgggattcctgtcccagactgtagcacactctttggcacaggattttgtcatggggtgtgtcaccctcaacgaaaggaggtttgcatcggtatagcctgtgtttggtgccctgatgactgaaagaattc

SEQ ID NO: 205753 - DNA, 593 bp, Homo sapiens
aacaaagatctggaactatggcaacaaaccaacgttgctgttctagcctgagctgcctgttttaggcaaatgggaatgcttttggaaacaatatgaaccgcaacgggtatttctgcaagtttctaagactggcaggagtcagctcgggggaagcaggaagaatccccagttggttggctattcttgggaccgaagagataatccccattgaacagagcctacactcacatccttgagtccgtgatgttcttcgcttccctgggaacagccagagtccagctttccgtgtggattgctttcacagggatatctggcccttcaagccagtggtgtgaatgtcaccccaagaaccttgacgtgtagatactgcctacttcaagtcatactgcagctctgcctcttcccaagataggatttgaagcagcttccaacagaaaatggatgtgaaaatgtattgtgaacacatgcataggaccatacatacatcatacacacacacatacacacacacttaaacatacacatgcacatrtacacacacacacacagctatgggcacaacttcatttcaacttgtagattgtgaagtaaag

SEQ ID NO: 205754 - DNA, 618 bp, Homo sapiens
ttttacataatctccttgtcttyctatttgcctgcaaatcccacctcagactgtcacctgctctatgaaacatttccagccacctgatattctcatcaggttacaatagataataactgcatgttcctccgtacaattcttttcttttttctttctttttttgaaacggagtctccctctgtcgcccaggctggagtgcagtggcgtgatctcggctcactgcaagctccgcctcccgggttcacgccattctcctgcctcagccgcccgagtagctgggactacaggtgcccgccaccacgcctggctaatattttttgtatttttagtagagacggggtttcactgtgttaaccaggatggtctcgatctcctgacctcgtgatccgcccgccttggcctcccaaagtgctgggattacaggcgtgagccaccgcgcctggccacaattctgtcacgcatccagccagccagcaacacattttgggggtcgtattaggctgttcttacattgctataaagaaatacttgagactgggtaatttataaagacgatagatttgattggctcacgattgttcaggccttaccagaagcatggtggagcatccgcttggc

SEQ ID NO: 205755 - DNA, 618 bp, Homo sapiens
ttttacataatctccttgtctttctatttgcctgcaaatcccacctcagactgtcacctgctctatgaaacatttccagccacctgatattctcatcaggttacaatagataataactgcatgytcctccgtacaattcttttcttttttctttctttttttgaaacggagtctccctctgtcgcccaggctggagtgcagtggcgtgatctcggctcactgcaagctccgcctcccgggttcacgccattctcctgcctcagccgcccgagtagctgggactacaggtgcccgccaccacgcctggctaatattttttgtatttttagtagagacggggtttcactgtgttaaccaggatggtctcgatctcctgacctcgtgatccgcccgccttggcctcccaaagtgctgggattacaggcgtgagccaccgcgcctggccacaattctgtcacgcatccagccagccagcaacacattttgggggtcgtattaggctgttcttacattgctataaagaaatacttgagactgggtaatttataaagacgatagatttgattggctcacgattgttcaggccttaccagaagcatggtggagcatccgcttggc

SEQ ID NO: 205756 - DNA, 542 bp, Homo sapiens
caaatatgatactgtttatcaaatccattgacatatttaatgaggtatgccagtgttgattattacaggggataggaagaatatatttgagtatcaactgtgcgcaaaggatctatatcctacaaggtttcatacaggttcatgttcatgttcagtaatcctagacccaccgtgcaggtctggtgttatttccatttgaaacataagccaaaagctcacaccaggaagaaaactaggaaatctgactcaaacttcgagttaatttttatattctctgtttgaatgccgctaattcacagattacatgaaaactatcagcaatagcagcttctagagtatagccctacatttgtctctctctctttttttttttkttttttgttttttgagatggagtttcgctctgtcccccaggctggagtgcaaaggtgtgatctccatccactgcaaactccgcctcccaaatcaagtgattcccgtgcctcagcctccacaatagttgagactaccgacgtgtgtcaccacgcccggctagttttttg

SEQ ID NO: 205757 - DNA, 610 bp, Homo sapiens
tttgggtatgttttcagcaatacctgactctactggtaccartttactcatagtccaacatatagagctgattttccttgatatgttaatatattttatttcagcttttaatataatctggacacctttttttcattgaagagctaattttgtatctttaatttttcttattatgacataagcttttcaaatttattataaactctttatagaggtcaatgcagtttatcatgtggtggtacatctcccctctgcttgagaacattaaacgatattgagggggcttttggttgtaacagtgattgagggtccactggcatttagcaccaggagctcaggaatgctaaacttcttgcaatgtgcaagacagtcttgaaatttaaaactaattgctctacccaagtacattaatatctcaattgagaatactgaatgtggactattattatgattttataatgaatcccttgctagtgagaaggctaaatggcacagccactttgaaaacagtttgtccttgtcgcactaaagctaaacatagttttaccatacaataaagcaatttcacttccaggaatttactcaactgattgaaaaacttacactgaca

SEQ ID NO: 205758 - DNA, 545 bp, Homo sapiens
tctctgattcccaaatgtatttctttttaatttatyttttatatttaacttttatattttaacatttttaaatctttatgtatatcagtatgtacttatggatatatattcatataagtacatataaataaatgattgaataagcttaaaaaacacagagaagagcgagattttccatgcagaaaagccccaaataatttatgttgatcctctccctcaaggtggtaaagcataactccctgctccttaagcctggacttgtacttagtgacttcatttccaacagtacagtatggaaaaaagaaaacagagttactttagtgaggaatctcgaccaacactatttcagctaagtgagcaaggtcaacatcaagagtgagcagtcatggtgacagcaggcatcgttcatacgatatgatgagaaggacactttaccttcatggtcttcctccccaaatcacataatgcaagtctaataatgaggaaaatatcaggtaaatcctaattgaaggacattttacaaaataacctgacgagtactgaaa

SEQ ID NO: 205759 - DNA, 496 bp, Homo sapiens
actcaatatttaatttaattttaattttaattttaagttctcaggtacatgtgcaggatgtgcaagtttgtgacataggcaaacatgtgccatggtggtttgctgcacctctcaacccatcacctaggtatgaagcccggtatgcattagctcaataaatgttaaacacctgtacatccataaaactacctcacaaatcaaaacttaggacatttccagcaccccgacagttgctcacagacattccaaaatktacccactaccctggctctttaaccttagattagttttccatagttgtgaatttcacataaatagaatcatatggtatttattcttcattggaggccttgttactctacagtatttctaagattcatccatattgctgcatgtaggagtagtacatagtatttcataattgtatatctttttcagtgagaaaatataaatgatctattctacaggtgatagatattcaggctgtttccactgc

SEQ ID NO: 205760 - DNA, 496 bp, Homo sapiens
actcaatatttaatttaattttaattttaattttaagttctcaggtacatgtgcaggatgtgcaagtttgtgacataggcaaacatgtgccatggtggtttgctgcacctctcaacccatcacctaggtatgaagcccggtatgcattagctcaataaatgttaaacacctgtacatccataaaactacctcacaaatcaaaacttaggacatttccagcaccccgacagttgctcacagacattccaaaattyacccactaccctggctctttaaccttagattagttttccatagttgtgaatttcacataaatagaatcatatggtatttattcttcattggaggccttgttactctacagtatttctaagattcatccatattgctgcatgtaggagtagtacatagtatttcataattgtatatctttttcagtgagaaaatataaatgatctattctacaggtgatagatattcaggctgtttccactgc

SEQ ID NO: 205761 - DNA, 460 bp, Homo sapiens
tatagaagctatacttatacttccatgtctataacagcactattcacaatagccaaaattcaacctaggtgtccacaaatgaatgcatggataacgaaaatatagtacatacacaatagaaaattattcagccatagaaagaatgaaattctgtcattttcagcaacatagttgcaattggagtcattawttaagtgaaatacaccagtcacagaatgacaaatatcacatgttatcactcacttgtaggagctcaaaaagtaaatctcatggaggtaggcagtaaaatggtggctaccaaagactgtgaagggtatgaggcaagtggggcaatgaagagagggtacaaaaatgcagttaaattgaaagaataagttctagtgtttgatatcacagtaggataactataattaataataatttatatttcatagtagctagtagaaaaatttggaatgtt

SEQ ID NO: 205762 - DNA, 597 bp, Homo sapiens
aaaattcaacctaggtgtccacaaatgaatgcatggataacgaaaatatagtacatacacaatagaaaattattcagccatagaaagaatgaaattctgtcattttcagcaacatagttgcaattggagtcattatttaagtgaaatacaccagtcacagaatgacaaatatcacatgttatcactcacttgtaggagctcaaaaagtaaatctcatggaggtaggcagtaaaatggtggctaccaaagactgtgaagggtatgaggcaagtggggcaatgaagagagggtacaaaaatgcasttaaattgaaagaataagttctagtgtttgatatcacagtaggataactataattaataataatttatatttcatagtagctagtagaaaaatttggaatgttcccaagacaaagaaatgatacatatttgaggtgacgaatatcccatttatcctgattgctacacattgtatgcttgtatcataatatcacgtgtactccagaaaaatgtacaatcattacgtatcagttttaaaaattaagaaaaaaatgcagagtagttctatcaccacaggtatctctataattttgtc

SEQ ID NO: 205763 - DNA, 618 bp, Homo sapiens
cacagtcctctcagatatctactgatggagccagctcttcttatcagatatatactgatggagtcagttctttttttctgtccctggagcaatmaacttttcacatagttttgtatagagatatccaagctgaaatttaaaggataggtatgggttagtcataacgaggggaattagtgagggaggggtgacagaaagcatttcaagaaatgaaaatataacatgcacaggaggagaagcaacagtgcatgagggaaaacagaaacaaaacagaatggcagaaggagaaaacagggccacatagtaatgcagaaaaatgggcatcataaatgtacaacatattaaaatgctgacatttaatctaaagtaaatagacatctatggaagcattaaaacatggatggaacatgatcatattttatctaaaatgttattcatggctggatttatgcagacagactgaaatcaggtagaaggctattcccgaagtttaagaaggaaatgctgagtgactaattagagtggtggagagggcatgaaattaacaggatggagtttagaagcagttcagaaatagatgtttcaggcattacagggaaagatggagaagttaaccat

SEQ ID NO: 205764 - DNA, 618 bp, Homo sapiens
cacagtcctctcagatatctactgatggagccagctcttcttatcagatatatactgatggagtcagttctttttttctgtccctggagcaataaacttttcacatagttttgtatagagatatccaagctgaaatttaaaggataggtatgggttagtcataacgaggggaattagtgagggaggggtgacagaaagcatttcaagaaatgaaaatataacatgcacaggaggagaagcaacagtgcatgagggaaaacagaaacaaaacagaatggcagaaggagaaaacagggccacatagtaatgcagaaaaatgggcatcataaatgtacaacatattaaaatgctgacatttaatctaaagtaaatagacatctatggaagcattaaaacatggatggaacatgatcatattttatctaaaatgttattcatggctggatttatgcagacagactgaaatcaggtagaaggctattcccgaagtttaagaaggaaatgctgagtgactaattagagtggtggagagggcatgaaattaacaggatggagtttagargcagttcagaaatagatgtttcaggcattacagggaaagatggagaagttaaccat

SEQ ID NO: 205765 - DNA, 449 bp, Homo sapiens
actctatttaggccacaatatggttgcaaatgtgtaattgcaaaggaaaatagtaggaaaatgatagtgttgcaatagtaccrattacacaaaacagagaaaaaatagaataaaattagtcctttgtattgaattcttggagtagataaaaatatttaataaacaaatgaagaaatgcccaacataaatttctatagagattctgagagtcaatttattacatttcagagcctttagagaatgattagtctttaaacataagctgacttcattttgttttctttttttatttttatttttattttttgaggtggaatctctctttgtcaccaggctggagtgcagtggtgcaatctcagctcactgcaacttccgactccctggttcaagcaattctcctgcctcagcctcccaagtagctgggattacaggtgcatgccaccacaccc

SEQ ID NO: 205766 - DNA, 618 bp, Homo sapiens
gttttggatttcagatttctttaaatttattttggaatatttgcattatatacttctagttcagcatccctaatccaaaaatacaaaaatctgaaatgttgtaatcagcatttctttgagcatcatcttggtgcttgaaaactttcaaattttggagcattttgtatcttagatttttagatttttggattagggatactcaacctatatatcacctttcatttcttcagtactataatgtaaatgaggttaggaacatttttgattttgctcaatgttttgtttaagtgccttcatatttctagacagggagcaagcattcaacaaactgcattcaccactctaagtagtgggcattttatttggaatttttcrgctatgcctgttagcatagatgagcctatttatctcatggccaaaacctagatctgcaaagactcttatatatcaattaatatggccctactttaggcaggtaggtattattatcattccactttaccaggaagaggactgaggcccaaagtgagaggatgatgatcctgctagaaaaatacagatggaagaacatagccaaaagttgctgactcccagtgcagttctttctttatttcacaa

SEQ ID NO: 205767 - DNA, 423 bp, Homo sapiens
gtcctggcaggctcctagaactgaggttcagagtgactgtgtgacccatgaggagatgcactaaacttgaaaaaaactgcgtgagttttctaatttatataaatagaaatctggagaacaggcatgggaatagacattaagggcatgggataattgtggaagtaacatagagttggatcaggctgaatttatttatttgggcccactaagtagggattctgcatttaatgttgcagctcggggagttaaaaaaaaattctaatagtttatttgcttggttagctgaaatatggaattaaagatggcccactgtgaatgagctggaaatgcctggtctctcctgatttaatgtagaggaagrgattctaagtcttagggagattgcgatgctggagtggattagtcattttatacctatttatt

SEQ ID NO: 205768 - DNA, 403 bp, Homo sapiens
actgaggttcagagtgactgtgtgacccatgaggagatgcactaaacttgaaaaaaactgcgtgagttttctaatttatataaatagaaatctggagaacaggcatgggaatagacattaagggcatgggataattgtggaagtaacatagagttggatcaggctgaatttatttatttgggcccactaagtagggattctgcatttaatgttgcagctcggggagttaaaaaaaaattctaatagtttatttgcttggttagctgaaatatggaattaaagatggcccactgtgaatgagctggaaatgcctggtctctcctgatttaatgtagaggaagggattctaagtcttagggagattgygatgctggagtggattagtcattttatacctatttat

SEQ ID NO: 205769 - DNA, 459 bp, Homo sapiens
ttattttcccccacattcctattggtactttcagcacttaccaaatagacttcttgaatttgaatccttgtttcaggatctcatcctgggaaatccaaactaagacacaaacaaagaagcccatggatcttaaggcagacagattgcctgcatctactcctagactggagaaaccaggaatgcttcaagatctgaacgtttcatatgatataggtgcagaagcagcttacaccctgtttcttggaaaaaaccaacagtgttatggcaagattctcaggaagaaatggtgtcatggtgtgcctaggcaaccaagaccatagacaaatcacaaaatatccatgtccaaagtttggcataaaaggtatagaaggttgaaaggcatgaagaagtgaycttaatctgatggtctcagccacatcccatataaacaaaaaaaaaatgagatccatatgctagcag

SEQ ID NO: 205770 - DNA, 558 bp, Homo sapiens
cccagggcacagataatcagagcacatcactctgacctcaatgaggggacrtgtgacatatgctgggccaatgagaactctgtctgggacttttgctaaaactattgtcaaacagaaactcaatctccaccaaagctcctaagcatagaggtgttggcagccatctttgcagaacttgagcagacccgacctaaaatgaagccaacatagaggagagcagaactgagagacagagagtggagtgagtcttgatgtatatcaggtccctggatccagccatacctgaaggcagtgtcagctatttatatcattaaattgtttttcctatgctacacaagtttgaattcagtttatgttgcttaaaaccaaaatagtcttcatgaatccagtgttggattgagaattatgaagcattataaaaaggaataataatagccattcccatcccccttttgtccttcgtgttttctgggtaacctcattcacaattgtctctctgttttttctacgttgctgaccagaaatgaattcctctctcttttcatccctctggatttg

SEQ ID NO: 205771 - DNA, 611 bp, Homo sapiens
gtttaccaaaaagaacagtctatgggactattgggccagtttcagattcagttcttcctcaggctcctcacctgatttcagctcagcctctctccttgggaagcagagatagttccccagctctccatataaggaggagaaggttttatgactatatatatatatatatatatatatatatatattttttttttaaactagctgggcatgatggcacacatctgtagtcccagccactggggaggctgaggtgggaggatcccctgagcccaggaatctgaggcagatattgagagctgaagccagctggacttgctgggtccagtggggacttggagaacttttttgtcttacaagagggaytgtaaaatgcaccaatcagcgctctgtaaaaacgcgccatcagcactctgtagctagcaagaggattgtaaaatgcaccaatgagcactctgtaatacacaccaatcagcaggatcctaaaagtagccattcgcagggaggattgaaaaaagggcactctgataggacaaaaatggaacatgggaggggacaaatgagggagtaaaagctggccacccagccagcagtggcaacctgctggggtcctt

SEQ ID NO: 205772 - DNA, 525 bp, Homo sapiens
ccacagagctgaaagtcacaggactggaccctgagcccagatccttccactatagcacagtggcctccatggtcacaaacatggcacagggtataaggcaaagatctaagaccaggyagagttaaggcaagagggggatcaggaaaagcccatggcatcaatatgaggggcttctgccccttacctgctggagtcttgttacagcccaaaggggttcttcttgcccactgcaagatgaagccagaacattgagacagcagtgttgctgtagagaaagggtttaattatcacaaggtaactaaacaaaaggatgggagatgtttttcaaatctgcctccccaagaattcagaagctagggtttttaagtgtacttgaaaacagcaggcagagggctgggaaactgaaacaattgattggctggggacaaaatcacaggggtctctaaactgtctttgaacagctgagtcagttcctgggaggggatttcaggatcatgtggcatctcttgatctcctgaaatgcta

SEQ ID NO: 205773 - DNA, 473 bp, Homo sapiens
ggaacaaacagcattcaataatctgtgggcataaaaaataagttatccttcctacttgcccttagatctcagaatgcaggactccaaaatagagccccgaagagtgaggctcagacatcagagctccccagagacacacaacaaaaacaggctaagttttcacttgagagaatatgcaacttgttcacttacatgagcacttcaatgttctaaagagcaacaattatattggttgtatgatgctatacaaaatgcatcttttcagtcagtctgtgtctgtcttcatctctctcacataccttaccctctcagaacatctcattcatgcacagcaatctaaaagcagcaatcacctctgaaccccgggaaagagtaatattggatgttcataaatacatacaagccatcaatgatattcgagagagkttcaactaattaaaaaaacttttcttaatgggaaatattcagtcaga

SEQ ID NO: 205774 - DNA, 610 bp, Homo sapiens
atatggacccatcagcaacaggcaaggtgggctctgttctggaagtcagcactaaagacagtttccatcgcggtgaatggggctaatgggcctttctagtaaatacctggttcctggttcgagcatttcttcttcctctgataacaaaaaataaacaggcagcagagcaggagaaaaagaaaagattatgcaggaataagatcagttagagtaagcagatccttcagagtccgtgaacgccgaaatgcaatggcagccagccaagtcctggggagcctgccaaacagccggcctgtggggagagccaccctcaagcctggaagcttcatgggacttytggaagccacccagccagccttcccatgtggctgccttagctgccctcccagacaccagctgacatgggggcctctttcagtccttgtgaaagagcagcaactgtgtggactggacccattcccatccctgtacctagcttctcttcaacaaaagggactgtttatgcacccatggacaaaagctacctacgaccccataagttatgcccagctgcccacaaaaaggagagaaatacacctttatgtccactggaacaatgtctctggaattc

SEQ ID NO: 205775 - DNA, 532 bp, Homo sapiens
ttgtcaatcccatcccactggccacagtgactggttcaggaatggcctaggttgatcccttcagagttagggaggaggcatcacagacaaatgagagagagaatatgagtgagagagacagccaacagtctttccatatgtttacctccacctgaaacacacagctgggagcaatgggcaaccactgtgtacctgtcatgtagttgaagtaccagaaatgactggcttcctgagaaggaaggatgaagcagatgtgcagtgagaagacaaaatgagaggaagtgtactaccgattcgtagaacaaaccagggctccctggccctccttcctggtcccaggccagcctggggccaactgcatttccccacctggattccacaagacaccckgcatctttataataaaatccatgtatttctactaccaccagctttaggtgatttctgttgcttacaattcaaagttctgattaaagcaagggaacatgttaggtgtttagtaaactcctgcacgttgctgattctattaatg

SEQ ID NO: 205776 - DNA, 383 bp, Homo sapiens
ggagcaatgggcaaccactgtgtacctgtcatgtagttgaagtaccagaaatgactggcttcctgagaaggaaggatgaagcagatgtgcagtgagaagacaaaatgagaggaagtgtactaccgattcgtagaacaaaccagggctccctggccctccttcctggtcccaggccagcctggggccaactgcatttccccacctggattccacaagacaccctgcatctttataataaaatccatgtatttcyactaccaccagctttaggtgatttctgttgcttacaattcaaagttctgattaaagcaagggaacatgttaggtgtttagtaaactcctgcacgttgctgattctattaatgatttatcaccacagatct

SEQ ID NO: 205777 - DNA, 548 bp, Homo sapiens
ccatcctaaacaatcttttagaaaattgtaatgcaggagtaagacaggtggcctttgttaactctcagttatccgtgctgggcctctcttctcctgtctcatcaaaccctgcgtcagccagccccctgtctctcttttctcactctttgcttgagtagatgttctcatgttgggttactcttagggacatttcatgattttcctaattctgggattcaaaaacaacaacaggaaacaaatacaactcaacaacaacaacaacaacaacaaaatcctttgtctctttcagtcctaaatgccgacagatcctacccacttcttctccacactctggcttgttttctcatcaaatcacaaaacttgagacccacagatgttccctatttaaatacatgatgtatgtaagcacgggccatctcccaaagtgattgtgtttttatttccaaaacaaaggcttaaaaggcatgtctcagaggatcaggcttctccmgcctgtgctggaaggtccacgtacccctgaacacagcagctccaacagttaacggctc

SEQ ID NO: 205778 - DNA, 360 bp, Homo sapiens
tttggtgtccttggtgtagacacagcaccccaatctttgccttcayctttccaaggcattctccctgtgtgttggtctctgtgcccaaagttcctttttttgtaaagatacacaccagtcatgtcggattagggcccttcccaatgacctcatttttatctgattacttctataaagaccctgtttccaaataaggtcacattttgaggtactggagtttaggacatcagcataggaattttgaggggacacagttccaccctgatatggtttggctgtgtccccacccaaatctcatcttgaattgtagtataatccccacgtgtcatgggtgggaccaggtggagataactgaatcat

SEQ ID NO: 205779 - DNA, 540 bp, Homo sapiens
agaacatgaatggggacagctacagcaaaaggtcagatttatcctgtgagagaatcttccatgtgttgggcaccagtggagccacatttttataaatggaaccaygcgaatttaaaatagagagcaacttaaatatatcaaaatacttttactttatatataacatttgaataaaaaaatctctcaagcaaaaatatagttagaattttgtaatttgaaaactggtgagtcaagtccactggaagctagctggctttacccttcacatggtgaaaccactttagctggtcaaaagaaataaccaacgaaattatggagttggcaaaaagatcagtagttgccaagggttttggggaggagggataaataggtggagcactgaggatttttagggcaatgaaactactctgtataatactacagcagtgaatttatgtaattatacatttgtccaaactcatagaatgtacaacgccaagggtgaaccctagtataaactacggactctggtgataatgatgttatcaacgtaggtttatt

SEQ ID NO: 205780 - DNA, 540 bp, Homo sapiens
agaacatgaatggggacagctacagcaaaaggtcagatttatcctgtgagagaatcttccatgtgttgggcaccagtggagccacatttttataaatggaaccacgcgaatttaaaatagagagcaacttaaatatatcaaaatacttttactttatatataacatttgaataaaaaaatctctcaagcaaaaatatagttagaattttgtaatttgaaaactggtgagtcaagtccactggaagctagctggctttacccttcacatggtgaaaccactttagctggtcaaaagaaataaccaacraaattatggagttggcaaaaagatcagtagttgccaagggttttggggaggagggataaataggtggagcactgaggatttttagggcaatgaaactactctgtataatactacagcagtgaatttatgtaattatacatttgtccaaactcatagaatgtacaacgccaagggtgaaccctagtataaactacggactctggtgataatgatgttatcaacgtaggtttatt

SEQ ID NO: 205781 - DNA, 362 bp, Homo sapiens
atatctccctgaatattatttaaattgtatattacatgaatggcaacccccggagaaaaccattgcatacaatgtagatgatgcctgctgtatctgtgcaacttggaagccttgatctcctcaayacaatgaggagatttcacaatgagtccagctgcgtcagttaaaagaaaagaaataataatttagctagtctcttagaaggacaacagcctggttttcaagactattgtcctcctgaattctgaatgtcaatatcacagtgtcttccttctggcaaaaaaaaaaaaaaaaaaagagaaaagatgaggaataagatgaaagccaggtgctgtaaaatgtctaagaggaaacattaagct

SEQ ID NO: 205782 - DNA, 459 bp, Homo sapiens
aacaaaccaacaggaaaaaataggcgtaaacaaagcttacagacaaataagaaactaaaatttgtcttttaaatatttgaaaaggtgctaagctctacttatatatagatacacagacacactcacacrcacacacatataaactacattgagacatcacttttcatttatcaatgaagatatagaggaaaaaaactctcctttattgttgtgacagtttaaattgcaaaacttttgcaaaggtcagcttgactacaaatttgataacacacaccacagtttaaaatgtaggtatgttttaatttagcaaatttactcctaggtatttttttcttcaggtactctagtatttaataggtataaacaaagacatatatacaagaacaatcactgaaaaattgtttgcaatacttaaaacacttcaaatgttcaataatagaaaactgaattcaatattat

SEQ ID NO: 205783 - DNA, 459 bp, Homo sapiens
aacaaaccaacaggaaaaaataggcgtaaacaaagcttacagacaaataagaaactaaaatttgtcttttaaatatttgaaaaggtgctaagctctacttatatatagatacacagacacactcacacgcacacacatataaactacattgagacatcacttttcatttatcaatgaagatatagaggaaaaaaactctcctttattgttgtgacagtttaaattgcaaaacttttgcaaaggtcagcttgactacaaatttgataacacacaccacartttaaaatgtaggtatgttttaatttagcaaatttactcctaggtatttttttcttcaggtactctagtatttaataggtataaacaaagacatatatacaagaacaatcactgaaaaattgtttgcaatacttaaaacacttcaaatgttcaataatagaaaactgaattcaatattat

SEQ ID NO: 205784 - DNA, 613 bp, Homo sapiens
ttaggagggaaacaacttgagtgaatgtggtatctcatacctgacgtgctgcatccctaatttcattttaaagtttttttaaacagattcattgaagtgtaatctatatattataaaattcatctttttaaagtatacagttgatttttttttttttttttttgagacggagtctcactgtgtcacccaggctggagtgcagtggtgcaatctcagctcactgcaatctcctcctcccgagttcaagcaattctcctgcctcagcctcccaagtagctgggattacaggctacttgtatttttagtacagacggggtttcaccatattggccaggctggtctcgaactcctgaccttgtgatccacccacctcgacctcccaaagtgctgggattacagtgctgtgcccggcaattcaatggtttttaataaaattacagagtgtacaagcatcaccacaatctagtattaaaacattttcattgctccatattccatatacccgtttactgttaatccacattcttacactctgccccaggcamatacacatgcattgttggtctctacagatttacctattctagacatttcatagaagccatacaacgtg

SEQ ID NO: 205785 - DNA, 597 bp, Homo sapiens
acactgaatctgccagcactttgatcttagactctccagcttccagaactatgagaaataaatgtttgttgtttaagcccttcaatgtatgacattttgttatagcagcccaagcaaagacgaccccattcaaatatattcctgttaatataatctaaatataccatacaacactaacaatttagctgccatttmcaatggaagggaatgcgtagttatacccagagactgcattcagcattcagaagtgtcattgagtaactaccaagactagtcctaaggtaatggccaacttctctatgaaaggatttcatcttgtcttgatattcaccatatagaggataaatctccaatttaatcacctctacattactcatatcaaataaaggaagaaaagaatgagaacagaccagaaaaggtatctgcattcttatatgtgcataaatatgtacacatactatttttgtctaaatgtatgtatgcatttagaaactttataaactgttcataaaccgtaaagtcaaacttgtatttagcctccctcacctgacccaatctatgtgtcctttgctgttccagtggcttcaatatttttgc

SEQ ID NO: 205786 - DNA, 597 bp, Homo sapiens
acactgaatctgccagcactttgatcttagactctccagcttccagaactatgagaaataaatgtttgttgtttaagcccttcaatgtatgacattttgttatagcagcccaagcaaagacgaccccattcaaatatattcctgttaatataatctaaatataccatacaacactaacaatttagctgccatttccaatggaagggaatgcgtagttatacccagagactgcattcagcattcagaagtgtcattgagtaactaccaagactagtcctaaggtaatggccaacttctctatgaaaggatttcatcttgtcttgatattcaccatatagaggataaatctccaatttaatcacctctacattactcatatcaaataaaggaagaaaagaatgagaacagaccagaaaaggtatctgcattcttatatgtgcataaatatgtacacatactatttttgtctaaatgtatgtatgcatttagaaactttataaactgttcataaaccrtaaagtcaaacttgtatttagcctccctcacctgacccaatctatgtgtcctttgctgttccagtggcttcaatatttttgc

SEQ ID NO: 205787 - DNA, 580 bp, Homo sapiens
ggacaatggttctgaaactttaatctgcatcagaatcacctaaagaacttgctgaaatacagacccctgggcctcatccgtagagtttgtgattcagttagtttgaggcagagcctaataatttgcttttctaactcattcctgggtgttgctgagactcatgttctggggaccacactttgagagccactggcatagcaacctgtgaagtcacgacagaagcatgttstctccatctggaggagaactgggggagtaaatcgattgttagggctcttaattacaaaaagcagctcttagccatttaagtagaatgggagtacattaagtgggtattgggtggttcatgggcaaatcgtggaggccagttttccagaaacaatgccccaagccatgtacaagtggcctgatgactaaagggccaccaagacttgagtaaggcgtacttagcacagtttcagagctgccaggaacataactctgctgcagttctgattgtgccaatattgatgccacttcttaggatgactatcttccctgaatgccagattgtttttccccactcttgggtttgatctgg

SEQ ID NO: 205788 - DNA, 631 bp, Homo sapiens
attaactttgccacattctattggttagaagcaagtcacatgatctacctgcacaacaggaagagattatactatggtgggacttacagggccaccttaggtgtgtccaccatagaagataasgagaaaagtctgaatttcctttttgaaattgaataaatcaaacttccttccctattctttctcatgtttagttgctttccccatttatctactttgttattttgaatgtactcatgctgtgttacactccatagtcggctcctggggaatttgcataaaaataaaactctattttaagggtctttattatttcgttacaaacattgtttcagaattgaaccacacaaagcctaagaatggcattgctctgatttgctcccataaataaatgtcacttaccattaagcattttcaaagggcatttccaaggacattctgattttgctaagatttactggaggttaaaaattaactagagattagaagaaaagagaattcaactggaatacctggttgtaatttttatttaaattattttaatattaattaaggtacctctcttgcattattcagcctgttaaactgtagaagtcttacttgaatgtaatatagtaaccatttttctata

SEQ ID NO: 205789 - DNA, 357 bp, Homo sapiens
aaagtttccagtatgggtgcctggaagggtaaaattcaactacttagcttacctttctaggcaatattaaaaattacttaatatatgccaactctttaaaagaggagtagattactcagtttttgcagataaatgtagcaggtcaattgcgtatattttctgcactgaatgaataaagaygaaaggatgagtttgcaaaatcataatataaagtgccacatcttgggatttatttgctctttgtttttttcaagacagggtcttgctctgtcacccagactggagtgaagtggcactatcaccacaggtcactgcagcaccgacctcctggcaggctcaatcaatcctcccaccttt

SEQ ID NO: 205790 - DNA, 619 bp, Homo sapiens
taggtataagtagactgctctgggcacacagaaatagagcaatcaattctagccagggctctccctccaggattttaggaaaaggtatcagtcagactaaacttgacaatgagatcagcagattacggtgtaagattggggaatagtaagttggttccacaagcagaaggaaggtccagaccaaggtcagcaaaggcacaaaagcatgtccaggcctatgctatggtggaagagaggtcctcaaagactgtgagtaaagacgtcagaaaatcagtccagctggaggacaacaaaggcactgatggccataataaagtgggggacattttgagtttttaaagcaatggtatgagttagtctatggtttcaaaatgaaataggctatgcattattttcctgtcactcccataagaaattatcacaaaatgaatggcttaaaacaacaagartgtactgtctcacagatctggaggctggaagtctgaaatcaagtgttggtagggctagattccacctaaaagctagagtgaagaatcctttgccacttccatctactggtagctccaggccatcattggcttgtggctctatcacttctacctctgcctctgcgttcatg

SEQ ID NO: 205791 - DNA, 405 bp, Homo sapiens
gaattccctgagaaaatatttgtgaaaatttggagcacggcrttagaaatcaaaaaatgtaacttaaacatgaatctctcccctgatttctcatgctggttttctgctctgtctgaaataaaaacagatacattaagtactcaggttcttggatctcatttccattggctacatggttctaattggtattcaagttgagacggcatgacagctaggcctttctaatcatcctattatgccaaagaagacatggttcccaccaagagcctgtgactattccaaacttttttaaacatccaaaacaaggcatgaataggtgtctttgaagcaggattctcagcttgaacctaagctgtgtccacccttaacattcatggtcaggacatatcagggcggatctggcag

SEQ ID NO: 205792 - DNA, 580 bp, Homo sapiens
attgctcactctaatacctattatgcttctgggtggttcattcccaggcctcaggtagttttcttcagacacacaaactgatcattacttacttgaatactcctaggagacctttgcratttctggaattctctgttcacacctcctccctccaggattctgtcctgtaaattcaagcttccttggtttcttgaagctctcagttccatctcctcaacaaaaggagttcactagcctctgcctgggttttgtatttccatgttgaagccgggaaacgttctccagactgcaagctggggcaattataaggcatatctcatttgcttcctgtctctcagaaatcactctctctctcccccgatattcaatgtcttgaaagccaatgtcctaaaattgccttctatatactgtgtctgtatttttagttgtttcacattggagtgtaaatctggtgcctgtgacttcatatcttggctagaagtggaagactaaccgcagggaattaaattaaaaatcaataacagatatttggaaacgtcaaatagttagaaattgaaaaacacactttaaaataagctat

SEQ ID NO: 205793 - DNA, 543 bp, Homo sapiens
aggtgggtggatgaggtgatttcactggtcaatttaggccccttgaagatgccacacaaggaacttggatgaggggaaatgggccagtaaaaggaaacagagacaggcatcttagggccttccttcccccatatagctgaaattaaatcccttccactgcagtggcagatgaagcccatgcaccacttttgcttcggaggtctgtgtgggtagacatgtggaggaggattcactcttctctggccgcactgctgggaacagtcactgggctcagcttttggccctcatcatgcataaagggcctatgcatttcaggccccactctgtacatgcattcagggagagagcctacttgtaagtctgctggggayggggcagtgcatatgtgtggatgtgtctgagtgtgtgcaagaaagagaaaaaagctcaagtctggtttgtagcctcaaagtgatgttttcttatgcaaattggtgtaggtacgcagggaaaccaaggcagacatatgtctctttcactaagtgactcaactcctcggggctt

SEQ ID NO: 205794 - DNA, 367 bp, Homo sapiens
actgacacctgggtttccttcaatctttctaacaaccttcaggcaagaattttggtaggaatcatggtctatggagctgcagggttggttttatctcttccgcaaaaatgcagtcagtcgtttcccggtattggttccaggatcccccartatcaaaatccacagatgctcaatgtccttatagaaatcagtgtagtatttgcatagaacctacactcttcctcccgtagactttaaatcatctctagattacttgtaatacctaatacactaagaatgctatataaatagttgctattctgtattgtttagggaataatgaaaagaaatgtctaaaatgtggggcaggaggtcagcaagaaagctt

SEQ ID NO: 205795 - DNA, 463 bp, Homo sapiens
tagttttccttgtagatgtctttcacctttttggctaaattcattcctaagaattttatttttatagctattatagaagggattgccttcttaatttttcagctrtttcatcattggtgtatagaaatgttaccgatttttataagttgattttgtattctgcaactttactgaattcattcatcagatctaagagttttttggtggagtctgggtttttctaaatataagatcatgccaactgcaaatggggacaatttaacttccttttctgagcttcttgaatctgcgtatttatgtctttcactaaaattggaaaatattttagccactattttttacaaaaaaatgttcatgtctcattctctcttctccttttggatatccagtgatatgtacgttacactgtttcatactgtctcataagtctctaagctctgttcccttttaaattctctttcca

SEQ ID NO: 205796 - DNA, 381 bp, Homo sapiens
agaattaaatcagaatactccattctttcaaagcctctagtaaggcaaagttttactgtattacttcttgctatcaatggctataaagcagagtcctggtaggcacattttgtatgcctgcaaagatgcagaacttaacagttccatctgttcaatattaccgcaaaagtcctttaaacctyggatggtgagtgtaatacttcagcactagcaccaaagcctcaaatataaaaagataccaagaacaccactagcaaacaaaatgagctcttggctgggagcagtagttcacacctgtaattccagcactttgacaagccaaggtgggaggattacttgaagtcagaagttcaagaacagcctgggtagcatagcgaattc

SEQ ID NO: 205797 - DNA, 572 bp, Homo sapiens
attaaaattcaagtggttttgcgcagcccctcctccaagtgagaggtacatacctcatcttaaagcctagtgaaagacattggagacaactggttcagtcttctcattttggacatgagaaagaggggcacagatcagacagagactggccatrggtcacacctggggactcaaagctcaaactcagagctctgcccttgattcaagtttcttcctcagtgcctatatcataaccagtggcccttgctcaggtgcctgggaaagggacataccaaacagtgcaaagaaacttgcaactgaaggcagcatccccagggaacacaccgctgctggtggcgaaacgacagcaagaggcctcgcaatcggagggtgagagaggacagaccggagctggaactgacgagccagctctgtgttagcatggtgctgttgccttgcaggtattttctcttttaatcatttcaacaaatctggatgactaaacccatttcatgggtgagaacacgtaggctcaaaaacagtaacttggctaaggtggcctcattagaagttggctgtgccatttgacccca

SEQ ID NO: 205798 - DNA, 578 bp, Homo sapiens
ctattttcacaaaagacttagagtcttgtttgatatgttcatggtttaatattctctttccagaagtttggtgcccaggaatsatttacttagaaattctttgcatacgggaacaggtgatattatttagttgaaatttaagaaaagttagttgagtgcataatcaaaatcgactttacatttgggaatgttctccagccaagctatgtattatctaactttaatattattgtaattcgtcatgcttactggttttctcaggtcaagacaaaataactatgtatcagattataaaagatagcaaatgaagaaaagggaggataaaagctatttttattattcttatccccactctctttttgatatgtaaatgaagattcagtttcttattccatctgagaaagtctgctctgaaaacagaaatgtgacaaatctgtattacgtaatcaagaacttgagtggcaggctgccctgtgatttattttcaaataatggaccagagagaccacttgaagttgcattaataatgcttgtacagggagaaataggcctttcttgttattggaacatgggtttac

SEQ ID NO: 205799 - DNA, 605 bp, Homo sapiens
agtcaaaagcagtattcaccgtgttagaacaatcacataaacacattaacagaagcaggcttgagagtgtgaatatgtctgcagaagagaatagctggacagatttttgaagcacaagctcaaggtattactatcaagacaaatagtcacacttttaaaaaacaaatgagcaaaattgcttatttgtttaccttccacagttgcaatccctatcatgtattcgtctctacgggttttaggggtggcggtgaggtatggttatattatcatgcttaaacataaacaacatttactcctaacacccyttaaaaatagacaacactaaactgtgagaagggcaaagatcacatgatcttaaaagaactatcttgaaagccacccacattgaatccaaattggaatccctttcaatgtctcaggagtagaaaatagatttcaaattacagagcccctctcatcttctaataacaatactgactcatcagcataagtttgtccagtcagtgatcatcatgagcgcacactgaatgtccaaaatatatccccaaatctgcaaaagacactgtcccagcttaagtttatctgacaggcaaaacccaacacta

SEQ ID NO: 205800 - DNA, 445 bp, Homo sapiens
cctgctcgagtatgcctacctaggtactctagcatttctgccctcaagagtacaagactcaattatttggtataatggatgaaagtcagtcttttgtggtagtatgttctgtgagtcttggtctcttgctagctgtcagggaaaagtggctccatgggttggtgaaagtggtatccagctaggtccaagggagamgggcaggaattccactctgttgtgtttctctgatgggcattctagggtcttctaaaaggatgcctcttgaatattgagaggacagtatccctcattgaggattatttggaatttgatggcctgaaggcaagaggagacaaattgggttattgtgcttagaagacatgtacctgtaccaaaaagactaacaagtgggcctaaaaagggaaaatcccaggagaaccatttccaggtttcttcccaatttagc

SEQ ID NO: 205801 - DNA, 554 bp, Homo sapiens
gactcatggggttgggaaggaccttggagtctgcacagagtagacctgaggcactaatggccctcttggacaggaggctcctgagagtggtagggctaaagcctaaggccgtgtaatgttcaaggtttcctctgcttgtttcctgaaaacctgcactgcctattctcctgttttgtctgtctgtattctgaaatggtcttgtgctccttcaggaccacattcccagtttgttatttatatgtccacagcttttgctgcattgtgtggcaacaaagaaatgggctttctcatagatgtgtctcggctcattgccaggacacacactaattggacctctggctctgccagctcttgtaacttctaraatgctctgaacaagagtcactgtaaggtcttggcaacaaagatataggctggcccaaggccacaggcataagagaccaaagtacctgtaggacagagatgaaggctggtcccagaaattggatgggaccaaggttaggggtacccagcaagcactagttcattccagagccccttggatgaatggggga

SEQ ID NO: 205802 - DNA, 596 bp, Homo sapiens
tctctaatctttaaagaaaataaagtgtgtgtatgtgtatgtgtgtgtgtgtgtgtgcgtgcgtacattgaggtgggrggtagttcatgtgaaatctttttttttccacaataatattttgttggtttattttaaaagtcataaactattgaatgatctaagccaacacatctgggagttggatctacccctatgtggtcatcaattttgtaaatctctgtgccactgcttgttgacaattcattatagcagcagacagtgaaaggccatttagccatgtaatcatctagctgttcatatcacatcatccatgtgaatgcaagtatctagcattttgagtcaagtaaactggtagatactatacttaagagagatggtgccttataatatgcaagatataactgtcaaggcctctgacaccacatgtatattgacggaagccagaatagctattgctaaaaatgcatttcattgactattccctctgcaaatgtgccatgatgacaatcaatcaggataaatcacacagctattcaactaattcatccataaagaaaactgatagagtgttgaagtcagtgaggccaaaatcagat

SEQ ID NO: 205803 - DNA, 596 bp, Homo sapiens
tctctaatctttaaagaaaataaagtgtgtgtatgtgtatgtgtgtgtgtgtgtgtgcgtgcgtacattgaggtgggaggtagttcatgtgaaatctttttttttccamaataatattttgttggtttattttaaaagtcataaactattgaatgatctaagccaacacatctgggagttggatctacccctatgtggtcatcaattttgtaaatctctgtgccactgcttgttgacaattcattatagcagcagacagtgaaaggccatttagccatgtaatcatctagctgttcatatcacatcatccatgtgaatgcaagtatctagcattttgagtcaagtaaactggtagatactatacttaagagagatggtgccttataatatgcaagatataactgtcaaggcctctgacaccacatgtatattgacggaagccagaatagctattgctaaaaatgcatttcattgactattccctctgcaaatgtgccatgatgacaatcaatcaggataaatcacacagctattcaactaattcatccataaagaaaactgatagagtgttgaagtcagtgaggccaaaatcagat

SEQ ID NO: 205804 - DNA, 481 bp, Homo sapiens
attccctgccaccttcaccaatgaacagttaaaaaaaaaaaagcaagcttagttcttgtattcatttgaaatcatagtaactgatgagtttggtaacttacagttctagaattgtttcctgtgacacggtggaactagaatatctcgaaagtattcctactgctccattctataaagtacaatagtttcaccttatctgcagtttggcttacccaccatccaaaaaaattaaatggaaaattctagaaataaacaattcataagtttttagtcatgyaccgttctgagtggcctggggaaatctcctgcgctcctgctccacctcgccttggatacaaatccttcttttgtccagcatatccacactttctacccacccatctgttagtaacttcatagccggctcaattaccaggtggactgctgtggtattgcagtgcttatgttcaagtaacccttcttttacttcatcatggcctca

SEQ ID NO: 205805 - DNA, 475 bp, Homo sapiens
agctaatttttgtatttttagtagagatggtatttcaccatattggccaggatggtcttctcctgacctcccgatccacccgcctcggcctcccaaagtgctgagatataggcgtgagccaccactcctggcctaagtccacattttaataataccaagactgataagaccttacttctttcaggctctttcatattacagataataagagatgattatagataataagagaatgcatgtatttattaaaagatttgtagggatagcataccacagatagactatcagtgttaggagaaaccctaactgttagtgagcatctattattagtaaacagagaagarcacagactatgaagatagtctgcttgggtttgaatcctctattgttatttattagctgtataaccctgggaaaattgcttaacctttcaggtcctcatttcttccatttgtaaagtggaggtaatagcatt

SEQ ID NO: 205806 - DNA, 475 bp, Homo sapiens
agctaatttttgtatttttagtagagatggtatttcaccatattggccaggatggtcttctcctgacctcccgatccacccgcctcggcctcccaaagtgctgagatataggcgtgagccaccactcctggcctaagtccacattttaataataccaagactgataagaccttacttctttcaggctctttcatattacagataataagagatgattatagataataagagaatgcatgtatttattaaaagatttgtagggatagcataccacagatagactatcagtgttaggagaaaccctaactgttagtgagcatctattattagtaaacagagaagaacacagactatgaagatagtctgcttgggtttgaatcctctattgttatttattrgctgtataaccctgggaaaattgcttaacctttcaggtcctcatttcttccatttgtaaagtggaggtaatagcatt

SEQ ID NO: 205807 - DNA, 493 bp, Homo sapiens
tttgcttagcaggagcacaacacgaaaattccttgagcagggaagacagctggtttgccaaatctgcacatttggctgtacaactggctctattggtagcttcaggctagcaatattttttactgacaatttacatgctgctccagcccaaggtatcygaaatgaagtctttgcataaacacagttagaaaagaacttggctcccaaccctggtcagaactctgctttaaaaaaggaattcacactgatccatggtaatgtgataaggttgagccttttcagcagagatttgctatgcaaggccccttgttttatatggcattatgtaaaacataatgtcaataatccatattgtctgtcttaataccattattcacataacagtattgtgcctacctcagccgctttgtaatccgggaaccccacacgcacattaaaacagagataactgtggaggaacacggttgcatacaagttgtgttgttctggcagg

SEQ ID NO: 205808 - DNA, 531 bp, Homo sapiens
tgagctatttatacaattttaagtatctcccaataaaataaatattaattataaggggaaaaagtaactttacattggggaaaattggaaggcaccaactaaatcaagtggccaaaatgaacaaatagaaataaacccatggaaatcacracgtatgtcaggattcaatgagaagaacacagcatcacttcagtgatactctttctaaagacacatcatctaaatctaaccatgaagcaccattgcatgaactcagattgaaggatggttttaaaaataaccaggctgtgatcttcaaaagtgtcaaggtcaaactcaatgatattaaagacacatcacagctaaatgcagcttgtgattctgaattggatcctttagctataaagggcaatattgagacaattgatgaaacttgaatgagatctgaggactagatggcagtaatttttcagttctaatttcctgactctgatgggtgtgctgaggtgatggagggaatgtctttgtttataggctactaggtggtaacat

SEQ ID NO: 205809 - DNA, 580 bp, Homo sapiens
tgcctggggcttgagaagttgcacacagctggaaacgttaattaagtctgcccttgtaagaaactcctcaaggccctcttgcaatgccacatacmaaggttttataagtgacaaccaaaaatatagagttggggcaaactgaggtggcctaattttatacatggaagaaaaccatcagaattcaacttctccttggacaccatttatgtttggaaggggagatgttttatttatatttatcttattttatttttgcttttttaagtgcatttgtaaaagcaaactctgttacttctttcctgctgaggactttggggacacatttagaggctgaaaccaatagagctactttagcatcttgtaatatattttgcagattcagctaattgagaaggcctcagaggaaggcttttgataattgggcttccaaagttgtgcacacacactggtaggtaatattcgtgcacataaattttacaataaaaaactcattgctctcatgtgttaactaccacctacgtgctgatgactcgactttttaaatctaacagaggcctgtccctgagtctcagacttcaat

SEQ ID NO: 205810 - DNA, 580 bp, Homo sapiens
tgcctggggcttgagaagttgcacacagctggaaacgttaattaagtctgcccttgtaagaaactcctcaaggccctcttgcaatgccacatacaaaggttttataagtgacaaccaaaaatatagagttggggcaaactgaggtggcctaattttatacatggaagaaaaccatcagaattcaacttctccttggacaccatttatgtttggaaggggagatgttttatttatatttatcttattttatttttgcttttttaastgcatttgtaaaagcaaactctgttacttctttcctgctgaggactttggggacacatttagaggctgaaaccaatagagctactttagcatcttgtaatatattttgcagattcagctaattgagaaggcctcagaggaaggcttttgataattgggcttccaaagttgtgcacacacactggtaggtaatattcgtgcacataaattttacaataaaaaactcattgctctcatgtgttaactaccacctacgtgctgatgactcgactttttaaatctaacagaggcctgtccctgagtctcagacttcaat

SEQ ID NO: 205811 - DNA, 580 bp, Homo sapiens
tgcctggggcttgagaagttgcacacagctggaaacgttaattaagtctgcccttgtaagaaactcctcaaggccctcttgcaatgccacatacaaaggttttataagtgacaaccaaaaatatagagttggggcaaactgaggtggcctaattttatacatggaagaaaaccatcagaattcaacttctccttggacaccatttatgtttggaaggggagatgttttatttatatttatcttattttatttttgcttttttaagtgcatttgtaaaagcaaactctgttacttctttcctgctgaggactttggggacacatttagaggctgaaaccaatagagctactttagcatcttgtaatatattttgcagattcagctaattgagaaggcctcagaggaaggcttttgataattgggcttccaaagttgtgcacacacactggtasgtaatattcgtgcacataaattttacaataaaaaactcattgctctcatgtgttaactaccacctacgtgctgatgactcgactttttaaatctaacagaggcctgtccctgagtctcagacttcaat

SEQ ID NO: 205812 - DNA, 580 bp, Homo sapiens
tgcctggggcttgagaagttgcacacagctggaaacgttaattaagtctgcccttgtaagaaactcctcaaggccctcttgcaatgccacatacaaaggttttataagtgacaaccaaaaatatagagttggggcaaactgaggtggcctaattttatacatggaagaaaaccatcagaattcaacttctccttggacaccatttatgtttggaaggggagatgttttatttatatttatcttattttatttttgcttttttaagtgcatttgtaaaagcaaactctgttacttctttcctgctgaggactttggggacacatttagaggctgaaaccaatagagctactttagcatcttgtaatatattttgcagattcagctaattgagaaggcctcagaggaaggcttttgataattgggcttccaaagttgtgcacacacactggtaggtaatattcktgcacataaattttacaataaaaaactcattgctctcatgtgttaactaccacctacgtgctgatgactcgactttttaaatctaacagaggcctgtccctgagtctcagacttcaat

SEQ ID NO: 205813 - DNA, 465 bp, Homo sapiens
cgttcctcaattaacctagtctctgattcttaacctttggctaacatggtccctgactctgaagcatttatttcagtttccttgaatctttttcttgagtaaatctactaaagacctctaaaagacatagattatttggtggtagtagttggggtaagggagaggggagaggggcttgctgttctgacccatgttttaagataactccatatcagaaattgaattcaacatttagaatccattccagtttcttatctttgaaaccayctagagatggtaatttggaaaagctggatggataaatggaaaaccagattctgattttctcaggagaatcaggctggtaaatccctgctggatcatggaaattaagcatttccccaaaccaaccttttattttgccctagggtaacctgatcaaatttcttggtttcattttctctattggactagcagtaatgtgaa

SEQ ID NO: 205814 - DNA, 465 bp, Homo sapiens
cgttcctcaattaacctagtctctgattcttaacctttggctaacatggtccctgactctgaagcatttatttcagtttccttgaatctttttcttgagtaaatctactaaagacctctaaaagacatagattatttggtggtagtagttggggtaagggagaggggagaggggcttgctgttctgacccatgttttaagataactccatatcagaaattgaattcaacatttagaatccattccagtttcttatctttgaaaccacctagagatggtaatttggaaaagctggatggataaatggaaaaccagattctgattttctcaggagaatcaggctggtaaatccctgctggatcatggaaattaagcatttccscaaaccaaccttttattttgccctagggtaacctgatcaaatttcttggtttcattttctctattggactagcagtaatgtgaa

SEQ ID NO: 205815 - DNA, 602 bp, Homo sapiens
gtctagaactgcttgattcatcttgggcctccagcacacactcgttaaatgaataaatttgggcctctatccaataatcytgtccaagaggacaaaccaggacatttcttcttcacatattttgctgctaagtcaaagctttcttgttctctaattagatcatgtccactccacatcagctacatttctttatgagattcacgtgttcatctgagatgcattaatgcaacaagcatttacagggtgggaactatggggtagactcgatgtgttaaactgagaacacagtcataatctgcaaactctgttctcaagtatctcagtccaggtaaggactcacatgtaaaccacatgtgtaaattggtatacaaaatgttcctcttggaggtcatctttgctattcctggaaaacagtggaggaagtaactaaccaacctgggcttttagaaaagactccaaagagggaactattttgatctagctcgcagtcagcaggcatgctccagactccagatgtatttaatgtgacatgcagaatgttcccttcctccatgaaaataatttaaaaagtaaatttgtatatacaaacaccatgattttaa

SEQ ID NO: 205816 - DNA, 553 bp, Homo sapiens
aaaccaatacatttctggtaatttgttactatagaaattggaaatgcatatgggtgcacactcactcatgaagagatcacattccagtctgcagtacagataagagagcctgagggttttataaaatctactatttatttttaatactctgactccgttgttgcctgttgatcctcaccaaacttacaacaaagaggctgagaactgatattttggaggtgctggataactctgccaacttgttaggtaacaatgtatgtattattcagggctctccagagaaacaaacccacaaaccgagagacagcgagcaagagagagagtaaacacacacacacacacacacacacacacacasagagagagagagaagagagagagagaaagggagagagagagagagagagagagagaaataaagattttattctaaggaattggctcacaggattgtagaggtgcaagttaaaaatctccaggagaaggagtgagcaggctagagaccagggaagagttgaagtctgaggacacaggcagtgtgatggaagaattc

SEQ ID NO: 205817 - DNA, 531 bp, Homo sapiens
tcccgtgggctaatataatgcaaacccaacccattttccagaaaataaagaagatttaaatacaagatttgcagaggatgagctatcttcagttaagaagaaaaaacagcatgcaagtagtacaacatcaagtttcaagcctgacacaacccagstgtgtgactctgaacaaatctatgctccttgcagagttgcagagttccattcataaaataaagatggcctatatatctcccaaagccccttccagctgtgtgagtctctgctactatctgggtcaatggtgccagttaccctttggcatggtttgggtctgtgtccccgtccacatcacctgtcaagttgtaatacctaacgttggaagtggggcctggtgggaggcgattggatcatggaggtggtccttcatgaaagactcagcaccaacccctcagtgctgttgatgagtgttaacaagtaattgagttatgatgagagctgattgtttaaaagagtacagccccttccgctctctttcttccttctgttcca

SEQ ID NO: 205818 - DNA, 531 bp, Homo sapiens
tcccgtgggctaatataatgcaaacccaacccattttccagaaaataaagaagatttaaatacaagatttgcagaggatgagctatcttcagttaagaagaaaaaacagcatgcaagtagtacaacatcaagtttcaagcctgacacaacccagctgtgtgactctgaacaaatctatgctccttgcagagttgcagagttccattcataaaataaagatggcctatatatctcccaaagccccttccagctgtgtgagtctctgctactatctgggtcaatggtgccagttaccctttggcatggtttgggtctgtgtccccgtccacatcwcctgtcaagttgtaatacctaacgttggaagtggggcctggtgggaggcgattggatcatggaggtggtccttcatgaaagactcagcaccaacccctcagtgctgttgatgagtgttaacaagtaattgagttatgatgagagctgattgtttaaaagagtacagccccttccgctctctttcttccttctgttcca

SEQ ID NO: 205819 - DNA, 551 bp, Homo sapiens
tgacatagcacgtggttaccaggtcagactctggagccaggctgcctgggtttgaagcccagctctgctgcttagtagacatgggacctgggagaagttgcctctctgtgtctcagggtcccaactataaaataactgcctacctcggcatgctgttgtgaagactgagttatatgcttaggagtgcttaggaggtggtttgcatgtggtaagtgctcaataagtattagctaatattactcaacaaacctttccaggrcacccactctgtgccaggtactgtgcatcctaccagggctctggccatgagtagggctgactcgcccctgaccacatggagctcacattccagtgggagatagatataaatccaacaacctcacacccacacaataagaagcgccttgaggcagtgctgcaggggaggtggtgcggacagtggtcagctggagcccggctgcctggctgtgtgctaactcagactcgggaggctcctaaccacttgggcttcctgtcctcttccataaaataggaacagcagctcctacatc

SEQ ID NO: 205820 - DNA, 471 bp, Homo sapiens
ccttactcattttggcagaaaaacttactctattgttgggaagtcacagacatgctacagacactgagaaaggctgtgaggggatgcagagtttcacaaagcacagtgatcaaaggccgtagcggtggggatcgtgctaccgacagagaaactacgaaatccaaaygcagggagagtggccttttaggaagtaagtctatatcagtcactcaaacttgaccccagattaaacaacctggctgagttccatgagcagctgacaacactgggagtaaggggtgtcacatgaaaaggacttaaaacaagcagctagaagaaaggaagggtagaaactgctccagggctctcaggaatggagggcaatactgggaacaggtggacagatgcacaaaaaacagccccaaagaggtttcctgttcagcagtcatttgacaaggggaagatccaggaggcagctgaagggagcaagga

SEQ ID NO: 205821 - DNA, 642 bp, Homo sapiens
tgctgtataccttatttaaaataatttatgtgaggagtctaaacttatgcaatggatatattatgaccctctccactataaaagwcttagatactgacattgtctattacagagaagtatgtgtagtttctgacgctgccagagagagacaaacagccagtgaaacttcatgttcaaacattagtaggaactactcactgtcagtagtacaaataagacagtgagaaatcaggtcttgatttatatacaaccctttaaatctaacttttcatagtctgaggttgcataatattctgtatgtaacttaaatctctcatattgactgttcatcaaggatctactctttggttaaaccaaaaaaggtaaaatgaatgctcttaaaaaggccactgttttgttttgtgtttcttcagagcagactctgagaaaagaactggagggcacataatttatttgggaggggatccccggaaacaagacaagataaaggtgggatgagacagggaaaggaaaaatgccgataaaaggacttttaataagcaaatgatgactgaggacatgcggaactgagtctccttgggaactctgggaggctgggtaggaaatgcctccaggaaaggaggatgcttagtggtctcagta

SEQ ID NO: 205822 - DNA, 555 bp, Homo sapiens
ttcttaatgacatataggtgtaagatactgttkttttcctattttacagtcctgcatgtggagtcactgaaaatataaaattaagttactaaaaaaagaaggaaattatttggggaactatatagcagataatataggaaaatctcctagcccagtggaaactgttttattttttagaaacactgcccctaatttaactgctcaaagagattttctttacctaaatgctcatgatagagacagagagaggcatacagagagaaagacagagagagacacacacacacaaagaaacagaccactgaaggagaagttcagaaatgatggaaagaaggtgtttagcaaaatgcctcttcaagagtttattcaaaggacaaaggtaactcttaactgctgttctcaacctctattggttttaatatatctttctatacttaaaaaaagaagactccaaagaccatttgcttgtgggaggtaaacatctttcaatatgttctatatttaaaattaaagttgggaaacataaaggatatttattaatttgttttcaaataa

SEQ ID NO: 205823 - DNA, 555 bp, Homo sapiens
ttcttaatgacatataggtgtaagatactgttgttttcctattttacagtcctgcatgtggagtcactgaaaatataaaattaagttactaaaaaaagaaggaaattatttggggaactatawagcagataatataggaaaatctcctagcccagtggaaactgttttattttttagaaacactgcccctaatttaactgctcaaagagattttctttacctaaatgctcatgatagagacagagagaggcatacagagagaaagacagagagagacacacacacacaaagaaacagaccactgaaggagaagttcagaaatgatggaaagaaggtgtttagcaaaatgcctcttcaagagtttattcaaaggacaaaggtaactcttaactgctgttctcaacctctattggttttaatatatctttctatacttaaaaaaagaagactccaaagaccatttgcttgtgggaggtaaacatctttcaatatgttctatatttaaaattaaagttgggaaacataaaggatatttattaatttgttttcaaataa

SEQ ID NO: 205824 - DNA, 442 bp, Homo sapiens
gcttcatatttttctgatgggtgtaaattgatttcttttttactatagctcctttaacacagtctctgtgttccatacataatgatttagtttaactgaaaatatctccccaaagcttacaaagatgaggatggagaaggagatgagaagcccagtactaacagtgagtgcactttgttcttgaacctgcctatgtctctatttcctrtgtcacctcagataagtaacttaatctcttctggatcaactttcttcgcttacaatgtgccctagatcccagactagcccatgtgttttaaaagttcatgtttctgtgttttacctctgttctattgaaccaaaaatcctgcggttggagaatcaaaaacaattttacaaaacctctcttagtgatcccaaaccaattgatccctggatgagaatttaggaataataaaaacat

SEQ ID NO: 205825 - DNA, 442 bp, Homo sapiens
gcttcatatttttctgatgggtgtaaattgatttcttttttactatagctcctttaacacagtctctgtgttccatacataatgatttagtttaactgaaaatatctccccaaagcttacaaagatgaggatggagaaggagatgagaagcccagtactaacagtgagtgcactttgttcttgaacctgcctatgtctctatttcctatgtcacctcagataagtaacttaatctcttctggrtcaactttcttcgcttacaatgtgccctagatcccagactagcccatgtgttttaaaagttcatgtttctgtgttttacctctgttctattgaaccaaaaatcctgcggttggagaatcaaaaacaattttacaaaacctctcttagtgatcccaaaccaattgatccctggatgagaatttaggaataataaaaacat

SEQ ID NO: 205826 - DNA, 538 bp, Homo sapiens
attttagaaatagagacgctttttctttctcttggataagacacagtggaatccatttctaattatgaaaataagaaaaagacaaatttctttccaagttaatactcaagaactttctgtggaggtagttttagcagccataatttgacctgagtatttctgaatccttgtgataatatgtaacattataacagattggtactttcagagtaatatggaactcagagaaatttatgatattgcaataaaataatacagattttaaagactactttctggatatggatttcaaagcctgcragcaaaatatgttggcttttttttctctatttctctttacctacccaaataatttgtaaaggatttatctaagatataatcatctctgctatctcagggactattaagagatggtggaccttgacacaatgaagaatggaaggcccagatttaaggacattgcaaattacatgggactaattccaattccttcagaggacaaatttctttggggtctgagtcatatagtttggctgca

SEQ ID NO: 205827 - DNA, 424 bp, Homo sapiens
gataagtaaaagataatccacaaaagtctaaaagtaragcttctaaggagtacacaaatgctaggttatgttttttttctcaagagaaggacagcacatttattattagctgctgaaacccaaccgttttctaaaactttccatattaatgacagctcttaagaattattcccattaagaggttaggagtcattacactttattatcttccatgtcaacaaatattattacgaacaagtgaattaaatattcaaggcatttaacgcatttatttacaaatcccaagaatgaatttgttcacgtagtttctgcctcatcaagcattaaaaagccttataccatatgcctttcacagcttgacaagtctgtcaacctaacttcacccatgtgcatgaataggtaaatccacaaagacacaaggtaa

SEQ ID NO: 205828 - DNA, 424 bp, Homo sapiens
gataagtaaaagataatccacaaaagtctaaaagtaaagcttctaaggagtacacaaatgctaggttatgttttttttctcaagagaaggacagcacatttattattagctgctgaaacccaaccgttttctaaaactttccatattaatgacagctcttaagaattattcccattaagaggttaggagtcattacactttattatcttccatgtcaacaaatattattacgaacaagtgaattaaatattcaaggcatttaaygcatttatttacaaatcccaagaatgaatttgttcacgtagtttctgcctcatcaagcattaaaaagccttataccatatgcctttcacagcttgacaagtctgtcaacctaacttcacccatgtgcatgaataggtaaatccacaaagacacaaggtaa

SEQ ID NO: 205829 - DNA, 424 bp, Homo sapiens
gataagtaaaagataatccacaaaagtctaaaagtaaagcttctaaggagtacacaaatgctaggttatgttttttttctcaagagaaggacagcacatttattattagctgctgaaacccaaccgttttctaaaactttccatattaatgacagctcttaagaattattcccattaagaggttaggagtcattacactttattatcttccatgtcaacaaatattattacgaacaagtgaattaaatattcaaggcatttaacgcatttatttacaaatcccaagaatgaatttgttcacgtagtttctgcctcatcaagcattaaaaagccttataccatwtgcctttcacagcttgacaagtctgtcaacctaacttcacccatgtgcatgaataggtaaatccacaaagacacaaggtaa

SEQ ID NO: 205830 - DNA, 619 bp, Homo sapiens
caccatgctatactgctatgccttgcctcgcctttctgatgctcgtcccttccgttgtatttctcttgggttctgataagactttgagttccaagcaccccattcttaccatgttctgtgggactcttggcctcttttcttaccctattccacctttctcccttctctagtcactaacagtggtttagaacgtgggctggtaagccagacagacctgggttcaagcccaggctttaccattctctacttatatgcccctgaacatgttatttgacctttttcagtctcagtttttccatctgtaaaatggggacaaaagaagtctcggtctgtttccccattaaaagtctgaatctgaaaaatggggataacaatagtacctacctccctgggatgttctgaggattaagagatgatgcccgtcaagagcccagttcagtgtctggcacagaagtgggactgtttaatggytggccccgcccgggggtcgcccaaatgtcccgccttcagagtcctcgttctctagggacaccctagtgcgacccccgccccctctacctcctcgctgcggcctcctacggccccaggggccgcgggagggggcggggagttccggtcg

SEQ ID NO: 205831 - DNA, 442 bp, Homo sapiens
ggaattctatgggccgaagctgccaagtttagcctcagtggggaaggctggtcagcgccaataggtggaacagctggcccagactgtctcattccaggtctggctgactgygggggcgagagttggcataaagatgaatttgtccttctgctcaggctggtgtccaaatcctgcaactcccccagcttgtccttctttggagagacccgtggagatgtcccaagcttggggccccactgaaccagggtgtgtggcatgtttctcatgaggctggctgagtcagcagttacatttgatctactgaccctccctctcctctcctgacttggggtccagtaggcaacctcactccctgctaagaccagcgaacatgcttgagggatcactgaggggtaggagtgtggaccctctgtctgctacacactacactgtttctgctgct

SEQ ID NO: 205832 - DNA, 593 bp, Homo sapiens
catcttacaaaacccaactcaagcatcaccaaccccatgaagcctttctaatcgctacctcctctgtgccttgtgtgcacatcaagtactacattgaggatgctataagatagtggtataaccacatgagaaactgacattcatcagtacacagagatatagcaacacaggttgctaaaatatttaaatattcccttactcattgccaaatagtttatgttttgaggctcctagttgtcctaacaacatcccaattttcccaatccccccctaggaaccctcraacctcctcaagatccagcaactaaagttcccctctggcagacctagagttatttcaatacagtgttatacatatttaaatatcgtctctctgtctgcatggataacttgcctactaaaatcaacattgatttatatgctttggggaacagaacaggatattaactactggaaaagatgctccttgaggtccggaagcacatgactccccagcatccagaacactcagctacagtgagctcgtagcaacggctgagttgattcaatgtctcctatgcctcccctcctcagccaccacctggctcacagtg

SEQ ID NO: 205833 - DNA, 522 bp, Homo sapiens
atgcagaggcttgacccaaacaaatggaaatgattgaaacatgtgaagaaaaagtagctttctggaagttagaaattacacggcgcaaaggcacaaagtcagccagggtatgtagrggaaaagagagttatccacgcaataaactgtggggtatatagagggaaaagagaattatccactctatgaactgtggggtatatagggggaaaagagagttatccactctataaactgtggggtatatagggggaaaagagagttatccactctataaactgtggggtatatagggggaaaacagagttatctactctggataaaacaagagcgagtgaagaagattaatgttcctgacttgcatttactggactcagtggatattctctccttccctgcaacctgtgccctacagggtaagaatattccccccaccccgcccgctccccgatttcacagatgaagagtctgcaactcagggaggagaaacaacattctcgaggtcacagagctgtaaattaacag

SEQ ID NO: 205834 - DNA, 536 bp, Homo sapiens
tgtgggcatcagacagcttaggtgggcaaaactcaaaagtactagtcattaatcccacatctgtgcagataaacaggaatattttctctgagagaaagtgataaactgctttgtattgtgacagccaacatttgcatttaaaagaatgaagaacagaatgagaatattttaaaagttagcatttctccatgaggatagtaaattccttatgtagcttgcaatatattgagtaaagactcaagaaaggaacaaacgtggtctcttgtgacttgtcacatacatcaaactcagctcatccatttctgtgatagtaatgactaatattcatggaccacactatatgctaagccatcaatggatggggagaatgctgagatctcatgaagttatgtacaagcatgtgactctaataaagcttcagctttaagaaacattatccagttatgaaattkgtaaatagcaagatcttgcatatacttgtgaatcacaagtgtcagaaatgtaataaaccatttaaaaaggttgcctagtattga

SEQ ID NO: 205835 - DNA, 597 bp, Homo sapiens
ttgccttaaatttattttgtttttgaatatgtgaaacatctatgtggttcccaagtcaatacaatataaaaaggtaaactgagagcctcatttgccttytacattcctcccactgacccatctacaagtacctatttaaattagtttttgtgttgttatttgtgtttcttaataaatttttttaagtgtgcataggtacatgcataacacacataacacaattgtgattatgcatatgatggtctgaagctcctgtcttttgtctatggaaggccaactctatataccttattacactgtaactatgctatgttatttgagatcatataacgtataccactctatatgagcctataacgagcatatatactctttattttttaatgcctacacagtactgtactgtgtgggtataccatagtttactcaccttgaacgacatgtagatttttccagtgttttattaccaaaaatagtgctgcaatgaataaccctgtaggaatgttgctttgtttctgtgcattttttaatactgataaatctttactttaaaaaatggccttatcactactctcaagagcccacaatatttcaaaa

SEQ ID NO: 205836 - DNA, 587 bp, Homo sapiens
caaaaataaaaaaattagctaggtgtcatggtgtgcacctgagccgagatcgcaccattgcactcaagcctgggcgacagagtgaccctgtcacaaacgaaccaacaaaaacaaacaaacaaacaaacaaamaaaacaaacaacaccacaacctgaaaaggaagccattaaatattggtctaagattcaagccatttcaacatcgtgatgttattaaaatcattgctctaactaccctccccccaccagataaaaatcataaaaacgtggcttgcttcctgaaaatgctttcattgtcagctatatataaaacaattactttgttgatcatttcatcatctgaaggaaataaatgctactatggggcattaagaggctaacacagtaaagagtctgagctgcaattataatttgtttcttagcaactaatagcaaaagttataaagttggttctaaaactgtaagagacagcattacagccctgggaatattgtgacagtccttaacagtataatcttgtgagtaatttgcttttgatattatcataagataaattattttggatctgcttggtgaaagccctaaag

SEQ ID NO: 205837 - DNA, 572 bp, Homo sapiens
tagcgcacacctgtggtctcagctactcagtaggctgaggcaggaggatcgtttgagcccaggaggttgaggctgcagtgagttatgatcatgccactgcactataagcctgggtgacagagtgagaccctttctcgaaaaagaaataaacaaataaaattaaaacatgtaatggggatggctgtgaactgctgtgaacttaactgtgttcacctaaaattcagatgttgctatcctgacccccagtatgcctatatctaaagtaaggaagtaattaaggttaaatgaggccatggggtagagcctttgtctgacatgatactgtcttcataaaaggagataccaaagagctcrcactgtctcagccatgtgaggacacggcaaaaaggcatctgtctgcaagtcagcatgagagccctcaccagaaaggaagtcaggtggcaccttgatcttgtattcctcagcttccaaaactctaagtaaacaaatttctatagttcaaactacccagtttatggtattttgttatgacagctctaactgactaagacagggacttgaaatgtgctttg

SEQ ID NO: 205838 - DNA, 572 bp, Homo sapiens
tagcgcacacctgtggtctcagctactcagtaggctgaggcaggaggatcgtttgagcccaggaggttgaggctgcagtgagttatgatcatgccactgcactataagcctgggtgacagagtgagaccctttctcgaaaaagaaataaacaaataaaattaaaacatgtaatggggatggctgtgaactgctgtgaacttaactgtgttcacctaaaattcagatgttgctatcctgacccccagtatgcctatatctaaagtaaggaagtaattaaggttaaatgaggccatggggtagagcctttgtctgacatgatactgtcttcataaaaggagataccaaagagctcacactgtytcagccatgtgaggacacggcaaaaaggcatctgtctgcaagtcagcatgagagccctcaccagaaaggaagtcaggtggcaccttgatcttgtattcctcagcttccaaaactctaagtaaacaaatttctatagttcaaactacccagtttatggtattttgttatgacagctctaactgactaagacagggacttgaaatgtgctttg

SEQ ID NO: 205839 - DNA, 572 bp, Homo sapiens
tagcgcacacctgtggtctcagctactcagtaggctgaggcaggaggatcgtttgagcccaggaggttgaggctgcagtgagttatgatcatgccactgcactataagcctgggtgacagagtgagaccctttctcgaaaaagaaataaacaaataaaattaaaacatgtaatggggatggctgtgaactgctgtgaacttaactgtgttcacctaaaattcagatgttgctatcctgacccccagtatgcctatatctaaagtaaggaagtaattaaggttaaatgaggccatggggtagagcctttgtctgacatgatactgtcttcataaaaggagataccaaagagctcacactgtctcagccatgtgaggacacggcaaaaaggcatctgtctgcaagtcagcatgagagccctcaccagaaaggaagtcaggtggcaccttgatcttgtattcctcagcttccaaaactctaagtaaacaaatttctatagttcraactacccagtttatggtattttgttatgacagctctaactgactaagacagggacttgaaatgtgctttg

SEQ ID NO: 205840 - DNA, 529 bp, Homo sapiens
gctcagatattgctcttctcctgcccttggcctggaatttacactatcagcacccctggttctcaagcattcagacttggactggaattataacaccagctttcctaggtttctaccttgcaggcagaaggtcatgggacttcatactccataatcatgtaagccaatttatcatattaaatctctctctctctctctctctctatatatatgtgtgtgtgtgtgtgtgtgtgtgtacgcatgtacaaatgtgtacttatatacaaatagaacacatgtacttgcccatgtctttgactagaagaatgaataaataagactgcagggggttagggtgtccagggccaagwaggccaagttttcagagtatatccaagcaggaactactcaagtataattatccaagtactcaaaaagaaagaactcattagtttaaaatcttccctatactcataccagcacttacttctgtaggagaaagggaactagcgcttattgaataccttctatgagccatggtattgaattc

SEQ ID NO: 205841 - DNA, 529 bp, Homo sapiens
gctcagatattgctcttctcctgcccttggcctggaatttacactatcagcacccctggttctcaagcattcagacttggactggaattataacaccagctttcctaggtttctaccttgcaggcagaaggtcatgggacttcatactccataatcatgtaagccaatttatcatattaaatctctctctctctctctctctctatatatatgtgtgtgtgtgtgtgtgtgtgtgtacgcatgtacaaatgtgtacttatatacaaatagaacacatgtacttgcccatgtctttgactagaagaatgaataaataagactgcagggggttagggtgtccagggccaagaargccaagttttcagagtatatccaagcaggaactactcaagtataattatccaagtactcaaaaagaaagaactcattagtttaaaatcttccctatactcataccagcacttacttctgtaggagaaagggaactagcgcttattgaataccttctatgagccatggtattgaattc

SEQ ID NO: 205842 - DNA, 433 bp, Homo sapiens
attatgctatatgataattacagggtatagttttgtctggctctctcactrgtccacatacaccctgagaactgaattggatccatgtttttatattttacttggtattaaacattggtacatagtagatgttcagaggtttcaaacacagttggcagttgttctgtctaggatattagcttcattttactctaaccagccatttatcctacataaaattcaaggtcagtaatcacctgagatttctaagaagggattattattaattaattactgatgctgtcaagaacttgttaattctcctctatgtttgaataatcaagtacctttgggcaaatgtgctgtaaaaacttgagttatccatactcagtatggagatttcttttgtttatttttccttcttcccataaatatttaatgaataccaactgga

SEQ ID NO: 205843 - DNA, 563 bp, Homo sapiens
gcacaatagtaaatattttaagttttgtggggcaagggtttttgttacagctattcaactctctgcacctatagcatgaaagttgccttaggcaatatgcaaaggaatgagtgtggctgtgttgcaataaaactttattggtggacactgaaatttgaatttcatagaattttcatgtgttatgaaatgttaatattctccttttgatttttkacagctgaagtctttcttagtccatgtgctgtacaaaaacagacaactgtcaggatttgcccccataggctatagtctgctgaacctgctctaggaggaaaggcagtcaagctttgtcacttgatgatggataatgacccttccccataaataaagaggatattgttaaggatggtaaaggaagcaacagcaacctctttcatggatgggatactgattatttgcctaaattgtgatgttgccattattaccccacttattgatgataaaataagggttagagagttaaataacctacctaaggtcccatagctagtgtggggctacgtatctggacaatttcaaagatc

SEQ ID NO: 205844 - DNA, 457 bp, Homo sapiens
taacccattccaggtattcaaatggagctactctccattttctatatatactttatacactttgcttctgtattgttacctaaaattgcctttgtttttagcctagtgcatgtccaaattctaactactcattgaagtgggggtctgtaaactaaatgcacgtggattaccttagaaagaatccataaattactgaaattaaatacaagatgctgggcttgtaaattttgcaggtaagaaacaattattttcatcacatgactaaaggggtctctgacatcctcagtaaaaaaaacttaagaacaatygtaacctagagcctagtgaacgagccaccttttccatgaagaggtccttgatctcttcagcccacaggtagaaaaggttgacagaaccgccttgagggcaaaatcaacacctttcctcacaagattcctccaagagatcataaatgttt

SEQ ID NO: 205845 - DNA, 457 bp, Homo sapiens
tattcaaatggagctactctccattttctatatatactttatacactttgcttctgtattgttacctaaaattgcctttgtttttagcctagtgcatgtccaaattctaactactcattgaagtgggggtctgtaaactaaatgcacgtggattaccttagaaagaatccataaattactgaaattaaatacaagatgctgggcttgtaaattttgcaggtaagaaacaattattttcatcacatgactaaaggggtctctgacatcctcagtaaaaaaaacttaagaacaattgtaacctagagcctagtgaacgagccacyttttccatgaagaggtccttgatctcttcagcccacaggtagaaaaggttgacagaaccgccttgagggcaaaatcaacacctttcctcacaagattcctccaagagatcataaatgtttcatggtcaaggagt

SEQ ID NO: 205846 - DNA, 584 bp, Homo sapiens
gtggaaaggcatgcttgcttcttttaagggctgtggttatartctgtatgggtatgtccacgtaaaattacatttatggaaccctggagaggtttgcatatagagacgttttgctgggataagtcctacttgattttgtaatgcagggactcaagttttccaccctggctgcatattaaaattacctggatgatgccagaggatcccctgccatcaagaaactcagatttaattgacctggggtgagcgccaaagaaccactgacacagaaagtacagtacatgtttccagtttttctgctatatacaaataaaagggcgcattctaggcaacagtaactcttattcctgccattgattagagtgtgccctccataatctctttgcttctatttccttatctatgaaacacatgtccttacttcttatgggattattgtgaggattcaaagataatataatataaattaaagcactataaacactataaaggactctacagatgttcgtgttcgaaggtccctgggtctgatgccctgtggataggatccaactctagtggggatgtgttctgtgtaaaagaaa

SEQ ID NO: 205847 - DNA, 584 bp, Homo sapiens
gtggaaaggcatgcttgcttcttttaagggctgtggttataatctgtatgggtatgtccacgtaaaattacatttatggaaccctggagaggtttgcatatagagacgttttgctgggataagtcctacttgattttgtaatgcagggactcaagttttccaccctggctgcatattaaaattacctggatgatgccagaggatcccctgccatcaagaaactcagatttaattgacctggggtgagcgccaaagaaccactgacacagaaagtacagtacatgtttccagtttttctgctatatacaaataaaagggcgcattctaggcaacagtaactcttattcctgccattgattagagtgtgccctccataatctctttgcttctatttccttatctatgaaacacatgtccttacttcttatgggattattgtgaggattcaaagataatataatataaattaaagcactataaacactataaaggactctacagatgttcktgttcgaaggtccctgggtctgatgccctgtggataggatccaactctagtggggatgtgttctgtgtaaaagaaa

SEQ ID NO: 205848 - DNA, 643 bp, Homo sapiens
aagacttctctgaagaagtgacccaggagataaggtctgagaatgttggaggggaaagaytgggtagaaggaaccaagagctaatgcatcctttttctaatctggccactggatctcgcttctcatccaaccagatgacctgctcagggtgaccccagtataatcccatacatacaaaaattggcaaatccattctaacaagtatccaaggactcttaaagaatagctttattctggctattctttttaggatcgaatgtcatccataatcatcacacttccatgcccctcagagacatcacataatgcgctgaatgaccagagtgcatttgttcactgtcctttatcaactaagaaaaaatgagcttcctacttctttgtctggttgatgggctgagtctctgccctattcagtacgagctgccacataccagacacaaatcaatatgccctactccccctcagtcaagagattcaaggtattccaataattaagcatcaatgtgtgtgcagaaaaggcaatatctccaatgattagtgttaaatttaattaactacctctaaaataaaatgacacataaactttgtaattaagaataattcttaattaagaaacatttgacagataggcaggaaaaagaaa

SEQ ID NO: 205849 - DNA, 549 bp, Homo sapiens
tgactgataccaatctcatcattggactagatttctcagtgaagataatctgagggttaatgctaactctcatagaatttaagtcaaaatatctgtctttgtttgcattgcccaaagaagttggatcaaaagagttacagctgggtggattttaacttttaacccagtttttcagatgtgttaatatatagtgcaaagtttccaatgtagttagagttactacaaccctaactgaaattgcctcatactgtgacattattatatcctacaatcactcatatatctttatttttccaactctaccatcacaactgagaaaaggtaatgtggtacatttacaaataaaagaggattaggattattttcattttaatattcccactataattatctrcagatttatgaagaccgagtcaagggttccatttgtagccatcaataaagagattaatttattattcccaatcgggctccaaccctcaaactatatttggccattggcttcgggatttggttatttcctcaaccctttgtgaagaaatcttttaa

SEQ ID NO: 205850 - DNA, 574 bp, Homo sapiens
ttcacagcttgagtgagctgaagtacagagaacaatttttcaataatgaaaactaacaaaagctaccctgatattactaagttctatatggaaatactgtgacaaacagacatcacaaawtcactgaactagaaaatgggataaaaaccagattcattcattcagttctcttaacatatgttcataaagcagagtccagatcttgctttaaggtcatggaacacaacaatgaacaaagcagacaaatactcctgcccttgtggaacttacatctgatcaggtgaggcaggaaaataataccatgataaaaagttaaatgacatagtgtgttagaaggtcatgcagtggtaatgggaaaaacagagtagaatcagagggattgagagagctgggagtaggaaggaaggctataatttttaaaaatggactctgggtaagtttcaggaagtaggtgcgtttgagtagagacctgaaggtggcaaggggtttagccagatgaatgtttacgggaaaacattcaggtagaagaaagggctcttaaagacaggattctgaacatgtttgaggaatatca

SEQ ID NO: 205851 - DNA, 574 bp, Homo sapiens
ttcacagcttgagtgagctgaagtacagagaacaatttttcaataatgaaaactaacaaaagctaccctgatattactaagttctatatggaaatactgtgacaaacagacatcacaaattcactgaactagaaaatgggataaaaacyagattcattcattcagttctcttaacatatgttcataaagcagagtccagatcttgctttaaggtcatggaacacaacaatgaacaaagcagacaaatactcctgcccttgtggaacttacatctgatcaggtgaggcaggaaaataataccatgataaaaagttaaatgacatagtgtgttagaaggtcatgcagtggtaatgggaaaaacagagtagaatcagagggattgagagagctgggagtaggaaggaaggctataatttttaaaaatggactctgggtaagtttcaggaagtaggtgcgtttgagtagagacctgaaggtggcaaggggtttagccagatgaatgtttacgggaaaacattcaggtagaagaaagggctcttaaagacaggattctgaacatgtttgaggaatatca

SEQ ID NO: 205852 - DNA, 436 bp, Homo sapiens
acaatgaacaaagcagacaaatactcctgcccttgtggaacttacatctgatcaggtgaggcaggaaaataataccatgataaaaagttaaatgacatagtgtgttagaaggtcatgcagtggtaatgggaaaaacagagtagaatcagagggattgagagagctgggagtaggaaggaaggctataatttttaaaaatggactctgggtaagtttcaggaagtaggtgcgtttgagtagagacctgaaggtggcaaggggtttagccagatgaatgtttasgggaaaacattcaggtagaagaaagggctcttaaagacaggattctgaacatgtttgaggaatatcacagagccagtttggctggaacagaatgaataaggaagataaaagttaagacatggagtcagggaggtattgggacagagaggggacc

SEQ ID NO: 205853 - DNA, 481 bp, Homo sapiens
gcctgttaagaaaagccagacttaccaggcttaggagaacaagggcagagcttcccactgaagacctagacacggcaatgcactggctgcctccaacctgtggctatcaggtccccatttcacatacccagcctgcttctcccttaacacactgagttgtctcacaaatagtagcgtttgccatcctgacacctctgttatctgaagtcaggacatgtgacctaactttggtttggtttgactctatctgaggaatggtaagaaggaccaagaaagcttccaatacttccaaggttaagaccaagggaygagatggagaactgtgggaagaggggtgaagtgctagccttacagcatgttagaagccctccctgtgtccaagaagacatctctagccttatattgcaaaatgacgagcactcagcaacatcaagagccttctttgcagagatttaaggcaagcacaggacctaaaatttca

SEQ ID NO: 205854 - DNA, 482 bp, Homo sapiens
tgcctgttaagaaaagccagacttaccaggcttaggagaacaagggcagagcttcccactgaagacctagacacggcaatgcactggctgcctccaacctgtggctatcaggtccccatttcacatacccagcctgcttctcccttaacacactgagttgtctcacaaatagtagcgtttgccatcctgacacctctgttatctgaagtcaggacatgtgacctaactttggtttggtttgactctatctgaggaatggtaagaaggaccaagaaagcttccaatacttccaaggttaagaccaagggacgagatggagaactgtgggaagaggggtgaagtgctagccttacagcatgttagaagccctccctgtgtccaagaagacatctctagccttatattgcaaaatgacgagcactcagcaayatcaagagccttctttgcagagatttaaggcaagcacaggacctaaaatttca

SEQ ID NO: 205855 - DNA, 458 bp, Homo sapiens
accaggcttaggagaacaagggcagagcttcccactgaagacctagacacggcaatgcactggctgcctccaacctgtggctatcaggtccccatttcacatacccagcctgcttctcccttaacacactgagttgtctcacaaatagtagcgtttgccatcctgacacctctgttatctgaagtcaggacatgtgacctaactttggtttggtttgactctatctgaggaatggtaagaaggaccaagaaagcttccaatacttccaaggttaagaccaagggacgagatggagaactgtgggaagaggggtgaagtgctagccttacagcatgttagaagccctccctgtgtccaagaagacatctctagccttatattgcaaaatgacgagcactcagcaacrtcaagagccttctttgcagagatttaaggcaagcacaggacctaaaatttca

SEQ ID NO: 205856 - DNA, 441 bp, Homo sapiens
atgggggcacagtttcctgggctgtcwaacacagggtgaaagctatgtgttggagactatttatctgaaagccatacataagatggaattgggtgggagtggtagaggccaacctgaggtagtaaatgtggccatatttaaaagatccccagccagactccttcatccctgactttacaatttacttccaagctaccactcgggggtctgcatttatctactcccctcccttcatccaagctgaacatagcaatggcctctgtctttcagacttgagatttcaatatcatcttctactgtttcttatcccacagtagccgcatctatctgattgccatttacgtagacattcttgctaattcatttaattttaacagtgtgcttaacatcatatgatgaacccctatcatctgtgtgctgtcatctccaaccacactgcca

SEQ ID NO: 205857 - DNA, 438 bp, Homo sapiens
ttaggtgatgggggcacagtttcctgggctgtctaacacagggtgaaagctatgtgttggagactatttatctgaaagccatacataagatggaattgggtgggrgtggtagaggccaacctgaggtagtaaatgtggccatatttaaaagatccccagccagactccttcatccctgactttacaatttacttccaagctaccactcgggggtctgcatttatctactcccctcccttcatccaagctgaacatagcaatggcctctgtctttcagacttgagatttcaatatcatcttctactgtttcttatcccacagtagccgcatctatctgattgccatttacgtagacattcttgctaattcatttaattttaacagtgtgcttaacatcatatgatgaacccctatcatctgtgtgctgtcatctccaac

SEQ ID NO: 205858 - DNA, 438 bp, Homo sapiens
ttaggtgatgggggcacagtttcctgggctgtctaacacagggtgaaagctatgtgttggagactatttatctgaaagccatacataagatggaattgggtgggagtggtagaggccaacctgaggtagtaaatgtggccatatttaaaagatccccagccagactccttcatccctgactttacaatttacttccaagctaccactcgggggtctgcatttatctactcccctcccttcatccaagctgaacatrgcaatggcctctgtctttcagacttgagatttcaatatcatcttctactgtttcttatcccacagtagccgcatctatctgattgccatttacgtagacattcttgctaattcatttaattttaacagtgtgcttaacatcatatgatgaacccctatcatctgtgtgctgtcatctccaac

SEQ ID NO: 205859 - DNA, 436 bp, Homo sapiens
tgggggcacagtttcctgggctgtctaacacagggtgaaagctatgtgttggagactatttatctgaaagccatacataagatggaattgggtgggagtggtagaggccaacctgaggtagtaaatgtggccatatttaaaagatccccagccagactccttcatccctgactttacaatttacttccaagctaccactcgggggtctgcatttatctactcccctcccttcatccaagctgaacatagcaatggcctctgtctttcagacttgagatttcaatatcatcttctactgtttcttatcccacrgtagccgcatctatctgattgccatttacgtagacattcttgctaattcatttaattttaacagtgtgcttaacatcatatgatgaacccctatcatctgtgtgctgtcatctccaaccacact

SEQ ID NO: 205860 - DNA, 527 bp, Homo sapiens
ggctggtcttgaacccctgggctcatgtgatcctactgccttgacctcccaaagggctgagattacaggcatgaaccattgtacctgacgtagagaactttctatgtgacaggtacttgcrttaaacatgtaattaatattttgaaattcaaacgcaataaaaatggtatagtatatgtaaataataataggtgtatttattgatatatgtaaattttctattctaatagattttaaattattgtaagattattgcaaaaataatacataaacatattaaagtacttaattcattaattcagttaattttcacaacagccttaggaagtagatgctaccattctctctactttatggattataaatctaaggataaggaagttaattcatttacccatagtcacccagaaaacaagttgaagagctggatttgaacgcaggtagttttgctacagactccaaagaatgacatctggaacaattaattaatagttctgtgatctctggcaattgtagtgctaagtctc

SEQ ID NO: 205861 - DNA, 527 bp, Homo sapiens
ggctggtcttgaacccctgggctcatgtgatcctactgccttgacctcccaaagggctgagattacaggcatgaaccattgtacctgacgtagagaactttctatgtgacaggtacttgcgttaaacatgtaattaatattttgaaattcaaacgcaataaaaatggtatagtatatgtaaataataataggtgtatttattgatatatgtaaattttctattckaatagattttaaattattgtaagattattgcaaaaataatacataaacatattaaagtacttaattcattaattcagttaattttcacaacagccttaggaagtagatgctaccattctctctactttatggattataaatctaaggataaggaagttaattcatttacccatagtcacccagaaaacaagttgaagagctggatttgaacgcaggtagttttgctacagactccaaagaatgacatctggaacaattaattaatagttctgtgatctctggcaattgtagtgctaagtctc

SEQ ID NO: 205862 - DNA, 607 bp, Homo sapiens
gttgaatgtagctctggctttgatttacctttcccaccaagctgctgtacacaagatctgagtgagagaacgcccctcatgctcacttcctcttgtcacctgaggggcaagtttctaggcattcaaactctgtgcagctctatctaaaagaccaagtcaatggggtggaaaaacgaaagtgtacttaaattaatgaaccattcactcatgcattctcataattttaaccacagactcctttttcatgacactttccagaagyttgtcacagcaatttcaaatacattttcctcagcacctcagcactcactgtgtctacacagagccatgctcacagcagaccatgaagaaatgaatgagagaatgaaggcatgttaagaaagtgagcctatgaatggtagctatgaagaaaggaggttcagatttccctatgttgacaacacattttaatttccccgaatggctgagtctaccccaggaaattctctaccatttttccccctgaagattcttttgaaaaagtctttaaaaagaaaactttaaaaaatcatctttcttaaactgacttagatatattctccaccaaaatcttccttctctacatctc

SEQ ID NO: 205863 - DNA, 535 bp, Homo sapiens
ctatcttgaaacatgtgtcccgttaccagaccacgcaacctatagtgcagtatgcattaatcaacttttaaaaataaatctattattttgtaaatagcacctttacatatcattgtaatcttagggtgacaaaagagttaatttgtgaaaggtaaataattgcagtttatcgtgacttayaaccctattctgacatgtcatcgttgtgaaatgtcctaagagcacaggcctctatagatctcaaagaagtcctgcccttagagtctattcatcagaaatccctgcctatccctccagtttccttccatatcacactgtctttggctcaccccatcctcactctggtctctgcgaagttcctctaatacaacacattctttctggtccctgagctattgctgctacttctgccacctgggaggcttctgtggggctggctctgtctcagccttcacatcgtgactcacctgtcacctccttaggggcttttccttcacttgttgccatgtcagctattttcctactttgatcactg

SEQ ID NO: 205864 - DNA, 569 bp, Homo sapiens
agccttcaatgtttgacacacagtaggtagtcagcgtttattggggaggtgaaggagtagattcgattcagctgcttcctctcagttccacacccagccttctatatcctgctttgtatgagccaggagctgagaccatgtaaactttgttactgcttggccacaggcccytgtaaaatgcatccaataagatgcaccagacagagtctgtgaggctctgggatggagaagggacttgctccttactgtctcttgtcagcagcaccccagcctcatttcttcaccccagtaagtgttcgtctagaagcagcagctgaatcccatttgccatcaatttttccaacatttgaaaagcagccacatcacacctagtcaaaaatctcagcaccagctgaggggtgctccaccccagaggcctaagtttgaataattgtaacctctgcttccccttgttcccaagtccacagggacttggttgctacttctgtagtaccttggatttctttcttgcctttttaattcttcaaagcaaagttaacgattctttgtattcaattctctctgttgaa

SEQ ID NO: 205865 - DNA, 569 bp, Homo sapiens
agccttcaatgtttgacacacagtaggtagtcagcgtttattggggaggtgaaggagtagattcgattcagctgcttcctctcagttccacacccagccttctatatcctgctttgtatgagccaggagctgagaccatgtaaactttgttactgcttggccacaggcccctgtaaaatgcatccaataagatgcaccagacagagyctgtgaggctctgggatggagaagggacttgctccttactgtctcttgtcagcagcaccccagcctcatttcttcaccccagtaagtgttcgtctagaagcagcagctgaatcccatttgccatcaatttttccaacatttgaaaagcagccacatcacacctagtcaaaaatctcagcaccagctgaggggtgctccaccccagaggcctaagtttgaataattgtaacctctgcttccccttgttcccaagtccacagggacttggttgctacttctgtagtaccttggatttctttcttgcctttttaattcttcaaagcaaagttaacgattctttgtattcaattctctctgttgaa

SEQ ID NO: 205866 - DNA, 569 bp, Homo sapiens
agccttcaatgtttgacacacagtaggtagtcagcgtttattggggaggtgaaggagtagattcgattcagctgcttcctctcagttccacacccagccttctatatcctgctttgtatgagccaggagctgagaccatgtaaactttgttactgcttggccacaggcccctgtaaaatgcatccaataagatgcaccagacagagtctgtgaggctctgggatggagaagggacttgctccttactgtctcttgtcagcagcaccccagcctcatttcttcaccccagtaagtgttcgtctagaagcagcagctgaatcccatttgccatcaatttttccaacatttgaaaagcagccacatcacacctagtcaaaaatctcagcaccagctgagggrtgctccaccccagaggcctaagtttgaataattgtaacctctgcttccccttgttcccaagtccacagggacttggttgctacttctgtagtaccttggatttctttcttgcctttttaattcttcaaagcaaagttaacgattctttgtattcaattctctctgttgaa

SEQ ID NO: 205867 - DNA, 568 bp, Homo sapiens
tctatctctggcgaacgcatttgcagatcaagtaagtgtagattcaacaaagacttaactttggtgaaaagatatgctctcataaggggaatgcattggagaattagagaccaatcagaaaggagagattatatttccaaaggcagaggttgctgggcataacccaagctttcttgataatcgttttacctttacaaggagctgataccaccagaaaagttttctccttcctctttaatacgtacacttgtttaacattagttgagatccagaaaagagtgaatgactaaacatttcaatccctgtagacacaaatggasttcacttcactattgactcttttgaacaagtggtctaagtgtggaggccacaagagaagatatttctatttcaaatcaaagactgtgaagggtggtagttgagcctaggggatcatcaatcctctctgtctcaccatgtgcatagggatatttattaaaactctcaaagtggccagaaatatctctgcttattgacctttaaacaagcttctagcacccaagcatactgtggtgtaaccaatagcaca

SEQ ID NO: 205868 - DNA, 590 bp, Homo sapiens
ggtcgaactattctgattgccgttttggctctgttgctctttctactaaccatgctcaccatcatctccatagtatccagagattctagtttgatggcagcacttcctactaccctctgagctacagagaatagcacaacgaaacactttggaagatgctggggcttctttcataaatgtagttctcacaggcttggtaaagggagtatagtctggaacttcccagggggcatagtgagagggcaagtgaagttcttaggtaataaatacgcttgagcattccaatctccctaagactttgggcaccttctaaactcaatgacccaaagtcataccataagaatctaaatgaagatgagcaaaaaaccaaggtaagtaaaagtaaggaaataaaaaataataaatatttaaatgtaataataaataataaaataacaaatatttgaataaataataaataaaattgggaagaaacaattgagaaatttaacaaatgagtaatatttaactgtaaaaatgaatgtagactatcattacagatgctcrttatcttataatagttatatccagataaacctaatgtaaatcaa

SEQ ID NO: 205869 - DNA, 492 bp, Homo sapiens
agatatgtttatctcttttatgttttgttcattatctwgcctacgttatccttggtaatttttatttattttgaataggtattcaaagatattcaaatattcagatgtttgaatgtcataaagatacccatcattaattaaactcctaaaagtgcaccagttactgtggtaagtgttcgatatgtctcatctcatttattccttacagcattctggtaaggaaaacaccatttacttatcccattttatagatgaggaaactgagggtcagagaggtttcattttgctgattcaaagtcacactgctaccaagaggagatacctggaggaagtttgtatgctgaagaatctgcgtgttaaaacaacaatatccactgacccactgggcctgtatgccacagaccagtccgctttgctgaagacacaggcaatgcatatcctaaatctgtgcttgtgcctctcaatttggctgccgtaaaaaagcctgaacaa

SEQ ID NO: 205870 - DNA, 574 bp, Homo sapiens
gtcaagctttatgaaagcttggagcaaaamaaaagccacagtatacaggagtaatcacatctaactgcatagcactaaaaaacaacctgatattttaaaagtgtgggcattgtgggtaatgataagagaggaaaaaaaaataagaaaatttaaaagtgagggcacaaaggcaatctacagattaagagaaaaatctgcaaaccatatatctgataagcagttaatttccaaaatacatagggtactcctacaactccaaaggaagaaaacattttttaatgggcaaagcaggattttaaggctgcagtgaaccactccagcctgggcatcagagtaagactctgtctcaaaaaaaaaaaaaaagggtcctaactaaacagacacctgtcaggtatataaaaaggtgctcaacattactaatcatcagggaaatgcaaatcaaaaccacaatgagatatcacctcacacctgtcaaaatggctcttgtcaaaaagacaagagacaacaaatattggggagatgtagaaaaaagggaatcctggtacatgtcagtagaaatgcaaaatggtgcagc

SEQ ID NO: 205871 - DNA, 617 bp, Homo sapiens
aaagctagaccacttctccaagatataaacatacatttatatgcatagacttgttctgaacatgtcatccctagccagagatgaccctcccaggccctccctgtggatcctatgtcttccctgccctgatgatgggctggttgagtgcaccctttcctttaccctgctctgctgcctttgctcccatgataaaaaggtaaagggtccagaagtggaatcctgaaggacagaatccagaaratcactttatttatttattttttatttatttttgttttttccactgggtgatatttttaattttactacataaactcatatatcacttaacaatatggatacattctgagaaatgcaatgttaggcaatttcatcattgtgtgaacatcatagagtgcacccacacaaacctatacggtgtagcctactacacacagaggctacatggtctaaactattgctcctaagccaaaaacctatacaacatgttactgtactgaacactgcaggcagttgtaacccagtggtaagtatttgtgtatctaaatacatcttaaggtagaaaagatacagtaaaaatattgtattataatcttttatcataccatcatatgtac

SEQ ID NO: 205872 - DNA, 505 bp, Homo sapiens
aatgtggcttgttctcctcatggctacacatgcttctacaaatgatcctgagggacaatttgtatttttaaaaaatgctctcacaatttaaatttaaagattttaaaggtctttgctttgttttttaattacttgtacattttattcttcagaataccatcacatacacacaaaagttscacattgttttttaaaagtcattaccacatcttggcagatggctcgaaataactgctttatcgatctggtagcaattaattctccattgtggattgttttttctgtacaacattcgctcatcctaatgagggtccttgatggaaccaagttgtaatggagctctttaaaaattcttgtatggcagctgtcggtcccaatccagtttagttcatcaagcatttattaagtgtttacaatatgccagttactgggaatgcaatgacaaataaccctaccttctaggagcaaacattgtaatgcctgagatagactacacagacaaaga

SEQ ID NO: 205873 - DNA, 505 bp, Homo sapiens
aatgtggcttgttctcctcatggctacacatgcttctacaaatgatcctgagggacaatttgtatttttaaaaaatgctctcacaatttaaatttaaagattttaaaggtctttgctttgttttttaattacttgtacattttattcttcagaataccatcacatacacacaaaagttccacattgttttttaaaagtcattaccacatcttggcagatggctcgaaataactgctttatcgatctggtagcaattaattctccattgtggattgttttttctgtacaacattygctcatcctaatgagggtccttgatggaaccaagttgtaatggagctctttaaaaattcttgtatggcagctgtcggtcccaatccagtttagttcatcaagcatttattaagtgtttacaatatgccagttactgggaatgcaatgacaaataaccctaccttctaggagcaaacattgtaatgcctgagatagactacacagacaaaga

SEQ ID NO: 205874 - DNA, 505 bp, Homo sapiens
aatgtggcttgttctcctcatggctacacatgcttctacaaatgatcctgagggacaatttgtatttttaaaaaatgctctcacaatttaaatttaaagattttaaaggtctttgctttgttttttaattacttgtacattttattcttcagaataccatcacatacacacaaaagttccacattgttttttaaaagtcattaccacatcttggcagatggctcgaaataactgctttatcgatctggtagcaattaattctccattgtggattgttttttctgtacaacattcgctcatcctaatgagggtccttgatggaaccaagttgtaatggagctctttaaaaattcttgtatggcagctgtcggtcscaatccagtttagttcatcaagcatttattaagtgtttacaatatgccagttactgggaatgcaatgacaaataaccctaccttctaggagcaaacattgtaatgcctgagatagactacacagacaaaga

SEQ ID NO: 205875 - DNA, 338 bp, Homo sapiens
gggctctggttgccaacaaacagcatttgtaaatggtctattagccttcatttatactgcctaacaattatttgaaggaataaattgatgtcaatggctcgtacgcattcaattcttgggagctttcctgtttaatatgtggcaaatatgtgatcttaaatttataaggactatccatctataaacatctggtacctgcatgtgacttgttatttatttgtctgctaggctctttttgtttcaaatttgytctcagactacttctgggacatcagactataatctcactacaactggcttttgtcccattgattcaaattatgctattcacttgtagg

SEQ ID NO: 205876 - DNA, 438 bp, Homo sapiens
gtaactaagtgctaagatttttacttggaaagaaaactatgacaatgccttcagttgtagcagaaagttgtggcattgtgataataaacaaaatctacaaagttacaacccaaattatacaagacatcaaaacactcagtaaacaaatatatatttcacctacttaaatcttattcatattaattataggccttttgtttagtacactggttattttttaaggaaccaatttaaactttcaattttaaatacatctatgctgacgatagactttygggtatatacaaccttcttcttctcttttaaaagttaaatacattccactattaactgaacttccatgaagcaacattaattttagagcatggtagtccataatcagtggttcattgtgatgtgctttatccaacatgtatcttagtgcatggttgaggatgt

SEQ ID NO: 205877 - DNA, 564 bp, Homo sapiens
tataattttatgagggacttccacttaaacatggggattgaatgtacatatttttctatttctccacaaaaacgacagcaaaagaattttttaaaatggcataagcttgcaaggacaaaggcaatggaaaagaagctgacacacaacatttcagaaactggaagcagccaggyaggtcataattgacttgggaacagagtgagcagaaacctaaggcaagtaagggaaatgcatcagtaagctaatttactccatagaattccaggaagacttggaaaattgaggatccagggacttatggaagtggggacactggtgggtttcaaaaacaggagggtcagttgaaaatttataaataaagcagttaaaatattttcacccacctcatgtcattggatgactacctttcactcacgccggttctaaacatacaccctctggagaggctgattccaaagggattcaggactcagatgtggcaaccattgctgagaaaaaggctacaatattagaaccagactaccatattagaaccaagtacatattctgcattgagaaacccca

SEQ ID NO: 205878 - DNA, 564 bp, Homo sapiens
tataattttatgagggacttccacttaaacatggggattgaatgtacatatttttctatttctccacaaaaacgacagcaaaagaattttttaaaatggcataagcttgcaaggacaaaggcaatggaaaagaagctgacacacaacatttcagaaactggaagcagccaggtaggtcataattgacttgggaacagagtgagcagaaacctaaggcaagtaagggaaatgcatcagtaagctaatttactccatagaattccaggaagacttggaaaattgaggatccagggacttatggaagtggggacactggtgggtttcaaamacaggagggtcagttgaaaatttataaataaagcagttaaaatattttcacccacctcatgtcattggatgactacctttcactcacgccggttctaaacatacaccctctggagaggctgattccaaagggattcaggactcagatgtggcaaccattgctgagaaaaaggctacaatattagaaccagactaccatattagaaccaagtacatattctgcattgagaaacccca

SEQ ID NO: 205879 - DNA, 564 bp, Homo sapiens
tataattttatgagggacttccacttaaacatggggattgaatgtacatatttttctatttctccacaaaaacgacagcaaaagaattttttaaaatggcataagcttgcaaggacaaaggcaatggaaaagaagctgacacacaacatttcagaaactggaagcagccaggtaggtcataattgacttgggaacagagtgagcagaaacctaaggcaagtaagggaaatgcatcagtaagctaatttactccatagaattccaggaagacttggaaaattgaggatccagggacttatggaagtggggacactggtgggtttcaaaaacaggagggtcagttgaaaatttataaatraagcagttaaaatattttcacccacctcatgtcattggatgactacctttcactcacgccggttctaaacatacaccctctggagaggctgattccaaagggattcaggactcagatgtggcaaccattgctgagaaaaaggctacaatattagaaccagactaccatattagaaccaagtacatattctgcattgagaaacccca

SEQ ID NO: 205880 - DNA, 448 bp, Homo sapiens
tgggagatttggcatatgcctcattatatccccaccctygctaacagtcgttaggttttcttccttaacagctaaacagaaaccagcctttccaaaagactactagcttatcttcccagatacgtaacagtccagatgagattcattatgttcaccttattttatgtaagatgtagatttaccaggcactaactaaagttttacaagtatgtaatcatttgtctcactgctgccccaccacctcccctgccttttaaggaaaatatataaatactaaacctcctaagaacctctttggaaaaaacagtcacacatgcttctgtgactctctattttcccaggtatgccttcaagctggctcaacaaagcttgatgctttgaaacttatgcttcaattactcatttcagttgtcagtgtaaaaggtgtatatgaaatagaaaagaattc

SEQ ID NO: 205881 - DNA, 631 bp, Homo sapiens
ctgttgacacttgagctaagagggaagtcaagctttgcaatggaagctgggaggggagggagagagtattttttactgataagagatttgagagtataagcaagaagtgaaaagytggtttcttagaagggggtcttagaaattattagattcttgggtgccatgaattcaaatcctagagcaatacgttagggttttcacaaaaatactctgaagattttgtttgcatattatcaaaaaccgaatgcaacctgaagaagacactcacaaaatctctcttcttctcttgttctagtttaaaatacaattactcttaaggcatactatacatttgctggcactttccttaacagtcactctcctaacattattacaactctgtaaaagatattttaatgtttttttttatgtgtctgctcttaaacagtaagggtctagaaggttgtttttgttgttgctgttttgttttgtttagtttttttgtattgtcagtagaaaagacaaaagattcttctgagggcagtgtgccatagaaaaatataataacaattctttgggatttattatttgttttctccatttgatctctaggccagactcataaatataatggttttagccagaaacaacc

SEQ ID NO: 205882 - DNA, 623 bp, Homo sapiens
gactgatcttttctaaaactggagacactttatttctcatcattgtataaagaagtctacagctagaagtttctaagatctattattgtggacaatagaaaagcatttgttaatacagaaactggatatatttagatgtagaacaagaagtctctgtgttcaaatagccattggattggcccttatagcctgcttggggtgcaacattttcaaaataaagagaaggaasgtagaatccaggcaaaagaaatccacattattatgaacttgggacacataaactctacatccaaggaaactgatttatataaattggtagagaaaaaaactgaagatgcactatgatggagtacaataaggataatgtgtcacctttcctttttttagttagagccacgtaactggagtagtatttcccagagtgtggtccacagaccatttattttagaatcacctatgatggttgtttaaattgcagattcctgggcttctaaagtagaatccccagggagtaaatataccttactaataagcttctccggtagtattcattcccaaaaagtttgagaaccactgacacatggttaggaatgcagactttgaacaatctgtgttcaaatctc

SEQ ID NO: 205883 - DNA, 423 bp, Homo sapiens
agaaacatgcgatggtgaccacaaaaggaatctggcagctgaaaattctgagtcactatcatgtcaaactataaaaattttatacaacttaaaaaaaaamcctgcactaatcattaatttatattattgttaaaattatcatacagtaaaattgattttttttccttttgatgtacagttctgaaaccacctttgcaaaaattgcaacactgagaaaactttgacagtgaaagaaatttgacctaaccaactccacattgcctttaacctccaaactgcccttcattcctgggcatggcctaagctaactttgggagaaatttaggttatagtttaaatgataatagctctttccaaaactaaactgcctttgtaaaactaatgaaaggccaccagtttacgaagataggagggcctgaattc

SEQ ID NO: 205884 - DNA, 559 bp, Homo sapiens
ccagagtgtggtccacagaccatttattttagaatcacctatgatggttgtttaaattgcagattcctgggcttctaaagtagaatccccagggagtaaatataccttactaataagcttctccggtagtattcattcccaaaaagtttgagaaccactgacacatggttaggaatgcagactttgaacaatctgtgttcaaatctcacctctttttttgtaactctgagggagagaacattggctattttgctcctgcagaatccccagcacctagaacagtgcctggcttgtagctggtgctccaaaaacatttgttgaatgaagaatgaatgaatgacccagggcaacagttttaatttcactaattttcttakaagaaaaaaaattaggaaaatagcccctatcttacagggctaacgtaagaaggaactgacttaataacgtgtgtccgacagcaccgtgcctggtacacaagaagtgcacagctcacaatgggtgaccttggcattgctgttgctatggctattacaaaggtgcttctgacagcagcaatgat

SEQ ID NO: 205885 - DNA, 423 bp, Homo sapiens
agaaacatgcgatggtgaccacaaaaggaatctggcagctgaaaattctgagtcactatcatgtcaaactataaaaattttatacaacttaaaaaaaaaacctgcactaatcattaatttatattattgttaaaattatcatacagtaaaattgattttttttccttttgatgtacagttctgaaaccacctttgcaaaaattgcaacactgagaaaactttgacagtgaaagaaatttgacctaaccaactccacattgcctttaacctccaaactgcccttcattcctgggcatggcctaagctaactttgggagaaatttaggttatagtttaaatgataatagctctttccaaaactaaactgcctttgtaaaactaatgaaaggccaccagtttacraagataggagggcctgaattc

SEQ ID NO: 205886 - DNA, 505 bp, Homo sapiens
ccagctcattgtattataattttgacattaatcaacctgacatttttcttttataaaggtaaggcatgaacatattagctctcatgattctttttttaaaaaattatyacttctcccagatttcctaagccccatttctttagctctttaagttgttactgtgataagggaaaatattgttttcgtgtgatgtgctgtaaataggttgggcagccatctcagtttgcctgaaacggaggggtttctcaggacatgggactgttactgcttaaactgggaaagtcttggggaaaccaggatggttggctatcctactgtaaagctattacataaggtggggtaaaagaggaaaggaagaatcagtagtggtattaatctcattaaatacaaaagaattattagtacaccactgttcccttgatttttgactcatgcaatctctgatgagtatctgaagggtaaaattgcactcaactaattaactctaaatgtcaggcatttggac

SEQ ID NO: 205887 - DNA, 625 bp, Homo sapiens
accctccacgtgtggcagctgacaggcagcacaaagctatacctggatgccctgatgcgcgcgccacaggcagcacagaagcacagcgtttctattatacttacagagacaaaggcatggcagggatttgcttaaacattaaaaaacacccatcttcaggggtggagaaaataagcgtttcctagtgggagggaagtactagcctatagaattaatagcttaaaaacactgattatagtttcctgttctataaagaacaaaattgctaatgacaccactagcttactgtgagcgtttccctcctgcctgcctaaatcactttccaaaaaaagatctggctgttgtcagcaatttataaaattcaaaaactaaatgtagggtgcaaacaaagagagaartgaggctgcttctcataaccaccaaagaatgagtttgctttatgactagttatattgactgaagacatttaaataagaatctggctcaaatgccaaagaattgtattaggtagcaacataaggtgtaaaaatttaaacttccaaacaccactcgctgggaagtctaggcagcttagttgaaattcatggacgtggagcacgtattacctaagatggatactgtaagg

SEQ ID NO: 205888 - DNA, 625 bp, Homo sapiens
accctccacgtgtggcagctgacaggcagcacaaagctatacctggatgccctgatgcgcgcgccacaggcagcacagaagcacagcgtttctattatacttacagagacaaaggcatggcagggatttgcttaaacattaaaaaacacccatcttcaggggtggagaaaataagcgtttcctagtgggagggaagtactagcctatagaattaatagcttaaaaacactgattatagtttcctgttctataaagaacaaaattgctaatgacaccactagcttactgtgagcgtttccctcctgcctgcctaaatcactttccaaaaaaagatctggctgttgtcagcaatttataaaattcaaaaactaaatgtagggtgcaaacaaagagagaaatgaggctgcttctcataaccaccaaagaatgagtttgctttatgactagttatattgactgaagacatttaaataagaatctggctcaaatgccaaagaattgtattaggtagcaacataaggtgtaaaaatttaaacttccaaacaccactcrctgggaagtctaggcagcttagttgaaattcatggacgtggagcacgtattacctaagatggatactgtaagg

SEQ ID NO: 205889 - DNA, 448 bp, Homo sapiens
taacactcactgcgagggtccgcggcttcattcttgaagtcagtgagactaagaacccaccaatttcgaacacagtagcactgtctttcttttccagctccctttttstgttactgaagtcctttctctgttcctcaaaccccatgaccaatgttatgtttgctttttgttgttgtttcttttaaaaaaaccctcttatctctatatgtaaaataacatataaaaatactacagaacccctagttacaatgttttatttgcctcatggaaatctcagtgccacttttcaacctctttgatactgatttctaatcaaatcaccacctttcatcccactttctggatgccaccttctcctcctaacttactttcttccatctcctgcagttagctatatggcatatccacagcttccacctcttttatggactgggtgtatttccacatc

SEQ ID NO: 205890 - DNA, 448 bp, Homo sapiens
taacactcactgcgagggtccgcggcttcattcttgaagtcagtgagactaagaacccaccaatttcgaacacagtagcactgtctttcttttccagctccctttttgtgttactgaagtcctttctctgttcctcaaaccccatgaccaatgttatgtttgctttttgttgttgtttcttttaaaaaaaccctcttatctctatatgtaaaataacatataaaaatactacagaacccctagttacaatgttttatttgcctcatggaaatctcagtgccacttttcaacctctttgatactgatttctaatcaaatcaccacctttcatcccactttctggatgccaccttctcctcctaacttactttcttccatctyctgcagttagctatatggcatatccacagcttccacctcttttatggactgggtgtatttccacatc

SEQ ID NO: 205891 - DNA, 434 bp, Homo sapiens
attgtgttttcgtgtcagtatatgtgtttgcaatatttatccgtwacatactaatttccttaggagagcagtgttaacatttaaaattcacgcatatgaattttttaaagctcattataaactaccaaagccagctacataacattaatattggcattcgttatgtaaatggtaacctggcttgtcagccactaggtgacgcatctttgtacttaaaacttggcatgtttataatctacaggaaatataaaacagactatgtttctccattggtggattaaaacacatgaattaaatacaatgttcacaaatttgtaagacgaccaaaattctttttgaggacttgtttgtatccagaaaatgcctgtgagtgaactagaagtgagtgttcattagagctgtgccgtctctgaagttatgagggcatatataag

SEQ ID NO: 205892 - DNA, 431 bp, Homo sapiens
acatgctgaaataatgtgagaaaagactgttttctggctagaactggaagtatatctgccagcattcctgtgaacatgcttttcttctgtccagctttgactgtttaagaagtcaagttatgttagacctagattgtattccgaactagagctagactataaaacttttttgagaatgatagaaatgtttaacccaaatttgtgagggcagagcatttgggagtgatgaaatttccaaaagtcaaaaacttctgatgagtgagagaaatgaattgttaaaacatgtgtcagtggaaatgtcatctyatccagggaagatggcttgaaaatacctttgcacctagtgtataaccaaagatcactccagacaaaaagcccccagcagaagattttgagatgttagggatcgtctatcacaccatgttcagtgg

SEQ ID NO: 205893 - DNA, 503 bp, Homo sapiens
ccaagtgaatggaagattctgctgagaatattgagatattgatatgtattttgtgttcactctacttttctgtttccttttctgagaagagagccaggtcttggcaatttcttcaaaggatggttgactgtgcctttcagaatcttgtttttcatgaagtctgagttccttgagaggataatttcataagggtaggaagtgatgggaggggtctacctaatagggcagagtaagggaaagttcacaaaatgcatatgtgttgcttttgggtatctaaccaagagttcctcatgtagtcatagtggaatttctgtgagtagaagctgatgatcttcaaggttctrtagactcttgccagaagattatgagaagacagtaaaggagcttgataattattgccagggatgagtgcattgcatgctagttgattggctttttctcaccaaaagtgaaagttacccatgttcagcttgtaggcccagactagtcaaagagtagttgtt

SEQ ID NO: 205894 - DNA, 523 bp, Homo sapiens
tcatccagtattcagaaggtgatcataatatgatcaattgctattcttatacattaccagtacaaatgtagattaaggaggattcaatgcaccaaatctcaatttctatagataaaacatgaactttctatatttttattccctattacaascttcataattagatttctctaaaatcttcagtaattttggaattatgtgtgtgttcaataaccatctattcaccgcactgtaatctccatgtaggccaggatgtcatagtgaacagaatgtttgcagtgacttagtgtctgaaaaatagcaagccctcagtcaatatttatttgaatgaatgtgtgaatggatggataagttacattttctattaaaaccatttgtttcagtactccaagttattaagatgtttcccaaacaacttatcttttaattaaattcttatccttttatttattcatatatttatttaaaatcttgtctgtgccagacatagtactggtagctgctttcacaatttccagtgtaa

SEQ ID NO: 205895 - DNA, 541 bp, Homo sapiens
attccctgaaatttaaatagatctaagtacttggacaaaggagtttacctcctgcagcctcagtgacttcattgtaaagtgagattaaatttaatggtctcaagttcctttgcattactaakacttatctgaatatttattatatatcatttcactttaacaaatgcacaaaggaagatcatctgaaatttctaagaagttcccaggctcgagatatacaacatttaaaagaattatgcctgcaaaaacaaggcttttcaaaaaatactaactatatcctgacattggtaaacttggtctgaacaatcaaggaattgacaagtttacagagaaaaatgtcaaacaactagactgtgtattaaatctctctttatcattcaaaatcacattccataaatcagagttctcttacaatgagaaaaatattggtaccataaaaataccagaaatacttaattttatttagaagtacagcaaaagcaatgctagaagttataaaatatttaaatattcatagattgacttaaaaactagataattg

SEQ ID NO: 205896 - DNA, 538 bp, Homo sapiens
tgtgctctccaaaaaacaaacaaaaagaacaaaaagaacaaaattcttttctgttaaatgcaaggtttactaaatattttccctttacagaaagaaccttctttacttcttctagacacgctttttttcatttcctatcctgagggttgcacacttaaatgcctacagcacccaggccgaccactgagatgagttcagcaggctgggtgcatactgtggtgaaagaggcaccacacacactgattaaaagagtaggggctactcacctccaggctgctgtcttgtggcaggcattggctaattgttcacaagccagttcttttcttccygagtaacagctacaacatatttcccagccttcattgccattgagtgaggcatatgattgatttctggttcatagaactgacaaacaccctatctaggcctgaaccataaaacttgcccatgcataattctctgttctctttcttctttaccctgctgaatggagatatccaaagtcccagaggaagatgcaatgataagataaaatgcg

SEQ ID NO: 205897 - DNA, 465 bp, Homo sapiens
agctatgcaaagcaaggaagaaggcaggaggtgttaaaagaaaaactttagagaaaataaatgtagcaaagttcatctgagcaaagaaccatgtgtgaattggrcagcactcagaaccagaagaggttcagagagctctgctgccgcagtgaggacagtgagcttttgtaggctgaacgtggaaagaaggctaagaaaatatattttattagagtgggaagaccctagttagaggttagttggtggtttctgattggtgaagcctctagttacattttactgtttacattgatttggattttggtttgcttatgtagaagctctggttatggagacaacctcaggctaacggcctccttcttatttgctttaacagagggatggcagaggtagaagacagcagatatttgagggccatcactactgccttgtaccgtgggtaacctgcatgaagtcttctctgta

SEQ ID NO: 205898 - DNA, 465 bp, Homo sapiens
agctatgcaaagcaaggaagaaggcaggaggtgttaaaagaaaaactttagagaaaataaatgtagcaaagttcatctgagcaaagaaccatgtgtgaattggacagcactcagaaccagaagaggttcagagagctctgctgccgcagtgaggacagtgagcttttgtaggctgaacgtggaaagaagrctaagaaaatatattttattagagtgggaagaccctagttagaggttagttggtggtttctgattggtgaagcctctagttacattttactgtttacattgatttggattttggtttgcttatgtagaagctctggttatggagacaacctcaggctaacggcctccttcttatttgctttaacagagggatggcagaggtagaagacagcagatatttgagggccatcactactgccttgtaccgtgggtaacctgcatgaagtcttctctgta

SEQ ID NO: 205899 - DNA, 549 bp, Homo sapiens
tagtttacctacatagctgtattttctcgcatttctggagaatgcaaattcagtgtcaatatgccagtcgtgtagtttcttgtgaggcctctccttctcacttgcagatgccaccctcttgttgtgtcctcacatggtctttcctccattcatgcacagaaaaagaaagatcttcagtgtcttttcctcttcttttaagaattaatctcactggattaggstcccaccgttaagacctcctttaaccttaattaccttcaaataaagtcacgtttgaattagggttcaagataggaattttaaggtacacaattcagtccataataaaagataatattatttatcatcatttcctcctctcttcaatttaatagttttttaaagcataaattggaagttgactgcctctttagtagtaaggcaacatgtagccctgagtctccaaggtaaatcagaaaactgaaatcatgtattgagtatagacacatataaaatgttcacacacctatacttagactcttactcccacacactattttgttaacctag

SEQ ID NO: 205900 - DNA, 549 bp, Homo sapiens
tagtttacctacatagctgtattttctcgcatttctggagaatgcaaattcagtgtcaatatgccagtcgtgtagtttcttgtgaggcctctccttctcacttgcagatgccaccctcttgttgtgtcctcacatggtctttcctccattcatgcacagaaaaagaaagatcttcagtgtcttttcctcttcttttaagaattaatctcactggattaggctcccacmgttaagacctcctttaaccttaattaccttcaaataaagtcacgtttgaattagggttcaagataggaattttaaggtacacaattcagtccataataaaagataatattatttatcatcatttcctcctctcttcaatttaatagttttttaaagcataaattggaagttgactgcctctttagtagtaaggcaacatgtagccctgagtctccaaggtaaatcagaaaactgaaatcatgtattgagtatagacacatataaaatgttcacacacctatacttagactcttactcccacacactattttgttaacctag

SEQ ID NO: 205901 - DNA, 549 bp, Homo sapiens
tagtttacctacatagctgtattttctcgcatttctggagaatgcaaattcagtgtcaatatgccagtcgtgtagtttcttgtgaggcctctccttctcacttgcagatgccaccctcttgttgtgtcctcacatggtctttcctccattcatgcacagaaaaagaaagatcttcagtgtcttttcctcttcttttaagaattaatctcactggattaggctcccaccgttaagacctcctttaaccttaattaccttcaaataaagtcacgtttgaattagggttcaagataggaattttaaggtacacaattcagtccataataaaagataatattatttatcatcatttyctcctctcttcaatttaatagttttttaaagcataaattggaagttgactgcctctttagtagtaaggcaacatgtagccctgagtctccaaggtaaatcagaaaactgaaatcatgtattgagtatagacacatataaaatgttcacacacctatacttagactcttactcccacacactattttgttaacctag

SEQ ID NO: 205902 - DNA, 516 bp, Homo sapiens
caggttggtcttgatctcctgacctcctgatctgcccacctcggcctcccaaagtgttgggattacaggcatgagccaccgtgcccgacctgttttcatattttctttcattttttatggaactktcacagctcagttttcagatctctctcaactggtttgccatatcttccctgagctcttgcctggcattcttaattaattgaagcaaatactctttttaattcatggtgaaaatatattgtcagaatatttatctgctccccagcaacatcttttctgtggggaattttgcattttccgtgtatttttccctattttttactcctttgaaaacagtcattttacatatcctatcgaaatgtttttattagtcattattgaaggaacaatattttcatgaataaactattgttaaggtagaagtcaaagctatgttcaagactaaagtttttctactattaatgagtttcttgtatgtaagttcaatttttccttacttctctctaaccaata

SEQ ID NO: 205903 - DNA, 516 bp, Homo sapiens
caggttggtcttgatctcctgacctcctgatctgcccacctcggcctcccaaagtgttgggattacaggcatgagccaccgtgcccgacctgttttcatattttctttcattttttatggaactttcacagctcagttttcagatctctctcaactggtttgccatatcttccctgagctcttgcctggcattcttaattaattgaagcaaatactctttttaattcatggtgaaaatatattgtcagaatatttatctgctccccagcaacatcttttctgtggggaattttgcattttccgtgtatttttccctattttttactcctttgaaaacagtcattttacatatcctatygaaatgtttttattagtcattattgaaggaacaatattttcatgaataaactattgttaaggtagaagtcaaagctatgttcaagactaaagtttttctactattaatgagtttcttgtatgtaagttcaatttttccttacttctctctaaccaata

SEQ ID NO: 205904 - DNA, 583 bp, Homo sapiens
cacgtgtgttcagtatttagctatcacctataagtgagaccatgtggtatttggttttctgttcctacattaatttgtttaggattatggcttccagctctatccatgttgctgcaaaggacatgatttcattcttttttatggctgtgtaatattccctggtgtgtatgtaccacaatttctttatccaatctaccattggtgggcagctgggttgattccatgtccttgctattgtgggtagcacaacagtgaacacatgagcacatgtgtcattttggtagagtgatttattttcctttgagtatatgccagtcatgggwttgctgggtcaaatggtagctctgctttaagttctttgagaaatcttcagactactttccacagcgattggaccaatttacattcccaccagcagtgtataagcattcccttttcttggcagcctcaccagcatctgttgttttctgactttttaacaacagccattctgactggtctgcggtgttatctcattgtggtttggatttgcatttctctgataattagtgatgctgagcatttttttttcacatgtttgttg

SEQ ID NO: 205905 - DNA, 591 bp, Homo sapiens
catattaatttctattaatttgatttcattaatttgaaaaaactacaagatttgtttaagactgagtttctgcttaatatcttgttgtgagatggccaaacacatgtcctttccgtgtttacctccagataatgcttggtgtattattaagggtaagatataggagactttgttgtcaaattctatcatcaaatactattagctatcatgagagttcttagatgctcaggaatttttgaagcaaagcttttccttaaagatgatccattactatgatttcatatttccttgtgggacagtctgtaagcctttgggaagttttggattaaccaatttacatcaaccacaataccagatacaactccaccagtggtaatttgggaggccacttctagaagctggaaaatttgcactctaacttttcacaaarttgtgttccttttcattctttgagagctaccacattaataatcatagctcattttgtaggataagtgtttcttaatataagtctaaattttttttgtatattttgtcaccaaatggcatcactgaaagcaaatagactctaggatagaatataactattat

SEQ ID NO: 205906 - DNA, 590 bp, Homo sapiens
catgtaatttaagccactgaatttgtggtattttttttcttgcagcaatataaaactaacacaaaatctgaaggttctgcattttccctttaattgttaaagatactccacctctttcctatgataatccacttaacatgttttctatagacttgatttccgccccctacattccagactttggaagctcttatgaaactgacttctgtacatgatcatttttgtgacggtgactggaaagctagaatatgatttgtggcttcttttttgtacaggyataagatttctgcatttattttgacactaaattcattctttgatttagctgttgtttttacaacctccttttccctttgttcttttttttctcaaccactcatattagtggtctatattttattaaatattttgaagttgtaatgaatccttcacaggctataaataaatgcaaagttaagtacttatgaatggataaacttgcaagcaatgtatgtagatagacaggcaccctgctctgcactcctatattataccccactctgttggcaacattttagacatttctctttccttatcacacttccaagctt

SEQ ID NO: 205907 - DNA, 511 bp, Homo sapiens
ttttctggtacttttgaccactatgaatctgtaactatttcatcaagttgtgacaatgaaagaaaccagaagagggcttagacaaaaagtctaactgcatccatttcatcggaaaggaaccttatatatcataattttaaytatttaagaaagcgagagacatacattttaatggattcatgttatgttttccaggcaagaaaatgtactataaagtaggagctataataacgaggaaaggtgcatggatgttaagttttattgtgttatggaagtctagaaggccaccaagggggaaaaaaaaaaaactagagacaatacccaaatattgaaaagtcactgttgggtaatattactttgtaattatggcgtaactaatattttagttctttatttttttttaatttcactttcagttctgagatacaagtgcagaacgtgaaggtttgttacataggtacacatgtgccatggtggtttgctgcacccatcaacctgtcatctaggtttt

SEQ ID NO: 205908 - DNA, 511 bp, Homo sapiens
ttttctggtacttttgaccactatgaatctgtaactatttcatcaagttgtgacaatgaaagaaaccagaagagggcttagacaaaaagtctaactgcatccatttcatcggaaaggaaccttatatatcataattttaattatttaagaaagcgagagacatacattttaatggattcatgttatgttttccaggcaagaaaatrtactataaagtaggagctataataacgaggaaaggtgcatggatgttaagttttattgtgttatggaagtctagaaggccaccaagggggaaaaaaaaaaaactagagacaatacccaaatattgaaaagtcactgttgggtaatattactttgtaattatggcgtaactaatattttagttctttatttttttttaatttcactttcagttctgagatacaagtgcagaacgtgaaggtttgttacataggtacacatgtgccatggtggtttgctgcacccatcaacctgtcatctaggtttt

SEQ ID NO: 205909 - DNA, 511 bp, Homo sapiens
ttttctggtacttttgaccactatgaatctgtaactatttcatcaagttgtgacaatgaaagaaaccagaagagggcttagacaaaaagtctaactgcatccatttcatcggaaaggaaccttatatatcataattttaattatttaagaaagcgagagacatacattttaatggattcatgttatgttttccaggcaagaaaatgtactataaagtaggagctataataacgaggaaaggtgcatggatgttaagttttattgtgttatggaagtctagaaggccaccaagggggaaaaaaaaaaaactagagacaataccyaaatattgaaaagtcactgttgggtaatattactttgtaattatggcgtaactaatattttagttctttatttttttttaatttcactttcagttctgagatacaagtgcagaacgtgaaggtttgttacataggtacacatgtgccatggtggtttgctgcacccatcaacctgtcatctaggtttt

SEQ ID NO: 205910 - DNA, 590 bp, Homo sapiens
tacgtttttctgaaaatgggaacaagacatgattcacaattgaagtgtgcgtctccatccttttcccatgaagctgaggccagagagataagcacatcaatagctctgttgtagccagaacacgcctcagcgcactgtgtcagctcaggggccctgtcagaagcagggcaggccagatccaaaggaaggtcttaacaactggtcagaacattttagtggaccagacttaggggtatataggcaggaagcaacaggatgaaatgcagatgtccaatrgcaaagcagtcagtattcgggtggctttaaagggagacaggaagatgccataccagaaagatgaagctcttacccaaggagtttgatagcaagagctaggtgctggtccaggcaggttagtggcattactgatatctaacagctatgaaagggactgaggtttaggaacaatttcagttagagccagaaggagtaaggcaagggactcatttcagaggaaatagggtgataattattgagattaagtagaatgttgaaggaagccctcatttttcttaaatatctcaatgaggaaatttctacagtaatacttc

SEQ ID NO: 205911 - DNA, 498 bp, Homo sapiens
cttcctactttactttttgaaatttcctttgactcatagcctattcagaagtgtatcatttagtttccaaatatgagggactttttcagatgcctgtcactgactaatatctaatttaagtccactgtggtcacataacatacactgtacaattacatcctttaaaatttgttragacttgctgtatggcacagaatacggtatctcttggtaaattttctgtgtacacttagaaagaatgtgcattctctcctcattaagtacagtgttatataaatgtcagttggttccatttggttattagtattgttcaagtcttttgtatagtcactgattttctgtctacttgtttggtcaattattgagagggttattaaaatttccagctaattgtgagtttgtctatttctacttgcatttgtatcagtattttttagttttttttttttattttgaaactctgttgttaggtgcatacatgagtagcattgttatgtc

SEQ ID NO: 205912 - DNA, 602 bp, Homo sapiens
ggcatacagttttctagcttccttttgaattctagttaatgtattttaggccatggttgccagcctactccctataaatagttacataatgcaaaaaagaaaagaggaaaaaacagtaccaaggccctaagacacacatgccagaacacrcatgcatggaatatttagcagtaataatatccacatgcatgattggcatcagtcctctgatttccgactcttgtctccatgagatgacatctgagatggatttagttgtggttacatagtaccactgggggttttaagttaaatttattacaactgatcaggacatcgtgctaggaattgaaagtaggtatgcttctctgagcgaatatatcgtgatatactaagtaaaagcaatttcatttatagaggctttgcaatcctattctgatttgcttcctgtatgtactgtccagaggccaatctttaaacctggtggtgttctacactgtagttcatttctcaaactttgatactgttaaagaaatttaaagggtattaaaatattaaatattttataataatatttaaataatccctttatccagctccctcctctttgaagttcttccctc

SEQ ID NO: 205913 - DNA, 566 bp, Homo sapiens
tacaaatatacctgatacatttttcatratatatgatttccaagggattcttcttataaaaccccttccattctcgcttgcaattcagcaagcactcctttaaaaatatctttgcctcagcataattcccaaatttctgatatacacagagataattgtgaaagtattgtatgcaaaaactgttgaaaaagagtcactttcttcaaagcctactcttctacgaaattgttggttgttgtttttagtagggctcgctatgctaggtgagcatgagcattcttaccagatatatggtttaatgtggagggttagggtagaagtcagtgaaggagggggaaaattaaaacataaaggctaaagaatattgtttcctgaaaacctgttaaaataagcaaataataaccaattctgtgtgacattttactctctaccaccatgctattcaaaacgtgctttgtgcatgggccaccattgggagcttgttagaagttcacattaccgggccctactccagaccaaccaaattacaatctgtattttaacatgatcttcatgtaatttgtatg

SEQ ID NO: 205914 - DNA, 566 bp, Homo sapiens
tacaaatatacctgatacatttttcataatatatgatttccaagggattcttcttataaaaccccttccattctcgcttgcaattcagcaagcactcctttaaaaatatctttgcctcagcataattcccaaatttctgatatacacagagataattgtgaaagtattgtatgcaaaaactgttgaaaaagagtcactttcttcaaagcctactcttctacgaaattgttggttgttgtttttagtagggctcrctatgctaggtgagcatgagcattcttaccagatatatggtttaatgtggagggttagggtagaagtcagtgaaggagggggaaaattaaaacataaaggctaaagaatattgtttcctgaaaacctgttaaaataagcaaataataaccaattctgtgtgacattttactctctaccaccatgctattcaaaacgtgctttgtgcatgggccaccattgggagcttgttagaagttcacattaccgggccctactccagaccaaccaaattacaatctgtattttaacatgatcttcatgtaatttgtatg

SEQ ID NO: 205915 - DNA, 482 bp, Homo sapiens
atctagttgctatgatttttccgaagaaggcttttatgtggaatcaccactacgctgaggggcttgccagagattcatgctgattccttcattcattttgttaggtttgaccactcaggccatgaacagccctggctgtgtaattccaagagacactgatgaatcatgctctttttttttcccaccaaacgttactaattcggctcatatcactgatgaaaaagctccagtttggagctgaatgtatattgaatgccttggatggtcagtgttccagaattagyacatcagtcatctgcccagactttttctctagagtttgtctgttttcagataaagattttggagtctagtccagggttatcagtctacttgtggaaggttttgaagcacatcaggataggaactcctgctgtgggactgagggcaaagtgccaggataccttgctacattctatttgtacatttggtgacatttctac

SEQ ID NO: 205916 - DNA, 482 bp, Homo sapiens
atctagttgctatgatttttccgaagaaggcttttatgtggaatcaccactacgctgaggggcttgccagagattcatgctgattccttcattcattttgttaggtttgaccactcaggccatgaacagccctggctgtgtaattccaagagacactgatgaatcatgctctttttttttcccaccaaacgttactaattcggctcatatcactgatgaaaaagctccagtttggagctgaatgtatattgaatgccttggatggtcagtgttccagaattagtacatcagtcatctgcccagactttttctctagagtttgtctgttttcagataaagattttggagtctagtccagggttatcagtcyacttgtggaaggttttgaagcacatcaggataggaactcctgctgtgggactgagggcaaagtgccaggataccttgctacattctatttgtacatttggtgacatttctac

SEQ ID NO: 205917 - DNA, 571 bp, Homo sapiens
atgttcccttccattttactcaccattaacttattatatacctgatattgtttattaactctttggtaactttttcatcgatttcaatgaatctcttactgtttggtgtaagacacaggtttcctagacctgggttgtatcgtttattctggcatggggcctataatgaaacctataatgaaaacactcttggcatagacttatacgtacaagttgattgcaaagtaagaatacattaaaaataattcactcagctatatatgamcttaataagactctttgctccttgatatcaagttccctatctttcaatgtcttgtacctccttcataatgcagcaaatttgacaggtcttactgtttgggccctattgcctttgcagtatatatacactgcctgctgctcatactgatattctctcctgttttatagagcctcatttcggtatagtgtttcctattcttttgaggtctatacctgtctgtgctcctgaaggttacatagggtagttgggtacttgtgtacttctgttattgtaaaatatcacacagtctgattacaaacagaatac

SEQ ID NO: 205918 - DNA, 591 bp, Homo sapiens
gctatccttcccccaacccccaccccacatctcagttcttaagttctgtgcacctgcaggctaaacaccatgtagaaactgccaagacgtggggcttgcaacctctgaagccatggcccaagctgtaccttgaccccttttagccacagtgagagcagttgggatgcaaggcaccaagtccctaggctgcacacagcagaggggccatgggcccagccctcaaaaccattttttcctcctaggcttctgggctcatgatgggaggagctgtcacaaaagtctctgacatgccctagagacattttcccattgtcttggtgattaacattcagctcctcattacttatgcaaatttctgcagcaggcttgggcttgatttttccccagaaaatggtttctatttgctactgcattgcaggccacaaatyttccaaaatttatgctctgcttcctcttgaatgctttaccacttagaaatttcttccaccagataccctaaatcatctctcttaagtttgaagtttcacagatctctagggcaggggcaaaatgctgccagtctctttgctaaagcatagcatggattatctc

SEQ ID NO: 205919 - DNA, 591 bp, Homo sapiens
gctatccttcccccaacccccaccccacatctcagttcttaagttctgtgcacctgcaggctaaacaccatgtagaaactgccaagacgtggggcttgcaacctctgaagccatggcccaagctgtaccttgaccccttttagccacagtgagagcagttgggatgcaaggcaccaagtccctaggctgcacacagcagaggggccatgggcccagccctcaaaaccattttttcctcctaggcttctgggctcatgatgggaggagctgtcacaaaagtctctgacatgccctagagacattttcccattgtcttggtgattaacattcagctcctcattacttatgcaaatttctgcagcaggcttgggcttgatttttccccagaaaatggtttctatttgctactgcattgcaggccacaaatcttccaaaatttatgctctgctycctcttgaatgctttaccacttagaaatttcttccaccagataccctaaatcatctctcttaagtttgaagtttcacagatctctagggcaggggcaaaatgctgccagtctctttgctaaagcatagcatggattatctc

SEQ ID NO: 205920 - DNA, 622 bp, Homo sapiens
ggctatttgaaaataaagctcaaaaaaattcaggagttttccatgttggtgaaatttttcgggacccagtgatctgaagcatgtcacaatattccttccgaggtaaaggacaaattcctacatgtggccactaagacaaagatgcaacaactaatgacctttggattttggaatcacagtgtatcttgtttgggcatgctcttcatactatgataaaatgactaatccaaaaagctgcctattttgagtaaggcgcagaacaggagaaagacctgtagcaggcccaggctaatcaagcctgagtcagccacagtacagattcaggtttttgactacaagccacactatcttctatggataactattctcctttcaaatatagctttaaatagtttttgtcttactartgggcttaccagagacagatacttactatgggtcaattttttaccatataatctgggatgcccatcatacgggtattttctgacctaacaagtcataaagttgagtatgcatagtagcattccatcaccaaatagaaatgatatgtaagatggggttaaataagccttacggataaatggcagagattgccattggtcatactcatgccactttc

SEQ ID NO: 205921 - DNA, 518 bp, Homo sapiens
tttctgacctaacaagtcataaagttgagtatgcatagtagcattccatcaccaaatagaaatgatatgtaagatggggttaaataagccttacggataaatggcagagattgccattggtcatactcatgccactttccctcttgcctcttaactgacatctatagcctcaaggagaatttcttatgaccaatgactaaagaaaaagaaatgtgggtctggcagcttatccagcattacattcctaccagagtgtctctgaaggacagttctagtggaaaatttttccagtaggcctaatttttttaattaatcaattttcattattgtagcagttttaggtttacagaaaattgagacaatagttcagagagttcccatagacttctctctcccaacttctcatttcccactatggtttaccctattattaacaccttggattagtgtagtacatttgttrcagttgataaaccaatattgatacattattactaactaaagtctatagtttacat

SEQ ID NO: 205922 - DNA, 537 bp, Homo sapiens
gttctgtgggaaagatcaggcattagatggaaaattagagcagccaatctctcaagttttttatagtcctgaaattctagattatgtggctaagttttaaactgtgcttgctcactgtgaatgttaacctaagaaccttgctgcgrctatcttctgttccctcttaaatctgaaaaatatttaaatgcatatgatcccctatcttatgccatttatttaacctcaccataaaaagttccaattttatttgaaatgatttaatttttaaatgtcagccaaattattgacctttctttaattttgtatctggaataaaagaagaaagaatttggcttcctataataatctttctctgtttcattttgagaggaaatttatcagtgggctggtggtcagtagtctgcagctttatatttagtgtctacagtattatgggagaggctgaggaacccagaatgacctggcaatgttgggggtgatcagctgtttcagtgaagttctccttaatccagtagctgtctctaaaaatctttttag

SEQ ID NO: 205923 - DNA, 556 bp, Homo sapiens
cctctttggcacccagaactgtatataacttccagatgtggtctgaccgtcagaaaccgtcatatctggwccctttatatctgattaggcaagagttctggctctttgggggacatataccacggtttattcaactcttctatgttttctttctttctttcattattacttattttctctattttatcttcaatgcaaattatgtatttacttctacatgtttttccacactttctgtctctactcttatgctagatgttgtgccaggtcctggagctttagaaatgatcaaggtgcaatctttgtcctgaatgtatggcagaaggtgtttcttctgaaggcatgcaagaatcagatgtatttggccttaattgagtaatctgatttcttatgtttactaagaaattacagcagtatcatttctcacccctactgttatttttagtcggccattattctttttgaaatcaatagtcctctctgaagggacattcttcttgatatgaaaacaaatgcatctctactccttttgaaaatgttaagatttatctctaga

SEQ ID NO: 205924 - DNA, 481 bp, Homo sapiens
ccagaactgtatataacttccagatgtggtctgaccgtcagaaaccgtcatatctggaccctttatatctgattaggcaagagttctggctctttgggggacatataccacggtttattcaactcttctatgttttctttctttctttcawtattacttattttctctattttatcttcaatgcaaattatgtatttacttctacatgtttttccacactttctgtctctactcttatgctagatgttgtgccaggtcctggagctttagaaatgatcaaggtgcaatctttgtcctgaatgtatggcagaaggtgtttcttctgaaggcatgcaagaatcagatgtatttggccttaattgagtaatctgatttcttatgtttactaagaaattacagcagtatcatttctcacccctactgttatttttagtcggccattattctttttgaaatcaatagtcctctctgaagggacatt

SEQ ID NO: 205925 - DNA, 558 bp, Homo sapiens
tctgaactacagggaaacagtttctagttgcctctccacctagccattgaactatagcttttatctacatcagtggttgccgaagtgaaatctcctgaccagaggcatcagcatcccctgggaccttgttactaatgcaaaccaaatgaataaaaactttaggggtggggccaaaaatctttgttgtaataaatcctacaggtgatcttgatcacactaaaaattttaaggaccactaatctataagtctgtaatgactgcccagtgtggatgaacttttaatatttacacatttacaaagtgtttttatgaactcattcccaaaactgaaatataaaacactattagtttaatttctctgaaaaattggcttgtgtttcttaaaactgaatatcaagaggagggacgtagcaatcacgattttcttggwcaattatcaactctcacactgaaaactagaaagacaatttgccattaatacttctgacagcatgagaggccccagttttatagtccgctcctcaatcaactccagagacccagcaattagacggccag

SEQ ID NO: 205926 - DNA, 546 bp, Homo sapiens
acgtacccaactttgatctaacaatccaatattccgcattcttgttttgacactccgactatagacaagtgtccttctcatgttctacttagtgacatgttttttgagattttgtgtttttggttattttgctgtttaaaatgaccytcaagtgtacttactgactagtgtttctaaacacaagagggatgtgttgtacctgatggagaaaatacatgttaaataatcttcattcaagcatgagttacagtgctgttgcacatgagaaaaatgttactaaatcaacaatatatattaaatgagatgtctttaaacagttacacacataaaagaaggttatttattgatcaattaacaaaaatattgtgcacaagaacctaaccctgtacttctcctaggagcagtggttcaataaatgctaattcaatgaccagggtaactttatagattgtaactactatgaataatgagaattaactgtgtatgcacagtcaaggtatttcattataatagcaggtactgtgaaaccttaaaaaaatactagaa

SEQ ID NO: 205927 - DNA, 525 bp, Homo sapiens
aattctcaaattttgatttaagaactgtgctattagctgaaagaatatgaaccaagtccattcttttgacctttgtaaagtcgaacctagtcaattattgcagcagagcagggaaccaaagaatagctttgaattggttagacccaaactgatttaagtttgcatgtggttaaatacgacattagttaaaaataattaatgctgtctttgacctttgaaatgaggaaggacattcattgtcctcccccagctcccactccattcatgtaaatctacttaactctttgcattgcctaaaacagaacacaacgttttactatatcttgatattaaatatctttaaaaacataagcagagttgtatgcttcttaaatggatggctttccaccaattttcactcagatattwagatatacagatatactcagatatttaaagtatacagtttccatggctcacagctaacctttgaaaacatgtaaatatacagtgtatgtttcatgaaatgacagagtaacgctagga

SEQ ID NO: 205928 - DNA, 550 bp, Homo sapiens
aggtactctgtcctatttcgcctcaaagtttccatattgctttttacagcatctacaactgtttctgttactaatttccttgtaatttttaaaatgtaactgaggtttctattctttacttatttagaaaaaaatacaatttcttggattacattaatagattaatgtaggatatgacacagmaatggtaagcttgctagtttatttattaggacaccccccaaaataaatatctttttaagttctcatattattttcatctggaagtctagaactttttatttgaatctcaattataatatattttaacttatatttctaaatagttaataggtttcccttgatgtgaacttttcaagccatttctttttgatagctattacttagattttattcttaatatattatattgttagtatgtccaatatatcagtggtatctacaaaataattcctgtatttaattttcttttatatttttgttgccatttttatttctccatatatttcaaatactctaatattctttaaagttctccttattggtattg

SEQ ID NO: 205929 - DNA, 544 bp, Homo sapiens
gtttccagggactggcaaggcttaatcttaaatccatggaggggccgaggttactatcctgggtcagtgatggtcactagccagggagttaggtgagggtccttagagatgaaagaggcccattgagctgaatgaggtctggattctggttgtgaattctgtttctactactttcaatggccctggtcccctcctgcaggtcatttttaaaagctaagccyaaagtatctgagtggcttggataaggtggctactgtgaatatgccctcaagatagcactcatgagtgtgagattctctgcacttcagaagcctctacaaccaggtgctattatgctttaaaacacactaatataagagactatgatttcctaatcagtttcatgggttatttctctattctttcagctacaatgttttttcatgtcataatataatgtgggtaaaaaatacttgcaacatcaagttgattaaaccaaaataaaactaaacaaagaaaattccaaataaaggaagattaaaaatgccaaacagcagacttaatt

SEQ ID NO: 205930 - DNA, 435 bp, Homo sapiens
cagattagattatggcccacgataacagctcattttaactaatacttgtaggtcctatctccaratatggtcatattctcaggcattgggtgttagggctttaatatatgaggacataatcttgggtaccataacagtacccaaagaatagtactcaaagaagagatgaatagagagatgtcaaattgacagacaacaaaagggtattcctagaacagtgcctagaaatgcatccctgaacatgttataccatgtatagagacttagactaagaatttgtgcaatacaaactaagaggtagatttagcagttttccattttatttgatgattaagcatctactatctgcaaatcactgagttgagctttgctttaggaggacacaaggaagtagcgaaaacaaatcatttaggggccaccaatctgctgaatttc

SEQ ID NO: 205931 - DNA, 594 bp, Homo sapiens
tgacttactttgtattttgttcccatgagaataattcagccaaatcaatacacctaaaagttttttatgtatcctcagttcctgttctttcaaccttattgacctctggttggagccaattgacaagtaataaaatgtataaaaatataaatttaatttaaaggatctaatgtgaatggtgatgaaacacaccattcttggaccctaggccacatttataagctgctgraccattcagaagttgaagtgctttccttatattttaaaaataagtattactgagctacacagaagataaaatggcagtctagctaaagcaacattaaatagaatatttcctatcacctcaatcaataacctgaaaattccgacaactttgaaaacattgttaccatagtattaagaacaaaataattaagaaagcctttcattagtttgctgattataaatataactttggtgtacttttttcctgttcctatatctttttaacttcctctgttttgtctcttaaaatgccatcttagagttagtttttataattagatatctctctttccactcaatttctctcctgaagcttgtgctgagtcc

SEQ ID NO: 205932 - DNA, 594 bp, Homo sapiens
tgacttactttgtattttgttcccatgagaataattcagccaaatcaatacacctaaaagttttttatgtatcctcagttcctgttctttcaaccttattgacctctggttggagccaattgacaagtaataaaatgtataaaaatataaatttaatttaaaggatctaatgtgaatggtgatgaaacacaccattcttggaccctaggccacatttataagctgctggaccattcagaagttgaagtgctttccttatattttaaaaataagtattactgagctacacagaagataaaatggcagtctagctaaagcaacattaaatagaatatttcctatcacctcaatcaataacctgaaaattccgayaactttgaaaacattgttaccatagtattaagaacaaaataattaagaaagcctttcattagtttgctgattataaatataactttggtgtacttttttcctgttcctatatctttttaacttcctctgttttgtctcttaaaatgccatcttagagttagtttttataattagatatctctctttccactcaatttctctcctgaagcttgtgctgagtcc

SEQ ID NO: 205933 - DNA, 621 bp, Homo sapiens
aaaaagcttgtttgtaaacatcttaataaataacagcaacaacaataacaatcatataggcatgcatgactatattttttcctcctgaacaacatatctcaggaattgttgggcttacacatctggaaagccatatttgtttgtgtattttccatgctgacactgccaagaaactaaatgcagttgagtgttaccgctgaaatcaccaggagtcctagtgccaggctgtgccagaatttgccactccaagttgcagtcagtctttcaacctcagaattaaatagagcatccrccaaagtagtatcagactgaagctgcttaagtggctttgaccattaaaaacatacataattacacttacattctgcgtgcaaatattgtgctatcatttgagagtgcaaataagcagtcagccacaacccagaaagacagtagtctacaagagagatgaaggactatggtagagacgggactgtggatctgtgtcccatctcagccacatacagctatatcattctagcaagttatagaacatctttcaacctcagtttccacatctacataataagaacagtcatacctgctctatttgcatgaactttttgtgatcatcaaataata

SEQ ID NO: 205934 - DNA, 367 bp, Homo sapiens
  misc_feature (1)...(367): n = A,T,C or G
ttttctaaagtgtggatgctccacaggttccaccctcaggctttcaaaatgatgctgacaagtcttaaaggaaagactgattcccagrggaacctcttcagaatttggttacatccaaataaaaggacactctgggtgatagactacacctccttaacagcctgagaatccctctcttgagctgtaagggtttagtccatggcttttctcagacctattggnaactattcctccctcatttgngatctctctttcttaccagaaggcagctgttnctgagcaantctctcttgnntgtcagggctacccttgcacaaaggcatgtttatcaccaaagctggattgtctnnnnnnnnnnnnnnnnnnn

SEQ ID NO: 205935 - DNA, 178 bp, Homo sapiens
tttagtttcttgtcattaaataaaaagccaaggattgttaaatgtatgttcataaatattagttttacaagacactagggtgtgattccaacarctttgactccgtttaggagccggtgcttttgacttctttggggctaagcttcttgctgtggcttctgcttgttgctctggtgaa

SEQ ID NO: 205936 - DNA, 551 bp, Homo sapiens
aggttgggtgtgatgggttgctcacaacttgaatccaggaggcagaggttgcatgagctgagatcgtgccattgcactccagcatgggcaacagagtgaaactctgtctcaaaaaaaaaaaaggtaggttactgctcaacttgccagaagtgacttacaatatttgtgttaaacactattatgatgtggcagaataagaatttgtaataattccaaagtgcactaaatgcaactttattttctacaattgtccccatcttgctscagctggctctgactacagtcctgctgatgatcatcaaggtacagttgaaatggtgttggggagtgtattcgtctgttttcacactgctataaagaaatacctgagactgggtaatttataaagtaaagaggcttaattgactcacagttccacatggctgtggaggcctcaggaaacttactaacacaaccatgggggaatgctaaggggaagcaagcaccttcttcacaagatggcagaagagagaagaacaggggaaactgccacttataaaaccatcagatct

SEQ ID NO: 205937 - DNA, 591 bp, Homo sapiens
tgcctgaaacaaatatatagtatatatgagttattgctctatgagatcttataaagactaggaaagccaaattgaaatgtagctgctggatggacagccagattcactcctatctgagatgattcatatgccacacaaatgaccacgatatacacaattcaacgtcatatctcaggaaaacygtagtttcttttatatcatagatctgctcaaacattcttataaacagttatggtaatttatgaaatctaaagctctgtgttgtaataattgttaaccttttttccttagctcccatatagttttaagtcctttcaattctgtttttccatcatggaaaaattagggagaaagtttcttctctataattgtctgctaaatccctgtaaatacatgtctaagttatttgttctgaggaattattctgtaacaataggagggctcacatttgctctgcattttccacttacatagtacattaatgtctataaagataatttattttatcagtttgacagttgcagttctggtttgataagaactctacagtaatttccactgaattagatgatacacaattatgatacagta

SEQ ID NO: 205938 - DNA, 617 bp, Homo sapiens
tttaaaaagctatgctgctattgttgccatgtccctggaatatgccctgtaccattattattattatttgttatagtcaggtttattgaggtataatttacatacagtaaaattcatccttttaaggtgtgcagtgagacgagtttgggcaattatataactaccacccaatcataatgtaaaacatttccatcatccaaaaatcttctctcaagccatttagtagtcagtcttttttgcccaccttaagccccttggcaacagctactcggatttctgtccctgtagttttgcttttatcagaatgtcatataaatggaagcatacagtacatagccttttgtgtttggcttctttcacttagtataatgcttttgaaattcatcggttttattgcaggtgttagtagttcatttctactttttgctgagccgtattccattgtatgggcacctcacaatttgtttattcattcacttggagatggacatttgggtggtttcatgtttttggytgttaggaacaaaattgttaaaaacatttacacgctggtctttctgtggatatatttcttttgggtaaatattttggagtagaattgctaggttgtatggtaa

SEQ ID NO: 205939 - DNA, 431 bp, Homo sapiens
tagagcacatatttctttatgtatggcttcttatataataatttagagattcacccatgttgttttattagtatttcattcttttgtgttgctgagtaatatttttaatggatataccaactttgtttttacatttcagttgatagacatctttttggccattatgttattgtccagtttttggctattatgaatacaactactttgaatattattgagtacaaatctctctaggagaacataggttttcgtatctcttgggtaaatatctaggagtggaactgtggttgtatgataaatgtaagtttaaatttattagaaacttacaaactattttcaaagtttcattttacgttcacacaaacattgtgtgagagttcaaatttcttagtatttttatcaactcttgytatatgactttttgtttatag

SEQ ID NO: 205940 - DNA, 487 bp, Homo sapiens
taggatgttctttaccttaaaatagtagtggaagcacatatgcagttatactttggactctgcactcctagaaggcttcaataaacttagaytccaacagcaaatcactaagccggtatttcattgtaaatctgtggcaaaaagttcccctgaactatattttccctcctaggatgggtgacacagtcactgtagggaagcgtgggctatgtttgaggacttaattttaaatcccagtttgagcaccaatccgctgtgagacattgaacagtcgtttattttaggtggtagtttttcttacctatgaacaaacagagtagattaaacaaccaccacagaccaacataacctcagcttgtgactcggcaatttcttttgaaaactgataccagagtaagcttgtcttaactcttactaaaatgaggaagaggaatggtatgcaaaagatttttaatgaacatttaaaatatgacttttatgtttaaaa

SEQ ID NO: 205941 - DNA, 513 bp, Homo sapiens
gtgggcaaaattaacccattgggtgtttrtgctaccttttctccctctctgtctctttctctttcttttttctccacttcctcctccctctcttgttttgtgttccttcttttagaagacacttcttttatttatttttttctcttatgcttcatgaaatacctacccttcttgtaatatctgaaaactagcaatcgcctcagtatcacctgaactagtctttgtatctgttaatgctccaaagtcctgcaactagtgctgctaaattctcggaactatcaccttgagcctgttatacgttttcaagggtaactctcagataactgaaaatatcttaagtggttcctgcattgctataaagaagtacctgagactaggtaatttataaagaaaagaggtttaattggctcatggttctgcaagctttaaggaagcagcatggtgctggcatctgctcagcttctagggagacctcaggaaacttacaatcatggtggaaggcaaagcaggagg

SEQ ID NO: 205942 - DNA, 567 bp, Homo sapiens
tttttgggatgccttaaacaaaaccgtgaatctctaagctcctcaggctggaaatggctcactgctggtggaatcattaagagtgccagccagatctgattgctgcattcagaggtttattaatatcacctcgaatttatcttcccygatgaggaaattttgccagcatctgacaaaaatgaaatgtacagcggccttgtgccaacaagcatcctctccctgccatcggctgttagcagaaagccagtgcagtgggctgctatggggctaataaaaatataagatgaaaatgggcttcgcatcttcaattaggaatttgggcttccaaccctcctcctgaggctcccttccccacaaccaggctatgataataaatttcagaacctcatctccctctgcgagtgtggattctctccccaactaatcctccaatactcatctgagcataacactcccgatgaaaccacacttgtcccttctaaacacttcaatgaattcccttatcttccagtctggaatgtaaccacaaaagaatatcaatgagaggcatgagtggagctggctaca

SEQ ID NO: 205943 - DNA, 567 bp, Homo sapiens
tttttgggatgccttaaacaaaaccgtgaatctctaagctcctcaggctggaaatggctcactgctggtggaatcattaagagtgccagccagatctgattgctgcattcagaggtttattaatatcacctcgaatttatcttccctgatgaggaaattttgccagcatctgacaaaaatgaaatgtacagcggccttgtgccaacaagcatcctctccctgccatcggctgttagcagaaagccagtgcagtgggctgctatggggctaataaaaatataagatgaaaatgggcttcgcatcttcaattaggaatttgggcttccaaccctcctcctgaggctcccttccccacaaccaggctatgataataaatttcagaacytcatctccctctgcgagtgtggattctctccccaactaatcctccaatactcatctgagcataacactcccgatgaaaccacacttgtcccttctaaacacttcaatgaattcccttatcttccagtctggaatgtaaccacaaaagaatatcaatgagaggcatgagtggagctggctaca

SEQ ID NO: 205944 - DNA, 567 bp, Homo sapiens
tttttgggatgccttaaacaaaaccgtgaatctctaagctcctcaggctggaaatggctcactgctggtggaatcattaagagtgccagccagatctgattgctgcattcagaggtttattaatatcacctcgaatttatcttccctgatgaggaaattttgccagcatctgacaaaaatgaaatgtacagcggccttgtgccaacaagcatcctctccctgccatcggctgttagcagaaagccagtgcagtgggctgctatggggctaataaaaatataagatgaaaatgggcttcgcatcttcaattaggaatttgggcttccaaccctcctcctgaggctcccttccccacaaccaggctatgataataaatttcagaacctcatctccctctgcgagtgtggattctctccccaackaatcctccaatactcatctgagcataacactcccgatgaaaccacacttgtcccttctaaacacttcaatgaattcccttatcttccagtctggaatgtaaccacaaaagaatatcaatgagaggcatgagtggagctggctaca

SEQ ID NO: 205945 - DNA, 594 bp, Homo sapiens
ccagtctggaatgtaaccacaaaagaatatcaatgagaggcatgagtggagctggctacaaatgaaacrtgaacaaaatcttggtggagtgcaatagggtttcagcaagaaggatcccaggttgcacttcccaggtggaagtgggttccttagactacattcggtgagtcaggtggtcacctgtggccaagtggaaagacccttcaaggccaaggaaccagacaatgtcttcaaggcagtcttgagttatcctgctggggcctggcagttggcagtctaagtggtagggggtgattgggaaggcactacaggtacgtgacgctgtgtgatagagtcaggagcaaggagctttggaagcttctagcgccaaggcaccttcagtccattatagaatgtccagtgtccccattttatgaatgagggcatgacccagaaagaagtcacttgtccagggtcacacagcaagtcagggtcgcagggctagagctagaatgcatatctggcttctctgaccagcagtctttcccccagaccatatccctactttcctttatgggggtaactttaattaagctctttctacctaccaagcac

SEQ ID NO: 205946 - DNA, 594 bp, Homo sapiens
ccagtctggaatgtaaccacaaaagaatatcaatgagaggcatgagtggagctggctacaaatgaaacgtgaacaaaatcttggtggagtgcaatagggtttcagcaagaaggatcccaggttgcacttcccaggtggaagtgggttccttagactacattcggtgagtcaggtggtcacctgtggccaagtggaaagacccttcaaggccaaggaaccagacaatgtcttcaaggcagtcttgagttatcctgctggggcctggcagttggcagtctaagtggtagggggtgattgggaaggcactacaggtacgtgacgctgtgtgatagagtcaggagcaaggagctttggaagcttctagcgccaaggcaccttcagtccattatagaatgtccagtgtccccattttatgaatgagggcatgacccagaaagaagtcacttgtccagggtcacacagcaagtcagggtcgcagggctagagctagaatgcatatctggcttctctgaccagcagtctttcccccagaccatatccctactttcctttatggggktaactttaattaagctctttctacctaccaagcac

SEQ ID NO: 205947 - DNA, 584 bp, Homo sapiens
tattgttcggtttatatgcaagttcaatkgattgttgattttaaataaaagttctaactgagaaaaaaaaagtaagcccataagagaaaccagtttcaaaaggccacatcctgtggattctccttatttgacattcttgaaaagataaagctatggtgatgaaaaacagatccctggctgccaggggttagagatggaaggaggcggttcgatgcggtaaaggcacagttccactgattatagtggtggttacacgcctccatacatttgtgaaaattcatagacctacacaccaaatttttttaaaaagtcaattttattttatgattacctaaaaaataaaaatgtttacaaggcccatgaattgggttgtctctaaaagatgacttttcttcatatttcttccaaattggttcatatttagagcactattgattatctaacaaaattttaaatggaaatagttgcagtggagattaaatgaaataacatattaaactgcttttgaaataaaaagggcatggaggatgtcatagaagtagcggtgcttgcagtaagaagtcagatcagactttacaaccttg

SEQ ID NO: 205948 - DNA, 540 bp, Homo sapiens
ctcactctggctcgaggaggagggagaaggaggcagggtttcatttcaagatcagtcagcccattgcagctggctgtcctgcagcttcaggagaaacaccagtggtcccacagctaaccaagatggtgcctgtcaggcacaacagcttgatagggacagccgcattccctgtcagattcttgataaagtacagcacatgccaggaattctgtgggcccttcaggcacttgtgctgttgacacccctatggctcaaaatcagaagctgtctctgaatttgatgaggtggtagagttggatcctttggcattgagggaagaatggcagaacgtgggtgtttacaaacacttctgtccacttatgtatactgcagatacttaatggagtgctcatcctgtgctgggatagaactgagacaaaaamcagatagtagctgctttcagggaacttaacaatgtcagttaatgggggagacaggtatccattcataatcatccccaatgaatgtgaacccaaaatgaaataagggcatggaagaaca

SEQ ID NO: 205949 - DNA, 545 bp, Homo sapiens
ctttgttgttgttgttcgttttgttttgttttgtttttgagatggagttttgctctgtcgcccaggctggagtgcagtggcgcgatcttggctcactgcaagctctgcctcccgggttcaagcaattctcttgcctcagcctcccaagtagctgggactacaggcacccaccaccacacctggctaatttagcaacctcaagtcttaatccatataggaactgtaagaagactactggtttgtttctcatcactaacatggtaactcatgattgccgaacactggctgagcagtcatgctctgcccagtggcattgttttctaagaacttaagtgtatcttctcattatcctcataaaatccccattatcagctccattcyacaagtggagaccttgaaacttagagagcttaaataataataataactaaaattcatgaagggtgcccttctagcccactacacataccaggcactgttctgagtgtttttatctgttgactcaattaatcctcataacaccctttttgtggtactatttatgt

SEQ ID NO: 205950 - DNA, 514 bp, Homo sapiens
cgtaattgactgggaccaaaccaagatcagaattcataacctcacagctgttcctcatgtcaactctttctattctaacacactgccatcctcattttaaaaaagggaatgtggccttgatattcccrtagattgctggatgcatacttccctgtcaccttccagtagggacacaggcattctattagctcagcagaatacagggctcccatccacatctgatggaaggcaaaggagatgaaactggtctccatgttgaggacagactggtacattaaagaagcaataggtcccctcatttgtacaccaagactcaagagttgaatctttcctttagtgacaagtggaagtccatggaagaatatttacaggcatggaagagtgagtttgaagtggggggcaaattctaaagagtaaagcctttaccaatggtaaactgtgccctttctatccatgccagcttgggaacccagttgagagtctgaaggagcaggacttagctttggacctgtga

SEQ ID NO: 205951 - DNA, 558 bp, Homo sapiens
tgatattcccatagattgctggatgcatacttccctgtcaccttccagtagggacacaggcattctattagctcagcagaatacagggctcccatccacatctgatggaaggcaaaggagatgaaactggtctccatgttgaggacagactggtacattaaagaagcaataggtcccctcatttgtacaccaagactcaagagttgaatctttcctttagtgacaagtggaagtccatggaagaatatttacaggcatggaagagtgagtttgaagtggggggcaaattctaaagagtaaagcctttaccaatggtaaactgtgccctttctatccatgccagcttgggaacccagttgagagtctgaaggagcrggacttagctttggacctgtgagatttcctctgtccccatcccaactgtgctcaggcccatcactttgcaggagcataattttatggcaagaggttcaccacatacctattgagctgcaagaggagtgatatcaatgtgcatatagttagggagagcaaagagtgctaatttagtaactgaag

SEQ ID NO: 205952 - DNA, 305 bp, Homo sapiens
tctaagaaataaacctatttcttattgagaaaaactcatattttgacatagaaatagtttcagaatttatataaatgaatgctagaaagcatagaataggaatctatttttatattagggtcatttataattstaatttatgtcctgacccactatttaactttttaaaaatttgcttctaatttatgttacctattgtatgacatatatcattgaacccatcttaaatgctttctggagtagcgaagatgcaaaataaaatatctccaatactgataacacagatagcaaaaacttatgacatt

SEQ ID NO: 205953 - DNA, 621 bp, Homo sapiens
catttagtgaaatggcaaatagcccagcagatgtttcagttaattttaatggtatcaatgttgtacaacaatagatgttcataataataaacttggctcttcagggaaaaataaatagcagtgttttctttttgaaatggcaagaatatatgtgtgacacatttaagaaagattttcatccctagaagttagaatgtaaaatgttttactacttaaagaggtaacccctcaacaattatgaaaacaaacaaaacatttctctacagaataaatcatttccaaggagccctggataaatatggtcttacagatacactttgtattctgccaggaataaatacaatgaaaggaaatcacaaatttgtcacatattcttcttatgtattaaatgcactcatccctcctcatcatactactctccttccattccatagatccgttcaaagaaatatttcccctcttgatgcacttccagcaaaggggtcttatactgaaaaattatttgtttttacctgaaattcaaatttagctgggctgtttgtatttttgtttactaaatctggaaaccacactcaggaagttytagtaatcagccagtttgtgaaaccaacagcgtttctg

SEQ ID NO: 205954 - DNA, 409 bp, Homo sapiens
aatgactgtgtttaggcatttctgcaaggctaggacatagtcctaaaaattgagcaccgcaaaacgaatcctgtctgtgcttccatcactactaaaacaatgcgaaaaacatacaaatcatattaagagcatcttatattgcatttaaatatagtaacagtggaagagataattttagttactccctcagaactagcaaaaacacactcttttgcaactctcccatttgttattgtttgcagacactgcatacctaacacttgttttatgtaaacaaataaaaaactcaataaacagtatatcccttcattctctatagcagtaaacttcyattttaatgagatttgagttcagtacagcaattttgatttcttttcaggttggttaaaataagattttacatgaattc

SEQ ID NO: 205955 - DNA, 629 bp, Homo sapiens
ctgcaacctagaatgaatgttgatggagtaatttttagcttgtacctttaggtcaaaatgaagaagccaatggctggaccctttaatttgttttgacccctgagctrcccaccttatgttgaatggaaacattccaagaacatcactttaattcatacttaaaccttttcctcttctgccctgctcccactccttaccattcttttctcttcattacttatgtattgactttaagcaagaacagttctccaaattggatcaaataactcattcagcactgggcctagctgaagaagtagatctgggattttagggtgaacctatatgaggtcattgcaacatcaggttctgttaagaaagggtgaagggctagacggggttattgtctgctttgttttaattacatttcaaaggcttctgtggcagcttcaaaactctgcctagcaatccttccatagtgcaatcaccctgctgagtttaacacattcacttactaaatgccaattgatttatgtgactcttaaaaacagcaactgctgctctcatctctcttgatatttaatcctgagccatggcagagttgctaataacaggtctggtaatacccccacagttctgatgacaatggt

SEQ ID NO: 205956 - DNA, 481 bp, Homo sapiens
tctgagaagaagatataaaacatctccatcctcctgtgagggttctttatgcctttttccaacaaattccatctctcaagccaaccactttgttgacacyttttttttgaaacttttattttaaattcaagggtacatgtacaggttttttatataggtaaactcatgtcactggggtttgttgtacagattacttcatcactcagctataaagtctagtaccgattggtgacttttcctgatcctctccctgctctaaccctccaccctcagggatgccccagtgtctgttgttcccctctacgtgttcatgtgttctcatcatttagctcccacgtgtaagtgagaacatgcagtatttggttttatgtttctctgttagtttgctaaggataatggcttccagctccatccatgttcctgcaaaggacatgatctcattcctttttatggctgcatagtgttccatggtgtatttgta

SEQ ID NO: 205957 - DNA, 481 bp, Homo sapiens
tctgagaagaagatataaaacatctccatcctcctgtgagggttctttatgcctttttccaacaaattccatctctcaagccaaccactttgttgacaccttttttttgaaacttttattttaaattcaagggtacatgtacaggttttttatataggtaaactcatgtcactggggtttgttgtacagattacttcatcactcagctataaagtctagtaccgattggtgacttttcctgatcctctccctgctctaaccctccaccctcagggatgccccagtgtctgttgttcccctctacgtgttcatgtgttctcatcatttagctcccacgtgtaagtgagaacatgcagtatttggttttatgtttctctgttagtttgctaaggataatggcttccagctccatccatgttcytgcaaaggacatgatctcattcctttttatggctgcatagtgttccatggtgtatttgta

SEQ ID NO: 205958 - DNA, 625 bp, Homo sapiens
acactctttccatcctcatatgaatgtttgaatgagtcatggaaaattagagcgtcaaatgtgtttcccagctgatttcaagcctgtgatagttttgtaggcccattcctgggcataaaaatcaagggcccaactgccagagagaatagaaggctgatataccagtaagtcttctatgcaccaggatagactttaaaccgtacccccacacataaaagctaaatttacctgggttgtggtgataagggaacacrtaaaataaaagaaggtagtcacctaatcctagttttgtttgtttgtttgtttctgaatcctgcaacaatatcagaccaaacttgggttggaaaggctttagctggctattattttcatcagactcctcaaggccatctcaaactataatgacaagaagaaaaagaaaaatggtcaaattatatgttgagattcctaaatcctttggtatcattgcttcatttataaaaagaaaaaactatacaaatatttataatctgtaattgtaataccatgacctactggaggagggataaagaaattctagattccatttccataaaaccctgctaagtgtctcatttaagtaaaccaagtctatgttttcattaat

SEQ ID NO: 205959 - DNA, 625 bp, Homo sapiens
acactctttccatcctcatatgaatgtttgaatgagtcatggaaaattagagcgtcaaatgtgtttcccagctgatttcaagcctgtgatagttttgtaggcccattcctgggcataaaaatcaagggcccaactgccagagagaatagaaggctgatataccagtaagtcttctatgcaccaggatagactttaaaccgtacccccacacataaaagctaaatttacctgggttgtggtgataagggaacacataaaataaaagaaggtagtcacctaatcctagttttgtttgtttgtttgtttctgaatcctgcaacaatatcagaccaaacttgggttggaaaggctttagctggctattattttcatcagactcctcaaggccatctcaaactataatgacaagaagaaaaagaaaaayggtcaaattatatgttgagattcctaaatcctttggtatcattgcttcatttataaaaagaaaaaactatacaaatatttataatctgtaattgtaataccatgacctactggaggagggataaagaaattctagattccatttccataaaaccctgctaagtgtctcatttaagtaaaccaagtctatgttttcattaat

SEQ ID NO: 205960 - DNA, 633 bp, Homo sapiens
aatggatactggattccagagtgggcaatgttgggaggagcaaggtagaatgtgatttaaagggactaagaaattttgggctgagctaggctataggagaatggtagacagacctgaggattttgctgggctgtgtcagtctgggttatagaagtgggtggaaattacarctaagggacttggagatgaggggaggtaagaagacagatctgatggtattgaggtaggggctgctaagagaagcatcaaacaggagggctagcccaggtttgagctggacactccactgacagttctaaagcagaaaattagggaaggaatagtcaggggcttatcagctatgcagtagcttctagaagtcaacagctggctctgggagggaaaagattgagaaaaacaaaagaaataaataagagcagaaggtataggggaaaaggtaggggtgagagttatcagtctggttagagctgggctaaacatttagtcttaccatcagtttaaaagcacctggaccagttagttgctgtacaggcaaagtcaaagggagaagcctggcctctctctactcagtcaaggttcatgactttaggagactgcaatgaaccaggcataccaggaaaggaaaaggttaac

SEQ ID NO: 205961 - DNA, 633 bp, Homo sapiens
aatggatactggattccagagtgggcaatgttgggaggagcaaggtagaatgtgatttaaagggactaagaaattttgggctgagctaggctataggagaatggtagacagacctgaggattttgctgggctgtgtcagtctgggttatagaagtgggtggaaattacaactaagggacttggagatgaggggaggtaagaagacagatctgatggtattgaggtaggggctgctaagagaagcatcaaacaggagggctagcccaggtttgagctggacactycactgacagttctaaagcagaaaattagggaaggaatagtcaggggcttatcagctatgcagtagcttctagaagtcaacagctggctctgggagggaaaagattgagaaaaacaaaagaaataaataagagcagaaggtataggggaaaaggtaggggtgagagttatcagtctggttagagctgggctaaacatttagtcttaccatcagtttaaaagcacctggaccagttagttgctgtacaggcaaagtcaaagggagaagcctggcctctctctactcagtcaaggttcatgactttaggagactgcaatgaaccaggcataccaggaaaggaaaaggttaac

SEQ ID NO: 205962 - DNA, 255 bp, Homo sapiens
ccggttacctgcgtgtcgtggcgaggaaggtgccccggaggcgactgacgcgggcgtgccctcgcctgggaaaatcgaggcgggcgcygcccggagtactgcggagggagaggggcgccgccgcgcggactctgcgcctgcgctctccgccctccgccgcccccaccccacaacctgactggcgccggagttggagactgcgggggacgctcagggttgtgcctgaactgaaggacttcctctacccgcgaggtg

SEQ ID NO: 205963 - DNA, 255 bp, Homo sapiens
ccggttacctgcgtgtcgtggcgaggaaggtgccccggaggcgactgacgcgggcgtgccctcgcctgggaaaatcgaggcgggcgctgyccggagtactgcggagggagaggggcgccgccgcgcggactctgcgcctgcgctctccgccctccgccgcccccaccccacaacctgactggcgccggagttggagactgcgggggacgctcagggttgtgcctgaactgaaggacttcctctacccgcgaggtg

SEQ ID NO: 205964 - DNA, 255 bp, Homo sapiens
ccggttacctgcgtgtcgtggcgaggaaggtgccccggaggcgactgacgcgggcgtgccctcgcctgggaaaatcgaggcgggcgctgcccggagtactgcggagggagaggggcgccgccgcgcggactctgcgcctgcgctctccrccctccgccgcccccaccccacaacctgactggcgccggagttggagactgcgggggacgctcagggttgtgcctgaactgaaggacttcctctacccgcgaggtg

SEQ ID NO: 205965 - DNA, 479 bp, Homo sapiens
agacctttctggaattcaggcattacaattccaactgtcactagacacccacagattgtgccatcagtacctcaaacccaacactcatgtccaaataaaaataatccagtctatacccctaaatcaacttcttccttcctaattttcttacttccggttaatgatagccttcagagaaatccctacatttggggtgataccaccaaaatagtagagtaaggaactccaaggcactgtccctgcaaaaagyaatgaatgcaattaatgagctggtaaatactgtcagactcaacttttgcagaactctggaatctagtaaaaaaaaaaaacttataaaatctagggcaaggcttggtaaagaaagaagttgctgctttgtggtaaagagagtgctatcgcatcctaagttgcctgcccaccatcccccacaccccaagtcagtgatggctgtgtggacagtaacctgcactcctaatgcc

SEQ ID NO: 205966 - DNA, 433 bp, Homo sapiens
attgcctgaatcttttcattttcagtttaacaatctatccttaagatcattccacagcagcacatgagacttcctttactaatacatctactacttctaacaattgcagagtgcgtcatcattatgtaagtagcactttcttcaactagaccttactgatggtcaatgggttgtttgtaattttctgggattaaatagtgctgcaatgaacagcctcatacatgtgtcattttgattttctgttagtgtacctttgggttagaatcatagaagaatgytgagttacagctaaagtttgtataattttgtgagatactgctaaattctgtattcataaactatttttaaaaactcctaacaatatatcagtgattatttccccacagccttgccaacaaactatgttgtcaatcttttggatttttgccaatct

SEQ ID NO: 205967 - DNA, 580 bp, Homo sapiens
aaatctgtattgtcatggatgaaatattgaggggattctgataaggaatcagaagagaagagccccagggaaagcctcagtcttcttagagattgcctaactggtgctgatcagaatgctggtagacagatggacagcaaaggccattctgataagataccagatgaaaatgaggagcaaggtatttgaaactgaaggaaagtccatttggctgaattgtattcatgtcctagaactttatggaaggcagaacttaagagtgtgaaaggaaaataaatctcagaactccaaaatcactaagccaaagggaaaagtcaagctgagaactgcgatggcaaacctgcctcccattctattcctaaataagatagctacaaagattaaaaagctacatacctccctcacaatttacccacaaggaaatkccctgtgaataaagaacaggcagaactcaaagtcatccctctgctcacatgagacaaatgcatatctgatttcttcctttgccctattgtttcactaagccagactaaggcataagtgactattcctttaccctcctctcatgagtaaattgtgt

SEQ ID NO: 205968 - DNA, 415 bp, Homo sapiens
atagcaattcaaggctccgttgaaataatgaggtggaggctggtgtgatccgtgagttgcagaggagcctcgctcctcaaagtgtggtctttacaccagcctcagcatcacctaggagcttgttagaaatgtaggctctcagataccaccccgactcactggctcagaacctaccatgtaacacaatcgctaggatgctccyacccacaagtaagtgggacacacactgatctggggcactgattctcaaccttggccacacagtcgaatcaccaaggagtcttcaaaggctgcggcatccaagctgcgcctctggggatctctgcagtgggacccagacaccagtggtttttaagagctctccaagtaaccccaatgtgcaacctcatctaatgttgagaaggaatatatgttt

SEQ ID NO: 205969 - DNA, 442 bp, Homo sapiens
acctgtttgtaaattatctaacaataattgaatgctttatgtattgatgtgggcctccagtgaattgattctggtcaaaattcacatctttggaatgtcaaattcattctgctgagaggctggaactttcctagatagacaagccacagagactttctgaaaatcaaggtagagagcctaagcattttrgagcttcatgttgtgtttgagaatggaggcccagagaaggaggccatcagctccagtgacttccctagtgccttcatggtaaaactcagcatagaattttccctccacacctgagcctcttccaagagcttctttcatgtcttggcttgtgtgacaccttgccccagcctcatcccaggacttttctgcaaaaggaattcttttcccttggcccacgtgctgctgcatatatccaattaatgaacaatctaga

SEQ ID NO: 205970 - DNA, 519 bp, Homo sapiens
cgcgttccaagataacgtatcttcacttacgcatatctcataaccagacttcttctgagtccaatcaaagggattcaggagctgttgtttggccagttatgactcctgctaactgccctgtctcccacttttcctcctggccacagagacaccacgggaccttatctaccctcttgcagaatttcagatacactgtgtctccaatattctcggaaaccatccagtttagtaaccctatcaraaacggaaatgagtttagcttggcaggaaatgaggtcagtttggcaactgatagtgaaacattgaacaatgtaggagttagtggtagtttgagttaatgcaagtcatgttgcaaggaggtgcaataagaagatcaaatgggctgtgagctgtgcagggtaatttgggctgaaagagggaagacccctgtaaactgatgattgtttgctttgtgtgtaccttgggcaggtgagtgcatagtggaggacttctgagtcctcccaacctagatacagatct

SEQ ID NO: 205971 - DNA, 648 bp, Homo sapiens
gaaaagaaggcagaccatagcaagttaacatgttaatttgggggcaaaaagggttctgctgagtgataatgattaaaaatatatagagaaaagcatagctaaactatatggtgatattttaaatcatggctagacgtgcactactacaaataccatagaaagtgcagagctcaagaaagatggaaaattatggctgcatgaagtattcacctctaagtcactttttaaagaggttgatttaatctgtgaaacatcacagtcttacatagtcaatcctaaaatgatacggggtttgacaattattcatcctacccacacatatgccaagaccttttataaatcttgatgcagtaatataaggcagcactgatctatgcttgccaagaaatagcgcttgttctgagaaaaagctctagaacattattgaaatccatctattgtatttttcttcagaggctaaatagattggagaggcagtgggagtctcaaacacatcacatgtttatatcatattccagaaagaagaaattgccaatatgtaatctattaagaagccaaagatgtacttttatttattaacaaagtcttatcctgagaaataccaargtcctcaaagcactcacctagattccccaaataaaataaaag

SEQ ID NO: 205972 - DNA, 415 bp, Homo sapiens
atgtgcataagttatataaaaataactacagcattttataaagggagttaagcaccagtggattttggaatctgcaaggatccctagaacaaatcacccaccagatactgagggatgcctctacttctaaataatccatgagtcaaagaggaagkctcaaggaaaagcaaaaatatatattgaactgcatgataacagaaatacaatatatcaaaatctatgggactcaactagagcagtgttgagatgaaaatttatagcacattttagtgcctacattagtaaaaaggaaacagaaaaatatcatatcaataatctaagttaccacaatctaagaaactagaaaaagaaggatgcagcaaacccaaagaaggaaggaaataatgaagaaaataataaagagcagaaataaaaa

SEQ ID NO: 205973 - DNA, 482 bp, Homo sapiens
attttcttaacttttttttttttttttaattttctcgagacagggtcttgttctgttgcctaggctggaatgtggtggcatgatcacggctcagtgcagctcaacctcttgggcttaagctgtcctcccacctcagcctttcaattagttgggactgtaggcgtgcggtaccatgctcgccttatttttgtgggggggtttttttttttttttttttttttttttgtagagacagggtttcaccatgttgcccaggcttgtatgatctcttttcctaaggaaaatctcctaaraaaaatctataaaagttctaaaatatttgcttctacttgggtatatttatgcaagatgatactgctttagggaaaggactccctaaatgcattgttaccagggctgagatgaaaagaggtttgatttgcaccccttcattttatgataagttgaaaaggtaataatagtttaaatgtgggttcaaggca

SEQ ID NO: 205974 - DNA, 476 bp, Homo sapiens
cactaacgttaaaatagaaatcataagactaatgaaacaagattctttgtgtagcaataagataccaaattccaccttcagtctggaatagcatcacatgacagatagcagaccttgaaggaaatcaaaatattttacccccaaatatatttctttggcatattcttaaatgaacctgtaaagccatctttcmtggggggaattagcatctacagagaatttccattaatacagctgggattaggatctaagagagattaactaagagtgataccttctaaggtctgaagagacagttgccatctattctctctgaaggctgctacccggaggcttcgtctacataacaagaacctaggcttccacaaccccccttatcttaactcaggcaattttttccattgacttcaagtcttagacaaagcttaactctttcaaccaattgccaattagacaatctttgaatccacctatga

SEQ ID NO: 205975 - DNA, 569 bp, Homo sapiens
aacggaaaccctgcttgtccctttctccagccgaagttgcatttccctgtgtcattcaaggagtaaatggatacaggactgatcrgctgttttaaaactccatggacaaaaaaagctaaattagcatgactctttggaattgtttcaatgatatttggctactatgaatatttttaatctttcatttttattacctatatgatgtcaggagctgtggcaggaagcacattttctcaattaaataattaatcccatagcataatagtccgtgaggaaaaattgacatttgtcaggttcaaagaaaatgaaagcctggaaggatttctcattatgcttgctcaagaaaaacataatctgatagcagactttccttactcgtttctctcctacacctaccactcccgctacaaatactccgcatatcaaaccacaggaaggagaaagcatccgcaacgccaccctcacactcgtcctcattcacccaattacagaatcatatcaattttatttcctaaatatgcctacagtttgctcacacctcactatccacaccatgaacattcgaattc

SEQ ID NO: 205976 - DNA, 593 bp, Homo sapiens
  misc_feature (1)...(593): n = A,T,C or G
taactttgaaaatctgataactattttagttccataggggtgtgtatccatttggctcttctgttactcagtgctatctgaaaattctgttggacttttcatctacaaaaagaagtaagacatggttttggacatcaaggaacaytgtcaaccaatcaaccaactaacccatatgcctaccatatgaaatacatgtgtttagttgtggaatacaaataaattatgtaacatcagaatgttttcagtcgtagtaaaaataactaacatttattgagtgatacctttntctatcattgcattaaagtgttntatacagattagaaaaaattatgatttagattctattattatccccatttcacagacccagacactaatgtattacatggaccaaaataatgttaacttatggcaggaaagtccctaatgatgactaaacctattgttttaaccaagaagttattccacagtccaggcaactcttacaagttacttattttgttactagtggcaggaatccgatttactttgagttatgggtagtgtatccatatgggtcctcagcaatttcattcttgttctcttcagaagaa

SEQ ID NO: 205977 - DNA, 386 bp, Homo sapiens
  misc_feature (1)...(386): n = A,T,C or G
aacagccttttctttctaaattcaattccctataaacttcagatattttatttttactaaattatagttagactttctgtagaattttttgttttaatttgtcttatcacctacttttttgtttttgtatrtaaacaacgtaacaactggaggtttcttaatagcatgctcatatctaaatagtaatcttttacatcttatgcaaagaaataatatgtttgcaagcaacatatgatgttttaccaattcctggaaggagtttctgagtatagttggggaggtcaagcattgaggcagagttcggtgacaggtgcagggatagataaaaatgacagtganaattaaataatcataaaaacttaatagtggaggttccttagaagtac

SEQ ID NO: 205978 - DNA, 505 bp, Homo sapiens
tttttatgacaatagagttaaagattattttggaaaaaaaattaaaaaaatttccaccactttttattcctatgtatttcctttttttgtcttaaataatctaataaaaaaagttcattattgaattctgcctttttatatcttttcccacttagtcccaatcctttgttatacagacacaaagtataagtacatatatgtatatatatatattttttcacatgtcaggccctcagtatttaagtaacactcttattccctggttgatctttcaattkccagcttaacagtctcaggtaacaattaaagattagtcaaatatcatgatttcacagcccttcatgtttctgatggtggggcttcaaaactgatgttcaaaatgtagtgctttgacatgttgaactgaagaagaaacctctaggtctccctgaccctgcccacactgccctgaccttagatcttctgtctatcccaacacacagagtgaagttttctgacattccct

SEQ ID NO: 205979 - DNA, 494 bp, Homo sapiens
atccaacttccttcacttcycttacctctaagaaaaaatgtaataaccattcataaaccattacatggtggggtaatcactctatgattttccgtatttgcacaataataaatttgtatgtctcttattactaatttatcttccatcagttgattttcagagaacctacagaaggtgaagaggaagttttcccttggcctgtacagttttagtgtcacaaacaggacactaaatgtgctctgatattctggaagccatagtcaagggaagccaggagcttacaagctggcagaggggtaagaaattcttaccagccaggctcccagactctactgactctggttgagcagatggtaaaaatcacattttgtctctttttcctcccaaaacttttgattaatgagagaaaagaatttgtgttaattcttttaggtatagcaactctggtgtacttttagtatgaatattaatattgtttcatacttttcctccta

SEQ ID NO: 205980 - DNA, 494 bp, Homo sapiens
atccaacttccttcacttctcttacctctaagaaaaaatgtaataaccattcataaaccattacatggtggggtaatcactctatgattttccgtatttgcacaataataaatttgtatgtctcttattactaatttatcttccatcagttgattttcagagaacctacagaaggtgaagaggaagttttcccttggcctgtacagttttagtgtcacaaacaggacactaaatgtgctctgatattctggaagccatagtcaagggaagccaggascttacaagctggcagaggggtaagaaattcttaccagccaggctcccagactctactgactctggttgagcagatggtaaaaatcacattttgtctctttttcctcccaaaacttttgattaatgagagaaaagaatttgtgttaattcttttaggtatagcaactctggtgtacttttagtatgaatattaatattgtttcatacttttcctccta

SEQ ID NO: 205981 - DNA, 432 bp, Homo sapiens
accattctggggtctggaggacagtggcccttttctcacagctccagtaggtggtatcccagaagggattctgtgtgggggctccaaccccacatttcccttccacactgccctagaggaggttctccatgagaccctygcccctgcagaaaacttctgcctgaacatccagagatttccatactttctctgaaatctaggcagaggtttccaaacctcagttttttatttttgtgtactcataggctcaacaccacatggaagctgccaaggcttaaggcttgtatcatctgaagccacagcccaaactctacatcagcccctttcagccatagcaggagtggctgggacacagggcacaaagtctctgggctgcactcagcatatggtccccaggcccagcctatgaaaccactttttcctcctgggcct

SEQ ID NO: 205982 - DNA, 432 bp, Homo sapiens
accattctggggtctggaggacagtggcccttttctcacagctccagtaggtggtatcccagaagggattctgtgtgggggctccaaccccacatttcccttccacactgccctagaggaggttctccatgagaccctcgcccctgcagaaaacttctgcctgaacatccagagatttccatactttctctgaaatctaggcagaggtttccaaacctcagttttttatttttgtgtactcataggctcaacaccacatggaagctgccaaggcttaaggcttgtatcatctgaagccacagcccaaactctacatcagcccctttcagccatagcaggagtggctgggacacagggcacaaagtctctgggctgcactcagcatayggtccccaggcccagcctatgaaaccactttttcctcctgggcct

SEQ ID NO: 205983 - DNA, 600 bp, Homo sapiens
  misc_feature (1)...(600): n = A,T,C or G
agaaatgtataaattagaaatggaattttatatcaagatttttaaagcatgttttatagtattcttatgacaatacttttatatgaaaacatatatcaggaaatctattttctatttgccatgcatttcaaaacacaatatagttttacaatgatattctgaacacagaccaaatccaaacyagtacccaaattttaagtcattgattagaacactatttaatctgtacattcataataaattattttttatatttgttaccatgaatgaaaacataaacaaatcaaaccatttgatgattctgaataccttttgtttccatatgttttagtgaataattattttaagaagatagaatctctgtattagtgcttagcatgctgaacaaaaatccatcagaagttaattcccatgagcacagggtattttgtattgttttcttatctcagagcctttaatagtgcttagcacatggtatgtgctctctctatctgtctatcatctgtctgtctatctatccatctatctacgagtatgactattaatggattaanaataacatttaatgagcacttcattgtctttccctgacatgaacgt

SEQ ID NO: 205984 - DNA, 600 bp, Homo sapiens
  misc_feature (1)...(600): n = A,T,C or G
agaaatgtataaattagaaatggaattttatatcaagatttttaaagcatgttttatagtattcttatgacaatacttttatatgaaaacatatatcaggaaatctattttctatttgccatgcatttcaaaacacaatatagttttacaatgatattctgaacacagaccaaatccaaaccagtacccaaattttaagtcattgattagaacactatttaatctgtacattcataataaattattttttatatttgttaccatgaatgaaarcataaacaaatcaaaccatttgatgattctgaataccttttgtttccatatgttttagtgaataattattttaagaagatagaatctctgtattagtgcttagcatgctgaacaaaaatccatcagaagttaattcccatgagcacagggtattttgtattgttttcttatctcagagcctttaatagtgcttagcacatggtatgtgctctctctatctgtctatcatctgtctgtctatctatccatctatctacgagtatgactattaatggattaanaataacatttaatgagcacttcattgtctttccctgacatgaacgt

SEQ ID NO: 205985 - DNA, 461 bp, Homo sapiens
ggaaacgatacatttagtttggatatctttggggtttttttgaattggtaaaattacctatttttatgatgtgtgaattatctagaagcctgtacacaaaaaagaataaaggccttcaaataaaagcatttctaaaggctaaagagattttaacctcataaatttgactttgagcatacttagttttaatatttgttctttctgaggaaaataaggtcaaaataactaaagttctctttaattttaaagacaaacatgcctctctaaataaaccatactttcattcatatctaacacattttgtttattatatctctactattagtttcctaccctagtttctgcacaatgcccagtttttcagagttaatctgtattatwacataagatgtattcattgaataataggattgcctgtaagatttacatagccccctcaattaaattaaacatgacttgta

SEQ ID NO: 205986 - DNA, 510 bp, Homo sapiens
tataaaaagtgatgatgttgtttagaaataggtttagtgcttattgtcttttatttgaagcattactattataattatgaacattagtaagctgacaaatctaattactcctccaattatatgccttatatgttgtttagstttttaatgcttactttaatggttattttaaaattaataccactaatattgcttttaaagatattactatggaaaaattctaacatggtctgtagacacactgtgtgtgttgtgtcactgttgccttaaaatatgtgattcatactgctttttgttgttattgtaaaatatacataacatgaaattgacaattttaaatatatttaaatgaagttttcagtggcaaatgaggtacttctcattaatatgcaatcatcaccaacattcatctccagaactgttttatcatcacaaactgaaactgagtatccattaaataaacactaacttgtcattaccctcacctcctgcccatggcaaccaccattc

SEQ ID NO: 205987 - DNA, 510 bp, Homo sapiens
tataaaaagtgatgatgttgtttagaaataggtttagtgcttattgtcttttatttgaagcattactattataattatgaacattagtaagctgacaaatctaattactcctccaattatatgccttatatgttgtttagctttttaatgcttactttaatggttattttaaaattaataccactaatattgcttttaaagatattactatggaaaaattctaacatggtctgtagacacactgtgtgtgttgtgtcactgttgccttaaaatatgtgattcatactgctttttgttgttattgtaaaatatacataacatgaaattgacaattttaaatatatttaaatgaagttttcagtggcaaatgaggtacttctcattaayatgcaatcatcaccaacattcatctccagaactgttttatcatcacaaactgaaactgagtatccattaaataaacactaacttgtcattaccctcacctcctgcccatggcaaccaccattc

SEQ ID NO: 205988 - DNA, 593 bp, Homo sapiens
ttgcacattctcttccttttcagatcaattttcaaatcatccatgctttgaattgagagattatggygcacagattcagaagtgtgtggatttaaagtcagttttactacttattatgaaaattacttaccttttcaaaaactcagttttctcatctctacctttggtagagacagatttaccatgaagctacagaagcttaagcttcagtgcttctcacttgtaccggatccttcctgtatacaaaattttttaaaaaattgcaaaatgcatggccacatatattgcataaactgcaagccccacaaaacctatatcttcgggtctgttacataattattaaatataataattgtatttacttaagtattaaatgaaaaacataggaaatgtctctagcacaagacctgatgaacaataaatagttaatattaacatactctcatctctaagatagacgtattgctcagtagttataaatatctatcaattgcataaatctataaaattgagataaatatgttttctgaagttttctagacaaacaagataaaaaaactaatctgaatttttcagaccctttgcctcacaga

SEQ ID NO: 205989 - DNA, 518 bp, Homo sapiens
ttagtccaaattcttgtttcaaaacctaccagatgtatgatattgggcttattacttaaccttgctttgcttcagttttttacctgtaaaatggagttatctatagctaccatacattattgttgtgaggattaaatgagaaaataaatgtaattttttttttgagatggagtctcgctctgtcacgcaggttagagtgcagtggcgcgatctcggctcactgcaaactctgcctcctgggttcaagcaattcacctgtctcagcctcccaaatagctgggattacaggctcctgycaccgtgcccaggtaaattctgtattttagcagagacaggccaccatgttggccaggctggtctcgaattcctgacctcgtgatccacccaccctggcctcccaaagtgctgggatcataggcgtgagccaccgcgcccggccaataaatgtaaatttttaaacacaattccagctcatagtagatgctctcctcaaaggatgttgaatttgatgatcttat

SEQ ID NO: 205990 - DNA, 623 bp, Homo sapiens
aactctgctaaagtctttctggcccactccacatagcctgatattcccttcttttcatcatccttctggtaataacagagcactgtaaagctatagtgtgtattggaatgtgtgcttatgttcttttcatgttcttctcacttcttttgaactcttagaaatcagagacttgaggaggaaataggcataaaggatagcttatctgttcaagaagcttagcattttttaaaaaaagaaaataatagttggaaatgatccaaaaacgtaggttgttttggacagaaaatgggagcaaatgcaaaataaaaactgctagagaagcaaacataattgttatgtgctgggaaaaatagctaaagatgawaggaactaaaatgtattgagttattacctagtgccagtcactattctaaaagcttggcatatattatctcatttaattctcacaacaactctatgaagtataattcttatccttgttttataatgctgaatgatgtatatcacccaattgcctgagctctaaagaaaaataaaattttcttgggcagctaattgttgagctttagttgtgccatgtgatgagaaggagggagggtcactagaaagaaaaggtgatagca

SEQ ID NO: 205991 - DNA, 642 bp, Homo sapiens
tgtgtatgatatgattccatttgtgtaaaaagcactgtagtatgtatgtgtggtttctaaaggcctagaaaaggtctgggaggatacacattaaactatcaacaatgattacctcagtgtagtaagatagtggtgggctggggagttttcattttttaccatatatatttcctattgaatgaatttttaaataattaaaacattaacaaaaaactgtacaaccatcctgtatgccccartgattcaaggcattttcagacctggcaccagccttctttccagactaattgctcagacttatttacattaggtaggccattatgcacttctgcattatgggaaacgtgggttgactggttgactgttgaaactggattgtgtactaggcctacctgctttgcaactagaataggaaaggccacctctgatactcagaaggtcatgaagctctttctgaggagaagctaaggtacttgttcctgccctgaggacatgccaaaataggttcattcctttagctcttcaaaggaagaagtaaaatttcataactctttccccttcccaacccatttttgcattagatgttttaaaagtacctgtacttatcttgttcactgtttagtttgcttcttttgtagcaga

SEQ ID NO: 205992 - DNA, 523 bp, Homo sapiens
tgagaacagcatgggaaagacctaccaccatgattcaattatctcccaccaggtttctcttttacacatgggagctacaaaatgagatttgggtggggacaagagtcaaaccatattagttcacttcctttagactgttcctgtaggcatccccttttcattatcattatttttccttaattcaacttagttcaaacccagtgttggaataagctgtctataaactgccttgctcttccctggaatccatgaaaaagcatcccaagaacatcaatacatctagagcctcacccaacacataactgggagttggaaataacttttcagccattcyttggttagaaggttgtggcagagatttctaattgcctatttaatgtccataattccctttatcttactaagagaactccaattttattgaaggcaactcagtgctaagtttaaaaactatatttccacagcttctttttaagttaggattggtcatatcaaacagatttggtgaaaggatgtaagcaga

SEQ ID NO: 205993 - DNA, 590 bp, Homo sapiens
tcatcatgttcctgaagcatatcactaagcaagtcaacattcttaaaaatagttaaccaaaattcaggaattcctatgggctcttctttttcttcatccttcttctcttcttcaatcttggccttttctttcaactcctccgaaatcttgccttcttcatctggtttccattcacattcttcttctgtgggttcataaattgcattaataatctcaaatcgcttatcaaatagaggctgatagagaacagcatagagaagtgataactttcaaaccaatctaaaatattcaacttgtgaatagaaataaacaaagaaaagtaaattaaacaaagaaaagtaaattattaaattaaaatattggctsttagattttagtggtaaataaattttttccctgggttatcagtcagtaacattagcttttggttataaatcagtttggacaagtattgtctccttgggttctagtggcttttacccaagcccataggaaagcaatcttcctgatccagattccctactaataaggcatccgcagcactactgactaatgtgatttaagatggctcatgtgtacgcccactttca

SEQ ID NO: 205994 - DNA, 594 bp, Homo sapiens
tttacgttttgatacttgagcttttgaaaagctgaaataggctctaatttttcttatcaattttcagagctctaggcaattcaaacctgttcaaagtgtcagttgacatgtccagtaatggtaggtgcactttgttacaagaccacaaaaggcaatagttgtctacttatgagaaaaatattgccaagagaaacttgtcatctctatagcattaatataaaacaatttgtagttattgaatacaatggatctccatcttaggccaaggtttttttgtgtgcgaagtgatcaccactttctctcctaattagggtatgatggactttagagtagcccatagaaatcatcctggaaatagaaaaatgaatgaattttcagaaagaaaagagggaagagaaaatgagtgggagggagagagaaagagagacagagacagaaagatcacatactagaatawtctctatgtgaataaagagcctaagattttcacacttcattgaccttcctcaactagaagaaagtctgctgctgctgattttcactaaaattaattatggcatggataggagagaacaaggagaaataagtattcaa

SEQ ID NO: 205995 - DNA, 446 bp, Homo sapiens
cctgggcatgccctcatatttagatgccagcctttatcctaccctgaaagttcttcctgttctcctaggcttattccaattaattcatttcgccattacttcaaaacttagaattaacatgcattagatgcaacatggtgtaatagaatttgcctaggtgttggaatcagacttgactgcaaattctgattctgttactttttagctgtgtgaccttagataaattattaaacctttctgagcttyagttacctcttttttatctacaaaatggagataataagacataccttttactgtgaggattaataataaaatctttaaatgcacctaacacgatgcattgtacacgttaggtattcaataagtagtaactattcttaaggtgttttaaattcttaagcccaccatttaatttttccagcatatgttatttttaaagcaag

SEQ ID NO: 205996 - DNA, 426 bp, Homo sapiens
caaaataagataaaataaataaatttaaaaaagtaaataaataacactcatgctaacatccctaatatccttgttgttcagattattcattttaccgatttggaaaaaaatgcaaatctagatgcctccatgatctgcttattctatttctgcaacacagctttgtgccatttttcaacacacactcacagacaaacctgggtatcattcctaatacctctttcccttctcccttatctttgwtaccctttccaaaatatcatcaagttctcttaagctctccaatggatccattcttgctatgtgttagacatcacttttgtcctgaacttcaagatcctctaaccagtccctacaaccttccaccccctacaatacattgatgcaaccagagtgatttttattttttacaatcaagtctaatta

SEQ ID NO: 205997 - DNA, 500 bp, Homo sapiens
agctgaaaattctgatgtaccatacttttacaatttataaatactttttgataacaaaagctatcaacatcttatttgaaaaagtcataatttgcttcataatgtaaaaaataacagctctttactgttactagtctttctcattttcctctaaaatatgcatggtaaaataacctgcagtgcttgtgtttaaaaaagatcttatactagcttctttcttcaggaatgttgagtattcgtcatatttatcaaacaaaatttattacatccacatttggttttttattttttagaaactcctttgcaaatagtaaaaatgaggctcattggaagagaaactgaaatgaaatgtagtaacttcctgattatgtttattttagaggctgcacatagcgytgccactaaaaaacagatataagtcatgtagtatgtggttgaattctccccattattctgggccttggtagcaattgctttttaagaattttcttttacaccag

SEQ ID NO: 205998 - DNA, 609 bp, Homo sapiens
aggcggtgttgggagacagagatgggggtctcctaccgtccaaaaaatccagaccttatgtgggaatcagcctcagaggacacattttaagtactttgcttgtcttgtccttatggaggaggggccaaaaaggacattattctatgtttttcgtcrctcagaaagcactttctagaacttcctagtgagtttctcttttattgacagccccagggtggacttgcagcagggccccgtagcttactgatgaaccagatgctgcactccccttcttgcaggcatcccagataccttgcaggcatcccagattttggagccatactttacttggctttggggagtggaaagaacctccctactgccccccaacagagagggaaaagtcttcacttatgaatagtgtgttcatcacctggccatggactggtcccctgaactttagggagaaagtatgtgaccctaatgtgattgattcagtagctctgagctaagcatgatcacatattttgttttttttctttgggccttagttgcaattccagaaatacaagaaaaatttccatcaatatctgttactcttgaatcaaaaacgtaatcctaaggggcacc

SEQ ID NO: 205999 - DNA, 497 bp, Homo sapiens
cctccaactccttacagtggccttgagacttgctttgacaattagaaatcagtgacactgtgccaattctgggccgaggctttcggagacctggcagcttccactttggctctgggaaagccagccactgtgttgtggagaagctcaggagagactcgagaaggaggagaaaccacagagcagctacttgggggaaaggcactgagctgccagacatgggaatgaagccttgttggattttccagtctggccagcctctagctgaatgcagccatatgtatgacccaaactgatgctacatggarcagaactgcctggccaagccgtgccctaatttctgacccaaagaatcatgaaaaagagtaaaatcatgttgttttgcatgactaaatgctggagggctagttatgcaacaatagatagctgaagtattatcattaaaaataatagaagattcagttatagtaaaataactaacctccgtttggtcaccttcc

SEQ ID NO: 206000 - DNA, 576 bp, Homo sapiens
ataggttatgcctgtaatcccagcactttgggagcctgggggaagggagaggattgcttgaagctgggagtttgagaccagcctggacaatatagtsagaccccatcactacaaaaaatataaattaaacattaacaaaaataaaaagctatatacaatttccttggctttttaattcttcatagtatataaggctagtggaattattttatgagaataaacaatattaaaaaaacagagttcaatgaagatattatggttgtcaattcatactacttgagaaacatggaattattttcaaacataatctaaagaccaaatttctgactattcctaacagaaaatgtaaactcaaacaaagcatatatcaaaataatgttacctcgttccaggttcagcctcagtatgtgtaacaagtgggcaagatggaggctttctcacaaaatgtatttcatatattgattatggattaatttttcttatgtgcaagcaaaacaaagccctcttgttactttcctcagtgtattgatacagaaagcaaactcactcagcttttccacacaaggaaaacaaatg

SEQ ID NO: 206001 - DNA, 554 bp, Homo sapiens
ttgtgggttaggttccaaaccactgcaataaagcaaatatcacaataaagagagccacatgaatttttttgttttccagagcatacaaaagttatgtttacactatactataggttatgaagtatgcaatagtgttatgtctaaaaaaataagttattaattaacaacactttattgctaaaaaaatgctatcatctgaaccttcataaagttgtaatctttttgctggtcttgcttcaaggttgatggctgctgactgatcaaggtggtggttgctgaaggttggggtggctgtggcaatttcttaaataagacaacaatgaagttttccatattaatttattcttcctttcacaaaagatttctctgtaacctgtgatactgtttgatagcattttacccatackagaacttctttcaaaattggagtagtcaaccctctcaaaccctgctactgctttatcaactaggtttgtgtaatattctaaatcctttcttatcatgtcaacaatgtttccagcatgttcaccaagagtagattatatctcaagaaa

SEQ ID NO: 206002 - DNA, 540 bp, Homo sapiens
gagactccatctcaaaaaaaaaaaaaaaaaaaagttatactgaatgcaaagacttttttcaaattttttatgttcaacttaaaattgtatatatttatggtacagaacatgatgttttgttatatctacacaatgtggaataactaagtcacaataattaatatatccattaccctacatatttattttttgtagtgaaaacatttaaaatctcctagtaatttcaagtagataatacattgttattaactatatttggcatgttttacaatagatctgaatttattcttcttgtctaactaaaattttgtaccatttgaaaaacatctcctcaattccccaccagcccctgggaatcaccattctactctccgcttctatgagtttgaccttttaagattctgctttaaagtgaaatyatgtggtatttattttcctgtgtctgtcttatttcagttagcacaatgtcatccagattctgttcacttgagaagggtgcttcccaactctgagaggggcaaccacaaactacttctcact

SEQ ID NO: 206003 - DNA, 615 bp, Homo sapiens
tcaaccactggattgtacactttaaragggcaaattttatagtatttcatttacctctgaataaaactgttataaaaagatactgtggattagctagaaatattgctcaagtgaacgggagatacatgcctagtgacctttagagtggtgccgtaggcctagggacgccttaggtaatggatataaatgtttagagaattctctacacttatctgaccagaaagttagacactgtcaacagaatattgtcacatctgcctgaaggtgctatttagagtgtctgaaaggacagggagctggaagttgattaaactgatggagtacactgtgtgactgttttgagttcttcttggtaatgaatatttgtcactttggcacaatttggcctgagacttgctttcttggaacatactattttggagtgaggttatagtgagagctgcatagctcacatacttcagcaattgaaggcaacatatcactactaaacagcctagttggatagaatgatgaacagttgatacccaggagaattattgactattatgtattcatcaagctcccaatcactctactgaattatcttattaatttaaaaagcttttatttgttaat

SEQ ID NO: 206004 - DNA, 516 bp, Homo sapiens
tcgtttaagtttatataaatgataggaaagctagcaatgtcagtcaaaagattctccttgaaatgtataccttacatgtaaaaattaagctgctcatttgtgaaatgaagtgaaattctcatagatcattcaataaatctgttttttttcttattagcattagcaaagttttaaacgacctgccatcagtcccattttagatgtgtttaaacaatttgggacacttagccaggctgaccatgagctagcaagtatgcaggtggacttgatttgaatttattgtaattatcttattcacatttatctttaagctgttgatttgtatgtgcttaaatgtggtatatttaaatatttatcctgattcttttatcagcatgtcttactttcaaagtgcataaactgctcatttctttttcagcaaaacattcagcctccamgtcaaagatctcaggtgttgtattgaccaatatacaaaagattaaaatatagtgtaagtgcaaaccccaaggcaaacac

SEQ ID NO: 206005 - DNA, 345 bp, Homo sapiens
agaaaaaatactacacacacacacacacacacacacacacacacacacacacacgcaaacacataaaaaatcaccctttgaaagtctaatcatttgaatttcttggtcacttatttagttttgataattttgaataatacatatttarttacaactttttggtctttaagtcaatgtttgccatcttcaatcagaaggacagcaacaaacaaagtacaattaaatattgatttttcaaaatccacaaatgtaaatacaaagagaaatttaaataattaaactttcaaatgatttttgggggacatgtttgtaatttcacacttctgaagctattaaagattaaaa

SEQ ID NO: 206006 - DNA, 577 bp, Homo sapiens
agctactttcctgcttatgtgtatacagagctactaacaatttcatttgtaatttactagcagaagtcatatgtgtgtgtgtgtgtgtgtgtgtgtgtgtgtgtgtgtgtgatatctgtgtaggtatatgtgtatatatatcctcaatttaaaatttttcatgtccatctatatgaaaattttttaattgagraaattatatccagtggcctattttcttcccgatgaattataaacgaacaccattttctactcatacaagcggaatgtcaatctacctcatgggcctatcaaagagcgaatttgaaaaaccactggtttagccagtgatatggttactaggtgatgctaggccccattgccactgttaaaagcttatccataagcgagatgagaaggcccttgcttggcatgtaaaagcaggagtagcaggggatggcaggtagctgcaggttgatgacacatgatgtgtctacatatctatatagaaccatgaagtccatgaacatacccacttttcataacaaacccaaagctattttatcatcaatcccagtcaacaatagtaagatccaag

SEQ ID NO: 206007 - DNA, 475 bp, Homo sapiens
gttttttttttttcttttgagttgatgaaactgctctgtagtctgattctggtgatgtttacatggatctatacatgtattaaaatttatagaactgtatgctttaaaggcaacttaaaaagtaatatcagaaaaaatacctatgtgtctcataattgatttttatattctatcttctattttctycccactggctcctttgtaacatgtattatgactgatcaaaatgtcactgaggtttggtgtagcaataatcctgtcatccagttgctgagcatagtgccacacaggtagttttacaactctggcacccctcctacccttctccctcttgtagtcctcagtgtctactgttgccatctttatagccacgtatacccaatgtttagctcccacttacaaatgagagcatgaagtatttggttttctgttcctgcattaatttgcttaggacaatgacctccagctgaagcta

SEQ ID NO: 206008 - DNA, 606 bp, Homo sapiens
agtttgttttatgttcaaaaaggaaaaaaaaaaaactatcaatgccatctgccacagagaagtcacgtaaggacagaaaaaactaatttatacgttagtcacagaaagaaagaagaaaggcagaagtggaaagagaaagagaggatgaggtgtagccgtaggctgagggtgctgtaatctcaaaagtaggcttttgtccaggaaaatgactcttagtattcctttctgggcctgtctattgtgctacatgctctttgacatgatttactactattcaatacactcaattcaacaagtacttattgcatctctacataaaccagcctgtgctttgatttttaggagtccttaaagataaatatttaacctgaaatcacttacagtcaagtagaagagataatatgcacatacgtttaactgmagtgtaatgcagaattggacacaaatcacaaaaacaagaacaaattgcctttgtgagctgataagtgggtaaggccactccttcatatcaataatgctgcctgcagggaacagaatccaatttagatgattcaggaaacgttaataaaggaactatttacagagctgtggataggttcaagggcg

SEQ ID NO: 206009 - DNA, 574 bp, Homo sapiens
ccctgccggatattaagatatattaggagccaagtgtgatagcttgtgcctctaatcccagcgatttgggcagcygggacaggagaattgaggccaagagttgaagagcagcctgggcaacatagcaagacccagtctctacagtagagatacacaaattatccaaggagggtgctatgtgcctgtagttctaattatttgggagactgaaggtggaggataacttgagctcaggaggtaaaggctgcagtgaaccaagatggcatcactgcactacagcctgggcaacagactgagacctcatctcaaaagaaaaaaaaaacacacataaggaagtcatgatgattaaaaacattgtggtcctgttgtgagaaatggaaaatgcaactaaacagatggtctagaaatagaactatataaagataggaagtacacaaaagaggtagcatcatagtcctgttgagaacgttgaattaccaactttggggaaagaggttcattatataaagagacacagagctgaatcctaacctaacgatacaacttatattgcactgtcttatatagcttgctg

SEQ ID NO: 206010 - DNA, 553 bp, Homo sapiens
aacagcttctatttacctgaaatagtaggacacactaattagaatttcaaagagcttacatctattaaaacgtgtggatccattttatcctaaggctcaggatgcccagcctcatataaactgatttaacaacaaacgtttaagtacaaatccaaagccatctatctagtattccttcacaacttcttgtgtaccaggctctgcactgtgttgctttccatactgtgtcttattgagtaatagacctccgaaatgggtgttgaaggttcctaccaaagggatctgtgtacaagaaacacatagccaggaaagaccaaattattatttgttaaaagtgagcttggccctgttatctcattttggaattcagaatggcttttctctctctcctctccccccamatcacagatgactagaacacaggtcaagcctaagctaatatgatttactcagaatcacagaccgagatgctgggactgactgtgtagcacacttgccactttctaatacagtaactcctctcactgctcaatagacgtcatggttgttggtc

SEQ ID NO: 206011 - DNA, 553 bp, Homo sapiens
aacagcttctatttacctgaaatagtaggacacactaattagaatttcaaagagcttacatctattaaaacgtgtggatccattttatcctaaggctcaggatgcccagcctcatataaactgatttaacaacaaacgtttaagtacaaatccaaagccatctatctagtattccttcacaacttcttgtgtaccaggctctgcactgtgttgctttccatactgtgtcttattgagtaatagacctccgaaatgggtgttgaaggttcctaccaaagggatctgtgtacaagaaacacatagccaggaaagaccaaattattatttgttaaaagtgagcttggccctgttatctcattttggaattcagaatggcttttctctctctcctctccccccaaatcacagatgactagaacacaggwcaagcctaagctaatatgatttactcagaatcacagaccgagatgctgggactgactgtgtagcacacttgccactttctaatacagtaactcctctcactgctcaatagacgtcatggttgttggtc

SEQ ID NO: 206012 - DNA, 400 bp, Homo sapiens
cactatagttatattcatctgtacttactgtctccctggtaaaggcataaactcccttcaagayggggacatggttttatactttcctgaatctcctttagtgcttatatctaacagcacttaaccaggatctggagggggtcaaccagtcttgcttccttccaatctactctgtagatgtttgtgtttttctactgtaactatagaggtaaaggagccaatggtgtttccagtgtctggcacataataggtgctctatgaatgtcaaatgaatgactgaggcataaaaagttcttcctatgacataagtagtataataggaagatcactgggatagaattttcttagaagacgtggctcctagtcctagcactattactcttactgactataactttgg

SEQ ID NO: 206013 - DNA, 527 bp, Homo sapiens
caagggctgctaccaacttctcttctctgaaagaatccttygtaatctctgcttgaaagcctttaaaaaaggtaatgttggtctctctcatgcaggatgggaaaaagacgctgaaacagtcagattttctctttgaaaaaacattttaaagaaaatatttttaaaatatatgtttcaaaacatattcaaaacctaagaaataattttcttagtgaattttgctacgggatagttgtgaggtgagtttaggggctttgctaagggataaatgaaaagcctaccagggtacacttcttgaaataaaaaacaacattagggttttttaattgttgttggttggttggttggttggttttaagagacagggtctccctgtgtcacctaaacctgactacaatggcctgttgatgactccctgcagcctcaaacttcagctcaagcaatcctcctgcctcagtctcccatgtatagaggactacaggcacatgctgtcacagctagctaatttttttaaattatcttttata

SEQ ID NO: 206014 - DNA, 565 bp, Homo sapiens
tagttagttttctaatttcataaaagaggaaactaagtctcaggcattcctcagttgccaatatcatgagctgttgtcttatggagccaagattcaacgtgaagcctattgccaaagctgacttgctcttccttcaaaacttatactggcagacgtagtgagtggtttataaacacagggctttctcctattttgtagaaacttacaatatatttaagaactaaagagggccacttaaaataacaagccagtatatcaccagtgaataaaccgaagggtaagaaaatatggactctgyctctggaatccagtggtagatgtttcaagtgatttaggaaaaaattaatgaatacaatagttgtttcttttattttcttttgtccaagtttatatatgcaataaaaatatttctcagcttttaggaagcattgtttacagacctaattgttaagcgttaattgactttaactgcctaataaaatgaactatgtaatcttaggaactactagatcgttgcacagattttgagtctttttatcaaggaatcttccttctgctccatcct

SEQ ID NO: 206015 - DNA, 578 bp, Homo sapiens
tatatgcaatatacatataaagttgaaaatatgagtgtgcacaggcacacatgaaagtctaaaaagaatcttttggtaacaatgccttggctggaagacttaattttggttaaataaaatacagcaatctaacctcgcccaataattgccacatgaaaattatttctgccaagtctatactgatatctatcttcctaaaatatagttgaatagacataactttctctggcttttattttaactattgtcatatttcttaaaccattcaggctcctgtaccaaaataccacaaactatgtgatgataaacaacagtaatttgtttcttacaattctgaaggctggaatgtccaagatcatgatgccagcagattcagtgyctggtaagaatctgcttcctcttagacagctatattcttatcctaacctcatacagtggaaggggtgaggggtatcttttgaccctctcctataagagcaatgattttatttgtgcagattccactcctatacataatcacctcccaaaagccccacgacctaatacaatcattttgggagtgaagattacaacatacg

SEQ ID NO: 206016 - DNA, 544 bp, Homo sapiens
tctccatctttactgtctacttctttcactatatttttaacacatgaattatacttacattatcaaccatgtttgatagtttcaatgtctggacatacctattcctatatatgttgagtactttatctcttcataaagagtagataatccttgcttattttgtgtgtttcatagatttttatatatgccagatattgtgtgcaaaataactatagaaatagagttaatatgtattcttacaaacggatttgcctcttccttcagctctctccttggtaggcttgaatcaatctagattgtaattaatattcatttaagtattattgttgccataactacgttcagtgtataatatgcttcacattctttctgtggttgacagcttctacattattttaaacatgaggccaaaagtgctagatgatttttcttattattcttgcttcatattcagttttcagctagacctgcacactggcttcacagacttaatctctccscaagtatttgcctctcctcatgccaagcagcatcaggttagtgg

SEQ ID NO: 206017 - DNA, 527 bp, Homo sapiens
gtaacatgtttaataacctggtctttggacacaaacacatttgggttcaaaactcattttcgtcacaagcattataaaattacaaaaattaattagctgtctaaacataaccccatctgtcacatagtcacatttacttaactgggttatgtttctaagacgtgatattataggtatagaacatgttcctgaggttggcagatatttaagtgccaataaatattttatattacattcatgcatagatgctggggtataacaatatttcactagactgtagagacatacatacagatccagtcaataaaacagtacaaagtgtattaaattaaatatggggtagataatagtaataaaagaagtcacagctgatatttagctgtgtatttgagtccttaaatgaggttaaaattgcttaataattgttggaaaaaaatgctaaaatttkgactttaaaaaaattcctaatattatagtaaaaacaataaggtatataattctgatttaacaataattcaagttttttt

SEQ ID NO: 206018 - DNA, 577 bp, Homo sapiens
tatattttctatcatagcaatacgtatttgagtacctactatttgcaaaaacaaacaaacaaacaaaaaactggattaagtgtgtaaattatttgtaaaggataagtagccatagttgtgaacaggacctaatactacagtttgtgtaataagacaggaacatggagtgtaagaatgtcacaaggcaatgtgtgattcctttccaattaagttttgtaaaggaggctcccatgaattggagacttctttgtcaaatattcctgmacaatgtgggaaattaacagtacattaagtgatggtaaattttagatttggggtggaaaatacatttagtggctaacagagtgaagaaatgcacagaaatgagaaggaatgaggtctgctcaaggctaaacttttggaggctctttgggacagtcattgaatgaaagactggaaactgtctttggatcctgatttccccaactgttctgctaaaaaacactattcaataagtatactccaaaatttgagttattttccaattagtggaaaatacagaaataggaaaatgaagaacagttgtattcatgctgag

SEQ ID NO: 206019 - DNA, 356 bp, Homo sapiens
cctagtgagtatatctcagtccccagtccccttccagagaaggcttagtggccagaagagggaatctctgtgtctttcttgacctaatctgagcccgtagcttcccccagccccacagggactgtcctcacagatcccctccaaccctgccccattctgtcggcttcagagcatggccagaagcacctttctggggcattacatctgatggggcacaaaggagacgggggtaggttctgctgcctgcgcaaattgggaagggtygggccagggctatagccggagagacccagacctcggtcctaagaggaagtggggctggaacactttggcccacactaatgataatgttgctg

SEQ ID NO: 206020 - DNA, 504 bp, Homo sapiens
ccagggccagcatcatggccacrttatccaggtcttcaagcaggaccatggactcgaaggaccccacacttgctttagggctctaacatcaacatatttaaattcctaataattttatcttcaaatttgtgttctgtaagtgaagactgaggagccaatggaacattcatgtgaaaagaggagatacctgagatttgcatatttaccattttttcatcttatttttatataaagttcacgatgccccatgatcacagaattccataggacccagtatgcatgggagttcagtgagactcaaaccaatgacaaggtaagtgtgtcacatctacaaccaagtaagcaagggtaatgatagctctgagagctacacctgccatttgaaccagaactcactttgaatactaaacaaagttcacaatgttctaagaaacacacacaaagggccttaacatatattttcttatttatattatttctttatattagccaaccacttacact

SEQ ID NO: 206021 - DNA, 495 bp, Homo sapiens
atcccacagaaatgtcaaccagagggttttccttgtttcctcaagcctttttgtgaatatatatgacaatataaaaacgttttcttacctttctgtgtgtgtgttttgttttaaatgctttgccaraaataactttaacataaataggttctttaaattattttgtgaagtaagagaatagatgacaatatgactgtttcatagaaaattggaaagtaagaatctttcatgttcattctctgacataacaacaaaagaaagtttggctttttaaaataatttgtacctggttttgggggcagaggttgctagattgactcttaaaaaataaataggaataattcatgagattatatattaataatttatacatgttaagttcttatttgttattaaaggtgaataatagtttatgtacatcattttacctaatttctcaaacccactagttgttggaaatgatattctgttgttattttttgaaatcccttctgt

SEQ ID NO: 206022 - DNA, 495 bp, Homo sapiens
atcccacagaaatgtcaaccagagggttttccttgtttcctcaagcctttttgtgaatatatatgacaatataaaaacgttttcttacctttctgtgtgtgtgttttgttttaaatgctttgccagaaataactttaacataaataggttctttaaattattttgtgaagtaagagaatagatgacaatatgactgtttcatagaaaattggaaagtaagaatytttcatgttcattctctgacataacaacaaaagaaagtttggctttttaaaataatttgtacctggttttgggggcagaggttgctagattgactcttaaaaaataaataggaataattcatgagattatatattaataatttatacatgttaagttcttatttgttattaaaggtgaataatagtttatgtacatcattttacctaatttctcaaacccactagttgttggaaatgatattctgttgttattttttgaaatcccttctgt

SEQ ID NO: 206023 - DNA, 497 bp, Homo sapiens
ctatgcgtcagcatgacggttttcttttattattatatttgttattgttatagactctgacatgmagctagaaatgactctagaaatgtaatatgattaaaatgagcatatatcatttatcattttcttaacatctttctctgttaataagaaaaaacttgaaagcaaaataatccactggataggttttcatactcatttattggtataggagagtaatgaaaatttataaattctcataaataaagtgttcaagaatccactattgtcacagttaaaaagacaatgataaatctaagttggtataaaattatataaattaattaaatagaataagatagatatagttactgcatcttttgttttctcttgttcaagatgaatgactttactaggaggagagggtttgaaatacagttgactctttataaataaatggtgaataattatgacttgagtttttccaaaagcagaaccttagaaaaataattgtgtgc

SEQ ID NO: 206024 - DNA, 494 bp, Homo sapiens
ctacacaaacctgttagctttcccagtaagatgaaaaaatgatcctaatttcccagtaagaacaaaaaatgatcctaggtgcaagtgttggcttkgtctttggtcaagtccatacattaatcaatatctcaatggttcccagccaaatttatgctgaagaagaatgcttaggttctcactattttgtatctggcttaaaagattagactatcagccagtgatagcgtttcttgtctattgttcacatactcagtgtttcttgcccttggtatgcagtagagcttacttcactgagctgctaaggaaaaacagcagtctctctcaagataaattcattctgtagaagccaccctagaacgtgatggaatattttggatatttcatgcgggattttgttttcttctaatatatatctgtatttcatgctaatttagttttacatctatcttgaaaatagccatttactggcacttttattacttttcaatttgtat

SEQ ID NO: 206025 - DNA, 545 bp, Homo sapiens
gagattttcctttattcattgtttatttttggcaccatggtcaaagattaattgaccatatatgtgtaggtttatttctgggctttctattctgttccattggtctgtgtctgtttatatgacaactgcaaactgttctgatgttactacagctttgtgatatagtttgatatcatggagggttatgcctccagaatttttttctctcaagattgctttggctctttgggggttttgcattttcatacaaattttaggattgtgtgtgtgtgtgtgtgaaaaattcctttggaattttgatagggattacactgattttgcagatcactttagatactatgggcctttaaaaaatactcattaatacacatttaagtctgtgtagtcacttgtgtcttatggatccatataggactgcacagtatactccaaatctctcttatataaatatacartagggccaagaacaaaaatgatggctaatttatgtttcattccttcattttgattgggacaggggcacagaaattctaggcagaaaaggg

SEQ ID NO: 206026 - DNA, 528 bp, Homo sapiens
tttcacctttgttcaaggtggcattgctttgagatccacccccagtttcctccttacttgctgcaagtaataaaatccgcttgttaaatcctcactggttgtggtcattgtaactgccaagcaatcagaatcaatttataaatatgtaggaggataaaatacagatataaatccactgaaagacgtttcattaatagtarcatactctgcacatactctgaatcattttttgcttacctgcagctaagaccaatcgtctgcctggagccacatgcaatcccagcacaggcatttggaggcttagtagtcctcctctcctttttcattcattttgttttttctcttattcttttgtctctatactcttcaacttttatattttttattgactacactaagcttttcttgagctccctagatttgataaagttgtccttctggcatgtttttgccagctgtcatggctcatagtgcaatttaagcctctgttgcacactattgtaaatccaggtaatgaaagccacaaac

SEQ ID NO: 206027 - DNA, 594 bp, Homo sapiens
gttggctacatttgattggccaaaactctgtgattggcgcaagtgtaagctaatgtctggtctgtttacaccttcacttgatatagttcacaatgtgcggaacaatctttaggctgaacttcaaatacataaggaggaagctttaggctaaacttgatttaaggaaatcttctatgatactttttatgtgttttgtttctgtttttgttttgtttggctttatatctaggccacaggattgaaatttttttttttaactttcattcagaaagagttttttgtttgtttgtttttgttgttgttgttgtttgctttttttttttttttttggtttccaatactctaaaaatgacttggcagtggctgttagatttttatagctacctgaatagttacattattataagatcgtattagtcttattttaattgtagcatactatgttgtaaaaattgtactgtcagagtgacattttattcattttctgttgtgtatatttttcttgcctggagayttgggaaattttaatttataattttttttaaataaaaacactgtactatatataggtatcaaaatatttttatcaattat

SEQ ID NO: 206028 - DNA, 439 bp, Homo sapiens
aatttttttttaataaattacctagtctccggcagttctttatagcagtgtgaaaatggactaatgcactgaactctggcaaaaataacataacaaagagatttgtttaatattcctaaattggtcctggaacaaaatcctaatctgattctggcaatttgcaaagaagagtaataaattttaagtgatacagaaacagaaccctggagattatgagacgatattagtaaaaaaatgatttataggccggatgcagtggctcacacctgtaatcccagcactttgggaggatgaggcaggtggatcaccaggtcaggagttcgagaccagcctcccctgaaaccctgtctctactaaaaatacaaaaattggcaggacatggtgttgagtgcctataatcccagctactcgggargctgaggaaagagaagtacttgaa

SEQ ID NO: 206029 - DNA, 578 bp, Homo sapiens
tggttttcaccagttgtcacataaaagccacttttcatcacacatcacacatcacaatcagatcgagaaatggttcattgttgcatagagtaatagaagatgacacttcaaaatgataatttttttttttcatttttagtctgctcatgargcacccacttattgagctttttcacccttccaatttgcttcaaatgtggaatgaccatagaatggtcgaagttgagttcttgggcaacttcttatatagttgtaaaataataaacttttatgattgctctcaattggctgttgtcaacttccaatggctggccactacactccttatcttcaaggctctcatctcctttgcaaaactacttgaaccaccactgcaccgtacattcgttagcagttccttggcaaataatgctgttgatgttgcgagttgaccctgctgttttacaacccattttgaactcaaataagaaaatcgcttgaatttgcttttggtctgacaccattttcatagtctaaaataaatacaaaataaacagcaaataataagtcattagcaacaaaaagtgagaaatgtgcat

SEQ ID NO: 206030 - DNA, 578 bp, Homo sapiens
tggttttcaccagttgtcacataaaagccacttttcatcacacatcacacatcacaatcagatcgagaaatggttcattgttgcatagagtaatagaagatgacacttcaaaatgataatttttttttttcatttttagtctgctcatgaagcacccacttattgagctttttcacccttccaatttgcttcaaatgtggaatgaccatagaatggtcgaagttgagttcttgggcaacttcttatatagttgtaaaatrataaacttttatgattgctctcaattggctgttgtcaacttccaatggctggccactacactccttatcttcaaggctctcatctcctttgcaaaactacttgaaccaccactgcaccgtacattcgttagcagttccttggcaaataatgctgttgatgttgcgagttgaccctgctgttttacaacccattttgaactcaaataagaaaatcgcttgaatttgcttttggtctgacaccattttcatagtctaaaataaatacaaaataaacagcaaataataagtcattagcaacaaaaagtgagaaatgtgcat

SEQ ID NO: 206031 - DNA, 578 bp, Homo sapiens
tggttttcaccagttgtcacataaaagccacttttcatcacacatcacacatcacaatcagatcgagaaatggttcattgttgcatagagtaatagaagatgacacttcaaaatgataatttttttttttcatttttagtctgctcatgaagcacccacttattgagctttttcacccttccaatttgcttcaaatgtggaatgaccatagaatggtcgaagttgagttcttgggcaacttcttatatagttgtaaaataatmaacttttatgattgctctcaattggctgttgtcaacttccaatggctggccactacactccttatcttcaaggctctcatctcctttgcaaaactacttgaaccaccactgcaccgtacattcgttagcagttccttggcaaataatgctgttgatgttgcgagttgaccctgctgttttacaacccattttgaactcaaataagaaaatcgcttgaatttgcttttggtctgacaccattttcatagtctaaaataaatacaaaataaacagcaaataataagtcattagcaacaaaaagtgagaaatgtgcat

SEQ ID NO: 206032 - DNA, 542 bp, Homo sapiens
tcatgtgcttcattctatattgctgtaaaccagtaatccagaaattcataattatttgcttcatgatacttctttttgtgaaatactcgcattattgctgttgttcctgtttgttattttagacagtatattttgtattggtgatttagactagcatttctatagagttaaggtataaaacctatatcttgtattatagaaagaccatcatataacagtaatacatgctggtcttcccctttattctagaaaaatgttaaacttttgggaaatcaaatatgaatgctatagcattagtcaacaaatcatacagcaccagtgcagcaatatcaatttcatctgaagggtaaaaagaagttcagatattccacttgctactgacttgcaatatacacaggtaagaaatttttattctaatttacaaatgacagaataggaatccgtctttatgtagaaagataactgacatgaatawcagtgaaaaacacattttttataacttgctctgaaattttatgcttgatatcttacaaaatatgtga

SEQ ID NO: 206033 - DNA, 539 bp, Homo sapiens
ttaacaaaatccaactttgtgtctaaaaattaaattctacatgccacagtgtttctgacttaaaccgtgttacgaaataatamaaattgtcaaaatctaaataattactttaagatttatggaaattattttaaaactagttaacatttcttactattattcaaggcctaaataattagaactattcatttttgcaagaaagaacacatagtttgtagactgaagggtctgaccaaaatttaagagggagggagaaagaaaatattgaagtgtatgtgtttatgtagaaatatgtattgatgtagaaggtactttatgtcaaaatataaacatggtagaaaatgattttagctttccaatcaatcaatgaaaataagttttttatgttggttggatttaatctgatcacaccgcatctttgtttaatgattataaattattgtaaacatatacaattaggagacagttctttcaatgttaaccaaaatacttggtttagtaagttttatgtttttctattatttatgtattatactatg

SEQ ID NO: 206034 - DNA, 657 bp, Homo sapiens
ttaataatgtaatatttacactgtttgtagctttaaaaaccaataaagttgtgcagaaattggaatatgtgactgacaatcgagaaaaatcattcattaggaacagactcagaaatgttagagatgatggattgcagacaaagttttaacatctattgatatgatttaaatctctgtctctacacatatctcatatcaaattgtaatcctaagtgytgaaggtaaagcctggtgggaggtgattgaattatgggaatgggtccttcataaatgtttagcaacatccctttggtgctgttctcctgatagagttctcataagatctggttatttaaaggtgtgtagcaattcacccctctccctcttcctccagctcccatcatgtgaaatcgcctgcttctgctttgctctttgccatgattgtaagttccctgattcctccccagaagctgatactgctatgcctcttggacagcctgtggaaccatgagccaattaaacatcttttccttaaaaattactcagtctcaggtatttcttttcagcagtgtgaaatggactaatgcacctattataaatattgtcaacacattcaagtacttaaaccacagtctgtgaagatgaacaaaaaatatttaatagaatcaagaaaaaaca

SEQ ID NO: 206035 - DNA, 581 bp, Homo sapiens
aaaattaaggaatggattgataaaatagtttaaaagagtctgggaaaagtctggatttcagaatataacttctgaaagttttaacaggttgaggatataaaggcaatattttagatttgtaatttttcaagaactataagcgagtatctaaaaatccataaatagcaacatcactttttaaaacagtttatcattcatatactttatctatgagtccagtactattaatatttgamattctttgtattatttaaattgtgtattccaggcctgaggaagtcccacttttgaaactgaagccaatatgctttacccatgagaagaaaagggagaggaggggagaaagctgtggctgtgccttgttttaataacaaaactttctgaataattaaaatgttttatttggaagaaaaagctgacaggtagcaaacctcatacagcatttatgaatatgtacataatagatgccaaacagcaaaaaccacttcagtaattactgtgcatagtatttgaatactatgtgcataaaagagaaaaaaagcacagaaaattcatatttattcaaatacattcataataaa

SEQ ID NO: 206036 - DNA, 581 bp, Homo sapiens
aaaattaaggaatggattgataaaatagtttaaaagagtctgggaaaagtctggatttcagaatataacttctgaaagttttaacaggttgaggatataaaggcaatattttagatttgtaatttttcaagaactataagcgagtatctaaaaatccataaatagcaacatcactttttaaaacagtttatcattcatatactttatctatgagtccagtactattaatatttgaaattctttgtattatttaaattgtgtattccaggcctgmggaagtcccacttttgaaactgaagccaatatgctttacccatgagaagaaaagggagaggaggggagaaagctgtggctgtgccttgttttaataacaaaactttctgaataattaaaatgttttatttggaagaaaaagctgacaggtagcaaacctcatacagcatttatgaatatgtacataatagatgccaaacagcaaaaaccacttcagtaattactgtgcatagtatttgaatactatgtgcataaaagagaaaaaaagcacagaaaattcatatttattcaaatacattcataataaa

SEQ ID NO: 206037 - DNA, 523 bp, Homo sapiens
agcatttatgaatatgtacataatagatgccaaacagcaaaaaccacttcagtaattactgtgcatagtatttgaatactatgtgcataaaagagaaaaaaagcacagaaaattcatatttattcaaatacattcataataaaaatcttaagaatcttttaacctaactgtacttgactactttttaaattccatgtttatatattgtctattttttgcataaattcaaatacyacatgttctcacttgtaagtgggtgctaaaccagcgatactcatggacatgaagatgacaacaatagatactggggactcccagagggaggctgaagcgggagtgaaaaaccaacaactaagtatatgcttagtacctgggtgatgagatccacccattttccagtagcaaacctgcacacgtacccgccacatctaaaagttgaaattatgaaaaaaattaaaacaataaaaagtctctgcactaatcgtgctcaaagataaaaaatgtttttagtttgtaagaattt

SEQ ID NO: 206038 - DNA, 546 bp, Homo sapiens
aaaaaattaaaacaataaaaagtctctgcactaatcgtgctcraagataaaaaatgtttttagtttgtaagaatttaattactttgttgtgcttatgatatatattagcatagttaatgttaaatagccgggcttttatgatagctacaagggtattaaaatgtgttgatattcagtgcaaattctcattaaatttcttaatatttgtgcaaatccgtaatatgatttgtacaaatacatgaaatatcagcttgtctaagttactttgacaatcaaatttctggaaggaacattgtaaaacttctgtacttaaaacattcaatataaatgttcttcagatttttgtacattgatagaaacatagtagcagataggtgaaaaattgaatctgaaaatatattctggaagtaataaaaagtgaaaggcttacaatagtgtgaacacttataccacacagtacattttgagctttggtattctgtccttaaaaataaatttttttatgaaaaacaaggatcttctctgttgtcagaaatggcataccat

SEQ ID NO: 206039 - DNA, 546 bp, Homo sapiens
aaaaaattaaaacaataaaaagtctctgcactaatcgtgctcaaagataaaaaatgtttttagtttgtaagaatttaattactttgttgtgcttatgatatatattagcatagttaatgttaaatagccgggcttttatgatagctacaaggstattaaaatgtgttgatattcagtgcaaattctcattaaatttcttaatatttgtgcaaatccgtaatatgatttgtacaaatacatgaaatatcagcttgtctaagttactttgacaatcaaatttctggaaggaacattgtaaaacttctgtacttaaaacattcaatataaatgttcttcagatttttgtacattgatagaaacatagtagcagataggtgaaaaattgaatctgaaaatatattctggaagtaataaaaagtgaaaggcttacaatagtgtgaacacttataccacacagtacattttgagctttggtattctgtccttaaaaataaatttttttatgaaaaacaaggatcttctctgttgtcagaaatggcataccat

SEQ ID NO: 206040 - DNA, 529 bp, Homo sapiens
tcccattcctaggctctatacatattaaaattatagaaatattaataactttatgctaataaataatttaggaaaaatgaaaaaacttcattgaaaagccaaaatgatgacagattactcagaagcaaactgatagactttaacagctttacagcaattacattaattgaaacsgtacttaaatcttgcaccaaaagtcccgcctttgatggcttcagtggtgatttctaccaaatgcttaatttaaaaaataatataaacactacaaaatataccaaacactgaacagtggatattgaatcataattcattatgtacggccaatattacactgctaccaaaaccaaagacattataatggaagtaaactacagaataacaatttgcatgacatagagattttgcagatgtaatggtttgaaagcagttgactttgagttaaaaaaaaaaactctattctgtgtgtacacaagtaaaaatgctctctaaaagaagtaaactgctgaaactgctgtattctgagaagacc

SEQ ID NO: 206041 - DNA, 386 bp, Homo sapiens
tattccattccattccattagatgattccattcgggtccgttcgaagattctcttcgattccattcgawaattccgtttttttccgtttggtgttgataccattcgattccattcgatgataattccattcgattctatgcgatgattccattcctttccattagaagatgattccattcgagaccattcgatgattgcattcaattcattcgatgaccattccattcaattctgttcaatgattccattagattccatttgatgatgattccattcgattccatttgatgatgattccatgcgattccattagatgatgacccctttcatttccattcaatgaggattccattcggttccatttgatgatgattcctttgaattc

SEQ ID NO: 206042 - DNA, 386 bp, Homo sapiens
tattccattccattccattagatgattccattcgggtccgttcgaagattctcttcgattccattcgaaaattccgtttttttccgtttggtgttgataccattcgattccattcgatgataattccattcgattctatgcgatgattccattcctttccattagaagatgattccattcgagaccattcgatgattgcattcaattcattcgatgaccattccattcaattctgttcaatgattccattagattccatttgatgatgattcyattcgattccatttgatgatgattccatgcgattccattagatgatgacccctttcatttccattcaatgaggattccattcggttccatttgatgatgattcctttgaattc

SEQ ID NO: 206043 - DNA, 386 bp, Homo sapiens
tattccattccattccattagatgattccattcgggtccgttcgaagattctcttcgattccattcgaaaattccgtttttttccgtttggtgttgataccattcgattccattcgatgataattccattcgattctatgcgatgattccattcctttccattagaagatgattccattcgagaccattcgatgattgcattcaattcattcgatgaccattccattcaattctgttcaatgattccattagattccatttgatgatgattccattcgattccatttgrtgatgattccatgcgattccattagatgatgacccctttcatttccattcaatgaggattccattcggttccatttgatgatgattcctttgaattc

SEQ ID NO: 206044 - DNA, 493 bp, Homo sapiens
acggaattgaatggaatcgtcatcgaatgaattgaatgcaatcatcgaatggtctcgaatggaatcatcttcaaatggaatggaatggaatcatcgcatagaatcgaatggaattatcatcgaatggaatcgaatggaatcaacatcaaacggaaaaaaacggaattatcgaatgkaatcgaagagaatcatcgaacggacccgaatggaatcatctaatggattggaatggaataatccatggactcgaatgcaatcatcatcgaatggaatcgaatggaatcatcgaatggactcgaatggaataatcattgaacggaatcgaatggaatcatcattggatggaaatgaatggaatcatcatcgaatagattcgaatagaattatggaatgaaatccagtgtgatcatcatcgaatggacccgaatggaatcatcatccaacggaagctaatggaatcaacatcgaatgaatcgaatggaaacaccatcga

SEQ ID NO: 206045 - DNA, 493 bp, Homo sapiens
acggaattgaatggaatcgtcatcgaatgaattgaatgcaatcatcgaatggtctcgaatggaatcatcttcaaatggaatggaatggaatcatcgcatagaatcgaatggaattatcatcgaatggaatcgaatggaatcaacatcaaacggaaaaaaacggaattatcgaatggaatcgaagagaatcatcgaacggacccgaatggaatcrtctaatggattggaatggaataatccatggactcgaatgcaatcatcatcgaatggaatcgaatggaatcatcgaatggactcgaatggaataatcattgaacggaatcgaatggaatcatcattggatggaaatgaatggaatcatcatcgaatagattcgaatagaattatggaatgaaatccagtgtgatcatcatcgaatggacccgaatggaatcatcatccaacggaagctaatggaatcaacatcgaatgaatcgaatggaaacaccatcga

SEQ ID NO: 206046 - DNA, 493 bp, Homo sapiens
acggaattgaatggaatcgtcatcgaatgaattgaatgcaatcatcgaatggtctcgaatggaatcatcttcaaatggaatggaatggaatcatcgcatagaatcgaatggaattatcatcgaatggaatcgaatggaatcaacatcaaacggaaaaaaacggaattatcgaatggaatcgaagagaatcatcgaacggacccgaatggaatcatctaatggawtggaatggaataatccatggactcgaatgcaatcatcatcgaatggaatcgaatggaatcatcgaatggactcgaatggaataatcattgaacggaatcgaatggaatcatcattggatggaaatgaatggaatcatcatcgaatagattcgaatagaattatggaatgaaatccagtgtgatcatcatcgaatggacccgaatggaatcatcatccaacggaagctaatggaatcaacatcgaatgaatcgaatggaaacaccatcga

SEQ ID NO: 206047 - DNA, 493 bp, Homo sapiens
acggaattgaatggaatcgtcatcgaatgaattgaatgcaatcatcgaatggtctcgaatggaatcatcttcaaatggaatggaatggaatcatcgcatagaatcgaatggaattatcatcgaatggaatcgaatggaatcaacatcaaacggaaaaaaacggaattatcgaatggaatcgaagagaatcatcgaacggacccgaatggaatcatctaatggattggaatggaataatccrtggactcgaatgcaatcatcatcgaatggaatcgaatggaatcatcgaatggactcgaatggaataatcattgaacggaatcgaatggaatcatcattggatggaaatgaatggaatcatcatcgaatagattcgaatagaattatggaatgaaatccagtgtgatcatcatcgaatggacccgaatggaatcatcatccaacggaagctaatggaatcaacatcgaatgaatcgaatggaaacaccatcga

SEQ ID NO: 206048 - DNA, 703 bp, Homo sapiens
ataccaattgatgatggttatttttgattccatttgatgatgattacattcgattccatttgatcataattccattcgattccactcgatgattccattcgattccattcaatgatgattccattcgagttcattgactgttccattccattccattcgatgattccattcgagtccattcgatgattctattcgattgcattcgataattccattcgattgcattcgataattccattcsattccatttgaggataattccatttgagtccattcgatgattgttccattcgattctattcggtgattccattcgattccattcgatgatgattgcattcgagtccatggattattccattccattccattagatgattccattcgggtccgttcgaagattctgttcgattccgttcgataattccgtttttttccgtttggtgttgatgccattcgattccattcgatgataattccattcgattctatgcgatgattccattccttcccattagaagatgattccattcgagaccattcgatgattgcattcaattcattcgatgacgattccattcacttcttttcaatgattccattagattccatttgatgatgattccattcgattccatttgatgatgattccatgcgattccattagatgatgacccctttcatttccattcaatgaggattc

SEQ ID NO: 206049 - DNA, 703 bp, Homo sapiens
ataccaattgatgatggttatttttgattccatttgatgatgattacattcgattccatttgatcataattccattcgattccactcgatgattccattcgattccattcaatgatgattccattcgagttcattgactgttccattccattccattcgatgattccattcgagtccattcgatgattctattcgattgcattcgataattccattcgattgcattcgataattccattcgattccatttgaggataattccatttgagtccattcgatgattgttccattcgattctattcggtgattccattcgattccattcgatgatgattgcattcgagtccatggattattccattccattccattagatgattccattcgggtccgttcgaagattctgttcgattccgttcgataattccgtttttttccgtttggtgttgatgccattcgattccattcgatgataattccattcgattctatgcgatgattccattccttcccattagaagatgattccattcgagaccattcgatgattgcattcaattcattcgatgacgattccattcamttcttttcaatgattccattagattccatttgatgatgattccattcgattccatttgatgatgattccatgcgattccattagatgatgacccctttcatttccattcaatgaggattc

SEQ ID NO: 206050 - DNA, 703 bp, Homo sapiens
ataccaattgatgatggttatttttgattccatttgatgatgattacattcgattccatttgatcataattccattcgattccactcgatgattccattcgattccattcaatgatgattccattcgagttcattgactgttccattccattccattcgatgattccattcgagtccattcgatgattctattcgattgcattcgataattccattcgattgcattcgataattccattcgattccatttgaggataattccatttgagtccattcgatgattgttccattcgattctattcggtgattccattcgattccattcgatgatgattgcattcgagtccatggattattccattccattccattagatgattccattcgggtccgttcgaagattctgttcgattccgttcgataattccgtttttttccgtttggtgttgatgccattcgattccattcgatgataattccattcgattctatgcgatgattccattccttcccattagaagatgattccattcgagaccattcgatgattgcattcaattcattcgatgacgattccattcacttctkttcaatgattccattagattccatttgatgatgattccattcgattccatttgatgatgattccatgcgattccattagatgatgacccctttcatttccattcaatgaggattc

SEQ ID NO: 206051 - DNA, 703 bp, Homo sapiens
ataccaattgatgatggttatttttgattccatttgatgatgattacattcgattccatttgatcataattccattcgattccactcgatgattccattcgattccattcaatgatgattccattcgagttcattgactgttccattccattccattcgatgattccattcgagtccattcgatgattctattcgattgcattcgataattccattcgattgcattcgataattccattcgattccatttgaggataattccatttgagtccattcgatgattgttccattcgattctattcggtgattccattcgattccattcgatgatgattgcattcgagtccatggattattccattccattccattagatgattccattcgggtccgttcgaagattctgttcgattccgttcgataattccgtttttttccgtttggtgttgatgccattcgattccattcgatgataattccattcgattctatgcgatgattccattccttcccattagaagatgattccattcgagaccattcgatgattgcattcaattcattcgatgacgattccattcacttcttttcaatgattccatyagattccatttgatgatgattccattcgattccatttgatgatgattccatgcgattccattagatgatgacccctttcatttccattcaatgaggattc

SEQ ID NO: 206052 - DNA, 554 bp, Homo sapiens
gatgacatttccattcaataccaattgatgatggttatttttgattccatttgatgatgattacattcgattccatttgatcataattccattcgattccactcgatgattccattcgattccattgaatgatgattccattcgagttcattgactgttccattccattccattcgatgattccattcgagtccattcgatgattctattcgattgcattcgataattccattcgattgcattcgataattccattcgattccattggaggataattccatttgagtccattcgatgattgttccattcgattctattcggtgattccattcgattccatttgataatgattccaatcgagaccattcgatgattccattcaattccattcaataatgatccctttcgagtccattcaatgattccattccagtccattcgatgattccatctgattccattmaatgaatctattcgattccattatatgacgattccattcatttccatctgatgatgattccattcgattccattcaatgataccattcgat

SEQ ID NO: 206053 - DNA, 376 bp, Homo sapiens
tcaattcgatggtgtttccattcgattcattcgatgttgattccwttagcttccgttggatgatgattccattcgggtccattcgatgatgatcacactggatttcattccataattctattcgattccattcgatgatgattccattcatttccatccgatgatgattccattcgattccgttcaatgattattccattcgagtccattcgatgattccattcgattccattcgatgatgattgcattcgagtccatggattattccattccattccattagatgattccattcgggtccattcgatgattctcttcgattccatacgataattccgtttttttccgtttgatgttgattccattcgattccatt

SEQ ID NO: 206054 - DNA, 376 bp, Homo sapiens
tcaattcgatggtgtttccattcgattcattcgatgttgattccattagcttcygttggatgatgattccattcgggtccattcgatgatgatcacactggatttcattccataattctattcgattccattcgatgatgattccattcatttccatccgatgatgattccattcgattccgttcaatgattattccattcgagtccattcgatgattccattcgattccattcgatgatgattgcattcgagtccatggattattccattccattccattagatgattccattcgggtccattcgatgattctcttcgattccatacgataattccgtttttttccgtttgatgttgattccattcgattccatt

SEQ ID NO: 206055 - DNA, 573 bp, Homo sapiens
tctcaccttctaggctattttctctgtagaagaacaaactgcttgaaaatcagactgcaccagaacaggcattcttcctgctgctgtggaagtgtgtctcgttcctgtggaaaggaggtatcttgttctggacagtgtgggctggagctgctggcggtcagaacagggaagatcgtgttcaggaagaacaccatccctgagagaaccagtctcccgacacacatctcaaggccagcctgcaccagctcaaccctctcctaagcgagaggctcccctattagcgtgatgcatgtcttggaccattatggattgacatacattcttttgtatgaagatattcaatgctgcacatggcatctctcackacaggacccccgaacccagaacacagctgctgaggaacaggtgctccatcaatacgggtgaaatagatgaatacgtccaagtgccggtgtcgagcactggaaatacaaggacgataaagacaccacccctgcctccaaggagttttttggctagtgggagattcccccttgttatttgtcactggtggggtcagaaatggagtcaagg

SEQ ID NO: 206056 - DNA, 304 bp, Homo sapiens
ggaaaattatctcttcctctcagtctatgtagttcaaaggggacagatggcctcacattggctccaacattggagtcctttctaccccctgccaacagcaattgggccattaataatcacatgatccatgmcaagccaataagactcaagcgtggaacatttgcaggaaagaataggaaaagtcatccttccctgagaatgaagccactgcagagaaaagtaaaagtaatagactactgatgtcatcatttgaacacccggatccagctgtgcctgaaatctacaccagacctttccagttaca

SEQ ID NO: 206057 - DNA, 304 bp, Homo sapiens
ggaaaattatctcttcctctcagtctatgtagttcaaaggggacagatggcctcacattggctccaacattggagtcctttctaccccctgccaacagcaattgggccattaataatcacatgatccatgccaagccaataagactcaagcgtggaacatttgcaggaaagaataggaaaagtcatccttccctgagaatgaagccactgcagagaaaagtaaaagtaatagactactgatgtcatcatttgaacaccyggatccagctgtgcctgaaatctacaccagacctttccagttaca

SEQ ID NO: 206058 - DNA, 524 bp, Homo sapiens
cctccctccctgctccaatagtccccyctgtagccatttttatgttcatgagtatccagtgtttagctcccacttacaggtgacaacatgcagtatttggttttttgttcctgtgttaattcacctacgataatcacctccaggggcatttatgttgctgcaagggacatgatttcattcttgtttatggctgtgtagtattccatggtatatatgtacccacttttttttattcaatccactgtcgatgagcagctaagttgattccatgtctttgcttttgtgaatagtgcttccatgaccatacaagtgcatgtgtctttttggtagaacaatttattttcttttggatatatacacagtaaggggattgctaagtcaaatggtagttctcagttctttgggaaatctccaaactgctttccacagtggctgaactaattcacattcccaccaacagtgtataagcattcccttttattcacaacctcaacagcatctgctgtttctttgacattttaata

SEQ ID NO: 206059 - DNA, 446 bp, Homo sapiens
caaatttctgttccctgtttctttgcctctgttcccaatttctaacaaatctccattatgtatttgtctgaataggtaaaataataaaagaaaaaaatggcagggggttggagggagagttgttataaattatctaagtgtctgaagataggctaggtgattgtgtaatcctgtgcatacatgacaaaatcttcatttgcctccttcaccaaagagagtttcagaagaatcycataaagttctaaagaagttagtataatgaaaatttttgtaaatgttaatgtttttctaattttttataactatgtgattaaaaatttaattgctttctctgtttttgaatacacaaatacgtgattgtttagagaattaccagggtgtaagtgtcttctagtaagcaatagaaaagcacatttgctataagcattggtggttcagtggtagaa

SEQ ID NO: 206060 - DNA, 608 bp, Homo sapiens
atttctttataaaataaagtgactctataagctatgagaatggacagttgcaatgaatccattgttggttctcaaacccaaaaccccatatttacccatttattcattaaaatattgctgtattatttcacgagttgatttgtaaaagtcaagggagtgttgtaatttgacataacgcccctgtgagaaacagagggggrtttcaacatccacatcacaaggttccccagactgcacacggtctccactgggcaatggcatccagatgtcatgtggtagccagcaagaactgtaggactgggactagagtggtcagtagctacgaagaagtgcctgggcccagtgtgacagctgccagcaccgtccacacgccaaaaagaaacttcacatctctttaaacttggaacacatgcaaaatactaacagttttgttttagcaataaagactccctgtcacttactaacttccttccctcacctatttatacaagtataagttgactagctgctatttctatagctgcctcctatgatatttataatgtgttgtgtgtgatttgggttgcccatgtcactaacactttgcaagaatttgtgtttgtaaatta

SEQ ID NO: 206061 - DNA, 608 bp, Homo sapiens
atttctttataaaataaagtgactctataagctatgagaatggacagttgcaatgaatccattgttggttctcaaacccaaaaccccatatttacccatttattcattaaaatattgctgtattatttcacgagttgatttgtaaaagtcaagggagtgttgtaatttgacataacgcccctgtgagaaacagagggggatttcaacatccacatcacaaggttccccagactgcacacggtctccaytgggcaatggcatccagatgtcatgtggtagccagcaagaactgtaggactgggactagagtggtcagtagctacgaagaagtgcctgggcccagtgtgacagctgccagcaccgtccacacgccaaaaagaaacttcacatctctttaaacttggaacacatgcaaaatactaacagttttgttttagcaataaagactccctgtcacttactaacttccttccctcacctatttatacaagtataagttgactagctgctatttctatagctgcctcctatgatatttataatgtgttgtgtgtgatttgggttgcccatgtcactaacactttgcaagaatttgtgtttgtaaatta

SEQ ID NO: 206062 - DNA, 535 bp, Homo sapiens
tttgttgaacaaacattttgtttgtaaggaaatctgattgcaggaacagagacttatttaatctactttaggtaacaggacacatgtgcatagaaacccagaaaaagctgtgtgataaatacggaagagtgagatctaaggagctggatctctacagctttcccttcaagataacgctgtttcttttgtgctacttgttccttctgtctcaaatcaccactttgacctctaatttataawtgagatactttctacctgatagcttcttcttgccctcagtttctgttctgtaatgacatcagctggcattagactcacaatggatcatcgggcctcctttacatcataaatcactagcttcccctttcactgatcattgcctcggttgaactgcttttcaattaaacattcctaactgagtatttgttggacttagtacatctttttgagtaaaccaccttattggttacttgttagcctctggattggcatcctttgggccaagtacactccctgtctattcagctctcgctag

SEQ ID NO: 206063 - DNA, 443 bp, Homo sapiens
ttctaggtaaatacttgtatagacgttatccactatcatcattattgttccataaaagaaagccttccttaaaatgaagaaaaataaacataaatcgaagaatacagagtactstatcattaaagcaggtattgaaaacacacagactctaaagttcaaaaagaatattttttctatatttaagggctaaaaatataacattaaatattgtatattttaatttaatagtaactgatatgtgttgtaagtgttttatgtggctctcattttgctctaataacaatttaggtacctttaacccactttatggattaagacactaaagcttggagaagttaagtagcagaactgagatttgagcccacatttttaagtcactaccctttcctacctccccaaacttgtatgtgttttgttattatgagttggccaacctggaggcc

SEQ ID NO: 206064 - DNA, 591 bp, Homo sapiens
acgtctgtatcctatgccacagaccagatgcccctttattgccagggaaacagccagcgatgtttatcctttatttaatctctctgctgactttcagtgctggtaaatgtttattccaccgaagtatgcttttaagatgtcagtcagcaacctttattgaccaatggatcacatttggtaaaggctcctgcttattacatagagaattagactgctcaaagaggattttgcaggggacaagcaccatttattcattcagtcattgatttgattgattaacttcttatgcatttgttcaactaagcatttactgaatgtctagtatgtgccaagcaytctggtgagatatttgagaaaatcaagaagaaaaaggcccaagccttgcccctgaagaactcagactaatagggtgacagaatgttgaaaattatagtaattcagtgtgattatatctttgtaattacagaacaaaagaacaagcagctgatttgagggaagctactagcactgttcgggtggaatttcagtaatttttatcaggtgattaccaaacctgaagggtaaatgaacaccctctttaaactaaagaag

SEQ ID NO: 206065 - DNA, 591 bp, Homo sapiens
acgtctgtatcctatgccacagaccagatgcccctttattgccagggaaacagccagcgatgtttatcctttatttaatctctctgctgactttcagtgctggtaaatgtttattccaccgaagtatgcttttaagatgtcagtcagcaacctttattgaccaatggatcacatttggtaaaggctcctgcttattacatagagaattagactgctcaaagaggattttgcaggggacaagcaccatttattcattcagtcattgatttgattgattaacttcttatgcatttgttcaactaagcatttactgaatgtctagtatgtgccaagcactctggtgagatatttgagaaaatcaagaagaaaaaggcccaagccttgcccctgaagaactcagactaatagggtgacagaatgttgaaaattatagtaattcagtgtgattatatctttgtaattacagaacaaaagaacaagcagctgatttgagggaagctactagcactgttckggtggaatttcagtaatttttatcaggtgattaccaaacctgaagggtaaatgaacaccctctttaaactaaagaag

SEQ ID NO: 206066 - DNA, 594 bp, Homo sapiens
tgttacatacacaatgccagtatctcttcttgattgcctatataacagatcatatctctgccacacaatttaatgcctgtagttttctcctttttccatgttgaaaagtttctctcgactgagtgcaaaagtccttcagggtagctgctaggtcctaccctatcatgtaattactgggcastctcccaagcacagaccatattcaacaagtgatggcttgttaaagttcctgcttctactatgacctaaggaataaggggaattatattccctaagtgaccaattttctccacttctagccaatttcttcactaagggagataagccaactagtcatcactttctctctctctgtagttgtacagagttttaaagtttgtagacagtaatattatgaatgctgctgccaccactctttttttttggagtgggggagtatctatcacctcaaacatttatcctttatttatgttacaaacaatccaattatgcactttaattatttttaagtgtacattaaaatattgtttaccataatcaacctgttctgccatcaaatactagattttattcattctttataaatttataaat

SEQ ID NO: 206067 - DNA, 401 bp, Homo sapiens
gtaactatccttctactctcaatctccatgagttcaattgtttcgaattttagattccacgaataagtgagaaaatatgacgtttatctttctgtgcctggcttatttcacttaatataatgatctccagttttatccatgttgttgaaaatgactggattctcattctttttgtggctccattgtgtatacataccacattttctttatcattcatctgttgatgaacactgaggttgcttccaaatcttggctrttataaacagtggtgcaacaaacatagcagtgcagatatctctttgatatgctgatttcttttcttttgggtatatacctagcagtgggagtgctggatcatatgatagctcaatttttagttttttgaggaacatccaaactgt

SEQ ID NO: 206068 - DNA, 645 bp, Homo sapiens
agggatgagaggatacatgaataaacagaggaatggagtggaatatcttatttcctgacaggaggtttaaatctatgttagtaagggtatgaaagctatatatattttttccttcagggaaagatggtgagccacccaaggtgaaaagagaatctctgacaagcaagcaaaaattaaggttgtactctttgtcataagaaatgactatgaatatgaacgtaaaaagacattagagaagaaaagtcaggaaaaggggaaagataaatttgggtagcataagagactgcccaaaggactttaaaaccagagatacctgacgttcayttttaagtttttacatgtttatgcaaatccactgccatctttttgaggcataagtcctgtctgctacacacaaaggagatgctaaggaacacttgcttgcctttatgttagaaacagaaacagtgtgattttttctgatgttctcaattacagagtctactgactcaggtctatatgtgcctgatgatgatcacgagccccatcaacaaagggagttcccgctcagcatggaggcagaccctccgccaaatgaaagaaaaatgtaggccaggtgtagtggctcacacctgtaatcccagcactttgggaggctgaggcagg

SEQ ID NO: 206069 - DNA, 610 bp, Homo sapiens
tggtatttctgtcttacatgtttcttctcaggagtgtggacaaaataatagccgctttatggtacacagatcagtagccaggcactttacataggtagtttattgtttctaataatctcattaattttgcaaagtgtgtgttttgatctagcaattggaggaatctgggctgtacccaaggcattctcacatccaagctcatcttctcacagagccttaatcacgttcactctgtacactgtagcttytcactctgttccccacttcccacatccactctgccacgaatctgtagattctgaaaggaaatttgagccttgttcacacgattcaatctgggaaacagcaccattagaaaaagaaagaagatgcttacaaatcagtgaccttcttatgcccttaaaaggctgatataatcttaaagaattctttatttcacttttaattaaaaccaagagactgagccctctgagaatgactcacaaggcatagcccctttctaagtttatgtagtagcttatttttcaaacgctgtcactgcccttttgaagtaggtgatcactaaacccaatatgaattaaggaaaataaggagagattaattgactccc

SEQ ID NO: 206070 - DNA, 610 bp, Homo sapiens
tggtatttctgtcttacatgtttcttctcaggagtgtggacaaaataatagccgctttatggtacacagatcagtagccaggcactttacataggtagtttattgtttctaataatctcattaattttgcaaagtgtgtgttttgatctagcaattggaggaatctgggctgtacccaaggcattctcacatccaagctcatcttctcacagagccttaatcacgttcactctgtacactgtagcttttcactctgttccccacttcccacatccactctgccacgaatctgtagattctgaaaggaaatttgagccttgttcacacgattcaatctgggaaacagcaccattagaaaaagaaagaagatgcttacaaatcagtgaccttcttatgcccttaaaaggctgatataatcttaaagaattctttatttcacttttaattaaaaccaagagactgagccctctgagaatgactcacaaggcatagcccctttctaagtttatgtagtagcttatttttcaaacgctgtcactscccttttgaagtaggtgatcactaaacccaatatgaattaaggaaaataaggagagattaattgactccc

SEQ ID NO: 206071 - DNA, 610 bp, Homo sapiens
tggtatttctgtcttacatgtttcttctcaggagtgtggacaaaataatagccgctttatggtacacagatcagtagccaggcactttacataggtagtttattgtttctaataatctcattaattttgcaaagtgtgtgttttgatctagcaattggaggaatctgggctgtacccaaggcattctcacatccaagctcatcttctcacagagccttaatcacgttcactctgtacactgtagcttttcactctgttccccacttcccacatccactctgccacgaatctgtagattctgaaaggaaatttgagccttgttcacacgattcaatctgggaaacagcaccattagaaaaagaaagaagatgcttacaaatcagtgaccttcttatgcccttaaaaggctgatataatcttaaagaattctttatttcacttttaattaaaaccaagagactgagccctctgagaatgactcacaaggcatagcccctttctaagtttatgtagtagcttatttttcaaacgctgtcactgccyttttgaagtaggtgatcactaaacccaatatgaattaaggaaaataaggagagattaattgactccc

SEQ ID NO: 206072 - DNA, 490 bp, Homo sapiens
caagtatttagcatttaatatgtaatagaatagttaattaacatttttctgatctataggaattcctcttagtcaattaggaaatgatctgtctgaattggaaatatattccattggccagaaatctaaaagctttaatgtattctgaatcttcaggacagaagggattaattggccagagcgcragatgaataaaactgagaggggtcctaggatttccaactgccttcagagaagtgggcaaagatgagtcattcattcattcattcattcattcattcgttcattaaacatttgctcagtagctccgttctaagttaatcaacaagggagcagagatgaataaaacacagtttcatcctcaagggaagcttcaaaggatctgaacgttgcttctaagtgcctcaatcttacagccttcgtatacaatggcttcctgtggtgactcatatgtctccttttaaatgctctttttttaggcatttatgct

SEQ ID NO: 206073 - DNA, 490 bp, Homo sapiens
caagtatttagcatttaatatgtaatagaatagttaattaacatttttctgatctataggaattcctcttagtcaattaggaaatgatctgtctgaattggaaatatattccattggccagaaatctaaaagctttaatgtattctgaatcttcaggacagaagggattaattggccagagcgcgagatgaataaaactgagaggggtcctaggatttccaactgccttcagagaagtgggcaaagatgagtcattcattcattcattcattcattcrttcgttcattaaacatttgctcagtagctccgttctaagttaatcaacaagggagcagagatgaataaaacacagtttcatcctcaagggaagcttcaaaggatctgaacgttgcttctaagtgcctcaatcttacagccttcgtatacaatggcttcctgtggtgactcatatgtctccttttaaatgctctttttttaggcatttatgct

SEQ ID NO: 206074 - DNA, 511 bp, Homo sapiens
cttttttgtacacatttcatttttgcaacatttaattatgtaattataaaaacaaatgcaataagaataaacagatttaagaataattacaattgattctttgttagtatgcaaatcacctgaaaggaatggaaatttatgggacataaacattctgcttgctgtggacattggtctgcctgtcactgacagagtggagaagattggttagtctattaaaaggatgctgcttaagagagctcaacagcgcaacttgtggactaactattacactggagggagatctgtgatgatttgccacaatgcacagtccttatgccttattataatcaatgacttaaataaaaatgtaaaatttgatkatataaagctagatgaaatagtgaaattctataatggccaacacatcttaaatgctcaataaatacttattgaattaaattgataactgaatgttagcttaacaaacttaaaatctagatcaaaatcggtaccattaaatttaacatgt

SEQ ID NO: 206075 - DNA, 511 bp, Homo sapiens
cttttttgtacacatttcatttttgcaacatttaattatgtaattataaaaacaaatgcaataagaataaacagatttaagaataattacaattgattctttgttagtatgcaaatcacctgaaaggaatggaaatttatgggacataaacattctgcttgctgtggacattggtctgcctgtcactgacagagtggagaagattggttagtctattaaaaggatgctgcttaagagagctcaacagcgcaacttgtggactaactattacactggagggagatctgtgatgatttgccacaatgcacagtccttatgccttattataatcaatgacttaaataaaaatgtaaaatttgatgatataaagctagatgaaakagtgaaattctataatggccaacacatcttaaatgctcaataaatacttattgaattaaattgataactgaatgttagcttaacaaacttaaaatctagatcaaaatcggtaccattaaatttaacatgt

SEQ ID NO: 206076 - DNA, 521 bp, Homo sapiens
agtttcatgtgggaaggtgatgacrttttaattatgttaaatttgaggtactgattggatatccaagacatactcttctttttaagaatagtgacaatttaatgcatgcgctatattaagagagaaggaaagtagacagaaaaagagaagaaagaaatattaaggtagattaaataaatgatggatacaaatatgcaagagagagatgaagagttaaatatgacaaggataaatgcaagttcattagaagtggaaaaataggcaatattgaatatccataagaagatatgttaatgatgaatgtgactttacaagtcacattaagtaactttattgttatcagttaattaataaagtacacaaaaaactttttgtgctgtccattagaataacatagttttaatattacaacatattggaaaaaccacttatcctgcctctcattgcctcagagaaggagaaaatttaaaagccatttgttaccaccagctaggacctttgtgttccatgtgtaatagaac

SEQ ID NO: 206077 - DNA, 467 bp, Homo sapiens
tctgtaggtttcagctatggtctcaaaattctgtaccctcaaccttagacaaatattatctacgtgtcacaggaaaacacctcttcccacctgtggtgaccaaggttctgaatgaaagactctgcagcctgtagyttgattctctgtggcaatgtcagcatttgccatgtttgtgctgagaaatcctagactcaggtttcttttatacatatatgtatatatacacttgttcatatattatgtgtatatgtaaatagtgtttcaaccaaaatatttaactaatactataaactaaaattacacattcagtaaagttggctgttgaattattattattgtgcctatctcagatgaaagattctcttgccatctctttctaaagaatattctaagattccaagatgaattcttaaaaatgtgaaaaattgttgtaagaatttaaaatgactctagaatcaaacagtctc

SEQ ID NO: 206078 - DNA, 561 bp, Homo sapiens
tgacctggccatagcagcccagggtttcacatgccggccatgtccctagatcctagtgcctgtcagaggccccgagagtgaaaatgtggcagctcccatgaagggatggctgtccagctgcagagtctcacaaaactagggaagatctaggccctcccttcctgtggctaagaatcacccagttcaacagccatggttcagacagagaaaastaaggcctaggagggaggaagtgccaggatggcaggtattcttagtatccttgttctccaaaaggggcctgctgatcctaatggaattctctgcccctgccaggctgcatttttagcacttcggctggaggcaggagtgggagacatagaatgaaaagagagggaactggtttaactccggtcacgggttagccaatgcccagagtgccagagggagagtaatcagggctccctcccgggcacctgagggttggctcacccatgccattaagcaggaagtaccagaagccaggagtgcacctggcgccctttgcatttcctacaagaccacctgcggacacatactcac

SEQ ID NO: 206079 - DNA, 408 bp, Homo sapiens
ttttgcttatctgttcatcagctgacggacttttgrtttatttccacctcttgactactgagaattatgaccatatgaacatttgaacaaaggtcttgagcaaaaatgtggacatatgtgattttatttttcttgagtaaatgcctaggattgggtcattgggttgaatggtaaattcatgtttaactttttaagaaatcaccaaactgttttccaaatagcctgtatcattttatattcccaccagcaaaatatgaaggttaatgtctctttatccttgacaggattggatatcatcacactctttgattgtagctattttctagtggttgtgaagtggctttaatttgcttttctctaatgcattctgatgttgatcatctcatgaagttattagccattcattta

SEQ ID NO: 206080 - DNA, 376 bp, Homo sapiens
cttttggtttatttccacctcttgactrctgagaattatgaccatatgaacatttgaacaaaggtcttgagcaaaaatgtggacatatgtgattttatttttcttgagtaaatgcctaggattgggtcattgggttgaatggtaaattcatgtttaactttttaagaaatcaccaaactgttttccaaatagcctgtatcattttatattcccaccagcaaaatatgaaggttaatgtctctttatccttgacaggattggatatcatcacactctttgattgtagctattttctagtggttgtgaagtggctttaatttgcttttctctaatgcattctgatgttgatcatctcatgaagttattagccattcat

SEQ ID NO: 206081 - DNA, 408 bp, Homo sapiens
ttttgcttatctgttcatcagctgacggacttttggtttatttccacctcttgactactgagaattatgaccatatgaacatttgaacaaaggtcttgagcaaaaatgtggacatatgtgattttatttttcttgagtaaatgcctaggattgggtcattgggttgaatggtaaattcatgtttaactttttaagaaatcaccaaactgttttccaaatagcctgtatcattttatattcccaccagcaaaatatgaaggttaatgtctctttatccttgacaggattggatatcatcacactctttgattgtagctattttcyagtggttgtgaagtggctttaatttgcttttctctaatgcattctgatgttgatcatctcatgaagttattagccattcattta

SEQ ID NO: 206082 - DNA, 412 bp, Homo sapiens
catgttttgcttatctgttcatcagctgacggacttttggtttatttccacctcttgactactgagaattatgaccatatgaacatttgaacaaaggtcttgagcaaaaatgtggacatatgtgattttatttttcttgagtaaatgcctaggattgggtcattgggttgaatggtaaattcatgtttaactttttaagaaatcaccaaactgttttccaaatagcctgtatcattttatattcccaccagcaaaatatgaaggttaatgtctctttatccttgacaggattggatatcatcacactctttgattgtagctattttctagtggttgtgaartggctttaatttgcttttctctaatgcattctgatgttgatcatctcatgaagttattagccattcattta

SEQ ID NO: 206083 - DNA, 284 bp, Homo sapiens
aattctaaaaaagttggaaaccattttccattataaaagaaattcttccaaatcacacaraacactctgacacttctccagttccccctttgaatgttctgcaaatgtgctggtttgaaggaaaaaaaattcaatgtggcacatgtttaaaaatataatgaagacacagacattatcaaatacaactgatagcactaaccttccctttgaaccgtccctaaacatccacactcacatgtcctttaaatacaaaccacttttctccaggcttcctaacttggtaa

SEQ ID NO: 206084 - DNA, 284 bp, Homo sapiens
aattctaaaaaagttggaaaccattttccattataaaagaaattcttccaaatcacacagaacactctgacacttctccagttccccctttgaatgttctgcaaatgtgctggtttgaaggaaaaaaaattcaatgtggcacatgtttaaaaatataatgaagacayagacattatcaaatacaactgatagcactaaccttccctttgaaccgtccctaaacatccacactcacatgtcctttaaatacaaaccacttttctccaggcttcctaacttggtaa

SEQ ID NO: 206085 - DNA, 284 bp, Homo sapiens
aattctaaaaaagttggaaaccattttccattataaaagaaattcttccaaatcacacagaacactctgacacttctccagttccccctttgaatgttctgcaaatgtgctggtttgaaggaaaaaaaattcaatgtggcacatgtttaaaaatataatgaagacacagacattatcaaatacaacwgatagcactaaccttccctttgaaccgtccctaaacatccacactcacatgtcctttaaatacaaaccacttttctccaggcttcctaacttggtaa

SEQ ID NO: 206086 - DNA, 523 bp, Homo sapiens
  misc_feature (1)...(523): n = A,T,C or G
taaaaatatgaatttaatttttatttataaaaatattctgaaaaatatcaacagaagcccttrttgatacgtttttggtttcctcattataagttttattggactttttttattttttattttttttatttgagacaaggtcttactctgtcaccagcttgggaatgggcaagggngcaatcatgggctcactgcagcctcaacctcccggggctcaagcagtccttccacctcggcctcctgagtagctgggaccacaggtgcacaccatcacacccggttaatttttgtatttttagtagagatggggttttgccatgttgcccaggctggtcttgaactcctgaccgcaagtgataaattttttttatgtgatgtttagctaatgagacatttgtagtaaccttctagcttatggtggctctttttctattgagtcacttgtatatgcggagatggcattgtctgtgtaccatttgttgaaatgagggaaaggaaggaagtgagataacatttattggga

SEQ ID NO: 206087 - DNA, 523 bp, Homo sapiens
  misc_feature (1)...(523): n = A,T,C or G
taaaaatatgaatttaatttttatttataaaaatattctgaaaaatatcaacagaagcccttgttgatasgtttttggtttcctcattataagttttattggactttttttattttttattttttttatttgagacaaggtcttactctgtcaccagcttgggaatgggcaagggngcaatcatgggctcactgcagcctcaacctcccggggctcaagcagtccttccacctcggcctcctgagtagctgggaccacaggtgcacaccatcacacccggttaatttttgtatttttagtagagatggggttttgccatgttgcccaggctggtcttgaactcctgaccgcaagtgataaattttttttatgtgatgtttagctaatgagacatttgtagtaaccttctagcttatggtggctctttttctattgagtcacttgtatatgcggagatggcattgtctgtgtaccatttgttgaaatgagggaaaggaaggaagtgagataacatttattggga

SEQ ID NO: 206088 - DNA, 499 bp, Homo sapiens
  misc_feature (1)...(499): n = A,T,C or G
ttataaaaatattctgaaaaatatcaacagaagcccttgttgatacgtttttggtttcstcattataagttttattggactttttttattttttattttttttatttgagacaaggtcttactctgtcaccagcttgggaatgggcaagggngcaatcatgggctcactgcagcctcaacctcccggggctcaagcagtccttccacctcggcctcctgagtagctgggaccacaggtgcacaccatcacacccggttaatttttgtatttttagtagagatggggttttgccatgttgcccaggctggtcttgaactcctgaccgcaagtgataaattttttttatgtgatgtttagctaatgagacatttgtagtaaccttctagcttatggtggctctttttctattgagtcacttgtatatgcggagatggcattgtctgtgtaccatttgttgaaatgagggaaaggaaggaagtgagataacatttattggga

SEQ ID NO: 206089 - DNA, 618 bp, Homo sapiens
tacaaacaacgttgccatgaacattattcttttctattgtgaggtttcctttgccataattaaatgtgcagattttaagtgtggagtctgatgagttttaataaatataggtatcamaacccctatccaagttaagagcccttaaccttcttacatgtctccctatggacatgtgtgagtctaggagtggaaacactgagttgtaggttatatgcaatttcagccccattatatgttgccagtcctgcacatcttataggcaggttattgccatgggagatctggactaagatatttcttcccaagagtactctaaacagatctgagaatactcctcagggcaggttgcaactagattgtgaagtgagtgatgcaactggctctttcgccactcatgcttatcattcagtgccccatcctcacccttggctgtcacacactggagccttccctcagttcaaccctcagaaccacctgcaacccagggctcagtagctggggcttgtatgtggactgcaaggttagggtagttggtggctgtgagaagccctcttcattccttcctagccatggagagctgggcaagtcgtttagcatctgggaacctcaggatcctca

SEQ ID NO: 206090 - DNA, 618 bp, Homo sapiens
tacaaacaacgttgccatgaacattattcttttctattgtgaggtttcctttgccataattaaatgtgcagattttaagtgtggagtctgatgagttttaataaatataggtatcaaaacccctatccaagttaagagcccttaaccttcttacatgtctccctatggacatgtgtgagtctaggagtggaaacactgagttgtaggttatatgcaatttcagccccattatatgttgccagtcctgcacatcttrtaggcaggttattgccatgggagatctggactaagatatttcttcccaagagtactctaaacagatctgagaatactcctcagggcaggttgcaactagattgtgaagtgagtgatgcaactggctctttcgccactcatgcttatcattcagtgccccatcctcacccttggctgtcacacactggagccttccctcagttcaaccctcagaaccacctgcaacccagggctcagtagctggggcttgtatgtggactgcaaggttagggtagttggtggctgtgagaagccctcttcattccttcctagccatggagagctgggcaagtcgtttagcatctgggaacctcaggatcctca

SEQ ID NO: 206091 - DNA, 618 bp, Homo sapiens
tacaaacaacgttgccatgaacattattcttttctattgtgaggtttcctttgccataattaaatgtgcagattttaagtgtggagtctgatgagttttaataaatataggtatcaaaacccctatccaagttaagagcccttaaccttcttacatgtctccctatggacatgtgtgagtctaggagtggaaacactgagttgtaggttatatgcaatttcagccccattatatgttgccagtcctgcacatcttataggcaggttattgccatgggagatctggactaagatatttcttcccaagagtactctaaacagatctgagaatactcctcagggcaggttgcaactagattgtgaagtgagtgatgcaactggctctttcgccactcatgcttatcattcagtgccccatcctcacccttggctgtcacacactggagccttccctcagttcaaccctcagaaccacctgcaacccagggctcagtagctggggcttgtatgtggactgcaaggttagggtagtkggtggctgtgagaagccctcttcattccttcctagccatggagagctgggcaagtcgtttagcatctgggaacctcaggatcctca

SEQ ID NO: 206092 - DNA, 580 bp, Homo sapiens
aattcagactgaaaggcttacccacatcaaagacttaatgcaaatgtggtcctttctacacagcacatggaaaagtggggtgcctctggttgtaatttgggtggaattcacaakaaatctccaccttatccctcccaccttcttccaggattgcttcctcatgtggactggataaacagctggagtggaattttaacttcacataaacgagtgctgctaagctgccttggatcactagcctcccactcaggtcccagagtagccgcccagctgctccagcagctgcatttaccaactccaggggccactccatccagtcctggacttgtgtggtgcagcacccctgcactgtgcccatgtgtttccaatcaccatgcagcccttgaccagagccctagcgtccgcttcttaaagtcagggcttttgtctccatcatctttcttcagcacccagtacaggacaggcccaagggacctgattagtgaatgtttattcacatactgcccatttttctgtgtgagtttgccctgtttttctgaacatacttgtctgtaacttccttgaaggctggaggtggcat

SEQ ID NO: 206093 - DNA, 580 bp, Homo sapiens
aattcagactgaaaggcttacccacatcaaagacttaatgcaaatgtggtcctttctacacagcacatggaaaagtggggtgcctctggttgtaatttgggtggaattcacaagaaatctccaccttatccctcccaccttcttccaggattgcttcctcatgtggactggataaacagctggagtggaattttaacttcacataaacgagtgctgctaagctgccttggatcactagcctcccactcaggtcccagagtagccgcccagctgctccagcagctgcatttaccaactccaggggccactccatccagtcctggacttgtgtggtgcagcacccctgcactgtgcccatgtgtttccaatcaccatgcagcccttgaccagagccctagcrtccgcttcttaaagtcagggcttttgtctccatcatctttcttcagcacccagtacaggacaggcccaagggacctgattagtgaatgtttattcacatactgcccatttttctgtgtgagtttgccctgtttttctgaacatacttgtctgtaacttccttgaaggctggaggtggcat

SEQ ID NO: 206094 - DNA, 580 bp, Homo sapiens
aattcagactgaaaggcttacccacatcaaagacttaatgcaaatgtggtcctttctacacagcacatggaaaagtggggtgcctctggttgtaatttgggtggaattcacaagaaatctccaccttatccctcccaccttcttccaggattgcttcctcatgtggactggataaacagctggagtggaattttaacttcacataaacgagtgctgctaagctgccttggatcactagcctcccactcaggtcccagagtagccgcccagctgctccagcagctgcatttaccaactccaggggccactccatccagtcctggacttgtgtggtgcagcacccctgcactgtgcccatgtgtttccaatcaccatgcagcccttgaccagagccctagcgtccgcttcttaaagtcagggcttttgtctccatcatctttcttcagcacccagyacaggacaggcccaagggacctgattagtgaatgtttattcacatactgcccatttttctgtgtgagtttgccctgtttttctgaacatacttgtctgtaacttccttgaaggctggaggtggcat

SEQ ID NO: 206095 - DNA, 289 bp, Homo sapiens
gtgtgttcatctcctgtgtgatctgggattacctatgagatagtaaaccaaactctagaaaccctgagcctaatgcccaaaaagcccatgacaatttyttaaatagatttggggaaaaaaaaaacacacacacacacaaacacccaaatgaagagtgagttgggagagcaaaagacaacctgaaagaaaaaaagagatccactaaggattaatgtatggagacagcatttatgtcctgccctacattatcctaatttgaaataagcaagtacttttttttagaaacaga

SEQ ID NO: 206096 - DNA, 289 bp, Homo sapiens
gtgtgttcatctcctgtgtgatctgggattacctatgagatagtaaaccaaactctagaaaccctgagcctaatgcccaaaaagcccatgacaatttcttaaatagatttggggaaaaaaaaaamacacacacacacaaacacccaaatgaagagtgagttgggagagcaaaagacaacctgaaagaaaaaaagagatccactaaggattaatgtatggagacagcatttatgtcctgccctacattatcctaatttgaaataagcaagtacttttttttagaaacaga

SEQ ID NO: 206097 - DNA, 556 bp, Homo sapiens
tcttattctgagtacacagttatattaatatagccagcaatcctattagcaatattaataataaaatagtaaagtgacaataatgatgatggtgataaacaaaaataataagaaagccaagatttgaatgcttgaactaaagttcatattccatctccatcttggtttgaattcccgcaaaagcagagggaggtggggcagagttacaaggcctggatcacctggctctctgcaatctattctctacatgctgctccttctgctgagaaacccctcctctcttcccacaggtctctccttgcccaytctccagctggcggtgcctttaacaacctcaggtaccagcctagataccacatgcttcattcagaaagtttttctcagctcccaggccttggcagattgcccccttgagttttcacagcatcttgcctttgcttgtcacggcactagtcttgctatgttcaaattgcctgttgtgtgtttggattcatgtgactgtggattcaaaatggacatagagggtgaatgaataaataaataagtgatgttgcct

SEQ ID NO: 206098 - DNA, 569 bp, Homo sapiens
taacgataccattaagagatggtggcattgagtccctctgactcaatggagtctctctccatgtatatctttgtgtgtgtgtgtgtgtgtgtgtgtatgtgtctatatgtgtcagtgagtgttgtgcctctgtctttctatgtgtctgtttctgtgtaatctgtatgcatatgtgcctagggtttctcctctttctctgcttgtggttctgtcttccttttgtctctttccgcctttttctgtctatcactctctttctgcccatctctctgtctctccttctccagttgtttttcttcatctggttctctctctcagttatcaactctttcattctttttaaattttattctcaggaaagtttgtcccatttggtgacaagatgacctcttgacatttcaagcttccatgcttcagtcaaaggtataatgcagctctcccactctcaaaagtcaaactaaacatccgaaatggactctagttgacctgacatgtgccctcccccagaccacactagcacactgattggccrctctcagtcacatgctggcccctgtcagggggccttt

SEQ ID NO: 206099 - DNA, 523 bp, Homo sapiens
atttttttttaatatgaattcctgggctctctcggaattgagaattgtgtgcagaaatctgtatttttcatattccagataagacttatgaatcctaaaatctggcaatttctggaagaaagtaatactaacttgccagggtagggaaataaaatcccaaatccttagatttggtacctgaataagtgttctttttcaaggatatttaagtcaccattaagatcacctgtrgattcagtggaacaggtgttaatgggggtgacaaattgctttttaataacagacacgccgtacattgctaaactttccttggtgatttccctaacactacacagaggaaaaactggaatttctttacatcttgtgagaaaatttcaaactgttgctcaggttctctctgctgagaataagggtagatgctgcatcatcctgaggaaagcttgcgaccttgaggtactggtgcaacatggccaaatctctagcaccaaagacagaggcaacttggtttgtattgaagccattt

SEQ ID NO: 206100 - DNA, 516 bp, Homo sapiens
acctgctattgcatatcttccatgtttccttgttctcacaatatttctgtctgaattatatccaaggaataatagccaaatggyatttcaagtacaatgtataataattctcagtgcacaattatggtaaagcctagtttgatgcacctgtttaggctcacatattaatatttaattcaaatgttgacatctcagcttgggtcttcaataggaattttaaatttaatatacaaaactaaattcattttctttcttccaaatcttctccttcaataaccaataacctttcccatttaggaaaaagaatatctatccttctagctgctaaaactaaaaacttaaaggaatcagtttctcttctattttcctcatgacccatatcagcaaaatatgttggttttgtttttaaaacatttccaaggtatggcttctcaatacccctgatgaaccatcattatctcttgcttaagactgaaccatcatcatctcttgcctaagatattgcaagagcaacct

SEQ ID NO: 206101 - DNA, 566 bp, Homo sapiens
ctctattctgtctcattgatctatgtgtttgtttttatgccaatacctgcttttttggttactatagttttgtatattttgtagttgggtagcttgatgcctctagctttgttctttttgctcaggattactttggctctctggggtatttttttgtggctccatatgaactttaggatttcataataaaatttctgtgaaaaatagtattttgacagagattgcattgaatttgtagattgctttgggtaatatgcttattttgacaatattaatactttcagtwcttaaacatagttgttcttccaattttgtgtgcacttatcaatttctatcatcaatgttttgtagtttttattgtagacattgtttacctccttggttaaatttattcctagcattttttttgtaggtattgtaaataggattgctttctcaatgtctttttcagttcattattggtgtataaaaacactaccaatttttgtatgttaattttgcattctgcaaatttactgaattcatttatcagttctaagagttcttcggtgaagtttttaaatttg

SEQ ID NO: 206102 - DNA, 566 bp, Homo sapiens
ctctattctgtctcattgatctatgtgtttgtttttatgccaatacctgcttttttggttactatagttttgtatattttgtagttgggtagcttgatgcctctagctttgttctttttgctcaggattactttggctctctggggtatttttttgtggctccatatgaactttaggatttcataataaaatttctgtgaaaaatagtattttgacagagattgcattgaatttgtagattgctttgggtaatatgcttattttgacaatattaatactttcagtacttaaacatagttgttcttccaattttgtgtgcacttatcaatttctatcatcaatgttttgtagtttttattgtagacattgtttacctccttggttaaatttattcctagcrttttttttgtaggtattgtaaataggattgctttctcaatgtctttttcagttcattattggtgtataaaaacactaccaatttttgtatgttaattttgcattctgcaaatttactgaattcatttatcagttctaagagttcttcggtgaagtttttaaatttg

SEQ ID NO: 206103 - DNA, 566 bp, Homo sapiens
ctctattctgtctcattgatctatgtgtttgtttttatgccaatacctgcttttttggttactatagttttgtatattttgtagttgggtagcttgatgcctctagctttgttctttttgctcaggattactttggctctctggggtatttttttgtggctccatatgaactttaggatttcataataaaatttctgtgaaaaatagtattttgacagagattgcattgaatttgtagattgctttgggtaatatgcttattttgacaatattaatactttcagtacttaaacatagttgttcttccaattttgtgtgcacttatcaatttctatcatcaatgttttgtagtttttattgtagacattgtttacctccttggttaaatttattcctagcaktttttttgtaggtattgtaaataggattgctttctcaatgtctttttcagttcattattggtgtataaaaacactaccaatttttgtatgttaattttgcattctgcaaatttactgaattcatttatcagttctaagagttcttcggtgaagtttttaaatttg

SEQ ID NO: 206104 - DNA, 482 bp, Homo sapiens
ccaattttgtgtgcacttatcaatttctatcatcaatgttttgtagtttttattgtagacattgtttacctccttggttaaatttattcctagcattttttttgtaggtattgtaaataggattgctttctcaatgtctttttcagttcattattggtgtataaaaacactaccaatttttgtatgttaattttgcattctgcaaatttactgaattcatttatcagttctaagagttcttcggtgaagtttttaaatttgtctgtatacaagatcatgtcatctgcaaaccagggcaatttgacttcctsttttcaaatttggataccttttatatctttctcctctctaattgctctggctaatactttcagtattatgttgaataagagtggtaaaagttggcaaccttgtcttgtctcagttcttagaggaacagcttttaactttcttctgttcaatatgatgtcagttgcaaattt

SEQ ID NO: 206105 - DNA, 618 bp, Homo sapiens
aaatattcctgcctgccagctctgaagagagcggtggatctcccagcacagtgctccagctctgctcaggacagactgcttcctcaagtgggtcactgatccccgtgcctcctaactgggagacacctcccagcaggggtcgacagacacctcatgcaggagagctctggctggcatctggcgggtgcccctcttggatgaagtttccagaggaagaacacacagcaatctttgctgttctgcagcctccactggtgatacccaggsaaacagggtctggagtggacctccagcaagctccagcagacctgcagcagagggggctgactcttagaaggaaacctaacaaacagaaaggaatagtatcaacatcaataaaaaggacgtccacacaaaaaccccatttgaaggtcaccaacatcaaagacaaaaggtagataaatccacgaagatgaagaaaaaccagcacaaaaaggctgaaaattgcataaaccagaacgcgcctcttctcctccaaaggatcacaactcctcaccagcaagggaacaaaagtggttggagaatgagtttgatgaatgagcctgttggaagcaggcttcagaaggtgggtaataacaa

SEQ ID NO: 206106 - DNA, 618 bp, Homo sapiens
aaatattcctgcctgccagctctgaagagagcggtggatctcccagcacagtgctccagctctgctcaggacagactgcttcctcaagtgggtcactgatccccgtgcctcctaactgggagacacctcccagcaggggtcgacagacacctcatgcaggagagctctggctggcatctggcgggtgcccctcttggatgaagtttccagaggaagaacacacagcaatctttgctgttctgcagcctccactggtgatacccaggcaaacagggtctggagtggacctccagcaagctccagcagacctgcagcagagggggctgactcttagaaggaaacctaacaaacagaaaggaatagtatcaacatcaataaaaaggacgtccacacaaaaaccccatttgaaggtcaccaacatcaaagacaaaaggtagataaatccacgaagatgaagaaaaaccagcacaaaaaggctgaaaattgcataaaccagaacgcgcctcttctcctccaaaggatcacaactcctcaccakcaagggaacaaaagtggttggagaatgagtttgatgaatgagcctgttggaagcaggcttcagaaggtgggtaataacaa

SEQ ID NO: 206107 - DNA, 618 bp, Homo sapiens
aaatattcctgcctgccagctctgaagagagcggtggatctcccagcacagtgctccagctctgctcaggacagactgcttcctcaagtgggtcactgatccccgtgcctcctaactgggagacacctcccagcaggggtcgacagacacctcatgcaggagagctctggctggcatctggcgggtgcccctcttggatgaagtttccagaggaagaacacacagcaatctttgctgttctgcagcctccactggtgatacccaggcaaacagggtctggagtggacctccagcaagctccagcagacctgcagcagagggggctgactcttagaaggaaacctaacaaacagaaaggaatagtatcaacatcaataaaaaggacgtccacacaaaaaccccatttgaaggtcaccaacatcaaagacaaaaggtagataaatccacgaagatgaagaaaaaccagcacaaaaaggctgaaaattgcataaaccagaacgcgcctcttctcctccaaaggatcacaactcctcaccagcaagggaacaaaagtrgttggagaatgagtttgatgaatgagcctgttggaagcaggcttcagaaggtgggtaataacaa

SEQ ID NO: 206108 - DNA, 503 bp, Homo sapiens
tgctttggcctgttctggcattctcaagtatttttataaaatcctcctccaacatctctctgctttgaaattactttgtggataatcctggcacccggtcccatacaatgctgctcttggaattgcaaagcttctggtggtagaattttttcctgcagtgtttacccctgatggtggggatastatttgccaggtaacactaggtagaacagatggcctccttttctgcctggttcctgtttcaattcaggtgatcctcctttgttgtcatgcatgtcgaaagcctctcttaagcaataatctttacttacatttattgttcctcactctgcttttccctgaaaaaaattacatgtaattaaaaaatttaaatgtatttcttttataaatttaaaagtgcacatagtaaaataaatttgaaaactgcacagaaaatcaagaaataaaaaagtctattttctgtctacctcttctactgtgtctcttatgaaaggtaagcaaca

SEQ ID NO: 206109 - DNA, 484 bp, Homo sapiens
cggagggttggaactattggagctttaaggagctgaactcttctgtaatcatgtaaaacattttttgtgttgtacacaaaaatgcatatcttcagactctctttacttcagtgataattttactaagtacaggtttagatttaaatgtaactaaaattggtggcttgctctaaggtattgtgtactttttatttgaatagtagctcacagaaatcagaggttgtaayatggaagacttcaggaacattctgtgagcatgctggcaggactgtacaactgaaaaaccaagatcctattgggtctacctccccaacatatcacagaaccacatcatctccactcttacaaacatagttggaacgcctttcatcttctgcctggaccactcctgcctggtattgctgccatctctcttgcctcctgtcagttgtttctccacatagccaccaagaaaacttttaaaaacaaaatcatttagcattag

SEQ ID NO: 206110 - DNA, 566 bp, Homo sapiens
tggctgactggacatgctcaatattctcctcctccacaaggaagaaccaaaaaacaagtagacaactggacatcaaatagcgtgtctaggggagaacagcagaattcaacaagaaactagtgaagaccctcagagacaaagaagcctgggatggtagcataggaaaagaagaaaagtccccaactgtattagtccattcttgcattgctataaagtaatacctgaggctgggtaatttataagaaaacaggcttaattagctcataattctgcaggccgtacagaaagcatagtggcatctgcttctgaggagacatcaggaaacttacagtcatggcagaaggcaaactgggagcaggaacatctcatggagaaagaaaaagcaagaaagaagagagagtgtagggggyaaggtgccatatacttttaaataaccagatctcatgaaacctcactcactattgcaaagacagcaccaagccacgagggatcctcctccatgatccaaacacctcttaccaggcccagtttcagcattgaggattacaattcaacatgagatttgg

SEQ ID NO: 206111 - DNA, 287 bp, Homo sapiens
tctttgtgatgtgggcattcatctctcagagttaaactttttcttttgatagtgcagatttgaaactcactttttgtggaatgtgcaagtagacatttagattactttgcagcccatggtagaaaaggaaatatcttcacataaatactagacagaagcaacctgaggaacttctttgtgatgtgtgcattcatctcacagatttaaacctttsttttgatagagcagttttgaaactctctttttgtaggatctgcaagtggacatttggagtgctttttggccta

SEQ ID NO: 206112 - DNA, 453 bp, Homo sapiens
agaaaattctttgtgatgtgtgcattcatctcagagagttgaactttcctttgatagagctatttggaaacactctttttktagaatctgcaagtgtatatttggagcactttgaggactctggtaaaaaaggaaatatcttcacacaaaatctaaacagaaataatctgataaacttctccatgatgtatgttttcatctcacagtattaaacctttcttttgatagagctgttttgaaactctctttctgtagaatctgcaagtggagcaccttgagtcctatggtagaaaaggtaatatcttcacataaaaactggacagaaaaattcagaaacacctctttgtgatgtgtgtgtacatctcacagagtagaaccttacttttgatggaccagttttgaaatattgtttttgtagaatctgcaagtgggcatttcgagtgccttgaggcc

SEQ ID NO: 206113 - DNA, 453 bp, Homo sapiens
agaaaattctttgtgatgtgtgcattcatctcagagagttgaactttcctttgatagagctatttggaaacactctttttgtagaatctgcaagtgtatatttggagcactttgaggactctggtaaaaaaggaaatatcttcacacaaaatctaaacagaaataatctgataaacttctccatgatgtatgttttcatctcacagtattaaacctttcttttgatagagctgttttgaaactctctttctgtagaatctgcaagtggagcaccttgagtcctatggtagaaaaggtaatatcttcacataaaaactrgacagaaaaattcagaaacacctctttgtgatgtgtgtgtacatctcacagagtagaaccttacttttgatggaccagttttgaaatattgtttttgtagaatctgcaagtgggcatttcgagtgccttgaggcc

SEQ ID NO: 206114 - DNA, 368 bp, Homo sapiens
aatttggtagtggagcgctttgaggcctaaggtggaaaaggtaatatcttcatataaaaactagatagaagaattctgacaagcttctttgtgatgtgtgatttaatctcacagagttgaacctttcttttgattgagcagttttgaaatattctttttgtagtatctgcaagtgggcatttcgagcrccttgaggcctatggtcgaaaatgaaatatcttcacataaaaactagacaaaagaattctgagaaacttctttgtgatgtgtgatttaatctcacagagttgaacctttcttttgattgagcagtttggaaacactcttttagtagagtctgcaagtggacattttgatcgctttgcggc

SEQ ID NO: 206115 - DNA, 444 bp, Homo sapiens
gacttctttgtgatgtgtgcrttcatctcacagagttgaacctttctttagattgagcagtttggaaaccctctttttgtagaatatgaaagtggacatttggagtgctttgaggcctatcacagaaaaggaaatatcttcacataaaatctagacacaaggaatctgagaaacttcattgtgatgtatgcattcatctcatagatttaaagctttctttttatagaactgtgttgaaactctttttttgtagaatctgcaattggagcgctttgcagcctatggtagaaaaggaaatatcttcacataaaatctagaaagaagcaatctgagaaacttcttcatgatgtgtacattagtcttacagaattaaacctttctgttgattgcacagttttgaaactctctatttgtagtatttgcaaagggacatttgaagccctt

SEQ ID NO: 206116 - DNA, 444 bp, Homo sapiens
gacttctttgtgatgtgtgcgttcatctcacagagttgaacctttctttagattgagcagtttggaaaccctctttttgtagaatatgaaagtggacatttggagtgctttgaggcctatcacagaaaaggaaatatcttcacataaaatctagacacaaggaatctgagaaacttcattgtgatgtatgcattcatctcatagatttaaagctttctttttatagaactgtgttgaaactctttttttgtagaatctgcaattggagmgctttgcagcctatggtagaaaaggaaatatcttcacataaaatctagaaagaagcaatctgagaaacttcttcatgatgtgtacattagtcttacagaattaaacctttctgttgattgcacagttttgaaactctctatttgtagtatttgcaaagggacatttgaagccctt

SEQ ID NO: 206117 - DNA, 444 bp, Homo sapiens
gacttctttgtgatgtgtgcgttcatctcacagagttgaacctttctttagattgagcagtttggaaaccctctttttgtagaatatgaaagtggacatttggagtgctttgaggcctatcacagaaaaggaaatatcttcacataaaatctagacacaaggaatctgagaaacttcattgtgatgtatgcattcatctcatagatttaaagctttctttttatagaactgtgttgaaactctttttttgtagaatctgcaattggagcgctttgcagcctatggtagaaaaggaaatatcttcacataaaatctagaaagaagcaatctgagaaacttcttcatgatgtgtacattagtcttacagaattaaacctttctgttgattgcacagttttgaaactctctatttgtagwatttgcaaagggacatttgaagccctt

SEQ ID NO: 206118 - DNA, 374 bp, Homo sapiens
ctgtctcgtttttatgtgaagatatttcctgtttccccagaggcatcaatgggctcacaaatattcctttgcatattctacaaaatgactgttcagaaggtgctcaatcaaaaaaaaagttcaacagtgtgagatgaatgcgcccattcaamggaagtttctcagaattcttctatctagtttttatgtgaagatatttcctttttcactataggccacaaagtgctccaaatatccacttgcagactctacaaaacgagtgtatccacactgctcaatcaaaagaaaatttcaactgtgtgagatgaatgcacacatcaaaataaatttctccaaaacttctgcctactttttatgggaagatatttcgtttt

SEQ ID NO: 206119 - DNA, 602 bp, Homo sapiens
acactttctgaagaaatgtaacagaggcctcgtgaagatagttacaaccgagctcagtctttaagataagtggcattattgaggtgtgaaaaacagttctctaaaatgtggcactttggcgtgctgactgctttgaaaattgaaagggttcagaaataagtctcaaaaccaaggtttctctctgactttgccctgcctgcctctctctgatcctctttcccaaagcactaagagggactctctcaggaatttccttacctaagaaaacttctttccaaaagaaatgcaatagtcttaagaccctccctcctcgcctatagtcccagctactctggaggctgaggcaagagaatcgcttgaacctgagaggtggaggttgcagtgagcctagaccgcgccgctgcactctagcctgggcgacagagcgagactcygtctcaaaaaaaaaaaaaaaaaaagaaaagaaagaaagaaaaaagaccctctctccttaggaaactcattaaataaccaagacagattaaccactggagaagagacaagtctgggagtcattgccatgcccagaaagacctcatttattcttatcagggcagccctga

SEQ ID NO: 206120 - DNA, 493 bp, Homo sapiens
gcttactaattatttcttctgcttaatctattctgctattgaaaaactcagatgcatttttcagtatgccagttgcatttttcatctccagaatttctgtttgattcttttaagttactttaatctctttgacaagtttatctgatgaacttctgaattccttctctgtgttcttttggatttctttgagtttcctcaatacagctattttgaattctctatctgaaatgtcacatatctctgtttcttgaggattggttcctggtgccttatttagttcttttggtgaggtcatgtattcctagatggtgttaatgttagtacrtgttctttggtgtttggggttgaagagccaggtatttattgtagttgtcagtttctgggcttatttgtacccatcctttttgggaagactatacagatatttgaaaggacttgggtgttgtgatctaagctacatgtgctttaggaaacaaccaaagcccagtcatgc

SEQ ID NO: 206121 - DNA, 585 bp, Homo sapiens
tttatttcttttttaatttctgagtgcaaaactctgttgattttcctttattctaaacaatatttattctgcactatttgtcattatctctcaggccaggccatgtatctgacctttgggggctttatatttgaaactcatgatttcaactactatgtgcatatatatacatattttttccaaatctctatttatatatttatgatttatgtctaatttgcattctagttctcactccaagtccttagaccctgatgtctataatacatctctaattagttgttcaactcactagtatacagagaaaattaaagtcatttgatggtcaacatttcttaatgttgttactgctataagatttctgcaagataaaatatgttatcaggaaatcatgtcgctgaaaactcttggagtamtgagttctttgatttcaatcctatctgctacttatgtatatgtgagagttagaattctctaagctttaaaattctgagcctcagttttcttatctgtaagttgggaactatagaaactacgtcacttgttattgtgagtgctaaatcaaatccttaataaaaaatcatt

SEQ ID NO: 206122 - DNA, 569 bp, Homo sapiens
tttttcttacatcatctgtattatgaaatagttgatgtttctactctttcctctggcacaggtatgcacatcacaactttattatgaagatactttgcctactctggccctagcaacaaaactgttaacttttytaaactatcatggaagaatgggaacttttggatacttatgaagccaagggaggctcatgagggcaaagtcgggctttcttaatgcccaaacatggacagctggggattgcaccatagccatgcagagccagcccctgctgattgacttctgagcttcaccctcattagtttagcaaccactacttctcccttcttgtattgtgacctccatgcctgaagagtcttctctgatattcgcaaactaagaatatggtggcactttgggcttttcccttatcctaatgacccattctgggttaattctacaattatgtgggaaatcggaacacataagcctgaccatttgtttctctgatgtcttattctctcttctcttttctacactaggatgaaatgtgtgaactatatttatttctagagtgttagtaataaata

SEQ ID NO: 206123 - DNA, 566 bp, Homo sapiens
atgtgcgtgcacacacacacacacacacacacaccgcttataaatccagtggtacacaaggccttataaggaaaagcaaaggttacattgctccactgctccttgtcccacccctaatacttcaaaacaaaaatttctgtctcttttattctgttggttactttcacatcactacattagataattataatactgaatataaattcattaactgtgaatattacctactgacttttgccatgataagtgaggacttagcattttaagactgygggaacattagccctgttcgttttttaacttcattgttttcattattgtgtactactatttttaataggatcttgggaggaagagggaaaaatcgcatattatcagtctgattaaaatggaatctgaagttcaagtgctttttaataatggcttgtaaatttcagtctgccctatatttaacctgagaccctactcagggactcagcactcttggtgtcccagaagggcattcttcaattagggttgattctggttttacctcttacttgcttaaacataactagtcataaatc

SEQ ID NO: 206124 - DNA, 572 bp, Homo sapiens
taagtttttttttaacttttaaattcaggagtacaagtatgtttgttacataggtgaacttgtgtcacagggatttgttgtaaagattatttcatcacccaggtactaagcctagtacccattcattatttttcctgatcctctccctccacaccccctccactctccgaaagaccccagtgtgtgttgttcccctctatgtgtccatgtgctctcatcgcttagctcccacttataagtgagacatgcggtgtttggttttctgttcctgygttagtttgctaaggataatggcctccagctccatccatgtccctgcaaaggacattatctcattcttttttatggctgcatagtattccatggttctgtcacccaagtaaaaatgcagtggcatgatcacagctcaccacagccttaaccttcctggactcaggtgatcctcccaccttaacctcctgagggaacccaggggagcctcactcccactacaggcatgtgccaccacaccaagctaatctttgtattttttttttttttttttttttttttttttggcgaaaaggggtttc

SEQ ID NO: 206125 - DNA, 572 bp, Homo sapiens
taagtttttttttaacttttaaattcaggagtacaagtatgtttgttacataggtgaacttgtgtcacagggatttgttgtaaagattatttcatcacccaggtactaagcctagtacccattcattatttttcctgatcctctccctccacaccccctccactctccgaaagaccccagtgtgtgttgttcccctctatgtgtccatgtgctctcatcgcttagctcccacttataagtgagacatgcggtgtttggttttctgttcctgtgttagtttgctaaggataatggcctccagctccatccatgtccctgcaaaggacattatctcattcttttttatggctgcatagtattccatggttctgtcacccaagtaaaaatgcagtggcatgatcacagctcaccacagccttaaccttcctggactcaggtgatcctccmaccttaacctcctgagggaacccaggggagcctcactcccactacaggcatgtgccaccacaccaagctaatctttgtattttttttttttttttttttttttttttttggcgaaaaggggtttc

SEQ ID NO: 206126 - DNA, 691 bp, Homo sapiens
ccagataaattctgaatctaagttagcaagcacaactatgtgttctccactgtctctttctgtgtccctggtagatacagctacccaatcactgatccttcctgctgagttaggatatgaccttagaactttatcaacaaggtgctccaggcagtctctaccaatcaagtcagagatctgcaacttttgagactgccttcaccctagcaatgtgacctaagtccttttgtttttaaagccagtactcagcctcttcaaagggaaagctgagatctgttttcattcatcactccacagagaataaccaaccttagccttcaaacttcttgttcgacatcctctctcataacacattatgcttcctgcattttacccatttacccaaaccttttccttcactaatccctcaatttcttcctcagagctatctggatcactttcttcctaacaaacacatctcctgtatctccaatctaatttgtgtttattctaccttttgttttaaatgagatgtgatctttcattttttcctggaattatctcaaatcttgctctctctctctctgtctatatatatacagggagatagatctctcctctctctctctctctctctctmtatatatatatatatacacatatagatagatagatagatatagatatatagcaaggatatgaggataagaat

SEQ ID NO: 206127 - DNA, 671 bp, Homo sapiens
ttggtgaccgagcgaaataatctacatagattctatgattagaaaagaagagacaggtaggaattgagagctggacatcccaatatttacaggtgagaaggaagatttcaaatatctacttaatttccctgctgtctcttagagttatctctttctgaccttttaaaaatacatattctctatcttttttaaaatagcgatatttcatagtaactatcagaattttttttgcattcatatgcttctatatatattgtcctctggattcaaatatcaactctattaataaaatctattcagtatgaataattatctctatatgcacaatgatattctcatcttaaatttagcatatataaaataagatccagaatttcaagctcacagtataccagctatagaaaataaactcatttcacttctctgtgcttcaatttcctcacctattaaattaggataaaacaaccctttctttttaggttgtttcaagaagcagatgggttgtcacrtgtaatacatgtgcttaaaacagtgactggcatatgataaatattcaataaattttgccattatttattttgacaaatgttctgttctcctactcacattttagtgagggtaaactgaccaaggtgtcatagaaacaaccccataatcacagtaaatttaca

SEQ ID NO: 206128 - DNA, 671 bp, Homo sapiens
ttggtgaccgagcgaaataatctacatagattctatgattagaaaagaagagacaggtaggaattgagagctggacatcccaatatttacaggtgagaaggaagatttcaaatatctacttaatttccctgctgtctcttagagttatctctttctgaccttttaaaaatacatattctctatcttttttaaaatagcgatatttcatagtaactatcagaattttttttgcattcatatgcttctatatatattgtcctctggattcaaatatcaactctattaataaaatctattcagtatgaataattatctctatatgcacaatgatattctcatcttaaatttagcatatataaaataagatccagaatttcaagctcacagtataccagctatagaaaataaactcatttcacttctctgtgcttcaatttcctcacctattaaattaggataaaacaaccctttctttttaggttgtttcaagaagcagatgggttgtcacgtgtaatacatgtgcttaaaacagtgactggcatatgataaatattcaataaattttgccattattwattttgacaaatgttctgttctcctactcacattttagtgagggtaaactgaccaaggtgtcatagaaacaaccccataatcacagtaaatttaca

SEQ ID NO: 206129 - DNA, 454 bp, Homo sapiens
ggttcatttgtctaagtttctcaaaaaggaaatacttttaattggtgttttctaagcatttcaaatataaagttaaatatatttaacaatgttactcctgacaataagttcattgtrtgtgaaatagagtaagaagtggcagcaatgatgaatcaaataataagattaagaaagactggtaaaaacatggacttttatgtactgtactagtagtttagaagttagtattaaattggctttcagaatactgctattgaaggtttttgtaagtcattcgtttttacatgtttcaatttgagttggactcttacattaaagcaaaaatcaaatcatttttatatcctgtgcctctagataaagtcttatactaataaaaagaaatggtgctacaagacctttatttttatgtccaatcttgtccatcttgttgctggacatttataaatcagcatag

SEQ ID NO: 206130 - DNA, 583 bp, Homo sapiens
ttggtgtaaaccaattgctccacttctttggctggaaaacaaattcattgttcagaagcagaatgtactgattaaataaggaattctacagaggtagakgcactgagttcagagacttctagagaggcaattttacttttcctgaatattttaggacatttctatttataaagattataatctttatgttaaatataaaaagtactttcaaagattgtatttataaaaataaacagagtaagacatcagtggtctgctgcctctatttaaatctagtatttcaggaacaattgtgagaaattctgattattattactgttacctattatgaaaaccatgatgcccttgcttctggccattaaacatttccacctagcctctaaatgctaagaacttatcatactcattaaaatcaaaaggcatattaattcaaccctcattattatcctacgaaaaatagtaaatagtgtgctatggctttccttaccaatgcatttctcactgtcttggtgaaaggactctcagttcttcaggagtcataactagcagatatataaatggattatacacaattaagccactt

SEQ ID NO: 206131 - DNA, 585 bp, Homo sapiens
atattgcatgattccctttacatgaaattccagaaagggcaaaacaaagctatagttactgaaagcagacaaatagttccctgggaccagtttcctggtgagaggttgactgcaaaaaggcacgagggagccgtgttcggtgggtggaaatgttctttattttgactatggtcattgttacacaggtctatacatttgcacaaatctcttgggactgtacatttaaaatagccagacatggtggcactcacctgtagtcccgactacttgggaggctgaggtgggaggatcactgtagtccaggagttcgaggctgcaggagctatgactgcaccactgcactccagcmtgggcgacagagtgtgaccctgtctgaaataaataaataaataagatgttgtatcttatataaataatccttgaataaagttgattttttataaagaagctagaaattcaaatttttaaactatgacatttgctgggtgtggtagctcacacctgtcatcccagcactttggggggctgaggcaggaggattgcttgtggccaggagtttgagaccagcttgggcaacataacaag

SEQ ID NO: 206132 - DNA, 411 bp, Homo sapiens
gatttgtgagcactgagaatggaaagtcgtgatcattgggagagacccaaatgacaaacaggtcattccggactctcagccttgccttggtaggatttcaacttccaaccaccrccatctgggtgacactcttaaattatgagccacaaagtgctttacatacatcatctcacagcagcctctgagcctgctgtcatcctcatctttattttacagacaagaagagtaaggctctaagttacccagcagcacagggaatgaggaagcagcctggcctggtagaccagggagtgctgatgtatctgtgctgcaatttcagcaaggccttgaaccttggtgttgtcaacatgtggagaattgtggactgaatcatagacattagatgggtacagttactgtgttctgtgagtg

SEQ ID NO: 206133 - DNA, 408 bp, Homo sapiens
ggatgatttgtgagcactgagaatggaaagtcgtgatcattgggagagacccaaatgacaaacaggtcattccggactctcagccttgccttggtaggatttcaacttccaaccaccgccatctgggtgacactcttaaattatgagccacaaartgctttacatacatcatctcacagcagcctctgagcctgctgtcatcctcatctttattttacagacaagaagagtaaggctctaagttacccagcagcacagggaatgaggaagcagcctggcctggtagaccagggagtgctgatgtatctgtgctgcaatttcagcaaggccttgaaccttggtgttgtcaacatgtggagaattgtggactgaatcatagacattagatgggtacagttactgtgttct

SEQ ID NO: 206134 - DNA, 428 bp, Homo sapiens
attaagtggatgatttgtgagcactgagaatggaaagtcgtgatcattgggagagacccaaatgacaaacaggtcattccggactctcagccttgccttggtaggatttcaacttccaaccaccgccatctgggtgacactcttaaattatgagccacaaagtgctttacatacatcatctcacagcagcctctgagcctgctgtcatcctcatctttattttacagacaagaagagtaaggctctaagttacccagcagcacagkgaatgaggaagcagcctggcctggtagaccagggagtgctgatgtatctgtgctgcaatttcagcaaggccttgaaccttggtgttgtcaacatgtggagaattgtggactgaatcatagacattagatgggtacagttactgtgttctgtgagtgttggtc

SEQ ID NO: 206135 - DNA, 360 bp, Homo sapiens
ccaaaaccaaatggattcacagacaaattctaccagatgtacaaagatgagctggcagcattcctactgaaactattccaaaaaatcgaggaggagaggctcctcccccaactcattctatgaggccagcattatcctgataccaaaagctggcagagacaaaacaaataaagaaaacttcagaccttaatgaacatcgatgtacatatccttgaygaacgtagatgtaaaaatcttcaacaaaatacttgccaactgaatccagcagcacattaaaaacctaatccaccgcaatcaagtaggctttatccctgggatgcaaggttggttcaacttatacaaatcaataaatgtgattca

SEQ ID NO: 206136 - DNA, 557 bp, Homo sapiens
aaagaggccagaggagaggcaagttcaggtttggaaagatgggggatgttagaaaattcccttctgcctgctgttccggggtcccaaaccaggagaccctgtctgtctcatgaccagaggcctagcacagtgtggcacgcagttatgctcattgtatgagcgggcagaacccacccactgaggaccccatattgaacctcataccatgaactagatatgcarcatcaccctacagataggaccagaggctcctggggtgtgtcgagtgcccagggagacctggcccggagtcctgctaggacatgctgggagggaacaccttcctaggggtgttagacatcagaagaagagagacgactggcctggcacctacagggctgcacaagaaacaggagacacccacccatccaccaccacagccactgtgggaaagacacctgccactgctttgagcccctgcccccaaactgcccagggccccctgtgtagaaggcttcacccagcatggagggagagctttactgagcggactgtagcccccctatggcatgagccgg

SEQ ID NO: 206137 - DNA, 557 bp, Homo sapiens
aaagaggccagaggagaggcaagttcaggtttggaaagatgggggatgttagaaaattcccttctgcctgctgttccggggtcccaaaccaggagaccctgtctgtctcatgaccagaggcctagcacagtgtggcacgcagttatgctcattgtatgagcgggcagaacccacccactgaggaccccatattgaacctcataccatgaactagatatgcaacatcaccctacagataggaccagaggctcctggggtgtgtcgagtgcccagggagacctggcccggagtcctgctaggacatgctgggagggaacaccttcctaggggtgttagacatcagaagaagagagacgactggcctggcacctacagggctgcacaagaarcaggagacacccacccatccaccaccacagccactgtgggaaagacacctgccactgctttgagcccctgcccccaaactgcccagggccccctgtgtagaaggcttcacccagcatggagggagagctttactgagcggactgtagcccccctatggcatgagccgg

SEQ ID NO: 206138 - DNA, 579 bp, Homo sapiens
gtgcaggcagggctccacgggtgcttctatagggccagttattggaaggctggccactatttgaccatgaatggaaggacccagatggcactgaagattgtttttttgttgttttttttaaattttgagacggagcttcactcttgttgcccaggctgaagtgtaatcacgagagcgtgatctcggctcactgcaacctccgactcccaggttcaagtgattcacctgcctcagcctcccgggtagctgggattacatgtgcctgccacaacatctggctaattttttgtatttttagtagagactggatttcaccatgtyggccaggctggtctcaaactcttgacctcaggagatccacccacctcggcctcccaaagtgctgggattacaggcgtgagccaccgcgaccgcccggcactgaggattcttaagacaccaaggagctcagccttgtgttcagtagactatgaagggcctgggtatttaccctcctgcccacagtagtaattcttgggaaatggcccatgtccctgtggggcagctggcgggactgtaaggttgtcatggtaacacagc

SEQ ID NO: 206139 - DNA, 574 bp, Homo sapiens
ttggagagatgcaatcctctcagacatggaaggtctggattccctgggtgggatggatgattttgcagtcgggggaaaggccgtgacaacaggggtggcccagcttacggatgccagtgttcctctgtcatttaccttgagccatcagatgttgggattgaccaaagagaggacttaaagaaggatatgacaaacgtggcctcttttccatcttccttttccttcatgtattccccctagtccrtccagaaggatctgtggtattttgggccactgtgaccctcgggaatcctgggatgtattggcagggccagagctgaccacagtatcactgccttcttcactcacctcctcagcacacacttctcaggtgcgcatgcaagaatagcaagaagagccaggctgtattcattttctgctgccactataaaaaatggccacaaacgtggtgacttaaaactacatacatttgttctctacagtcctaaagggcagaagtcctgagtctgtttcactgggctaaagtcaaggtgtctgcagggccgcattcccacagaagcaccaagggaaactt

SEQ ID NO: 206140 - DNA, 381 bp, Homo sapiens
tcttaggaggtgctctctaagctgttggaatgtggtgtctgaaaagaggctctttccttacccaggagccttggcccactctggatagggtggggtctctgggtcatgtagtatcagttttgcctccagaagggctggagactgaggtcagctacctgggcagccaaccacatctttgtgaccaagcctcaataagaactctggacaccaaggcacaggtgggcatctctggttgatggtgcgccacgcatgttrtcacacattactgaggggaaggttagcgctatctgtgactcccaagggagaagaccactggaagcttcgtgagtagaacttttctggactttccccatgcatctcttcccttggctgatttaactc

SEQ ID NO: 206141 - DNA, 609 bp, Homo sapiens
agaattcagtttatgggctgggtgccatggttcacacctgtaatctcagccctttgggaggccgaggcgggcagatcacctgaggtcaggagttcaagaccagcctggccaaaaaggcaaaaccccatctctactaaaaatacaaaaattaggccaggcgcagtggctcacacctgtaattccagcactttgggaggctgaggcgggcggatcacgaggtcagcagatcgagaccatcctggctaacatggtgaaaccctgtctctaataaaaatacaaaaaaattagctgggcttggcggcgggtacctgtagtcccagctactcgagaggctaaggccggagaatggcgtgaacccaggaggtggagcttgcagtgagcagagattgtgtcactgcactccagcctaggcgacagagacactctgtcygtctcaaaacaaaaacaaaaacaaaacaaaaacccaaaaattagccaggtgtggtggcgggcacctgtaattccagctacttgggaggctgaggcaggagaatcacttgaatctgggaagcagaggttgcagtgagcccagatcacgccattgccccccagcctgggcaacaagagtga

SEQ ID NO: 206142 - DNA, 609 bp, Homo sapiens
ctgaatctcttttaaaacacactgtggggagggggtgtttgagccaatatttgatcatgttaagagattattgataatctctttaggcatgctaatggtattgtagttatttttaaccyatatttaacctcaatatcttttagaaatacagtctgaaatattttggatgaagtgatatgacgtctgggatttgcttcaaaataatccaggcctggggaggagtgggtgggagtggagaagaaagactggccgtgagatgagaactcttgaagctgggtgatgaatattgggggaattaattatacttttctgtctatttcagtatatgtttgaaattttccataatgaaaactttaatttttaatatgtttatttttttaaagcttgttttttaaaatacaaaaagacaggagcttgagtatagagacccttcagtcttgcccacccagttccagtctccttttccgggaggttggcagaatcatcagctcttaccattgaccatggtggcccaggtagcattaagctcctcaaacataggaccatgccaagttttgttgcttcctgagcaattggcacagtgcaacacaccagaaggcctcaatactt

SEQ ID NO: 206143 - DNA, 566 bp, Homo sapiens
gacttggagtcaaaggagatcattttgcagctttaaggtttgatgactaccctattggattttggacttgtatggggcctggagtccctttgtttaggccaatttctcccatttggaatgggtgtatttacccagtgccttttcccccatcatatctaggaagtaactaacttgctttggattttacaggctaatagacagaagggactttccttgtctcccatgagactttggacttgaatttctggaatgttctaagactgcagggaactgttagaaaggcattattatgcttttaaatgtgaggacatgatatttgggaggagscaggggcagaatgatatggttcggctgtgttccagccaacatctcatcttgaactgttgttcccatgatccccatgttttttgggggggacctggtgggagataattgaatgatatggcagttacccccatgctgttctcatgaaagtgagtgagttctcatgagatctgatgattttataagcatctggcatttaccctgctggcactcattctctctcctgccattttgggaagagg

SEQ ID NO: 206144 - DNA, 395 bp, Homo sapiens
caagctgtgtatgaaagcaagactcagtgggtagctgtcttcaagagtcccatctcacatgtaataacagtcagaggctcaaagggatggaggaataaagaaaatggaaaatagaaaaaaaacaggggtagtaatccttatttcagacaaaacaaatttcaaaccaacraagatcaaaaaacccaaagggcattacataatggcaaagaattcaattcaacaaaagacctaactatattaaatatatatgcacacaacacaagagcacccagattcataaagcaagttcttagagatctacaaagagaaacagactcccacacaataatagtgggagacttcagcacttcactgacagtattagataactgaagcagaaaatttaataaacatat

SEQ ID NO: 206145 - DNA, 644 bp, Homo sapiens
cccttttggttagtgcaggtgtcaagcccagtgctaggagagctgaaatatcccasggggaaaaatattccttcatcttaatagaataaccttgcagaatatgtgaccttgttttaccacacattacaatgaacttagagaacagctgaaggtgtggagccaattatacacgctttgattttatttggagaattcttgaagatgctcatagtggaccagcatgagaataaagtattagaattttaaattattgttatattattttaaataagaaataaatttaacttggaaaattagtgcttaacacactgactttaactctatgtagtatgctctaggattctcaaaaaaaatgggatttccagcacagaatagttgacagaggtccatatccaaactttgttagttaatattagatgacacatacttaactagacatatgtaaggtaaacttatagtagtacactgaaagcaaaggaagcaatgtggagttgacacttctgctcctagaatgaaccatgaaccattctgtagatatataatttgaaatcaacaagaatctccccatagctgatgagaaattaccaaaataattagaaattgctatttgaaatacttacatccagtattattaatggtgatat

SEQ ID NO: 206146 - DNA, 644 bp, Homo sapiens
cccttttggttagtgcaggtgtcaagcccagtgctaggagagctgaaatatcccagggggaaaaatattccttcatcttaatagaataaccttgcagaatatgtgaccttgttttaccacacattacaatgaacttagagaacagctgaaggtgtggagccaattatacacrctttgattttatttggagaattcttgaagatgctcatagtggaccagcatgagaataaagtattagaattttaaattattgttatattattttaaataagaaataaatttaacttggaaaattagtgcttaacacactgactttaactctatgtagtatgctctaggattctcaaaaaaaatgggatttccagcacagaatagttgacagaggtccatatccaaactttgttagttaatattagatgacacatacttaactagacatatgtaaggtaaacttatagtagtacactgaaagcaaaggaagcaatgtggagttgacacttctgctcctagaatgaaccatgaaccattctgtagatatataatttgaaatcaacaagaatctccccatagctgatgagaaattaccaaaataattagaaattgctatttgaaatacttacatccagtattattaatggtgatat

SEQ ID NO: 206147 - DNA, 644 bp, Homo sapiens
cccttttggttagtgcaggtgtcaagcccagtgctaggagagctgaaatatcccagggggaaaaatattccttcatcttaatagaataaccttgcagaatatgtgaccttgttttaccacacattacaatgaacttagagaacagctgaaggtgtggagccaattatacacgctttgattttatttggagaattcttgaagatgctcatagtggaccagcatgagaataaagtattagaattttaaattattgttatattattttaaataagaaataaatttaacttggaaaattagtgcttaacacactgactttaactctatgtagtatgctctaggattctcaaaaaaaatgggatttccagcacagaatagttgacagaggtccatatccaaactttgttagttaatattagatgacacatacttaactagacatatgtaaggtaaacwtatagtagtacactgaaagcaaaggaagcaatgtggagttgacacttctgctcctagaatgaaccatgaaccattctgtagatatataatttgaaatcaacaagaatctccccatagctgatgagaaattaccaaaataattagaaattgctatttgaaatacttacatccagtattattaatggtgatat

SEQ ID NO: 206148 - DNA, 583 bp, Homo sapiens
acaatataccaaaacttacagaaggcagtgaaagcatttctaagaaggaagtttataatgataaatgcttacattaagaaaataagcaagatctcaagtaaacaataagctatacacattaagtaaaaagaaaaaaccaagctgaaaattagaagaaaaaataatgaagattagagaatatatgagacacaagaattataatagaaaatatcaaatatattgkttttttttaaaaaattgataaacctttagctagactaaaagaaaaaagagtggatatataaatcaataaaattatacatgaaagagaagaagactctacaactgatactgcagaattagaaagattatgaggctactataagtaattgagcaacaacaaattgaataatttagtagaaatggataaatttatagaaaaatgcaacctaccaaagctaattcatgcagaaatacaaaaacttgaaaaagctaataataagtaaggagactgaagacaaaaaaaaaattcccgtaagtaaggagattgaatcagtaaaatatctcccgacgaagagaagcccaggacttcatggattcattg

SEQ ID NO: 206149 - DNA, 583 bp, Homo sapiens
acaatataccaaaacttacagaaggcagtgaaagcatttctaagaaggaagtttataatgataaatgcttacattaagaaaataagcaagatctcaagtaaacaataagctatacacattaagtaaaaagaaaaaaccaagctgaaaattagaagaaaaaataatgaagattagagaatatatgagacacaagaattataatagaaaatatcaaatatattggtttttttwaaaaaattgataaacctttagctagactaaaagaaaaaagagtggatatataaatcaataaaattatacatgaaagagaagaagactctacaactgatactgcagaattagaaagattatgaggctactataagtaattgagcaacaacaaattgaataatttagtagaaatggataaatttatagaaaaatgcaacctaccaaagctaattcatgcagaaatacaaaaacttgaaaaagctaataataagtaaggagactgaagacaaaaaaaaaattcccgtaagtaaggagattgaatcagtaaaatatctcccgacgaagagaagcccaggacttcatggattcattg

SEQ ID NO: 206150 - DNA, 583 bp, Homo sapiens
acaatataccaaaacttacagaaggcagtgaaagcatttctaagaaggaagtttataatgataaatgcttacattaagaaaataagcaagatctcaagtaaacaataagctatacacattaagtaaaaagaaaaaaccaagctgaaaattagaagaaaaaataatgaagattagagaatatatgagacacaagaattataatagaaaatatcaaatatattggttttttttaaaaaattgataaacctttagctagactaaaagaaaaaagagtggatatataaatcaataaaattatacatgaaagagaagaagactctacaactgatactgcagaattagaaagattatgaggctactataagtaattgagcaacaacaaattgaataatttagtagaaatggataaatttatagaaaaatgcaacctaccaaagctaattcakgcagaaatacaaaaacttgaaaaagctaataataagtaaggagactgaagacaaaaaaaaaattcccgtaagtaaggagattgaatcagtaaaatatctcccgacgaagagaagcccaggacttcatggattcattg

SEQ ID NO: 206151 - DNA, 492 bp, Homo sapiens
tagcacttgtaaaataagctgcttctgtactatggaagcaaggatccttctagatttacatgtctgtatcaatagcgctagatgacttccctcttgtattacctgcagtattgaatttctatttgcctttagatatttatatatgctaatcctcatactaaatatatacctcatactaaatatatacctcatactaaacatacttgaaatgacatatctccagttctttaatattctatcacagtagamggtatgaaccatttattgaatatagaaacctatgtcactgttatatctgtctccataatctgaaataacatcttaattctacttgatttccaaaatattcccatttttttctcctttctatttctattgccacattaatgcccaagatactttcatttcttatttggctatcacaatagcctttattgatctctttcttttcaaatactatattgtgcattggtaacaaaattgcttcatcca

SEQ ID NO: 206152 - DNA, 549 bp, Homo sapiens
tttgctaatcctgttagcagtcggtctcccaaaccctggcgaatttactttctgtctcaatgaatttgcctattttggacgttcatgtatatgaaaacatagagtctgtagtttttgtgaccatcacttagcatattatttttatggttcattcatattgtagcatgtatcaatgcctcatttcttataattgataataaaaatcaattgtatggatataacattttatgtatcattactcagttgatgaaaatatgaattattttcactttttactattatgaacgaaacttttaattacatttatgtacacatttttgtgtggatatatgtcttcttatgtcttggctatatgacagtagaaatccatgatcacatggtaactttatatttaacattctgatgaactgccaagctgttttccaaggtgactgccacrttttaaaatcccaacagcaacatatgaggatttcaatttctccacatcatatccaacatttgttgttgtctggtttctctagtttagccattctagtgggtgtgaagtgg

SEQ ID NO: 206153 - DNA, 616 bp, Homo sapiens
attcaacaatttagattggatgcctaaacaggaaaggagaatcaaagttgaaatcagtattgaaaagaaaaaatataaaaatatatataaaaaaagacttgggaaaacagaaattcttagtccatttatgtaataaagatttggggatgcattgacacctgggttgactctgaccatcgggaacttatgtagcttgttgctcatttttggaagtgttgggtatgctaagttgaaggtcgtggcagcaggatgattaaaaattcctttagggtggcaaacagagtttctctcttargtatttcctccctcatgagcagtcatatgcctctatgaggaaactttgaaaaaactggtaagcttgtactactatgtatgagcatggagaactgtctcctatttaggtaattatcttcctaagtttccatttcttttcccattaaagaaacattacttctttaactgtgcctgttttactgccaagcacagtactatcctcttgtgacaaccaaactaacactaaattaaagaaaaagctcttgctcagaaacaactaacagtagacagttgccgggaaagcctgattaagaaaaaaagagaaagcaaaagtatacaattc

SEQ ID NO: 206154 - DNA, 614 bp, Homo sapiens
ctcctttctagccattagcaataacttcccattgccccctccccacagactctggaagccgctaatctactatctctttctgtcaatttgcttattgaggacattccatatgaatggaattctacaatatgtgcattgttgtgtctggcttcattcacatagcataatattttcaaagttcatctatgatgtggcatatatcagtacttcattcctttttatcagtgactatttttaattgtatgtgtataccctttatccatgtgtcagttgatagacctggggttcatcatatggttgttataaataataccgctataaacattactgtacatttttttgtggacatctgctttcaattcgcttggatattaactagaaagatcttaattttatttttcagtaatagcatggaagaatctttagctctacatataatgatagaaactgttatgractaaatgtttgtgtcagcccaaaatttatatgttgaagtcaaatcccccagtggggcagttatttgcagaggaaccgtctaacacagtgattagggttaaatgaggttttggtggggttagtatcctcataggaaaaaaacaccagagagctcactg

SEQ ID NO: 206155 - DNA, 544 bp, Homo sapiens
tgacatttgagttgtaacataaataacagatgaatgagccaaacagcagtggcagaaatgtgcttcaaaggaaaagcacttaaacagatttccacacaggtgtttaggcaaaaatacagtctaccaacaggataaaagatactttagtcaaatatctgtacattttgttgtacacatgggtaaacatctgtatacccagaaatatttagatattttaatgtttcactttatatttcagtatacttgtatattcatgaatattcatgtatgttgcacagaatttgttaatctttgcacttgggtgaatgtaaacgaagttctgttgctttttggaaaagaggagtttgatgttggctttctagggctgagatgtaaaaattaaaagggaaatgctaaattccagtgacaagagtccagagagtttccactctgctctgggagggcttatggyttgccatgtgccaggggccaatttcagggcacttgaaacatctgctccccctacttacaaatcaatcatagcctttatgggtctggaagcttc

SEQ ID NO: 206156 - DNA, 626 bp, Homo sapiens
gatttctttccactatgtttacaaaaaaaaaaaaaaaggataaatgagcccactgaaatttcagacttaaaagaaataaaacaaagtaaaaaagtgaaatactttataacagtaaatcayagtatatctgtgaaatttgagagaaaagacagtaatttatttgaaagtgcttggaaatgtaagccattttacaagctgtatgctgtgaagatagatgatagatagacagatagatagacagatggatagattgatagattgatatagatatagatagatatgaatgaaaataagaagcagcagggtgggctgtagctgaaaggagagttataaagggtcagtggggaaaggagagggcaagagctattatagcaaacccagattcagaggagtcccaaaccaggagtgagtagaagctctgaagtcaagaaagcagagtggaggtaagcaagtcggttgggaagaggctgaaagtgaataagcacacagagagaggtggattattttaatgttgaagttatttattagatttcctacactgtctaggactcacagttctctgtgaggctctacattattattttgcctgctcttaaaatttccatgagaatctcccttctctctct

SEQ ID NO: 206157 - DNA, 626 bp, Homo sapiens
gatttctttccactatgtttacaaaaaaaaaaaaaaaggataaatgagcccactgaaatttcagacttaaaagaaataaaacaaagtaaaaaagtgaaatactttataacagtaaatcacagtatatctgtgaaatttgagagaaaagacagtmatttatttgaaagtgcttggaaatgtaagccattttacaagctgtatgctgtgaagatagatgatagatagacagatagatagacagatggatagattgatagattgatatagatatagatagatatgaatgaaaataagaagcagcagggtgggctgtagctgaaaggagagttataaagggtcagtggggaaaggagagggcaagagctattatagcaaacccagattcagaggagtcccaaaccaggagtgagtagaagctctgaagtcaagaaagcagagtggaggtaagcaagtcggttgggaagaggctgaaagtgaataagcacacagagagaggtggattattttaatgttgaagttatttattagatttcctacactgtctaggactcacagttctctgtgaggctctacattattattttgcctgctcttaaaatttccatgagaatctcccttctctctct

SEQ ID NO: 206158 - DNA, 669 bp, Homo sapiens
cccttttttgttgcctgacctcgggtagtttaagtaaccatgctggcctttagtatcctcactggtaaaatgaggcttagattccacctgtggttttyaaataaccctctttggagctctgtggcttctgagaattctttagaggatggacaaaaataaaagaaagaaaaaaataatgaatttcaagtattttcttccaaacattaatatttatattgccttagaaacctgttaattgttttgagcttaagtatcccttccagttctataattatagaaacgaatccacataggtattgagataaaagcttttacatataagatcttttctgtaataaagtgaactgggcttaatgcaagggtagcaagtttatctaaataaagaatttttggataacagattattgttgctcatagaacttaaggttgataatgtaattcttataagaagtgacctgtgttttgccacattttggtgaggacatcatctaggttctagagaaaaggttattctccttgtatcactaacatgcacagttactagcagattgttaatcataacaattcagtacactctctaaacaaagaatattataaaatatgttttatgcagtgggtttcttttgttgtaaaaatgtgtctggtctaaaaagatgtctgtactttgca

SEQ ID NO: 206159 - DNA, 669 bp, Homo sapiens
cccttttttgttgcctgacctcgggtagtttaagtaaccatgctggcctttagtatcctcactggtaaaatgaggcttagattccacctgtggtttttaaataaccctctttggagctctgtggcttctgagaattctttagaggatkgacaaaaataaaagaaagaaaaaaataatgaatttcaagtattttcttccaaacattaatatttatattgccttagaaacctgttaattgttttgagcttaagtatcccttccagttctataattatagaaacgaatccacataggtattgagataaaagcttttacatataagatcttttctgtaataaagtgaactgggcttaatgcaagggtagcaagtttatctaaataaagaatttttggataacagattattgttgctcatagaacttaaggttgataatgtaattcttataagaagtgacctgtgttttgccacattttggtgaggacatcatctaggttctagagaaaaggttattctccttgtatcactaacatgcacagttactagcagattgttaatcataacaattcagtacactctctaaacaaagaatattataaaatatgttttatgcagtgggtttcttttgttgtaaaaatgtgtctggtctaaaaagatgtctgtactttgca

SEQ ID NO: 206160 - DNA, 413 bp, Homo sapiens
tgactcatttatgtagatagaaataacataagtgattgtcttctctctatatatgtgtgtatctatatataatatcatgcaatcttgttgattgattaatttaaaatggtgctcttaccaccatcatcatatatcaataattcattattgaactcccatgttacttgattgggtcatttaaagaaaagtttcttgtttgcatgaataaagtaaagagctgattagttaaaaaaaaactgcatattttcagactctttcaaatgcatttaaaaaaaaaatcccatcattttatttcaagtatgggctgatgagaaaagagcaacacctgagcatatcttggtaaaatgcttgaattctaagtataaggtgaactacagctctcattcaaaaygaccaagttaagtacacagaag

SEQ ID NO: 206161 - DNA, 545 bp, Homo sapiens
gacacagaaaatggggagtaggtgctgggaagaaactggcactcagagatctctggactcrcagaggaagtgcatgtaagtgtactagttctccctgacctcaaaagctgagaagaaaccaagaaactggttgagtacactttgcctttgagattgggaaaaatcagaaaaaccaaagagcaaaggtatcagggcatcacaggcccacaagggtgagaatcactttggtttccactgtttgaaggattctaacactattgcatttcaacaaccatatctacactaacaaataaaaacagcaaccaatactagcagtcataaagaggaaaagcagaaagaacatttgaacacatgccatttaaacacatgtcaactgaattgctggaaaaaagatgaacgcttgaataaaaacatttttaaaagaagttgaggagatgaaattcagacacaaaatgtatggtgttaaaagacatgatttaccatgtacagacaaatacaaattaaaaatcagaggctagattctccctgttgaaaatagatttccc

SEQ ID NO: 206162 - DNA, 514 bp, Homo sapiens
tcacatgtattgctggatgctcgtaagtagtatcactgatattctgaaattagctgttaaaatttttaattgaaataactaaatgcaacccattattcaagtttaactataccagtttttcccaaacatccctctccaggtcccttctcttgcaaattcggtaagggtgtgattgtcattgccatctaagcccactgataaaatgaccttacctaaatttaggaccttcttctaatttaacaccaatccatgtaaatgagcacttttagggtttaaccagctatggatcctcctaatcctcaataaagcccttaaggatatagtgagcagcatcatatatactgactctggagaatgttctctcaaggccttgttccctactaactcccagcccagcttacatgttattttcctaagctccaatgacattctgttgccattctccaaagatcaatgacacgattctatawgaaatgtacagtactacagaagagagaaataactactgcacatt

SEQ ID NO: 206163 - DNA, 547 bp, Homo sapiens
atttatcaattaattctttccttcagtttaattaacagagtaactactatgtgtccagctgacaggtgtcaaggttgtctgttaggacaatgagcataaccgaaggtataatcaagccctcattcagttgctgcggtagttcaatcaaaaggcagaaaggtgttgtgggccatttttctccaaggggtggcaccaggtgagtatcagatggatgcagcacagatgaggcaaactgtctcactgacaagaagcccccaacaaaaggctcctatcttactggactgagtgttgaatcagaccttggaaaattgcctcattcaagatcccagataaagaagtcatcacagaggtccctggaactaggaatgcagacgtacatatgagtattggctagcctgaaggcctgagtcctwgactgcaacacttttcagaaaactgcagtgcattagctgtacaacaaggctgatgtgggaagggcagcttccctcccatccccataaggcctggcaggcaatttcataattgcttctggtaggtctgaaagatc

SEQ ID NO: 206164 - DNA, 560 bp, Homo sapiens
ttattttaaaatgtttcacttggaaatgaatttatatttagaatgtaaattacatagagccaaagattattgtttcatttgcttctatgtcccctagaaaactgcctgtcacataatgtatgctcaataagcccctcttaatggattaatttgtccttatcaaacataagcatatatatttatttcatgaaattatatagagatggaaaacttctttaaagaacaaacatctctaatttgcacatgtaagcacaacatacaagagacttatgtgacatttaaacaaaacatttacttagaaagccaatatttcatctcatgcaataatgaaaaatctgatagctccattatggctcatttaaagaaagtcaaaattctaaaatatwagagtgcagttgtcattaagatgttacttttatgactacttgaaaggctaaagaaatatctgttaagtattaaaagggcaaagatttagataaaaatggaattgtgcagccacatttcactgtactgagtgtacattcagtcaggtacctctacagatgattttatgaactgta

SEQ ID NO: 206165 - DNA, 631 bp, Homo sapiens
cccctcactctttttgagtcagcctttaaatttgttctctctcaagctgcacttgtatcttctaagtaggcagagaggtcgtggcactatctctctccaacagtgtcagcaaattgttttgatttctagagcatgggtgggtcatgtgctttttattttcccgcagaaaaatgaatttcatgaatatgaaaagagatcttcattttttatatttttacaactttgtttcagagagctatacttaattgttctagtagcctgctttttcagtctgtggctgaagggagcagctatgtcaaaatgctagcaatataaagtcttacacaatttaaaaaaatatagcgattttcctaaatttcaatttacctttttcagtttagatggttctgagtcagcatgtatatcactgcatgtaacaagcagagatgggggaaatttcaaaaatrctggccattccaatccttatttttctagtgcttatcaaggactaactataatttttacaagtcttgtaagtttttgaaaactcacacaagatcgtttggggttagaatgtataaagtcttggatggcatcatttaagacagaatttcttcatatttaaaacagaaatgataattgcttctctact

SEQ ID NO: 206166 - DNA, 362 bp, Homo sapiens
ggaattctatgtgaggaacaaactctcagaatactgcaggagtgttttggaatcctatgtgagggacaaacattcagaccctcgtagcagtgttctggaatcccatgtgattgacattcagaccacagcaggagtgttctggaatcccctgtgaggacccaacattcagacctctgtagcagtgttctggaatcctaagtgagagacaaacatttagaccccagmagcaatgttctggaatcctatgtgagggacaaacattcagaccctcgaagcagtgttctggaatccaatgtgtgggataaacattcagacaatagtagcagtgttctgtaatccaatgtgagggacacacattcagg

SEQ ID NO: 206167 - DNA, 258 bp, Homo sapiens
tggaatccaatgtgtgggataaacattcagacaatagtagcagtgttctgtaatccaatgtgagggacamacattcaggccctcgtcggaatgctttgaattctatgtgagggacaaacactgagacaatcttagtactattcaggaatcctctgtgaggtacaaatttttagaccacagcagaagtgttctgcaatcctatttgagggacaaacattcaaacaacagagggaatcttctggaatcctatgttacgga

SEQ ID NO: 206168 - DNA, 258 bp, Homo sapiens
tggaatccaatgtgtgggataaacattcagacaatagtagcagtgttctgtaatccaatgtgagggacacacmttcaggccctcgtcggaatgctttgaattctatgtgagggacaaacactgagacaatcttagtactattcaggaatcctctgtgaggtacaaatttttagaccacagcagaagtgttctgcaatcctatttgagggacaaacattcaaacaacagagggaatcttctggaatcctatgttacgga

SEQ ID NO: 206169 - DNA, 499 bp, Homo sapiens
atgacggacaaacatttagacaactgaagcagtgttatggaatcacatatgagagacagacattcagaaacttgtaccagagttctggaatcctttgagagggacaaacattcagaacccagcagaaatgttccggaatcctatgtgagggacaagcattcagacactggtagcagtgttctggaatcctawgtgagagacaaacactccgaacccagcagcattgttctggaaccctatgtgagggaaaaacattcataccacagaaagattgccttcgaatcctatgagagggacaaacactcagaacacagcaggagtgtgttggaatcctatgtgaaggaaaaacattgagaccctcgtagcagtgttctggaatcctatgtgagggacaaacattcagatcctcgaagcagtgttctggaatctaatgtgagggataaacattcaaataacagcgggagtgttctgaaatcctgtgttacggacaaatattcag

SEQ ID NO: 206170 - DNA, 499 bp, Homo sapiens
atgacggacaaacatttagacaactgaagcagtgttatggaatcacatatgagagacagacattcagaaacttgtaccagagttctggaatcctttgagagggacaaacattcagaacccagcagaaatgttccggaatcctatgtgagggacaagcattcagacactggtagcagtgttctggaatcctaagtgagagacaaacactccgaacccagcagcattgttctggaaccctatgtgagggaaaaacattcataccacagaaagattgccttsgaatcctatgagagggacaaacactcagaacacagcaggagtgtgttggaatcctatgtgaaggaaaaacattgagaccctcgtagcagtgttctggaatcctatgtgagggacaaacattcagatcctcgaagcagtgttctggaatctaatgtgagggataaacattcaaataacagcgggagtgttctgaaatcctgtgttacggacaaatattcag

SEQ ID NO: 206171 - DNA, 511 bp, Homo sapiens
gaattctgtgtgagggacaartattcaagctgtcattgcagtgttctggaatcccgtgtgagggacaaacattcagacactggtagcagtgttctggaatccaacgtgagggacaaacattcagacaacagcaggattgttctggaatcctatgtgagggacaagcattcagacaatcgtagcagtgttctggaatcccatgtgagggacaaacattcagaccttcatagcagtgttctggaatggtatgtgatggacaaacattcagacaatcatagcattgttctggaatcctatgtgagggacaagcattcagacaatcgtagcagtgttctgtaatcccctgtgaggaacaaacgttcagacagtcgtagcattgttctggaatattatgtgagggacaaacattcagacaattgtagcagtgttccggaatcctatgtgagggacaaacattcaaacaacagcgggattgttcaggaatcctatgttatggacaaacattctgacc

SEQ ID NO: 206172 - DNA, 492 bp, Homo sapiens
gttctggaatcccgtgtgagggacaaacattcagacactggtagcagtgttctggaatccaacgtgagggacaaacattcagacaacagcaggattgttctggaatcctatgtgagggayaagcattcagacaatcgtagcagtgttctggaatcccatgtgagggacaaacattcagaccttcatagcagtgttctggaatggtatgtgatggacaaacattcagacaatcatagcattgttctggaatcctatgtgagggacaagcattcagacaatcgtagcagtgttctgtaatcccctgtgaggaacaaacgttcagacagtcgtagcattgttctggaatattatgtgagggacaaacattcagacaattgtagcagtgttccggaatcctatgtgagggacaaacattcaaacaacagcgggattgttcaggaatcctatgttatggacaaacattctgaccctcgtagcggtgttctggaattc

SEQ ID NO: 206173 - DNA, 492 bp, Homo sapiens
gttctggaatcccgtgtgagggacaaacattcagacactggtagcagtgttctggaatccaacgtgagggacaaacattcagacaacagcaggattgttctggaatcctatgtgagggacaagcattcagacaatcgtagcagtgttctggaatcccatgtgagggacaaacattcagaccttcatagcagtgttctggaatggtatgtgatggacaaacattcagacaatcatagcattgttctggaatcctatgtgagggacaagcattcagacaatygtagcagtgttctgtaatcccctgtgaggaacaaacgttcagacagtcgtagcattgttctggaatattatgtgagggacaaacattcagacaattgtagcagtgttccggaatcctatgtgagggacaaacattcaaacaacagcgggattgttcaggaatcctatgttatggacaaacattctgaccctcgtagcggtgttctggaattc

SEQ ID NO: 206174 - DNA, 225 bp, Homo sapiens
gagacaaacattacgaccccagcaacagtgttctggaatcctatgtgaaggaaartcattcagacactcgtaccagtgttctggaattctgtgtgagggacaaacattctgatgcccgtagcagtgttctgtagtcctgtgtgagggaaaaacattgagaccacagcaggagtgttccagaatcccctgtgaggaacagacattcagaccctcataggagggttc

SEQ ID NO: 206175 - DNA, 225 bp, Homo sapiens
gagacaaacattacgaccccagcaacagtgttctggaatcctatgtgaaggaaagtcattcagacactcgtaccagtgttctggaattctgtgtgagggacaaacattctgatkcccgtagcagtgttctgtagtcctgtgtgagggaaaaacattgagaccacagcaggagtgttccagaatcccctgtgaggaacagacattcagaccctcataggagggttc

SEQ ID NO: 206176 - DNA, 225 bp, Homo sapiens
gagacaaacattacgaccccagcaacagtgttctggaatcctatgtgaaggaaagtcattcagacactcgtaccagtgttctggaattctgtgtgagggacaaacattctgatgcccgtagcagtgttctgtagtcctgtgtgagggaaaaacattgagaccacagcaggagygttccagaatcccctgtgaggaacagacattcagaccctcataggagggttc

SEQ ID NO: 206177 - DNA, 583 bp, Homo sapiens
gaaatcctatgttagtgacaaacattcagacccttgtaggaatgttctggaatctatgtgagggacttgctttaagaccacagcaggagtgttctggaatctcatgtgaggtacaagcatttccactctcatagctgtgttctggaatcctatgtgatgaacaaacatttagaccccagcagcagtgttctggaatcctacgtgagggaaaaacatacagaccatcatagcagtgtattggaatcctgtgkgagggacaaacattcagacaatcgaagcagtgttctggaatcctaagagagagacaaatattcagaacacagaaggattgttctggaatcctatgtgaggagcaaacactcagaacacagcaggagtgttgtggaatcctatgtgagggacaaactttgagaccctcgtagtagtgtcctggaatcctatgtgagggacaaacatgcagacaattgtagcagtgttctggaatcctatgtgatcgacaaaccttcgaacaacagtggaagtgttctggaatcctatgttatggacacacattcagaaccttgtggcagtgttctggaattct

SEQ ID NO: 206178 - DNA, 526 bp, Homo sapiens
ttctggaaacctatgtgagggacaaacattcagaccacagcaggyatgttgtggaatcctctgtgaggaagaaacattcagaccctcgtagcagtgttctggaatcctatatgacagacaaacatttagaccccagcagcagtgttctggaatcctgtgtgagggacaaacattcacaccctcggagcagtgttctagaatcctataaagggacaaacactcagaacccagcagccgtgttctggaaccatatgtgagggacaaacactgagaacacagcaggattgttttggaatgctatgtgatggagaaacattcaggcactcgtagcagtgttctggaatcctaagtgagggacaaacattcagacaatcgtagcagtgttctggaatcctatgctagggaaaaacattcagaccccagtagcagtgttctggaatcctatgtgagggaaaaacattcaaacaacagcgggagtgttctgaaatagtatgttactgacaaacattcagacccttgtcacagt

SEQ ID NO: 206179 - DNA, 534 bp, Homo sapiens
acaaacattcagaccctcatagcagtgttctggaaacctatgtgagggacaaacattcagaccacagcaggcatgttgtggaatcctctgtgaggaagaamcattcagaccctcgtagcagtgttctggaatcctatatgacagacaaacatttagaccccagcagcagtgttctggaatcctgtgtgagggacaaacattcacaccctcggagcagtgttctagaatcctataaagggacaaacactcagaacccagcagccgtgttctggaaccatatgtgagggacaaacactgagaacacagcaggattgttttggaatgctatgtgatggagaaacattcaggcactcgtagcagtgttctggaatcctaagtgagggacaaacattcagacaatcgtagcagtgttctggaatcctatgctagggaaaaacattcagaccccagtagcagtgttctggaatcctatgtgagggaaaaacattcaaacaacagcgggagtgttctgaaatagtatgttactgacaaaca

SEQ ID NO: 206180 - DNA, 526 bp, Homo sapiens
ggaattccgtgtgatggacaaacattcagaccctcatagcagtgttctggaaacctatgtgagggacaaacattcagaccacagcaggcatgttgtggaatcctctgtgaggaagaaacattcagaccctcgtagcagtgttctggaatcctatatgacagacaaacatttagaccccagcagcagtgttctggaatcctgtgtgagggacaaacattcacaccctcggagcagtgttctrgaatcctataaagggacaaacactcagaacccagcagccgtgttctggaaccatatgtgagggacaaacactgagaacacagcaggattgttttggaatgctatgtgatggagaaacattcaggcactcgtagcagtgttctggaatcctaagtgagggacaaacattcagacaatcgtagcagtgttctggaatcctatgctagggaaaaacattcagaccccagtagcagtgttctggaatcctatgtgagggaaaaacattcaaacaacagcgggagtgttc

SEQ ID NO: 206181 - DNA, 534 bp, Homo sapiens
acaaacattcagaccctcatagcagtgttctggaaacctatgtgagggacaaacattcagaccacagcaggcatgttgtggaatcctctgtgaggaagaaacattcagaccctcgtagcagtgttctggaatcctatatgacagacaaacatttagaccccagcagcagtgttctggaatcctgtgtgagggacaaacattcacaccctcggagcagtgttctagaatcctataaagggacaaacactcagaacccagcagccgtgttctggaacyatatgtgagggacaaacactgagaacacagcaggattgttttggaatgctatgtgatggagaaacattcaggcactcgtagcagtgttctggaatcctaagtgagggacaaacattcagacaatcgtagcagtgttctggaatcctatgctagggaaaaacattcagaccccagtagcagtgttctggaatcctatgtgagggaaaaacattcaaacaacagcgggagtgttctgaaatagtatgttactgacaaaca

SEQ ID NO: 206182 - DNA, 527 bp, Homo sapiens
ttctggaaacctatgtgagggacaaacattcagaccacagcaggcatgttgtggaatcctctgtgaggaagaaacattcagaccctcgtagcagtgttctggaatcctatatgacagacaaacatttagaccccagcagcagtgttctggaatcctgtgtgagggacaaacattcacaccctcggagcagtgttctagaatcctataaagggacaaacactcagaacccagcagccgtgttctggaaccatatgtgagggacaaacactgagaacacagcaggattgttttggaawgctatgtgatggagaaacattcaggcactcgtagcagtgttctggaatcctaagtgagggacaaacattcagacaatcgtagcagtgttctggaatcctatgctagggaaaaacattcagaccccagtagcagtgttctggaatcctatgtgagggaaaaacattcaaacaacagcgggagtgttctgaaatagtatgttactgacaaacattcagacccttgtcacagtg

SEQ ID NO: 206183 - DNA, 534 bp, Homo sapiens
acaaacattcagaccctcatagcagtgttctggaaacctatgtgagggacaaacattcagaccacagcaggcatgttgtggaatcctctgtgaggaagaaacattcagaccctcgtagcagtgttctggaatcctatatgacagacaaacatttagaccccagcagcagtgttctggaatcctgtgtgagggacaaacattcacaccctcggagcagtgttctagaatcctataaagggacaaacactcagaacccagcagccgtgttctggaaccatatgtgagggacaaacactgagaacacagcaggattgttttggaatgctatgtgayggagaaacattcaggcactcgtagcagtgttctggaatcctaagtgagggacaaacattcagacaatcgtagcagtgttctggaatcctatgctagggaaaaacattcagaccccagtagcagtgttctggaatcctatgtgagggaaaaacattcaaacaacagcgggagtgttctgaaatagtatgttactgacaaaca

SEQ ID NO: 206184 - DNA, 538 bp, Homo sapiens
ttctggaaacctatgtgagggacaaacattcagaccacagcaggcatgttgtggaatcctctgtgaggaagaaacattcagaccctcgtagcagtgttctggaatcctatatgacagacaaacatttagaccccagcagcagtgttctggaatcctgtgtgagggacaaacattcacaccctcggagcagtgttctagaatcctataaagggacaaacactcagaacccagcagccgtgttctggaaccatatgtgagggacaaacactgagaacacagcaggattgttttggaatgctatgtgatggagaaacattcaggcactcgtagcagtgttctggaatcctaagtgagggacaaacattcagacaatcgtagcagtgttctggaatcctatgctagggaaaaacattcagaccccagtagcagtgttctggaatcctatgtgagggaaaaacattcaaacaacagcgggagtgttctgaaatagtatgttaytgacaaacattcagacccttgtcacagtgctctggaattc

SEQ ID NO: 206185 - DNA, 506 bp, Homo sapiens
tttgggatcccatgtgtgggaaaaacagaaaacagcgggagagtattggaatcctatgtgagggacaaaacattcagaccctctttgcagtgctgyggaatcctatgtgagggacaaactttcagaaaatcacagcagtggtctggaatcttatgtgagagacaaacattcagaactcagcaccaatgttctggaatcttatgtgagagacaaacattcagaactcagcaccaatgttctggaatcctatgtgagagacaaacattcatacaacagcgagagtgttctgcaatcctaggtaatggacaaacatttagaaaccagcagcagtgttgtggaatcctatgagaggcacaaacattcagaccttagtagagttattctggaatcccatgtgagggacaaacattcagaacctcgtcgcagttttctggaattctgtgtgaggcagaaacactctgaacccagaagcagtgttctggaatcctctatgacagacacacatg

SEQ ID NO: 206186 - DNA, 506 bp, Homo sapiens
tttgggatcccatgtgtgggaaaaacagaaaacagcgggagagtattggaatcctatgtgagggacaaaacattcagaccctctttgcagtgctgcggaatcctatgtgagggacaaactttcagaaaatcacagcagtggtctggaatcttatgtgagagacaaacattcagaactcagcaccaatgttctggaatcttatgtgagagacaaacattcagaactcagcaccaatgttctggaatcctatgtgagagacaaacattcatacaacagckagagtgttctgcaatcctaggtaatggacaaacatttagaaaccagcagcagtgttgtggaatcctatgagaggcacaaacattcagaccttagtagagttattctggaatcccatgtgagggacaaacattcagaacctcgtcgcagttttctggaattctgtgtgaggcagaaacactctgaacccagaagcagtgttctggaatcctctatgacagacacacatg

SEQ ID NO: 206187 - DNA, 415 bp, Homo sapiens
gaattctgtgtaagagccatatattgagatcctcaaagccgtgttctggaatcctacgtgagggacaaacattcagaccacaggaggattgttctggaatcctctgtgaggaaaaaacattcagaccctcgtagcagtgttctggaatcctatgtgagggacgaacctttagaccccagcagcagtgctcttgaatcctacgtgaggaaaaaacattcagacactcgtagcwttgttctcgaatcacatgtgagggacaaacattcagataatcttagccatgttctggaatcctatgtgagggacaaatattcagaccccagcagcgttctggaatcctatgtgaggaacaaacattcaaacaacagcgggagtgttgtcgaatcctatgtaacagacagactttcagaacctc

SEQ ID NO: 206188 - DNA, 391 bp, Homo sapiens
gttctggaatccccggtgaggaacaaacwttcagagcctcatatcagtgttctggaatcctatgtgacggacaaacattaagtccccagaagcagttttctggaatactgtgtgaggaacaaacattcagaccctggtagtagtgttctggaatcctatgtgagagacaaacactcagaacccaacagcagtgttttggaaccctatgtgagggtcaatcattcaggccacagcaggattatgctggagtcctatgtgagggacactcagaacatagcaggagtgttttggaatcctatgtgagggaaaaactttcagacactcgtagcagtgttctggaatcctatgtgggagacaaacattcatacaatcttagcagtgtacgggaatt

SEQ ID NO: 206189 - DNA, 411 bp, Homo sapiens
tctggaattctctgtgtgggacaaacattcagaccctcatagcagtgttctggaatccccggtgaggaacaaacattcagagcctcatatcagtgttctggaatcctatgtgacggacaaacattaagwccccagaagcagttttctggaatactgtgtgaggaacaaacattcagaccctggtagtagtgttctggaatcctatgtgagagacaaacactcagaacccaacagcagtgttttggaaccctatgtgagggtcaatcattcaggccacagcaggattatgctggagtcctatgtgagggacactcagaacatagcaggagtgttttggaatcctatgtgagggaaaaactttcagacactcgtagcagtgttctggaatcctatgtgggagacaaacattca

SEQ ID NO: 206190 - DNA, 536 bp, Homo sapiens
gttctggaatccccggtgaggaacaaacattcagagcctcatatcagtgttctggaatcctatgtgacggacaaacattaagtccccagaarcagttttctggaatactgtgtgaggaacaaacattcagaccctggtagtagtgttctggaatcctatgtgagagacaaacactcagaacccaacagcagtgttttggaaccctatgtgagggtcaatcattcaggccacagcaggattatgctggagtcctatgtgagggacactcagaacatagcaggagtgttttggaatcctatgtgagggaaaaactttcagacactcgtagcagtgttctggaatcctatgtgggagacaaacattcatacaatcttagcagtgtacgggaattctttgcgagggacaaacattcagaccccagcagcagtgttccagaatcctatgtgagctataaacattgatacaacagtgggagtgttctggaatcctatgttatggacaaacattcagaccctcgtcacagtgttctggaattc

SEQ ID NO: 206191 - DNA, 393 bp, Homo sapiens
tgttctggaatccccggtgaggaacaaacattcagagcctcatatcagtgttctggaatcctatgtgacggacaaacattaagtccccagaagcagttttctggaatactgtgtgaggaacaaacattcagaccctggtartagtgttctggaatcctatgtgagagacaaacactcagaacccaacagcagtgttttggaaccctatgtgagggtcaatcattcaggccacagcaggattatgctggagtcctatgtgagggacactcagaacatagcaggagtgttttggaatcctatgtgagggaaaaactttcagacactcgtagcagtgttctggaatcctatgtgggagacaaacattcatacaatcttagcagtgtacgggaattc

SEQ ID NO: 206192 - DNA, 392 bp, Homo sapiens
gttctggaatccccggtgaggaacaaacattcagagcctcatatcagtgttctggaatcctatgtgacggacaaacattaagtccccagaagcagttttctggaatactgtgtgaggaacaaacattcagaccctggtagtagtgttctggaatcctatgtragagacaaacactcagaacccaacagcagtgttttggaaccctatgtgagggtcaatcattcaggccacagcaggattatgctggagtcctatgtgagggacactcagaacatagcaggagtgttttggaatcctatgtgagggaaaaactttcagacactcgtagcagtgttctggaatcctatgtgggagacaaacattcatacaatcttagcagtgtacgggaattc

SEQ ID NO: 206193 - DNA, 536 bp, Homo sapiens
gttctggaatccccggtgaggaacaaacattcagagcctcatatcagtgttctggaatcctatgtgacggacaaacattaagtccccagaagcagttttctggaatactgtgtgaggaacaaacattcagaccctggtagtagtgttctggaatcctatgtgagagacaaacactcagaacccaacagcagtgttttggaaccctatgtgagggtcaatcattcaggccacagcaggattatgctggagtcctatgtgagggacactcagaacatagcaggagtgttttggaatcctatgtgagggaaaaactttcagacactcgtagcagtgttctggaatcctatgtgggagacaaacattcatacaatcttagcagtgtacggkaattctttgcgagggacaaacattcagaccccagcagcagtgttccagaatcctatgtgagctataaacattgatacaacagtgggagtgttctggaatcctatgttatggacaaacattcagaccctcgtcacagtgttctggaattc

SEQ ID NO: 206194 - DNA, 597 bp, Homo sapiens
catcagagcagtgttctggaatcctttgtgagggacaaacattcagaccacagcaagagtcttctggaatccactgtgaggaacaaacattcagaacctcatagcagtgttctggaatcctatgtgatggacaaacatttagacctcagaagcagtgttctgtaatcctgtgagagacaaacattcagacactcgttgcagtgtacaggaatcctgtgtgagggaaaagaactcagaacycagcaacagtgtcctggaaccctatgtgagggacaaacattcaggccacagcaggattgttctggaatcctacgtgagggacaaacactcaaacacagcgggagtgttttggaatccaatatgagggagaaacattcagaccctcatagcagtgttctggaatcctatgtgagggacaaacattcagaaaatcgtagccatgttctggaatctcaagaaagggaaataaattcagaccccagcagcagtgttttgtaatcctatgtgagggagaaacattgaaccaagatcgggagtgttctgcaatccctggttatggacaaatattcagaacctcgtctcagtgctctggaattc

SEQ ID NO: 206195 - DNA, 606 bp, Homo sapiens
tcgaattctgtgtgaaggacaaagattcagaccatcagagcagtgttctggaatcctttgtgagggacaaacattcagaccacagcaagagtcttctggaatccactgtgaggaacaaacattcagaacctcatagcagtgttctggaatcctatgtgatggacaaacatttagacctcagaagcagtgttctgtaatcctgtgagagacaaacattcagacactcgttgcagtgtacaggaatcctgtgtgagggaaaagaactcagaacccagcaacagtgtcctggaaccctatgtgagggacaaacattcaggccacagcaggattgttctggaatcctaygtgagggacaaacactcaaacacagcgggagtgttttggaatccaatatgagggagaaacattcagaccctcatagcagtgttctggaatcctatgtgagggacaaacattcagaaaatcgtagccatgttctggaatctcaagaaagggaaataaattcagaccccagcagcagtgttttgtaatcctatgtgagggagaaacattgaaccaagatcgggagtgttctgcaatccctggttatggacaaatattcagaac

SEQ ID NO: 206196 - DNA, 598 bp, Homo sapiens
ccatcagagcagtgttctggaatcctttgtgagggacaaacattcagaccacagcaagagtcttctggaatccactgtgaggaacaaacattcagaacctcatagcagtgttctggaatcctatgtgatggacaaacatttagacctcagaagcagtgttctgtaatcctgtgagagacaaacattcagacactcgttgcagtgtacaggaatcctgtgtgagggaaaagaactcagaacccagcaacagtgtcctggaaccctatgtgagggacaaacattcaggccacagcaggattgttctggaatcctacgtgagggacaaacactcaaacacagcgggagtgttttggaatccaatatgagggagaaacattcagaccctcatagcagtgttctggaatcctatgtgagggacaaacattcagaaaatcgtagccatgttctggaatctcaagaaagggaaataaattcagaccccagcagcartgttttgtaatcctatgtgagggagaaacattgaaccaagatcgggagtgttctgcaatccctggttatggacaaatattcagaacctcgtctcagtgctctggaattc

SEQ ID NO: 206197 - DNA, 412 bp, Homo sapiens
gaattctatgtgaggtagaaacagtgagaacccagcagcagtattctggaatcctatgtgagggaaaatcattcagaccccagcaggagtgttctggaatcctatgggagggacaatcattcagacaatcgtagcagtgttctggaatcctatgtgaggggcaaacatrcagacacttgtagcagtgttctggaatcctatgtaagtgacaaatattcagacccttgtagcatttttctggaatcctatgtgagggacaaacattgagacaatcgtagctgtgttctcgaatcctatgtgagggagaaacattcagactacaacagcagtgttctggaatcgtatgtgagggacaaacattccaacaacagagtgagtgttctggaatcctaagttacggacatacattcag

SEQ ID NO: 206198 - DNA, 412 bp, Homo sapiens
gaattctatgtgaggtagaaacagtgagaacccagcagcagtattctggaatcctatgtgagggaaaatcattcagaccccagcaggagtgttctggaatcctatgggagggacaatcattcagacaatcgtagcagtgttctggaatcctatgtgaggggcaaacatacagacrcttgtagcagtgttctggaatcctatgtaagtgacaaatattcagacccttgtagcatttttctggaatcctatgtgagggacaaacattgagacaatcgtagctgtgttctcgaatcctatgtgagggagaaacattcagactacaacagcagtgttctggaatcgtatgtgagggacaaacattccaacaacagagtgagtgttctggaatcctaagttacggacatacattcag

SEQ ID NO: 206199 - DNA, 412 bp, Homo sapiens
gaattctatgtgaggtagaaacagtgagaacccagcagcagtattctggaatcctatgtgagggaaaatcattcagaccccagcaggagtgttctggaatcctatgggagggacaatcattcagacaatcgtagcagtgttctggaatcctatgtgaggggcaaacatacagacacttgtagcagtgttctggaatcctatgtaagtgacaaatattcagacccttgtagcattkttctggaatcctatgtgagggacaaacattgagacaatcgtagctgtgttctcgaatcctatgtgagggagaaacattcagactacaacagcagtgttctggaatcgtatgtgagggacaaacattccaacaacagagtgagtgttctggaatcctaagttacggacatacattcag

SEQ ID NO: 206200 - DNA, 412 bp, Homo sapiens
gaattctatgtgaggtagaaacagtgagaacccagcagcagtattctggaatcctatgtgagggaaaatcattcagaccccagcaggagtgttctggaatcctatgggagggacaatcattcagacaatcgtagcagtgttctggaatcctatgtgaggggcaaacatacagacacttgtagcagtgttctggaatcctatgtaagtgacaaatattcagacccttgtagcatttttctggaatcctatgtgagggacaaacattgagacaatcgtagctgtgttctcgaatcctatgtgagggagaaacattcagactacaacagcagtgttctggaatcgtatgtgagggacaaacattycaacaacagagtgagtgttctggaatcctaagttacggacatacattcag

SEQ ID NO: 206201 - DNA, 404 bp, Homo sapiens
gcagcagtattctggaatcctatgtgagggaaaatcattcagaccccagcaggagtgttctggaatcctatgggagggacaatcattcagacaatcgtagcagtgttctggaatcctatgtgaggggcaaacatacagacacttgtagcagtgttctggaatcctatgtaagtgacaaatattcagacccttgtagcatttttctggaatcctatgtgagggacaaacattgagacaatcgtagctgtgttctcgaatcctatgtgagggagaaacattcagactacaacagcagtgttctggaatcgtatgtgagggacaaacattccaacaacagagtgagtgttctggaatcctaagytacggacatacattcagaaattcgtctcagtgatctggaattc

SEQ ID NO: 206202 - DNA, 387 bp, Homo sapiens
ttttctggaatcctatgtgagggacaaacattgagacaatcgtagctgtgttctcgaatcctatgtgagggagaaacattcagactacaacagcagtgttctggaatcgtatgtgagggacaaacattccaacaacagagtgagtgttctggaatcctaagttacggacatacattcagaaattcgtctcagtgatctggaattctatgtgagggtgaaacactcagaaaccggcaacaatgttcttaaatcctatgtgacagacatacatgtagacggtaacagcagtgtcctgtaattctgtgtgatggaaaaacwttcagacactcatagcagtgttctggaatcctatttgagggacaaacattcagaccacagctggagtgt

SEQ ID NO: 206203 - DNA, 623 bp, Homo sapiens
tgtagcagtgttctggaaccctatgtgacagacctacttgtagactccagcagcagtgttctggaaccctatgtgagggacaatcattccgaccctcgtggcagtgttctggaattttgtgtgagggataaacattcagaccccagcgcgagtgttctggaatcccacgtgagtgacaagcattcaaaaaatcttagcagtgttctggaatcctatatgagagacaaactttcagaccctcgtagcagtattctggaatcctatgtgggggcaaacattcaatcatagcagtgttcaggaatcytatgtgagggacaaacatttagactgtcgtagcagtgttctggaatcctacgtgagggacaagcattgagacaatcgtggcagtgttctgggatcctatgtgagggacaaacattcagacaattgtagcagggttctggaatcctatgtgagggacaaacattcaaaaaacagagagagtgttctggaaccctatgttacggacaaacattcagacaatcgtagcagggttctggaatcctatgtgagggacaaacattcaaaaaacagagagattgttctggaaccctatgttacagacaaacattgagaccatcgtt

SEQ ID NO: 206204 - DNA, 623 bp, Homo sapiens
tgtagcagtgttctggaaccctatgtgacagacctacttgtagactccagcagcagtgttctggaaccctatgtgagggacaatcattccgaccctcgtggcagtgttctggaattttgtgtgagggataaacattcagaccccagcgcgagtgttctggaatcccacgtgagtgacaagcattcaaaaaatcttagcagtgttctggaatcctatatgagagacaaactttcagaccctcgtagcagtattctggaatcctatgtgggggcaaacattcaatcatagcagtgttcaggaatcctatgtgagggacaaacatttagactgtcgtagcagtgttctggaatcctaygtgagggacaagcattgagacaatcgtggcagtgttctgggatcctatgtgagggacaaacattcagacaattgtagcagggttctggaatcctatgtgagggacaaacattcaaaaaacagagagagtgttctggaaccctatgttacggacaaacattcagacaatcgtagcagggttctggaatcctatgtgagggacaaacattcaaaaaacagagagattgttctggaaccctatgttacagacaaacattgagaccatcgtt

SEQ ID NO: 206205 - DNA, 623 bp, Homo sapiens
tgtagcagtgttctggaaccctatgtgacagacctacttgtagactccagcagcagtgttctggaaccctatgtgagggacaatcattccgaccctcgtggcagtgttctggaattttgtgtgagggataaacattcagaccccagcgcgagtgttctggaatcccacgtgagtgacaagcattcaaaaaatcttagcagtgttctggaatcctatatgagagacaaactttcagaccctcgtagcagtattctggaatcctatgtgggggcaaacattcaatcatagcagtgttcaggaatcctatgtgagggacaaacatttagactgtcgtagcagtgttctggaatcctacgtgagggacaagcattgagacaatcgtggcagtgttctgggatcctatgtgagggacaaacattcagacaatygtagcagggttctggaatcctatgtgagggacaaacattcaaaaaacagagagagtgttctggaaccctatgttacggacaaacattcagacaatcgtagcagggttctggaatcctatgtgagggacaaacattcaaaaaacagagagattgttctggaaccctatgttacagacaaacattgagaccatcgtt

SEQ ID NO: 206206 - DNA, 578 bp, Homo sapiens
aatcccatgtgagtgacaaacattcagaccacagcagaagtgttctggaatcccctgtgaggaacaaacattcagactctcgtagtagtgttctrgaatcctatttgaaggacaaacatttaggccccagcagcagggtccttgaatcctatgtgagggacaaatattcagaccctggtagcactgttctggctttctttctgagggacaaacattcagtccacagcaggagtgttctggaatcctaagtgagggacaaacattcacaccctcgtagcagtgttctggaatcctatgtgagggacaaacattcaaataaatacttgagtgtttttgaatcctatgttacggacaaacattcaaaccctcgtcgcagtgttctggaattgtttgtgagtgagaaacactcagaaaccagcagcagtgttctggaatcctatgtttcggacataaatgtagaccccagcagcagtgttctggaatcctaagtgagggacaaacattcagaccctagcagcagcattctggaatcctattgagggacaaaaattctgaccctcatctcagtggtctggaat

SEQ ID NO: 206207 - DNA, 580 bp, Homo sapiens
aatcccatgtgagtgacaaacattcagaccacagcagaagtgttctggaatcccctgtgaggaacaaacattcagactctcgtagtagtgttctggaatcctatttgaaggacaaacatttaggccccagcagcagggtccttgaatcctatgtgagggacaaatattcagaccctggtagcactgytctggctttctttctgagggacaaacattcagtccacagcaggagtgttctggaatcctaagtgagggacaaacattcacaccctcgtagcagtgttctggaatcctatgtgagggacaaacattcaaataaatacttgagtgtttttgaatcctatgttacggacaaacattcaaaccctcgtcgcagtgttctggaattgtttgtgagtgagaaacactcagaaaccagcagcagtgttctggaatcctatgtttcggacataaatgtagaccccagcagcagtgttctggaatcctaagtgagggacaaacattcagaccctagcagcagcattctggaatcctattgagggacaaaaattctgaccctcatctcagtggtctggaattc

SEQ ID NO: 206208 - DNA, 578 bp, Homo sapiens
aatcccatgtgagtgacaaacattcagaccacagcagaagtgttctggaatcccctgtgaggaacaaacattcagactctcgtagtagtgttctggaatcctatttgaaggacaaacatttaggccccagcagcagggtccttgaatcctatgtgagggacaaatattcagaccctggtagcactgttctggctttctttctgagggacaaacatwcagtccacagcaggagtgttctggaatcctaagtgagggacaaacattcacaccctcgtagcagtgttctggaatcctatgtgagggacaaacattcaaataaatacttgagtgtttttgaatcctatgttacggacaaacattcaaaccctcgtcgcagtgttctggaattgtttgtgagtgagaaacactcagaaaccagcagcagtgttctggaatcctatgtttcggacataaatgtagaccccagcagcagtgttctggaatcctaagtgagggacaaacattcagaccctagcagcagcattctggaatcctattgagggacaaaaattctgaccctcatctcagtggtctggaat

SEQ ID NO: 206209 - DNA, 580 bp, Homo sapiens
aatcccatgtgagtgacaaacattcagaccacagcagaagtgttctggaatcccctgtgaggaacaaacattcagactctcgtagtagtgttctggaatcctatttgaaggacaaacatttaggccccagcagcagggtccttgaatcctatgtgagggacaaatattcagaccctggtagcactgttctggctttctttctgagggacaaacattcagtccacagcaggagtgttctggaatcctaagtgagggacaaacattcacaccctcgtagcaktgttctggaatcctatgtgagggacaaacattcaaataaatacttgagtgtttttgaatcctatgttacggacaaacattcaaaccctcgtcgcagtgttctggaattgtttgtgagtgagaaacactcagaaaccagcagcagtgttctggaatcctatgtttcggacataaatgtagaccccagcagcagtgttctggaatcctaagtgagggacaaacattcagaccctagcagcagcattctggaatcctattgagggacaaaaattctgaccctcatctcagtggtctggaattc

SEQ ID NO: 206210 - DNA, 578 bp, Homo sapiens
aacattcagagcctcatagcagtgttctggaatcctatgtgattgacaaacattcagacaacagcaggagtgttctggaatcatctgtgaggaacaaacattcagacaacagmaggagtgttctggaatcatctgtgaggaacaaacattcagaccctcttagcagtgttctgtaatcctatgtgaaatcatcctatgtgacagacaaacatttagaccccagcagcagtgttctggaatcctatgtgaggtagaaacattcagaccctcatagcagtgttctggaatcctacatgagcgacaaacacactgaaaccagcagcagtgttctggaaccctatgtgagggataaacattcagaccatgccaggattgttctggaaacctatgtgagggaccaacactccgaacccagcagaaaggttttgaaatcctgtgtgagggacaaacgtttagactctcgtagcagtgttctggaatcatatgtgagggacaaatatacagaccatagcaggagtgttctggaatcctatgtgagggacaaacattcagaccctcatagcagtgatctggaattc

SEQ ID NO: 206211 - DNA, 578 bp, Homo sapiens
aacattcagagcctcatagcagtgttctggaatcctatgtgattgacaaacattcagacaacagcaggagtgttctggaatcatctgtgaggaacaaacattcagacaacagcargagtgttctggaatcatctgtgaggaacaaacattcagaccctcttagcagtgttctgtaatcctatgtgaaatcatcctatgtgacagacaaacatttagaccccagcagcagtgttctggaatcctatgtgaggtagaaacattcagaccctcatagcagtgttctggaatcctacatgagcgacaaacacactgaaaccagcagcagtgttctggaaccctatgtgagggataaacattcagaccatgccaggattgttctggaaacctatgtgagggaccaacactccgaacccagcagaaaggttttgaaatcctgtgtgagggacaaacgtttagactctcgtagcagtgttctggaatcatatgtgagggacaaatatacagaccatagcaggagtgttctggaatcctatgtgagggacaaacattcagaccctcatagcagtgatctggaattc

SEQ ID NO: 206212 - DNA, 591 bp, Homo sapiens
gttctggaatcctatgggatggacacacatgtagaccccagcagcattattctggaatcctatgagacagacaaacattcagaccctagcaacagtgttctggaatcctagaatagggataatcattcagaccctggtagcagtattctggaattctgtgtgaggaacaaacattcagagcctcatagcagtgttctggaatcctatgtgattgacaaacattcagacaacagcaggagtgttctggaatcatctgtgaggaacaaacattcagacaacagcaggagtgttctggaatcatctgtgaggaacaaacattcagaccctcttagcagtgttctgtaatcctatgtgaaatcatcctatgtgacagacaaacatttagaccccagcagcagtgttctggaatcctatgtgaggkagaaacattcagaccctcatagcagtgttctggaatcctacatgagcgacaaacacactgaaaccagcagcagtgttctggaaccctatgtgagggataaacattcagaccatgccaggattgttctggaaacctatgtgagggaccaacactccgaacccagcagaaag

SEQ ID NO: 206213 - DNA, 510 bp, Homo sapiens
gaattctgtgtgagtgagaaacattcagacccttgtagaagtgttctggagccctgtgtgagggacaaacattcagaccacagcaggagtgttctggaatccaccrtgaggaacaaacattccgaccctcgtagcagtgttctggaatcctaagtgatggataaacatttagacccagtagcagtgttctggaatccccagtgaggaacaaacattcagacaatcgtagcagttttctggtattctatgtgagggacaaacattcagaccccagcagcagtgttctggaatcctatgtgtgggacatacattcagaccctcgtaggaatgttctggaatcctttgtgagggacatgtattaagataatcatagcagtgttccagaatcctatgtgagggacaaacattcagaccccaggagcagtgttctggaatcctatgtaagggagaaacattcaaccaacagcgggagtgttctgaaatcctatgttaaggacaaacattcagacc

SEQ ID NO: 206214 - DNA, 482 bp, Homo sapiens
gaattctgtgtgagtgagaaacattcagacccttgtagaagtgttctggagccctgtgtgagggacaaacattcagaccacagcaggagtgttctggaatccaccgtgaggaacaaacattccgaccctcgtagcagtgttctggaatcctaagtgatggataaacatttagacccagtagcagtgttctggaatccccagtgaggaacaaacattcagacaatcgtagcagttttctggtattctatgtgagggacaaacattcagaccccagcagcagtgttctggaatcctatgtgtgggacatacattcagaccctcgtaggaatgttctggaatcctttgtgagggacatgtattaagataatcatagcagtgttccagaatcctatgtgagggacaaacattcagaccccaggagcagtgttctggaatcctatgtragggagaaacattcaaccaacagcgggagtgttctgaaa

SEQ ID NO: 206215 - DNA, 364 bp, Homo sapiens
ggaattctgtgtgagggaaaaactttcagacaatcatggcagtgttccagaatcctacgtgagggtcaaactttcagaacacagaagtagtgatctggaatcccctgtgaggaataaacattcagaaccctgtagcagtaacctggaatccgatgtgacggacaaacctttagaccccagcagcattgatctggaatcctatttgagggacaatcattcagaccctctcagcagtattctgtcatcctatgtgcgggagaaacattcagaccasagtgggggtgttctgtaataatatgtgacaaacatttcgatcctcacagaagtgttctggaatattatatgagggacaaaggttcagaca

SEQ ID NO: 206216 - DNA, 364 bp, Homo sapiens
ggaattctgtgtgagggaaaaactttcagacaatcatggcagtgttccagaatcctacgtgagggtcaaactttcagaacacagaagtagtgatctggaatcccctgtgaggaataaacattcagaaccctgtagcagtaacctggaatccgatgtgacggacaaacctttagaccccagcagcattgatctggaatcctatttgagggacaatcattcagaccctctcagcagtattctgtcatcctatgtgcgggagaaacattcagaccagagtgggggtgttctgtaataatatgtgacaaacatttcratcctcacagaagtgttctggaatattatatgagggacaaaggttcagaca

SEQ ID NO: 206217 - DNA, 215 bp, Homo sapiens
aatctcaaatactaaaatcrtaaataaaagaggtgacagtacaacagatgccacagaaatgaaaaaaattacaagagactaatgtgagcaaccgtatgccacaaaactgggcaacctagaataaatttataaattcctagaaacacaaaccaccatactgaatcacggagaaataaaaaatccaaagagacctgtaactagtaagaagattcaac

SEQ ID NO: 206218 - DNA, 571 bp, Homo sapiens
aataacaattttaaaactcacagctatattaagaaaaaaagagaaatctcaaatactaaaatcgtaaataaaagaggtgacagtacaacagatgccacagaaatgaaaaaaattamaagagactaatgtgagcaaccgtatgccacaaaactgggcaacctagaataaatttataaattcctagaaacacaaaccaccatactgaatcacggagaaataaaaaatccaaagagacctgtaactagtaagaagattcaaccagtaatcaaaaaccccccaaaaaagaaaattccaggtccagataacttcactggagaattttaccaaacatttcaagaagaattaatgccaatcctctgcaaaatattccaaaaatgttcaaaaaccagaaggggacattccaatccattctatcaggtcaacatttatctggttccagagccagatgaacaccttttgtaataaaaagactcaaagaattagtaatatatggaaactcctcagtaaataaagattgtacatgaaaagctcacagctaacatcatactcaatggtgaaaaactaaaatctt

SEQ ID NO: 206219 - DNA, 215 bp, Homo sapiens
aatctcaaatactaaaatcgtaaataaaagaggtgacagtacaacagatgccacagaaatgaaaaaaattacaagagactaatgtgagcaaccrtatgccacaaaactgggcaacctagaataaatttataaattcctagaaacacaaaccaccatactgaatcacggagaaataaaaaatccaaagagacctgtaactagtaagaagattcaac

SEQ ID NO: 206220 - DNA, 285 bp, Homo sapiens
cggggtttgattgtggcaaggatgctgctggtgtcaaaaccacaacgtgggaagcacagaaccactagttggttttcagtgtttcagtgcatacaattcctaatawatctggccaagaaaacctgtaagttcttagattgtcccaaaggtggcgcatgaaatcaaagcaggagaacagtttcctacgaggtgtagcctgggaaagttgggggtgactgatggaaaggaggagtgaagctccgccctttccgctgctaggctgcgcccgaggctatttaaacccac

SEQ ID NO: 206221 - DNA, 285 bp, Homo sapiens
cggggtttgattgtggcaaggatgctgctggtgtcaaaaccacaacgtgggaagcacagaaccactagttggttttcagtgtttcagtgcatacaattcctaataaatctggccaagaaaacytgtaagttcttagattgtcccaaaggtggcgcatgaaatcaaagcaggagaacagtttcctacgaggtgtagcctgggaaagttgggggtgactgatggaaaggaggagtgaagctccgccctttccgctgctaggctgcgcccgaggctatttaaacccac

SEQ ID NO: 206222 - DNA, 285 bp, Homo sapiens
cggggtttgattgtggcaaggatgctgctggtgtcaaaaccacaacgtgggaagcacagaaccactagttggttttcagtgtttcagtgcatacaattcctaataaatctggccaagaaaacctgtaagttcttagattgtcccaaaggtggcgcatgaaatcaaagcaggagaacagtttcctacgaggtgtagcctgggaaasttgggggtgactgatggaaaggaggagtgaagctccgccctttccgctgctaggctgcgcccgaggctatttaaacccac

SEQ ID NO: 206223 - DNA, 323 bp, Homo sapiens
acaaacaacagggtaaaaggcaaactgtagaataaaagaaaataccagttgagtgtcccttatttgaaatgcttgggatgtgtttcagattttgtaatatttgcattattcttactggttragcatctcgaattcaaacacctgagtctgagatgctccaataagcatttcctttgagtgtcatgttggcactcaaaaagtttcagaatttggagcatttgggatttcagatttttggatcagagacattcaacctatagttgcacatcatgtatctcataagaagtgaatattcagaatacgtaaagtactcctacagagag

SEQ ID NO: 206224 - DNA, 323 bp, Homo sapiens
acaaacaacagggtaaaaggcaaactgtagaataaaagaaaataccagttgagtgtcccttatttgaaatgcttgggatgtgtttcagattttgtaatatttgcattattcttactggttaagsatctcgaattcaaacacctgagtctgagatgctccaataagcatttcctttgagtgtcatgttggcactcaaaaagtttcagaatttggagcatttgggatttcagatttttggatcagagacattcaacctatagttgcacatcatgtatctcataagaagtgaatattcagaatacgtaaagtactcctacagagag

SEQ ID NO: 206225 - DNA, 323 bp, Homo sapiens
acaaacaacagggtaaaaggcaaactgtagaataaaagaaaataccagttgagtgtcccttatttgaaatgcttgggatgtgtttcagattttgtaatatttgcattattcttactggttaagcatctcraattcaaacacctgagtctgagatgctccaataagcatttcctttgagtgtcatgttggcactcaaaaagtttcagaatttggagcatttgggatttcagatttttggatcagagacattcaacctatagttgcacatcatgtatctcataagaagtgaatattcagaatacgtaaagtactcctacagagag

SEQ ID NO: 206226 - DNA, 323 bp, Homo sapiens
acaaacaacagggtaaaaggcaaactgtagaataaaagaaaataccagttgagtgtcccttatttgaaatgcttgggatgtgtttcagattttgtaatatttgcattattcttactggttaagcatctcgaattcaaacacctgagtctgmgatgctccaataagcatttcctttgagtgtcatgttggcactcaaaaagtttcagaatttggagcatttgggatttcagatttttggatcagagacattcaacctatagttgcacatcatgtatctcataagaagtgaatattcagaatacgtaaagtactcctacagagag

SEQ ID NO: 206227 - DNA, 516 bp, Homo sapiens
  misc_feature (1)...(516): n = A,T,C or G
nnnnnnnnntctttttttttgtgtgtgacagggttttactctgtggctcaggctggagtaattgcagcctcaacctcatgctcratcaaacctccacctcagactcctgactagctgggactacaggtgcatgccaccatgtccagctaattcttgtattttttttttgtaaagatgaggttttgccatgttgccttgacgtcctgggctcaagcaatccacacaacttggcctcccaagttgttgggatgacaggtgtgagccactgcacctggccaagtttcagtcttcttgctgatggagggacttgccttaatgtaaggtggtggttgctgagcgttggggtggctgtggcaatttcttaaaataagacaacattgaagtttgctgtgtcaattgactctctgtttcacaaaagaattatctgtagcatacgatgttgtttgatagctttttacccacagtagaactttcaaaattggattcaatcctgtcagaccttcgtactgctgtacc

SEQ ID NO: 206228 - DNA, 516 bp, Homo sapiens
  misc_feature (1)...(516): n = A,T,C or G
nnnnnnnnntctttttttttgtgtgtgacagggttttactctgtggctcaggctggagtaattgcagcctcaacctcatgctcgatcaaaccyccacctcagactcctgactagctgggactacaggtgcatgccaccatgtccagctaattcttgtattttttttttgtaaagatgaggttttgccatgttgccttgacgtcctgggctcaagcaatccacacaacttggcctcccaagttgttgggatgacaggtgtgagccactgcacctggccaagtttcagtcttcttgctgatggagggacttgccttaatgtaaggtggtggttgctgagcgttggggtggctgtggcaatttcttaaaataagacaacattgaagtttgctgtgtcaattgactctctgtttcacaaaagaattatctgtagcatacgatgttgtttgatagctttttacccacagtagaactttcaaaattggattcaatcctgtcagaccttcgtactgctgtacc

SEQ ID NO: 206229 - DNA, 516 bp, Homo sapiens
  misc_feature (1)...(516): n = A,T,C or G
nnnnnnnnntctttttttttgtgtgtgacagggttttactctgtggctcaggctggagtaattgcagcctcaacctcatgctcgatcaaacctccacctcagactcctgactagctgggactacaggtgcatgccaccrtgtccagctaattcttgtattttttttttgtaaagatgaggttttgccatgttgccttgacgtcctgggctcaagcaatccacacaacttggcctcccaagttgttgggatgacaggtgtgagccactgcacctggccaagtttcagtcttcttgctgatggagggacttgccttaatgtaaggtggtggttgctgagcgttggggtggctgtggcaatttcttaaaataagacaacattgaagtttgctgtgtcaattgactctctgtttcacaaaagaattatctgtagcatacgatgttgtttgatagctttttacccacagtagaactttcaaaattggattcaatcctgtcagaccttcgtactgctgtacc

SEQ ID NO: 206230 - DNA, 520 bp, Homo sapiens
tagctttatgaaatatatttttaagtgataagacttgaaakttgaaattattctgtgatccaagggcactagaatgaatgttgggttagtaggcatgaaaacaatattcagctctttatacatctctgtaaaagcccttgagtaccaggggcattgtcagtgagcggtaatactttgaagtaatcttatttcttgagcagtaggtgtcaacagtgggcttaagatattcagtaaaccatatttgtaaaccgatagtctgtcatccaggctttgttcccatttgtagagtacaggcagagctgtgttttatcataattcttcagggcccttggattttcagaatagtaaattatcattggtttcaagttaacatcaccaactgcattagcccttaacaaaagagtcagcatgtcctttgaagccttaaagccaggcatcaactcctctctagctgggaacatcctagatggcatctccttctagtagaaggctgttttgtctccattgcaaatctgtttag

SEQ ID NO: 206231 - DNA, 312 bp, Homo sapiens
tatatttttaagtgataagacttgaaagttgaaattattctktgatccaagggcactagaatgaatgttgggttagtaggcatgaaaacaatattcagctctttatacatctctgtaaaagcccttgagtaccaggggcattgtcagtgagcggtaatactttgaagtaatcttatttcttgagcagtaggtgtcaacagtgggcttaagatattcagtaaaccatatttgtaaaccgatagtctgtcatccaggctttgttcccatttgtagagtacaggcagagctgtgttttatcataattcttcaggg

SEQ ID NO: 206232 - DNA, 312 bp, Homo sapiens
tatatttttaagtgataagacttgaaagttgaaattattctgtgatccaagggcacyagaatgaatgttgggttagtaggcatgaaaacaatattcagctctttatacatctctgtaaaagcccttgagtaccaggggcattgtcagtgagcggtaatactttgaagtaatcttatttcttgagcagtaggtgtcaacagtgggcttaagatattcagtaaaccatatttgtaaaccgatagtctgtcatccaggctttgttcccatttgtagagtacaggcagagctgtgttttatcataattcttcaggg

SEQ ID NO: 206233 - DNA, 503 bp, Homo sapiens
tttatgaaatatatttttaagtgataagacttgaaagttgaaattattctgtgatccaagggcactagaatgaatgttgggttagtaggcatgaaaayaatattcagctctttatacatctctgtaaaagcccttgagtaccaggggcattgtcagtgagcggtaatactttgaagtaatcttatttcttgagcagtaggtgtcaacagtgggcttaagatattcagtaaaccatatttgtaaaccgatagtctgtcatccaggctttgttcccatttgtagagtacaggcagagctgtgttttatcataattcttcagggcccttggattttcagaatagtaaattatcattggtttcaagttaacatcaccaactgcattagcccttaacaaaagagtcagcatgtcctttgaagccttaaagccaggcatcaactcctctctagctgggaacatcctagatggcatctccttctagtagaaggctgttttgtctccattg

SEQ ID NO: 206234 - DNA, 494 bp, Homo sapiens
aaagttgaaattattctgtgatccaagggcactagaatgaatgttgggttagtaggcatgaaaacaatattcagctctttatacatctctgtaaawgcccttgagtaccaggggcattgtcagtgagcggtaatactttgaagtaatcttatttcttgagcagtaggtgtcaacagtgggcttaagatattcagtaaaccatatttgtaaaccgatagtctgtcatccaggctttgttcccatttgtagagtacaggcagagctgtgttttatcataattcttcagggcccttggattttcagaatagtaaattatcattggtttcaagttaacatcaccaactgcattagcccttaacaaaagagtcagcatgtcctttgaagccttaaagccaggcatcaactcctctctagctgggaacatcctagatggcatctccttctagtagaaggctgttttgtctccattgcaaatctgtttagtgtagccatct

SEQ ID NO: 206235 - DNA, 422 bp, Homo sapiens
aagttgaaattattctgtgatccaagggcactagaatgaatgttgggttagtaggcatgaaaacaatattcagctctttatacatctctgtaaaagcccttgagtacsaggggcattgtcagtgagcggtaatactttgaagtaatcttatttcttgagcagtaggtgtcaacagtgggcttaagatattcagtaaaccatatttgtaaaccgatagtctgtcatccaggctttgttcccatttgtagagtacaggcagagctgtgttttatcataattcttcagggcccttggattttcagaatagtaaattatcattggtttcaagttaacatcaccaactgcattagcccttaacaaaagagtcagcatgtcctttgaagccttaaagccaggcatcaactcctctctagctgggaaca

SEQ ID NO: 206236 - DNA, 489 bp, Homo sapiens
aaagttgaaattattctgtgatccaagggcactagaatgaatgttgggttagtaggcatgaaaacaatattcagctctttatacatctctgtaaaagcccttgagtaccagrggcattgtcagtgagcggtaatactttgaagtaatcttatttcttgagcagtaggtgtcaacagtgggcttaagatattcagtaaaccatatttgtaaaccgatagtctgtcatccaggctttgttcccatttgtagagtacaggcagagctgtgttttatcataattcttcagggcccttggattttcagaatagtaaattatcattggtttcaagttaacatcaccaactgcattagcccttaacaaaagagtcagcatgtcctttgaagccttaaagccaggcatcaactcctctctagctgggaacatcctagatggcatctccttctagtagaaggctgttttgtctccattgcaaatctgtttagtgtagc

SEQ ID NO: 206237 - DNA, 503 bp, Homo sapiens
tttatgaaatatatttttaagtgataagacttgaaagttgaaattattctgtgatccaagggcactagaatgaatgttgggttagtaggcatgaaaacaatattcagctctttatacatctctgtaaaagcccttgagtaccaggggcattgtcagtgagyggtaatactttgaagtaatcttatttcttgagcagtaggtgtcaacagtgggcttaagatattcagtaaaccatatttgtaaaccgatagtctgtcatccaggctttgttcccatttgtagagtacaggcagagctgtgttttatcataattcttcagggcccttggattttcagaatagtaaattatcattggtttcaagttaacatcaccaactgcattagcccttaacaaaagagtcagcatgtcctttgaagccttaaagccaggcatcaactcctctctagctgggaacatcctagatggcatctccttctagtagaaggctgttttgtctccattg

SEQ ID NO: 206238 - DNA, 489 bp, Homo sapiens
aaagttgaaattattctgtgatccaagggcactagaatgaatgttgggttagtaggcatgaaaacaatattcagctctttatacatctctgtaaaagcccttgagtaccaggggcattgtcagtgagcggtaatactttgaagtaatcttatttcttgagcagtaggtgtcaacagtgggcttmagatattcagtaaaccatatttgtaaaccgatagtctgtcatccaggctttgttcccatttgtagagtacaggcagagctgtgttttatcataattcttcagggcccttggattttcagaatagtaaattatcattggtttcaagttaacatcaccaactgcattagcccttaacaaaagagtcagcatgtcctttgaagccttaaagccaggcatcaactcctctctagctgggaacatcctagatggcatctccttctagtagaaggctgttttgtctccattgcaaatctgtttagtgtagc

SEQ ID NO: 206239 - DNA, 520 bp, Homo sapiens
tagctttatgaaatatatttttaagtgataagacttgaaagttgaaattattctgtgatccaagggcactagaatgaatgttgggttagtaggcatgaaaacaatattcagctctttatacatctctgtaaaagcccttgagtaccaggggcattgtcagtgagcggtaatactttgaagtaatcttatttcttgagcagtaggtgtcaacagtgggcttaagatattcartaaaccatatttgtaaaccgatagtctgtcatccaggctttgttcccatttgtagagtacaggcagagctgtgttttatcataattcttcagggcccttggattttcagaatagtaaattatcattggtttcaagttaacatcaccaactgcattagcccttaacaaaagagtcagcatgtcctttgaagccttaaagccaggcatcaactcctctctagctgggaacatcctagatggcatctccttctagtagaaggctgttttgtctccattgcaaatctgtttag

SEQ ID NO: 206240 - DNA, 490 bp, Homo sapiens
gaaagttgaaattattctgtgatccaagggcactagaatgaatgttgggttagtaggcatgaaaacaatattcagctctttatacatctctgtaaaagcccttgagtaccaggggcattgtcagtgagcggtaatactttgaagtaatcttatttcttgagcagtaggtgtcaacagtgggcttaagatattcagtaaacyatatttgtaaaccgatagtctgtcatccaggctttgttcccatttgtagagtacaggcagagctgtgttttatcataattcttcagggcccttggattttcagaatagtaaattatcattggtttcaagttaacatcaccaactgcattagcccttaacaaaagagtcagcatgtcctttgaagccttaaagccaggcatcaactcctctctagctgggaacatcctagatggcatctccttctagtagaaggctgttttgtctccattgcaaatctgtttagtgtagc

SEQ ID NO: 206241 - DNA, 523 bp, Homo sapiens
ctatagctttatgaaatatatttttaagtgataagacttgaaagttgaaattattctgtgatccaagggcactagaatgaatgttgggttagtaggcatgaaaacaatattcagctctttatacatctctgtaaaagcccttgagtaccaggggcattgtcagtgagcggtaatactttgaagtaatcttatttcttgagcagtaggtgtcaacagtgggcttaagatattcagtaaaccrtatttgtaaaccgatagtctgtcatccaggctttgttcccatttgtagagtacaggcagagctgtgttttatcataattcttcagggcccttggattttcagaatagtaaattatcattggtttcaagttaacatcaccaactgcattagcccttaacaaaagagtcagcatgtcctttgaagccttaaagccaggcatcaactcctctctagctgggaacatcctagatggcatctccttctagtagaaggctgttttgtctccattgcaaatctgtttag

SEQ ID NO: 206242 - DNA, 489 bp, Homo sapiens
aaagttgaaattattctgtgatccaagggcactagaatgaatgttgggttagtaggcatgaaaacaatattcagctctttatacatctctgtaaaagcccttgagtaccaggggcattgtcagtgagcggtaatactttgaagtaatcttatttcttgagcagtaggtgtcaacagtgggcttaagatattcagtaaaccatatttgtaarccgatagtctgtcatccaggctttgttcccatttgtagagtacaggcagagctgtgttttatcataattcttcagggcccttggattttcagaatagtaaattatcattggtttcaagttaacatcaccaactgcattagcccttaacaaaagagtcagcatgtcctttgaagccttaaagccaggcatcaactcctctctagctgggaacatcctagatggcatctccttctagtagaaggctgttttgtctccattgcaaatctgtttagtgtagc

SEQ ID NO: 206243 - DNA, 520 bp, Homo sapiens
tagctttatgaaatatatttttaagtgataagacttgaaagttgaaattattctgtgatccaagggcactagaatgaatgttgggttagtaggcatgaaaacaatattcagctctttatacatctctgtaaaagcccttgagtaccaggggcattgtcagtgagcggtaatactttgaagtaatcttatttcttgagcagtaggtgtcaacagtgggcttaagatattcagtaaaccatatttgtaaaccgatagtctgtcatccaggctttsttcccatttgtagagtacaggcagagctgtgttttatcataattcttcagggcccttggattttcagaatagtaaattatcattggtttcaagttaacatcaccaactgcattagcccttaacaaaagagtcagcatgtcctttgaagccttaaagccaggcatcaactcctctctagctgggaacatcctagatggcatctccttctagtagaaggctgttttgtctccattgcaaatctgtttag

SEQ ID NO: 206244 - DNA, 503 bp, Homo sapiens
tttatgaaatatatttttaagtgataagacttgaaagttgaaattattctgtgatccaagggcactagaatgaatgttgggttagtaggcatgaaaacaatattcagctctttatacatctctgtaaaagcccttgagtaccaggggcattgtcagtgagcggtaatactttgaagtaatcttatttcttgagcagtaggtgtcaacagtgggcttaagatattcagtaaaccatatttgtaaaccgatagtctgtcatccaggctttgttcccatttgtagagtayaggcagagctgtgttttatcataattcttcagggcccttggattttcagaatagtaaattatcattggtttcaagttaacatcaccaactgcattagcccttaacaaaagagtcagcatgtcctttgaagccttaaagccaggcatcaactcctctctagctgggaacatcctagatggcatctccttctagtagaaggctgttttgtctccattg

SEQ ID NO: 206245 - DNA, 489 bp, Homo sapiens
aaagttgaaattattctgtgatccaagggcactagaatgaatgttgggttagtaggcatgaaaacaatattcagctctttatacatctctgtaaaagcccttgagtaccaggggcattgtcagtgagcggtaatactttgaagtaatcttatttcttgagcagtaggtgtcaacagtgggcttaagatattcagtaaaccatatttgtaaaccgatagtctgtcatccaggctttgttcccatttgtagagtacagrcagagctgtgttttatcataattcttcagggcccttggattttcagaatagtaaattatcattggtttcaagttaacatcaccaactgcattagcccttaacaaaagagtcagcatgtcctttgaagccttaaagccaggcatcaactcctctctagctgggaacatcctagatggcatctccttctagtagaaggctgttttgtctccattgcaaatctgtttagtgtagc

SEQ ID NO: 206246 - DNA, 489 bp, Homo sapiens
aaagttgaaattattctgtgatccaagggcactagaatgaatgttgggttagtaggcatgaaaacaatattcagctctttatacatctctgtaaaagcccttgagtaccaggggcattgtcagtgagcggtaatactttgaagtaatcttatttcttgagcagtaggtgtcaacagtgggcttaagatattcagtaaaccatatttgtaaaccgatagtctgtcatccaggctttgttcccatttgtagagtacaggcagagctgtgttttatcataattcttcagggcccttggattttcagaatartaaattatcattggtttcaagttaacatcaccaactgcattagcccttaacaaaagagtcagcatgtcctttgaagccttaaagccaggcatcaactcctctctagctgggaacatcctagatggcatctccttctagtagaaggctgttttgtctccattgcaaatctgtttagtgtagc

SEQ ID NO: 206247 - DNA, 489 bp, Homo sapiens
aaagttgaaattattctgtgatccaagggcactagaatgaatgttgggttagtaggcatgaaaacaatattcagctctttatacatctctgtaaaagcccttgagtaccaggggcattgtcagtgagcggtaatactttgaagtaatcttatttcttgagcagtaggtgtcaacagtgggcttaagatattcagtaaaccatatttgtaaaccgatagtctgtcatccaggctttgttcccatttgtagagtacaggcagagctgtgttttatcataattcttcagggcccttggattttcagaatagtaaatyatcattggtttcaagttaacatcaccaactgcattagcccttaacaaaagagtcagcatgtcctttgaagccttaaagccaggcatcaactcctctctagctgggaacatcctagatggcatctccttctagtagaaggctgttttgtctccattgcaaatctgtttagtgtagc

SEQ ID NO: 206248 - DNA, 514 bp, Homo sapiens
tatgaaatatatttttaagtgataagacttgaaagttgaaattattctgtgatccaagggcactagaatgaatgttgggttagtaggcatgaaaacaatattcagctctttatacatctctgtaaaagcccttgagtaccaggggcattgtcagtgagcggtaatactttgaagtaatcttatttcttgagcagtaggtgtcaacagtgggcttaagatattcagtaaaccatatttgtaaaccgatagtctgtcatccaggctttgttcccatttgtagagtacaggcagagctgtgttttatcataattcttcagggcccttggattttcagaatagtaaattatcattggtttcaagttaacatcaccaactgcawtagcccttaacaaaagagtcagcatgtcctttgaagccttaaagccaggcatcaactcctctctagctgggaacatcctagatggcatctccttctagtagaaggctgttttgtctccattgcaaatctgtttag

SEQ ID NO: 206249 - DNA, 503 bp, Homo sapiens
tttatgaaatatatttttaagtgataagacttgaaagttgaaattattctgtgatccaagggcactagaatgaatgttgggttagtaggcatgaaaacaatattcagctctttatacatctctgtaaaagcccttgagtaccaggggcattgtcagtgagcggtaatactttgaagtaatcttatttcttgagcagtaggtgtcaacagtgggcttaagatattcagtaaaccatatttgtaaaccgatagtctgtcatccaggctttgttcccatttgtagagtacaggcagagctgtgttttatcataattcttcagggcccttggattttcagaatagtaaattatcattggtttcaagttaacatcaccaactgcattagcccttaacaaaagagtcagcatgtcctttgaagccttaaakccaggcatcaactcctctctagctgggaacatcctagatggcatctccttctagtagaaggctgttttgtctccattg

SEQ ID NO: 206250 - DNA, 493 bp, Homo sapiens
caggttttccatcagtactcgctgctttatcttgcgcttttatgttatggagatgacttttttccttaaacctcaagaaacaagctcttctagcttcagacttttcttctgcagctgcctcacctctctgagtcttcatagaattgaagagagrctgggtgcggtggctgtcacacctgtaatcctagcaatttgggaggccgaggcgggcagatcacctgaggtcgggagttcgacaccagtctgaccaacgtggagaaaccccatctctactaaaaatataaaaaatcagccaggcgtggtggtgcatgcctgtaatcccagctactcgggatgctgaggcaggagaatggcttgaacttgggaggcagaggttgcgataagccaagattgcgccattgcactccagcttgggcaagaagaatgaaactctgtcttaaaaacaaagaaaaaaagtaaaaagagaggcttaggcttaatggaattttttttt

SEQ ID NO: 206251 - DNA, 493 bp, Homo sapiens
caggttttccatcagtactcgctgctttatcttgcgcttttatgttatggagatgacttttttccttaaacctcaagaaacaagctcttctagcttcagacttttcttctgcagctgcctcacctctctgagtcttcatagaattgaagagaggctggrtgcggtggctgtcacacctgtaatcctagcaatttgggaggccgaggcgggcagatcacctgaggtcgggagttcgacaccagtctgaccaacgtggagaaaccccatctctactaaaaatataaaaaatcagccaggcgtggtggtgcatgcctgtaatcccagctactcgggatgctgaggcaggagaatggcttgaacttgggaggcagaggttgcgataagccaagattgcgccattgcactccagcttgggcaagaagaatgaaactctgtcttaaaaacaaagaaaaaaagtaaaaagagaggcttaggcttaatggaattttttttt

SEQ ID NO: 206252 - DNA, 493 bp, Homo sapiens
caggttttccatcagtactcgctgctttatcttgcgcttttatgttatggagatgacttttttccttaaacctcaagaaacaagctcttctagcttcagacttttcttctgcagctgcctcacctctctgagtcttcatagaattgaagagaggctgggtgcggtggctgtcacacctgtaatcctagcaatttgggaggccgaggcgggcagatcacctgaggtcgggagttcgacaccagtctgaccaacgtggagaaaccccatctctactaaaaatataaaaaatcagccaggcgtggtggygcatgcctgtaatcccagctactcgggatgctgaggcaggagaatggcttgaacttgggaggcagaggttgcgataagccaagattgcgccattgcactccagcttgggcaagaagaatgaaactctgtcttaaaaacaaagaaaaaaagtaaaaagagaggcttaggcttaatggaattttttttt

SEQ ID NO: 206253 - DNA, 606 bp, Homo sapiens
tcacaacttggctaagtgtttgttgcatgaggtctagctactggcctgtcttgcttacagcatgccttcctcactaagcttaattatttcttccttttggtttaaagtgacagacatgcaactcttctttcacttgaacatatagaggctattgtagggttattaattggccacattttaatattaataaaaagaagcctgagaaaaagagagagaaagagaaatggcccgttggtggggcagtcagaacaaacgcatttgtcaattgtttgcggtcttatccgggtgtgatttgtggttcccaaaacaatgacaacagtascattaaagatcactgattacagatcaccataacagattcaataataaaaagcttaaaatactgtgagaatgccgaaatgtgacacagagacgtgaagtgagcacatgctctaggaacaatggtgccagtgagacttgcttattgcagggtggccacaaactttcaatatgtaaaaaacatggtcacaaaacacaataaagcaaagtgcagtgaaacaagatgtgtctgtcttttgataggctctgacaatctctatctttgaattggtacattcatactattaa

SEQ ID NO: 206254 - DNA, 606 bp, Homo sapiens
tcacaacttggctaagtgtttgttgcatgaggtctagctactggcctgtcttgcttacagcatgccttcctcactaagcttaattatttcttccttttggtttaaagtgacagacatgcaactcttctttcacttgaacatatagaggctattgtagggttattaattggccacattttaatattaataaaaagaagcctgagaaaaagagagagaaagagaaatggcccgttggtggggcagtcagaacaaacgcatttgtcaattgtttgcggtcttatccgggtgtgatttgtggttcccaaaacaatgacaacagtagcattaaagatcactgattacagatcaccataacagattcaataataaaaagcttaaaatactgtgagaatgccgaaatgtgacacagagacgtgaagtgagcacawgctctaggaacaatggtgccagtgagacttgcttattgcagggtggccacaaactttcaatatgtaaaaaacatggtcacaaaacacaataaagcaaagtgcagtgaaacaagatgtgtctgtcttttgataggctctgacaatctctatctttgaattggtacattcatactattaa

SEQ ID NO: 206255 - DNA, 606 bp, Homo sapiens
tcacaacttggctaagtgtttgttgcatgaggtctagctactggcctgtcttgcttacagcatgccttcctcactaagcttaattatttcttccttttggtttaaagtgacagacatgcaactcttctttcacttgaacatatagaggctattgtagggttattaattggccacattttaatattaataaaaagaagcctgagaaaaagagagagaaagagaaatggcccgttggtggggcagtcagaacaaacgcatttgtcaattgtttgcggtcttatccgggtgtgatttgtggttcccaaaacaatgacaacagtagcattaaagatcactgattacagatcaccataacagattcaataataaaaagcttaaaatactgtgagaatgccgaaatgtgacacagagacgtgaagtgagcacatgctctaggaacaatggtgccagtgagacytgcttattgcagggtggccacaaactttcaatatgtaaaaaacatggtcacaaaacacaataaagcaaagtgcagtgaaacaagatgtgtctgtcttttgataggctctgacaatctctatctttgaattggtacattcatactattaa

SEQ ID NO: 206256 - DNA, 606 bp, Homo sapiens
tcacaacttggctaagtgtttgttgcatgaggtctagctactggcctgtcttgcttacagcatgccttcctcactaagcttaattatttcttccttttggtttaaagtgacagacatgcaactcttctttcacttgaacatatagaggctattgtagggttattaattggccacattttaatattaataaaaagaagcctgagaaaaagagagagaaagagaaatggcccgttggtggggcagtcagaacaaacgcatttgtcaattgtttgcggtcttatccgggtgtgatttgtggttcccaaaacaatgacaacagtagcattaaagatcactgattacagatcaccataacagattcaataataaaaagcttaaaatactgtgagaatgccgaaatgtgacacagagacgtgaagtgagcacatgctctaggaacaatggtgccagtgagacttgcttattgcagggtggccacaaactttcaatatgtaaaaaacatggtcacaaaacacaataaagcaaagtgcagtgaaacaagatgtgtctgtcttttsataggctctgacaatctctatctttgaattggtacattcatactattaa

SEQ ID NO: 206257 - DNA, 413 bp, Homo sapiens
acaaattgatatccagaaaagcctcaaatgtctgaaaaccaagtaataaactttgaaataccctgtragtcaaaaaagtattcacaaggggaactggaatgtatttggaacaaacttgttataaaaatcatatttctggtagactaaaggtgacaacttctttcctgctcctctctctgtgagaaccaattccccttataccttgcccagactactgatttgtttggccaacagaaggtgacaaaggtggtatttggggacttcagaagccaggctgagaaaacagaacacttatccaggagaaagccagtcaccaggcaggaaatcccactcccctgagaccccatgatggaaaccacacggccagtccatgactagctacacgcattgcattgacatcccccactgaccct

SEQ ID NO: 206258 - DNA, 413 bp, Homo sapiens
acaaattgatatccagaaaagcctcaaatgtctgaaaaccaagtaataaactttgaaataccctgtgagtcaaaaaagtattcacaaggggaactggaatgtatttggaacaaacttgttataaaaatcatatttctggtagactaaaggtgacaacttctttcctgctcctctctctgtgagaaccaattccccttawaccttgcccagactactgatttgtttggccaacagaaggtgacaaaggtggtatttggggacttcagaagccaggctgagaaaacagaacacttatccaggagaaagccagtcaccaggcaggaaatcccactcccctgagaccccatgatggaaaccacacggccagtccatgactagctacacgcattgcattgacatcccccactgaccct

SEQ ID NO: 206259 - DNA, 413 bp, Homo sapiens
acaaattgatatccagaaaagcctcaaatgtctgaaaaccaagtaataaactttgaaataccctgtgagtcaaaaaagtattcacaaggggaactggaatgtatttggaacaaacttgttataaaaatcatatttctggtagactaaaggtgacaacttctttcctgctcctctctctgtgagaaccaattccccttataccttgcccagactactgayttgtttggccaacagaaggtgacaaaggtggtatttggggacttcagaagccaggctgagaaaacagaacacttatccaggagaaagccagtcaccaggcaggaaatcccactcccctgagaccccatgatggaaaccacacggccagtccatgactagctacacgcattgcattgacatcccccactgaccct

SEQ ID NO: 206260 - DNA, 413 bp, Homo sapiens
acaaattgatatccagaaaagcctcaaatgtctgaaaaccaagtaataaactttgaaataccctgtgagtcaaaaaagtattcacaaggggaactggaatgtatttggaacaaacttgttataaaaatcatatttctggtagactaaaggtgacaacttctttcctgctcctctctctgtgagaaccaattccccttataccttgcccagactactgatttgyttggccaacagaaggtgacaaaggtggtatttggggacttcagaagccaggctgagaaaacagaacacttatccaggagaaagccagtcaccaggcaggaaatcccactcccctgagaccccatgatggaaaccacacggccagtccatgactagctacacgcattgcattgacatcccccactgaccct

SEQ ID NO: 206261 - DNA, 567 bp, Homo sapiens
agaacactcctactgtggcctgaatgtttgttcctcacataggattccagaacacccctgctgttgtctgaatgtttgacactcacataggactccagaacactcttgctttsgtttcaaagtttgtccctcacataggatttcacaacactcctgcagtgttctgaaaatttgtccctcacataggattccagaacactcctgctgtgttctgaatatttgtccctcacatacgtctccataacactcatgctgtggttataatgtttgtccctcagatagcattcaagaacactgctgctggagtctgaaggtttgtctctaacatacaattccacagcactactgctctggtctgaaggtttgttcttcacatatgatttcagaacagtggtgatggattctgagcatttgtcattcacataggattccagaacactgcaaagagggtctgaatatttgtccctcacttaggattccagaatactgctgctgggttctgagtgtttgtcccacacataggattccagaacactgctacaaggctctgaatgtttgtccattaaa

SEQ ID NO: 206262 - DNA, 640 bp, Homo sapiens
ctctcctatgggattccagaacactgctccaagggtctaaatatctctccctcacataaaattccagcacacggctacgaagttctgaatgtttgtccctcacataggattccagagcccccttgctgtggtctgaacgtttgtccctcacataggatttcaaaacactgctacgaaagtctgaatctttgtccctcacatgggactccagaacactcctactggggtctcaatgtttgtccctcacataggattcctgaacactgctacaagggtctgaacgtttgtccttsacaaaggattccagaacactccttctgtggtctgaatatttgtccctcacatagtatttcagaacactcctgctgtgttctgaatgtttgtccatcacataggactccagaacactcctgctgtgttgtgaaattttgtccctcacatagcattcaagaacaatgctatgagggtctgaatgtttgcacctcacatgggattccaggacactcctgttgtggtctgaatgtttgtacctcgcataggattccagaacactcttgctgtgttctgaatgtttgttcatcacataggatttcagaacactcctacgagggtctgcatgtttgtccctcaaattgaattc

SEQ ID NO: 206263 - DNA, 624 bp, Homo sapiens
gaattccagaacactgctgggagggtctgaatgtatgtctctcctatgggattccagaacactgctccaagggtctaaatatctctccctcacataaaattccagcacacggctacgaagttctgaatgtttgtccctcacataggattccagagcccccttgctgtggtctgaacgtttgtccctcacataggatttcaaaacactgctacgaaagtctgaatctttgtccctcacatgggactccagaacactcctactggggtctcaatgtttgtccctcacataggattcctgaacactgctacaagggtctgaacgtttgtccttgacaaaggattccagaacactccttctgtggtctgaatatttgtccctcacatagtatttcagaacactcctgctgtgttctgaatgtttgtccatcacataggactccagaacactcctgctgtgytgtgaaattttgtccctcacatagcattcaagaacaatgctatgagggtctgaatgtttgcacctcacatgggattccaggacactcctgttgtggtctgaatgtttgtacctcgcataggattccagaacactcttgctgtgttctgaatgtttgttcatcacata

SEQ ID NO: 206264 - DNA, 383 bp, Homo sapiens
actcctgttgtggtctgaatgtttgtacctcgcataggattccagaacactcttgctgtgktctgaatgtttgttcatcacataggatttcagaacactcctacgagggtctgcatgtttgtccctcaaattgaattccagaacactcatgcagtggtctgaatatttctccttcacacaggattccagaacactcctgctatggtctgagtgtttgttcctcacataagattccagaaaacagctacaagggtctcaatgtttgtccttcaggacaaaacactgctgtcctggtctgaatatttgttcctcacataggattccagaacaatcttgctatggtctgaatgtttgtccctcacataggattacagtacactgct

SEQ ID NO: 206265 - DNA, 383 bp, Homo sapiens
actcctgttgtggtctgaatgtttgtacctcgcataggattccagaacactcttgctgtgttctgaatgtttgttcatcacataggatttcagaacactcctacgagggtctgcatgtttgtccctcaaattgaattccagaacactcatgcagtggtctgaatatttctccytcacacaggattccagaacactcctgctatggtctgagtgtttgttcctcacataagattccagaaaacagctacaagggtctcaatgtttgtccttcaggacaaaacactgctgtcctggtctgaatatttgttcctcacataggattccagaacaatcttgctatggtctgaatgtttgtccctcacataggattacagtacactgct

SEQ ID NO: 206266 - DNA, 608 bp, Homo sapiens
actgctgcaagggtctgaatgtatgtccctcacataggattctagaacattgatgctagggtctgtatgtttgcccttaacatatgatttcaaaacactgctcctgggttctgaatgtttgtccttcacataggaatacagagcactgctgctggagtctgaatgtttgtcactcacatagtattccagaacactgctgcgaggatctgaatgtttgtccctcacatgggattccagaacactgctgcgagggtctaaatgtctgtccctcacataggtttccagcacaatggtaccaggttctgaatgtttgtccctaacatgggattccagagcactcctgctgtgctctgaatgcttctccctcacataggattccagaacactgctacgagggtctaaatgcttatccctcatataggataccagaacactcctgctgaggtctgaatgtttgttcctyacataggattccagaacactcctgccgtggtctgaatgtttgtccctcacataggattccagaacattcgtgctggggtctcaatgtttcccttaacttaggatttcagagcactgctcctggggtctgaatgtttgtccctcac

SEQ ID NO: 206267 - DNA, 446 bp, Homo sapiens
gccttctatctcatcagtacactgatcagaagtctgcctgtgtcacgggcatgtgtgttctcatcataygttttccctgccattacctggaaaatgaggatcacatgttctttatctttgtgtccccttcaaagcctcccaccctgcctggctcacatgtgttctacagaaacgtttgttggaagaggggagagaggggaaagaatcttgcctccagtttgccagtgggcagtagattctggagtaggacaggaacaggtacttagtgaaaaatctttagaaaaaaaaaaatcttagagttacatgtgagtatttgtgaggctgagaatttaatttcatggagctattataaactcatttgataagtaagatgtgctggccattttcaaataggtaattcaaatatagcttagaggacttgcaattgagagagggtagagtaggga

SEQ ID NO: 206268 - DNA, 466 bp, Homo sapiens
gaattccctgagcacttaattttgccttctatctcatcagtacactgatcagaagtctgcctgtgtcacgggcatgtgtgttctcatcatatgttttccctgccattacctggaaaatgaggatcacatgttctttatctttgtgtccccttcaaagcctcccaccctgcctggctcacatgtgttctacagaaacgtttgttggaagaggggagagagggraaagaatcttgcctccagtttgccagtgggcagtagattctggagtaggacaggaacaggtacttagtgaaaaatctttagaaaaaaaaaaatcttagagttacatgtgagtatttgtgaggctgagaatttaatttcatggagctattataaactcatttgataagtaagatgtgctggccattttcaaataggtaattcaaatatagcttagaggacttgcaattgagagagggtagagtag

SEQ ID NO: 206269 - DNA, 555 bp, Homo sapiens
ataagcaatagcattaacatagacacagttttctagtttgtggatattaagaggatgttagtgattagccacaacttatgagaaagctactcttgccttggtaggcaaaggaatggaaagcttttttaaaatctgccgttttattttgcttctgttttaaataaatgaaagttgtgctggaaaagtgagttttgagcccaacatcaaacattaatcctgctactgctttcacaagaaactggggargcaccatccaagcctcagcaatgctgaagaaaaggacctcatctaggttgtgaatgagaagcaaatcccactgtgggagaccactggtcctgagtgactctgagcctgagcctcctacttcctgcccctccttttctactgtgggctcacagactctgatgttggtgaaatgttcttttccttggcttggattaggcacctggtgtcctgaaagaggtcattggttttcctgaggacgtccaaggaggctggctcaccagtggcttaccacaggccaaatttgaggttaattaaccatcagtcattgtc

SEQ ID NO: 206270 - DNA, 429 bp, Homo sapiens
ccattttagatatgcctgaaccattagcttgaagctggagtgtgtaccaagggtggtcatgctgttcactgatgagtaagcagcctcatgatctcaggtaggctcagcagcaatctcagtgaatacacagtcacrtttagagaagtacagacatggctagacctggatgtctaacacaagatgaagaactagcaccatccccatttcactacctatttacttaacatttcaaaatgttaacggaaagaattaatctgaagtgcaccatcacaagtctacttttttcacgcatttaaaaaatttttttccaagctactcataaagattgtttggggttttgttggtgtttttgttgctaatgggttttcggaaacgcagcaacccagctaggtaaggaacacagttagtttaggattcatacatggaatt

SEQ ID NO: 206271 - DNA, 558 bp, Homo sapiens
tggaaaattgtgtagcagttccttaaaaggttaaatgtagattataatatgacccagcaattccactgctacccaagataaatcaaaatatgtccaacaaaaacttgtayacgaatgctcatagcagcattgttcttagtagcccaaaagtggaaacaaccccaatgtccatcaactgactaacggataaataaaatgtggtacgtccatacaatggattattatttgacaataaaagaagaactgatacatgctacaacatagatgggacttgaaaacgttatacaggcaatactccattttattgcagctttctttattgtgctttgtagatgctgcatatctacagttttacaaattgaaggtttgtggcaaccctgcaccgagcaagtccattggtgccatttttccaacagcatgtgctcaactagtgtctctgtgacagattttggtcattctcacaatatttcaaaatttttcattattattatatctgatatggtgatctgtgatcaatgacctttgatgttactatggtaattgttttggggcggcatg

SEQ ID NO: 206272 - DNA, 624 bp, Homo sapiens
tttgcctgccataccaagaaggtgggacctaagtcaaggttttcaaaccctgtttaaatggcagaatgttttggtcaaaattttttagccagcaccccaattacaaaacagataaaaatgatgcagctttagttaaactaaatgtgagactggtacttcctctgtcttggtcttcctcttatccctccaggccacccctgaagcaattcagaacacagtttgagaaccacctgcagtaagtgacagtgatgcaggtagggggatgtggcactgagaggtcttgaagggcaatgccatgtttcccaagtttccagctttatttcgaaagtgacagatacggaagtgcttggtacctaagaggtactcagcttgcatatctgagtgtatgcgtgtgkgtgtgctgcatttgatggatccttccctgggaagggtaggggttagcagtcaagaatattgagttttattttggacaaaatggattaaaggtattttcagaatacccacatgcagagatgtagtaggcacttgaaaatgtaggtgtgagccctgggcaatggtgaaagctatagttatagacttgggagttattggtctataagtgatagctgaagccatggacatcag

SEQ ID NO: 206273 - DNA, 651 bp, Homo sapiens
gtacattaaatgctttgaccaatgtctgttatgtttggttaccttccagttttaaaatrtgtgaatttcctttttactgttctaggggaaagcgatggtatttgccccacgccgagggaatactttaaaccagttttgcaatctagctgaaaaagctggtttctgtatccaaagacatgaaaattatgatgaacacatttcaaacttccactccaaggttagttttctgcttgtgttagataacactttaatccgcattgcattttgaagagatcatggtctttttggcaggtaacctaaatatttgattaaagtactccttagatgtgttgcttctgaacagctatttgtatctgattattttgtgtggtaaagccatcttttatctttgcatgtctagaaggattttacagaaaccattcctgtttactcttttctctgaaacaaactaatcttttcattcataatagactaatttgtaggatgtaaggggaggtggcatagaatgaataacatgcatttatattttaatgaaaaaccttcagcttttaagtaggttaaatgcttagccgcactgaaataaatagaaggtgaatgtctaattgtatcatgttggactgtaaatctttatctctgcttgctttatagctg

SEQ ID NO: 206274 - DNA, 472 bp, Homo sapiens
ggtacggtataataccacttcttaatggaagaagtccaagaaagcatttcaaggagagtgtggttggctgctgcagattactgaaggtaggtcaggcagattgcaaagtagttcagtgactgttggaagaaaggtcatatcatcagggcaggtgaagcaatgggagtgtccactcccataagaatgttggtggcaaagggagagaagttgtgtgtgtgctaaggggaagctgaggtggaagagttgagcatgtgatcaggcaagccgctacagccaagaaagaagaaagaagaaagaagtggagacaagaaagggaartatttgatgaggcaaagatctagatcagggcttctcaaagtgtggccccctgaccagcaccaccagcatcagttgtatacttgttggaaatgcatattccaaggccccacctcagacctgctgaatcggaaactctggagttgaagctcaggaa

SEQ ID NO: 206275 - DNA, 558 bp, Homo sapiens
aaatccaacaggtagaatttaagaaacaccaacccaatactcaagattcagtatccatcaccctcactctggtccagccccaatcttacatttgaagttttgaattactagagtattcccttgtttccttttttgccccgtaactgcttcctaacagtattttcactggaattagatactgaaaagatttaccttgttkggaaggtctgcatagtaagtgaatgggaatccctgattccaaaaatacccagaacgacagcatcttcaaaactggaaccctgaaacttattctttcctgggccttactcacatataagagttctgatcctgacctctagcccaggaattagaatcaatggtatcaaattatttcttgacaccaaatatctccaagcctgtatgttcaagtgtcacccacttccagattgccaagctgtactccacccgtcagctaagatgtgatcattcactcattcattctgtacatagctgtaactcagctggccccgttgcccatcatctcccctaacaatggggaaatttgatgtggtgctatta

SEQ ID NO: 206276 - DNA, 531 bp, Homo sapiens
atcagtggtttcagacattcactgggcatattggaacatatgtaccctaagtaaatgagggggaactattatacacagatgataaataagtgcatgaaaagatggtaagacaaaagacaacaagtgttgccaaggatgtggagaaattggaatttttgcacacttttggtggggatgcaaaatggtatatatgctatagaaaacagtaggaaggtttttcaaaaaattaaaaatataactaccgtatgatccagcaatcccacttctgggtatttatttgaaagaattgaaatcatgatcccaaagagttattagaattcccatcttcactgcagcactattaacaatagccaagatatagaagcaacytaaatgtccatcaatagatgaatggataaagaaaatgtggaatgtatataaaatgctatttagtcttaaaaagaaggaaatttgcagtatatgactacatgagtgaattttgaatgcacttagctaagtgaaataagccagtcacagaaagacaagtactgc

SEQ ID NO: 206277 - DNA, 560 bp, Homo sapiens
gtacgcatcctggaccttcggaaaacaatcacccagtgtttaaaaaaaaatgtttaactcttttcactgtctctgaacaaggagctgaaaatccaagcttctgttcatgttctgctacctgcagtctggataaacttacagctattaaatttttataagctagtgtgtgctgatatgtaaaatagggataattttgcctttcacagagttttggtgaatataaaatagaataatgaaaatgtgtttgaaaataaatasaaactgctatatcaaggaaaattattatttgttataattatatgcataattttacttaacataattattacataattattatagttataattatataattaattatatgtaataaatcacatacaactctttgaatatatgcctaagtgtcattcaaattcatcattatctaaagcaaatgtcaaattttgcctcagccactagagtgaaatagatacatcctggatcttccacctaaagtcttgctagtcaaaggagaagaggagtagatttaggtacattactattatgttttttaaagg

SEQ ID NO: 206278 - DNA, 447 bp, Homo sapiens
tgatgtttgtttaattgtaatattaatctactttactagcaccattaatttatttgcaggatcttaaatktcaagctaaaattaaaaatatcttttttctttttatattttgtctttaaaagtatttttaatttactgctaaaaagagagaatggcattgattcttcatctgcatagaaaacagctcactcccttctagcagatttattttgaattatataaacaccaaaaaaaaaatcctcacatacgctctgcatttttatagcttctttttaagcaaactctctcttcttggaagatcccctcccttcttcaagatatttctgctcctcccactacctcaaacgtaactgctattgttgtccttgttgcatccgcatcaccctgtgcctctattaaaagcactttacacctcataatataatttaatacatgtatgttccccta

SEQ ID NO: 206279 - DNA, 584 bp, Homo sapiens
tggcaaacaaagaagcaaaggaactaaacagaaggttgtggtatctcttttacgtacagaattctgccatgacagggtttctgagagtcttacaggcttggaaccttaaccccagcatttgatatccatcattgacttagcatggggatgtggcaaataatgtaaaacatcacaaaccaccatatacaccaaacttggactctatgagtcttttttgcaaacctgaacttagccaaatgtrtgatagaactctcatttaattttgtccaagttgcatttgctgcttttcaagtaatggtagaagtcacccttcgtctgattcctattgaaaatgtatatttcattttaagaaaggctgagtttacagaaagaaggaagagctccataaaagcaatttttacatgaatgtaagaggacatgcaattttcatcatccctggcattatatagattgaatttaatccaatctcatcttctacagaagcatacacaggcagcagttctcaagctcactcattaaactgtggagttaataatgctgaccagcaggaagatggaagacagccgatgttttcctactggtca

SEQ ID NO: 206280 - DNA, 584 bp, Homo sapiens
tggcaaacaaagaagcaaaggaactaaacagaaggttgtggtatctcttttacgtacagaattctgccatgacagggtttctgagagtcttacaggcttggaaccttaaccccagcatttgatatccatcattgacttagcatggggatgtggcaaataatgtaaaacatcacaaaccaccatatacaccaaacttggactctatgagtcttttttgcaaacctgaacttagccaaatgtgtgatagaactctcatttaattttgtccaagttgcatttgctgcttttcaagtaatggtagaagtcacccttcgtctgattcctattgaaaatgtatatttcattttaagaaaggctgagtttacagaaagaaggaagagctccataaaagcaatttttacatgaatgtaagaggacatgcaattttcatcatccctggcattatatagattgaatttaatccaatctcatcttctacagaagcatacacaggcagcagttctcaagctcactcattaaactgtggagttaataatgctgaccagcaggaagatggaaracagccgatgttttcctactggtca

SEQ ID NO: 206281 - DNA, 625 bp, Homo sapiens
agatatctgcctccttttgaagcttgcaattctaaaacaaaataacatcatgyaggtgaggagtagaaagagaaaaaaagtttccaccagggtatctctcctgttgccacttgaagactgcaaggtgagggtggtggaaatatgaaaatggctaaaatccatgtctaacatgggctgttaaaacaagacctgattgtctcaaggtggaatttgttagaaacaataattatttatgacattttattgcaacagcctccaaagcatatggttaccttattagaaattaaaattcattttcatataaatctcagcaggatattacactaaaataactagagtaactccaggggacaacaaataattctagtttagctcttctaaggcctggcacttgtaatataaaatgtaagtacaatggcatatttggaaaatgtaagcaatctatctactgcaagcatgaggataaatattatatattcaccactttggggacatatgtaatttacattttccctacaaatttccactccttggttttacattttccaacttaaaaaaactttttattcattagcaatttatttgttgttctttcttgtttttaattgtggatgtcaaagtatag

SEQ ID NO: 206282 - DNA, 625 bp, Homo sapiens
agatatctgcctccttttgaagcttgcaattctaaaacaaaataacatcatgcaggtgaggagtagaaagagaaaaaaagtttccaccagggtatctctcctgttgccacttgaagactgcaaggtgagggtggtggaaatatgaaaatggctaaaatccatgtctaacatgggctgttaaaacaagacctgattgtctcaaggtggaatttgttagaaacaataattatttatgacattttattgcaacagcctccaaagcatatggttaccttattagaaattaaaattcattttcatataaatctcagcaggatattacactaaaataactagagtaactccaggggacaacaaakaattctagtttagctcttctaaggcctggcacttgtaatataaaatgtaagtacaatggcatatttggaaaatgtaagcaatctatctactgcaagcatgaggataaatattatatattcaccactttggggacatatgtaatttacattttccctacaaatttccactccttggttttacattttccaacttaaaaaaactttttattcattagcaatttatttgttgttctttcttgtttttaattgtggatgtcaaagtatag

SEQ ID NO: 206283 - DNA, 399 bp, Homo sapiens
gtaactaacctgagatctgaaaaaaaagatagacgataactaagtgaagctagtaaggagtaggggaagaatgctgcaggaagagggactagaagatatgttactgagggatggctaatgtgaatggagacaaagaggsagcatggtgcaaaatgagatcagaaggcagagagatcctgaaggttcctgtggtctgtgataaggatccatcttgttccttacagcaatgagaaactgtgcaccaaggccacgagggcaaaatgttcagttttgcattgtgaaagattactctgtgtacaacatccaaaaccaattaaagagagctagaatgaaggaagtgaagaggccaccaccaacgttgagatgagaaacatgaaacgctgggtctaaaggatgtca

SEQ ID NO: 206284 - DNA, 399 bp, Homo sapiens
gtaactaacctgagatctgaaaaaaaagatagacgataactaagtgaagctagtaaggagtaggggaagaatgctgcaggaagagggactagaagatatgttactgagggatggctaatgtgaatggagacaaagaggcagcatggtgcaaaatgagatcagaaggcagagagatcctgaaggttcctgtggtctgtgataaggatccatcttgttccttacagcaatgagaaactgtgcaccaaggccacgagggcaaaatgttcagttttgcattgtgaaagattactctgtgtrcaacatccaaaaccaattaaagagagctagaatgaaggaagtgaagaggccaccaccaacgttgagatgagaaacatgaaacgctgggtctaaaggatgtca

SEQ ID NO: 206285 - DNA, 418 bp, Homo sapiens
caacacgagttccttattttaatgaatctaccacacatctacactttcttagcttattgatataagagaaatcagaaggtgacaaatagaaatagggccaaggcaaatgttttaggcttaactgcacttgtcaaagatctaatgatttttgcaaactattcacaaaattgagaaacagcccccagtatggctytgctctgctcagaagattaggagtgcatagtgggcactgttaataatcatagttaaagtaggaactttacatcacttcatatcctaccactgtcctatatgtaatttatgttctaaatatagtcaacttttcaaatgtattttgccatcatatcatctcctgctcagtctagaaactcttttctgtcatacccacatacctttgatggggcctgagataccaaca

SEQ ID NO: 206286 - DNA, 575 bp, Homo sapiens
tccctcttacaaagatgaaaactaggattgtagaatcaaagctctaactctactacttaacttcctaggtaagcttagggtgagtctcaattctctcttacaaagatgagaaatagyattgcagaatcagagctctaactccactacttaactagctagatgacctcaggcaagtctctcaactttccttagtctcagtttcctcacatgtagaatgagaataacaatattttactggagtataatagcaaaaaccatgtaaggtacttagaatataaacatagaagttgtactgataaatattagcagcaacaacaactaggatttatttattcacttatgcactcaacaattatttaccaagtagctgctatgtgccaggcaaggctggttattagagagtcaacagtgaatgaagcagacaaaaatctctgacatcttggagcctgctctccatgctaataagagtgtcttatgcacttaagtatttatttaataatttgagtatgttttaagagaggacagcatgaaaaaagtcctaatctggactaagatttaatttgccagccgggtgc

SEQ ID NO: 206287 - DNA, 575 bp, Homo sapiens
tccctcttacaaagatgaaaactaggattgtagaatcaaagctctaactctactacttaacttcctaggtaagcttagggtgagtctcaattctctcttacaaagatgagaaatagcattgcagaatcagagctctaactccactacttaactagctagatgacctcaggcaagtctctcaactttccttagtctcagtttcctcacatgtagaatgagaataacaatattttactggagtataatagcaaaaaccatgtaaggtacttagaatataaacatagaagwtgtactgataaatattagcagcaacaacaactaggatttatttattcacttatgcactcaacaattatttaccaagtagctgctatgtgccaggcaaggctggttattagagagtcaacagtgaatgaagcagacaaaaatctctgacatcttggagcctgctctccatgctaataagagtgtcttatgcacttaagtatttatttaataatttgagtatgttttaagagaggacagcatgaaaaaagtcctaatctggactaagatttaatttgccagccgggtgc

SEQ ID NO: 206288 - DNA, 529 bp, Homo sapiens
agtgcagagcagtggcgtgatcttggcctcccgagtttgagcgattaatctgcctcagcctcctgagtggctgggattacaggtgcttgccactgtgaccagctaatttttgtgtttttagtagaaacggggtttcaccatgttgtccaggctagtctcgaacttctgacctctggtgatccacccacctcagcctcccaaagtgctggaatgactggcatgagccaccacacccggccaaagtacaatgtttcttaacctttttgttaaaaaattattgcttccctaaggagtcttttaaacatttttaccttatccctgtcccatgaaattttattaccagagatacactatctgttcatgagcatggccctttggggaaccacagacctttataatatctaatatcaccaccattacyaccacctctagacccagtttttcacccccttagaggtaatgtcactctagttgagactgcatggtgtagaggttagaagcaccacattaggagccaggtctgcctgga

SEQ ID NO: 206289 - DNA, 470 bp, Homo sapiens
ctaatgagaaaacagaaaagaaagataccccaaggtattcttatctcaagcattctgaatatctggaaataaatgggagcaggaactaagaattaaggttttgctgacaatgaccaatcagaagaggcttttgatctctactatggtttgaatgtttgtcccctccaaaattcatgttgaaatttagtcaccattgtaacaatattaagaagtggaacttttaagaggtgattaggacatgatggctctgccctcatataaaaaggccagttctgccccctcttgcccacttcttgctcttctgccttycacctgtgatgatgaatcaaaagggccctcaccagatgctggcaccttcattttggacttcttagcctccagcaccatgagaaaataaatttccattctttgtaaattacccagcctcaggtgttctgttacagcggcatgaacgaactaaagcaatgctt

SEQ ID NO: 206290 - DNA, 633 bp, Homo sapiens
gggaataaggttgatttcagttaaagaagcttatttcatctaaggactctctacatggcgaaatacatgaaaaagtaacgtaactagtcttcttgagtacattyagctgatcatcattcatcatacaggtggtagaggacaaaatgtttttaatgaaccgaggttgtgttcattaactacctgctcataggtccacaggcccttgtttgtttgtgtaattcagtctggtgtttaatcattggttaatttgatcctgtagtgaatcagatctaaacctctggcaccaaatcatttatttttaaaggcctaaagcctgttcactctattttgactgcttgaggggaggggtgaatgaataatttgaccaagtaactgtgggaaattgctatcgaattaaccaagaaatgtgaatacttttaaaggggaagctaagtttgccttgtagagaggcacaacagagtagatgccaggggctaaaattccccagaggtcaccttcctgctagttaatctcttgagcctccataaggtaaaaatgttaataatacctacctgtgtggtacttgtaaaggtgaaatgaattgatacatgcaaaatgcttaaaactatgcttggcataaagtggtggttaata

SEQ ID NO: 206291 - DNA, 519 bp, Homo sapiens
gcttgactcaacggcacatgtgcatcctttatcacacgtattccttgtctgtgtttcttttctctttctttccagtagactttaactgtccttttctttccacatgcatctgacagcctggaacaaagcccttcaaacagtgttgattttccaatgcatatgtttctattaagcatgtaccatgtcaaatcatgatgcccggagttgagtaaattgtatttcaaggacagtgaagggccggtgagacaaactsaccttcaggtcaaatccactttgattatgcctaaccattcttctcaaaaatgtgttttttaaattaatggaggcctttattcaagcaatattcattccatgcccacttacctttctgcacaagtgagtgaatagtcattcactcaatatttatggggcctctactctgtgggctgcagcaccacataattatctggagacacttcaaaaatgtttaagatattctctgcccgcagggaaattataatccctaaggggcaataaacc

SEQ ID NO: 206292 - DNA, 377 bp, Homo sapiens
ctcattagtttcaaagaactttttaacttttgccttaatttcattatttacccaaaagctattcaggagcatattattaaatttccatgtaaytgtatggttttgagtaaatttcatagtattgatttctaatttgattgcactgtagtccaagagattgtttgttatgatttcaggtctttcgcatttgctcaggagtgttttacttccaatgatgtgatcaattttagagtatgtgccatgtggcaatgagaagaatgtatattctgttatttttgggtagagagttctgtggttgatttgatccagtgctcagttcaggtcctgaacagacacacagaccaatggaacagaatacagaacccagaaataaggcc

SEQ ID NO: 206293 - DNA, 510 bp, Homo sapiens
ctcatagcaaaactgaaagcacagagattgcccatatacctcctgctgttatccgttatcaatatccctcacctgagtggaacatttgttacaattgatggaccttcactgacatgttataattacacaaagtccrtaatatacatttagggttcactcgtggtgttgtatattttttgggtttggacaaatatataataacctgaatccaccattacagtatcataaagagtattttcactgccctaaaacctcactggatttttataagttcaaatcagagataataggcccaattaaaaaaaaatcagtatgacacaaagggaaagtagtgattgttctaatataccaaccagttagccaacaccactgtgtttttatagctcatgatctctgcaaagtcagtaggttcaagtctgataaaattgctctgcaagttatcttaccagtccatgaagaacttgccaagagctatgcttttgtgtggatatctgcttgttcaccctagtt

SEQ ID NO: 206294 - DNA, 614 bp, Homo sapiens
atgaaaaagcaagaatagaacttgactcttaactgtcaatccagtgttctttgtccaacagttagtgtggaacaactatcctctttggagtcataagaaccttggttgaaattttaggcactctacacgtagtatccgatgtcaatccctgggatggttaggagcaatgagatgagaggcacacagtgcttgaccaaaaacatgttctcaagagctgttgatcttctttcctttttaaatgtacacagggagtggggaatgccttttcccctcctaagtatatccctccctgggttctttttctagkaaatgtttatggaagaagtctgagtagatcatatcattttattaagagaattctttgcatcgcttctatcggttacccaggccctgccttctaatttaatgatgatgatgccaaatttgagtctgtgtttgttctgaactcttatgcagatggaacctggtgatacatgaagaatcattatgccacatcaagtttcattttacagtccataagtacaccttttaaaacaaaaacaaactatttcaccatcctggggagggatgtaaatcatgtatttttattacctcaaaagaccaccagaaaatga

SEQ ID NO: 206295 - DNA, 616 bp, Homo sapiens
ttctgttatttttgtttttcacttaatgttgaacatggaatcacagtattgcttaaaagtggggaaaagcacgctatcacctttatcrttgtgatatttactgctttctcttaaactcacagagttccttggttgttgggaacatgtagatcataagagcaatctatttatagcttttatgacagcatccatttgtggcttccttgcattttaggaaggaaaaaatatatatcctcttaggtatgatgatgattatatttcttaggtatagatagacatgtcctatggatgttaactcatgaagaactcaggcagagaagtgtgtaattgtctggtgcagtacagatacccagaaaactgaggaagatgattcaggaggcgttttgtttatatgaccagatttaccaactaaatggaggatgcaattcatgatgcacttgagcccaactttggaaccaaagagacctgaatttgtgtcttagttctacaactcatgtgacttacagcaagtcactttaacccatctgagcctgtttccttatttgaaaaacaggaatgataacaatagctgctcctttatcatgacataatatgagggatatgtgagctaagaaat

SEQ ID NO: 206296 - DNA, 572 bp, Homo sapiens
tctatttatagcttttatgacagcatccatttgtggcttccttgcattttaggaaggaaaaaatatatatcctcttaggtatgatgatgattatatttcttaggtatagatagacatgtcctatggatgttaactcatgaagaactcaggcagagaagtgtgtaattgtctggtgcagtacagatacccagaaaactgaggaagatgattcaggaggcgttttgtttatatgaccagatttaccaactaaatggaggatgcaattcatgatgcacttgagcccaactttggaaccaaagagacctgaatttgtgtcttagttctacaactcatgtgacttacagcaagtcactttaacccatctgagcctgtttccttatttgaaaaacaggaatgataacaatagctgytcctttatcatgacataatatgagggatatgtgagctaagaaatataaaatgcttaatggaattatagcatatagaatcagcaactaaaacatataacaacattctatatatctagtaatacctacaacatagtagttgctcaataaatattagatcatttt

SEQ ID NO: 206297 - DNA, 628 bp, Homo sapiens
tagttatttctgtgactctccctggctgtgctgtgagtttgagtggcggggaatagctgtattcatctttatgtccctaatgcttattatgtgtactggcatgtagwagatgttcaaaatgcagtaattgaagtggttaataaaaactaattaattagagtcagtctagtttagctaatattatacattataataaacatttttataatattttaaattataaagtatttttgtttattgtcttgctcgattatgattctaatatcatccccatgagggagttgtgattatcactgtttctataggaaggcacagaatcagagaagccatatttaatgttatctaatgagaaattgagttttccacccatccgggcatcagtccacatgccttggtctccacagggaggttttcagataccaggtatggattgctagtagttggataattttatatgtccatgattaagtgagataagagtaataaaagtgaagttttttaaataatgctaagatacattaatgtatagtgctaagattatgttaagatgaagggccatccttgtgtgtgtgtgtgctaaaatgtccccttttaaaataaaattagagtggcagcatatagtatatta

SEQ ID NO: 206298 - DNA, 373 bp, Homo sapiens
tctctctcagactgtaccacacaaacatttttctcttagtagagcattgtttaattcatataattcatgtattaatatgatatgtgttacatggcttrtgatgaaaaacagcagtctactgctcactcctccctattcctcccctaagaagtttcttcttaagttgcttctactgtttacttccattcttttcttctaataatgtgcttgtattgctatattttatacaattttatttattatctattgcctttctcttatagtgaggattcagcttgctaactaccccttgctccaccctccctgcctgtctccttctctttccaagttctaatacaatagagctaggatcaactggaagcttcaggtgagg

SEQ ID NO: 206299 - DNA, 373 bp, Homo sapiens
tctctctcagactgtaccacacaaacatttttctcttagtagagcattgtttaattcatataattcatgtattaatatgatatgtgttacatggcttgtgatgaaaaacagcagtctactgctcactcctccctattcctcccctaagaagtttcttcttaagttgcttctactgtttacttccattcttttcttctaataatgtgcttgtattgctatattttatacaattttatttattatctattscctttctcttatagtgaggattcagcttgctaactaccccttgctccaccctccctgcctgtctccttctctttccaagttctaatacaatagagctaggatcaactggaagcttcaggtgagg

SEQ ID NO: 206300 - DNA, 390 bp, Homo sapiens
gggtcttgtagcgtttgccttttgtgcgtctggtattggcagaaagtgagcttgtgggtcctgcaatgagaagcgactgccattgtggtgcttatcggcattattggacactaatggatggatagcagataacgaatatatccgaagccttacctttcttcctctcttgtgtgttaggaccracaggatcattcagggcaaggtgagtgtaataacatgctttgttttaaatgacaaatcagctttggcttaattcattcactttctccctttcaataggtgaagataaattaactagagaagctttgggataaatcaaataagtgaacatactacttactttttcttaggcctctgatgcatttggctgagtgatttttataaatatga

SEQ ID NO: 206301 - DNA, 185 bp, Homo sapiens
ttggaacatagtaaagtctctaaagacaatatagccaagtatagaagtatacaaataatatgagggcagtaatyaagaaagaaacccaattatcacaataattgctggataaaaaatgcctcgaagcatttgttaaaataagctaaaattatttctctctaaattaaaacctgatagataatgag

SEQ ID NO: 206302 - DNA, 309 bp, Homo sapiens
gagatcttggaatgtaacatttyttctgcaattgaagtttttcaggccaattaagtgaggtaatgtgtatattacattactaattctatagtcttacctgttctaccggggagcatttgtatttaaaaaaaaaaaaaaaacaacatgtagattttcatagtttacagtgcactttagcacccattaacacatttcatgctcctaaaaaccctatgaagaagacactgcaaattttgtcttcttgagaaacaaagtcaaattgaggtgaaatggtttgctgaatattggataactatgaaatggtagagt

SEQ ID NO: 206303 - DNA, 521 bp, Homo sapiens
ttctcagcaatcctcaaatgcctacaatactagaacatgaattttcaaatcccctaaatcttataatattgctcatgtattagtcaataacagatgaataattaatttaattaatactgaggtatagataatataaaagctttttcaaaatgttttgccacaaaaaacggaagacttataatttgtgaagaatgagaggaagaaccacaaggwataagaggaacaagaaatgagaaaagaaaacaaaatatttcaatttctcaccttcgccaattttccaagacatttctacctataataaaactaccattgcgttgtaaaggccactagaaatctgcaatagaaatagaactttggatagatcttaggaaatagtgctgctatgtttctgggtttaggatttcattctaagaatagaggatgagaagccctttttttttttttttttttttttgagagggagtctcactctgtcacccaggatgggcgcgatctcggctcactgcaagctccacctccca

SEQ ID NO: 206304 - DNA, 592 bp, Homo sapiens
tgtgaatcccacaaatagaacccatcactcttggatatgaccaatgaaaagcactggcagatcagagtttgttcccttattttcttccctgttgggtcacctcagtctggccttaccactcaactgcacatcacccctccagacagtgggtgtgaggaaagggtaggaagaaagggggttggtggtgggtgaggagctctccatagagtgtctttgtctccaggttccagtgactatttccaacctttgaatgctcatttttgtgacaggagtaactaacctcaaggtactacattacccctgtagaatttttttcatacctatttcttaagggtttttataaactgtgcacttactgaagtctcctcaaattaatccaattggaatatgcatttattcttactgtagtactgatacaatggggaaactcagttaagggattgttgaccatacatgttctagaggtgacagaatakaggcaattgcattcccattaaaatagaatggcagatggtaaaaacctgactctgacgcttgctcactgtgtgaccttggcccagttactaaatcagtctgtgcctgagtttcctct

SEQ ID NO: 206305 - DNA, 605 bp, Homo sapiens
gaatgtatcatatgtcatagagtttgaaatagttcttgtcatgtaggaagagtcctgtataaatgcataggaatcatccagcacatatgtattccacaggataatataccatctaacaacctctgatctttgttgcctgcatgttaaagatttcaaggttgtatttttcatcacattcagagtacagtggttgaaaatttgaaacatttgaaacgagatatttcctagcctgaagatcttcatcacagagttagaaaaggctcctctttgaaagaaaagacttccttatackcatcttcatctggaatttccccagtactccttatttctgacataagagaagtcgtaggcatggagttactaagattattccaacattttaagagtacttttactcaggttgcaaaattagcaggctatttttttttgcagcttctgacttcaggtctattaatgttgctgatcactagtatcacaaagaaatttgtcctaatgagccagtgggtttccacctttatgttgatagcaccaaacctgaatagacaatatcagcatatctgcaaaaagcaagtgaaaaagagattgatataatatgtaaatagctt

SEQ ID NO: 206306 - DNA, 567 bp, Homo sapiens
gtagagagatgggggagcaggtagatagcttgtggttaaagactgactctgctaattattgctgggaacatgaaagccttcttctattcagttatttaatgtataataaaccctracttaaagtattaatacttctgtggagattaaataagtttctgtttaagtgaacttaaatgaaaagaaacctctcaagatttaaaggctatttaggtggggaagaggagtttccatagtcttcactgggaggcaagtttgtggagacagttatagaataattgtatgtttgaaccatggattttggtttttaaaatgtatgtttcccagagttttaatagacatttgtagaaaactgaatgaaaaacctgaactattttcatggatacatggccatttatgaagaatattcatggatcagagccccaaatatgaattactggaggcttggagagtatttcccaaactgctgtagtaataatagtgcttcatgcactctgtgggggaaaaggggttttattcatttggatacatgaaggagggaaagaggtcaaaattaaattagattgtttt

SEQ ID NO: 206307 - DNA, 619 bp, Homo sapiens
tcatagttggaggctacaacatctctctgtcagtaacagatagatcaagtaggtagaaaatcaatatgaatacagatgacctgagcagcaataataatcagattgatctaattaacttttataaaataatctatctaggaacagaatacattcctctccagctcacatagaayatttaccaagatagatcatgtttgggggcattaagcacactttcatgtattttaaaaatttgaaaccatataaggtagcttagactataatggaattaaaatagaaattaatcacaggtaatgagaaaatccttaatatttggaaattaaaagcataattttaaaaaacacatgggtcaaagtataactctcaaaaataggacttatcaaacttggagtatgcagcaaaaacagtgcttagagcaaaagttatagcattatatgcatagaccagaaaagaagaaagttctcaaattagtaatctaagcttctgttttaggaaactagagaaagaagagtaatttaagccaaaacaagccaaagaaaagaactaatgcatttggaacatataccaatgagcttgaaaaacatagagaaaaatcaacaaaaccccaaattagtcctta

SEQ ID NO: 206308 - DNA, 568 bp, Homo sapiens
tcctttctttttcatctatggtataagaagtggataataataaatatttacatgtcatgccaagttaagtcaaaagacttggccaacttaacaaactcctctttaaacatccctgaattctctgaaaactggcaattttttttccttgcataaagccaacagaaatggaaaaagacacacatacttaactattcccccatctccaacagccacctcctgtattgaacgtagtttcaattttaggggctgatagggggccccactccttttggtactggttggacttacttccttggacagtggtataggctagggcttgttggttaagagggaggagtgcctgatgacgttagggtggaatcctgtgctaaagaastggcaaggctcccctcagaattgaaggtctgaggaggctccaagaggagcataggccttctagggggagcagctaagagggggtcatctaggatacccagtgtggcttcctggttccagggactattacgagctagatacattttactgctatcccttagggtcagggtcctggcagagagctataaaagct

SEQ ID NO: 206309 - DNA, 568 bp, Homo sapiens
tcctttctttttcatctatggtataagaagtggataataataaatatttacatgtcatgccaagttaagtcaaaagacttggccaacttaacaaactcctctttaaacatccctgaattctctgaaaactggcaattttttttccttgcataaagccaacagaaatggaaaaagacacacatacttaactattcccccatctccaacagccacctcctgtattgaacgtagtttcaattttaggggctgatagggggccccactccttttggtactggttggacttacttccttggacagtggtataggctagggcttgttggttaagagggaggagtgcctgatgacgttagggtggaatcctgtgctaaagaactggcaaggctcccctcagaattgaaggtctgaggaggctccaagaggagcataggccttctagggggagcagctaagagggggtcatctaggatacccagtgtggcttcctggttccagggactattacgagctagayacattttactgctatcccttagggtcagggtcctggcagagagctataaaagct

SEQ ID NO: 206310 - DNA, 560 bp, Homo sapiens
attaactgccccagtttttttaagtcctgacttttataagcacacaggatttcagttcaaattaactaaacaactactgagtacctattttgtatggcaactccattcaaagttgtagctcttccaaagatattcaaactatgtgtctgttttccaggacattaaatgtaatggcgaaggcagatgtacaaaaatctgtgacgtagaacagagctgacctagacctatcctccacactacattcacatttatcacatatttattttcattttaatttttacattttttgttaattaaaagtggagtttcactatgtcacccaggctggaatgcagcaacttgatcattgctcagtgcaggctcgaactcctaggttcaaacaatcctcctgtttcaacctcctgagtagctgggattagagccttaaaccaccacacctggctcatcatacattaaatgcataggaatttcagaaaattttgtattttagagaataatggatacaaarttacttagataatttgatgtcaattaccatcagtgctacttaaagactattt

SEQ ID NO: 206311 - DNA, 478 bp, Homo sapiens
  misc_feature (1)...(478): n = A,T,C or G
tatttatgcaaaaatcttaagtacaayattgaaaaacaggacttagtaaaaaaacaaaaaatcacaataaaggagagtttattctaagaatgtaaggatggatcagtattgagaagtctatttacgtaatttatttcactaataatctaaggagaaaaactatatgaacatcaccancagnatgttgaaaaagcatttaacaccaaatatttctcataaaaatctttaacctagcaagagttatatactatttaatatattcatctcatcctcaaagcctgcatcatgctaacagacacacctggaattttttaaaatgttaaacatataactatcatataatgcagccattctatgcctatacatttagtcaagtgaaatgtaagtgaatgcttttataaaaacttatacaatgtcctatgtgagctttgttcctaatagccaaaaattggaaacgatacaatagtccaccaaaagg

SEQ ID NO: 206312 - DNA, 302 bp, Homo sapiens
aaatctgcggatctccggggtttgaytgtggcaaggatgctgctagtgtcaaaaccacaacgtgggaagcacagaaccactagttggttttcagtgtttcagtgcatacaattcctaataaatctggccaagaaaacctgtaagttcttagattgtcccaaaggtggcgcatgaaatcaaagcaggagaacagtttcctacgaggtgtagcctgggaaagttgggggtgactgatggaaaggaggagtgaagctccgccctttccgctgctaggctgcgcccgaggctatttaaacccaccc

SEQ ID NO: 206313 - DNA, 289 bp, Homo sapiens
tccggggtttgattgtggcaaggatgctgctrgtgtcaaaaccacaacgtgggaagcacagaaccactagttggttttcagtgtttcagtgcatacaattcctaataaatctggccaagaaaacctgtaagttcttagattgtcccaaaggtggcgcatgaaatcaaagcaggagaacagtttcctacgaggtgtagcctgggaaagttgggggtgactgatggaaaggaggagtgaagctccgccctttccgctgctaggctgcgcccgaggctatttaaacccaccc

SEQ ID NO: 206314 - DNA, 289 bp, Homo sapiens
tccggggtttgattgtggcaaggatgctgctagtgtcaaaaccacaacgtgggaagcacagaaccactagttggttttcagtgtttcagtgcatacaattcctaawaaatctggccaagaaaacctgtaagttcttagattgtcccaaaggtggcgcatgaaatcaaagcaggagaacagtttcctacgaggtgtagcctgggaaagttgggggtgactgatggaaaggaggagtgaagctccgccctttccgctgctaggctgcgcccgaggctatttaaacccaccc

SEQ ID NO: 206315 - DNA, 302 bp, Homo sapiens
aaatctgcggatctccggggtttgattgtggcaaggatgctgctagtgtcaaaaccacaacgtgggaagcacagaaccactagttggttttcagtgtttcagtgcatacaattcctaatawatctggccaagaaaacctgtaagttcttagattgtcccaaaggtggcgcatgaaatcaaagcaggagaacagtttcctacgaggtgtagcctgggaaagttgggggtgactgatggaaaggaggagtgaagctccgccctttccgctgctaggctgcgcccgaggctatttaaacccaccc

SEQ ID NO: 206316 - DNA, 302 bp, Homo sapiens
aaatctgcggatctccggggtttgattgtggcaaggatgctgctagtgtcaaaaccacaacgtgggaagcacagaaccactagttggttttcagtgtttcagtgcatacaattcctaataaatctggccaagaaaacytgtaagttcttagattgtcccaaaggtggcgcatgaaatcaaagcaggagaacagtttcctacgaggtgtagcctgggaaagttgggggtgactgatggaaaggaggagtgaagctccgccctttccgctgctaggctgcgcccgaggctatttaaacccaccc

SEQ ID NO: 206317 - DNA, 289 bp, Homo sapiens
tccggggtttgattgtggcaaggatgctgctagtgtcaaaaccacaacgtgggaagcacagaaccactagttggttttcagtgtttcagtgcatacaattcctaataaatctggccaagaaaacctgtaagttcttagattgtcccaaaggtggcgcatgaaatcaaagcaggagaacagtttcctacraggtgtagcctgggaaagttgggggtgactgatggaaaggaggagtgaagctccgccctttccgctgctaggctgcgcccgaggctatttaaacccaccc

SEQ ID NO: 206318 - DNA, 262 bp, Homo sapiens
gtggcaaggatgctgctagtgtcaaaaccacaacgtgggaagcacagaaccactagttggttttcagtgtttcagtgcatacaattcctaataaatctggccaagaaaacctgtaagttcttagattgtcccaaaggtggcgcatgaaatcaaagcaggagaacagtttcctacgaggtgtagcctgggaaagttgggggtgactgatggaaaggaggagtgaagctccrccctttccgctgctaggctgcgcccgaggcta

SEQ ID NO: 206319 - DNA, 262 bp, Homo sapiens
gtggcaaggatgctgctagtgtcaaaaccacaacgtgggaagcacagaaccactagttggttttcagtgtttcagtgcatacaattcctaataaatctggccaagaaaacctgtaagttcttagattgtcccaaaggtggcgcatgaaatcaaagcaggagaacagtttcctacgaggtgtagcctgggaaagttgggggtgactgatggaaaggaggagtgaagctccgcccyttccgctgctaggctgcgcccgaggcta

SEQ ID NO: 206320 - DNA, 296 bp, Homo sapiens
atctccggggtttgattgtggcaaggatgctgctggtgtcaaaaccacaacgtgggaagcacagaaccactagttggttttcagtgtttcagtgcatacaattcctaataaatctggccaagaaaacctgtaagttcttagattgtcccaaaggtggcgcatgaaatcaaagcaggagaacagtttcctacgaggtgtagcctgggaaagttgggggtgactgatggaaaggaggagtgargctccgccctttccgctgctaggctgcgcccgaggctatttaaacccaccctggc

SEQ ID NO: 206321 - DNA, 204 bp, Homo sapiens
tggtaggcagtgctcaccaaatacctgctcatttgagagattactcgattaatgtctgtcttaatttcctggtctcccttgcagtttaractggggacatgtgtttttttctggccagagaactgtgagaggaagtgatagatgaggcgttgcgtgtcttggctgatgcaatcaagggccagggtatgccctgtgtcacataaa

SEQ ID NO: 206322 - DNA, 490 bp, Homo sapiens
caccagtggaaacttagaatktaaagccttgccaggtgcagtggctcatagctgtaatcccagcactttgggagatcaatgtgggcctattgtttaagctcaggagttcaagaccaacctgggcaacacagagaaaccccgtctccaccaaaaatacaaaaattagctgggcatgttgacgtgcacttgtggacccagctacttgggaggctgaggtgggaggaccacttgagcctgggaggcagaggctgcagtgagccaagatggcaccactgcattccagcctaggtgacagagtgaggcccccatctcaattaaaaaaaaaaaaatttaaaccctttctctatgtgagaaagtaattctacatgaaacaagacaaccagtataaaaaaaaagattctaaacagaagttactctgaccaaatctctattcccaagctgacagtttttccaaaaagctggcaaggccaaccacatttaggctgacgaa

SEQ ID NO: 206323 - DNA, 546 bp, Homo sapiens
taccatcctcctatttttggtcgtgacacacttggaacataatccctgtcccccaaggttgttcagtagttgagagcgtggagtctggtaccagatgcttaaattcaaagactagatctgacatttgtaagccattgactctgggcaaatcatgtaactctgtgcctcagtttccccatctgtaaaatgagataatcatatctctctcataaagctgttgtgagataaagtgattttagatacacaaggctttagagcaatgcccggcatatatggtcaattctgcaggggagatgccccagatcactggaactaaagtgctgatggtgcatatggatattatatcattggtgccgatggctcttactaagcgagaaggcaaacagccatctgctgaactaggaggtggggcctggccacctcagagtcccctagctcccctcaagaagggccagccaaggacgggtcactggtaagagagggactcactctgaccacccacatctyctttaggcatttcagcggttccttctccaggagaagaag

SEQ ID NO: 206324 - DNA, 530 bp, Homo sapiens
gttcttacaaaacaagttactgctaaggtaatcagagtttaatctctctgaggaacactgagtggtcgtctaaaacatgggccttggagttatcccacctaggaagtgagggaactgggatatttatactccagttgccatcagttattaatcaaaggctgctcctggggccacrgtgtaatttccctggcacatctggcctgctgtgcacaggagcagagtagctctgtaggtcagaggaaacccccaggcaaatgaatctaggcgctgacaggtagaaggttagtgtgctctgcagtgttaagggtgaggggctctgggcagggcactgacagtgtcaactgcagtcaagaccttgttccactcagatccacctgtgtcctgtgttaggcttactctatcctatcactgcttcttcaaggtcacaaataaacattaaaaaaaaaaaaaaaaagacaacaggagcattagtgggccaggatctcactgtctactgctgcagtctttcccatgatgttcattgatcagct

SEQ ID NO: 206325 - DNA, 530 bp, Homo sapiens
gttcttacaaaacaagttactgctaaggtaatcagagtttaatctctctgaggaacactgagtggtcgtctaaaacatgggccttggagttatcccacctaggaagtgagggaactgggatatttatactccagttgccatcagttattaatcaaaggctgctcctggggccacagtgtaatttccctggcacatctggcctgctgtgcacaggagcagagtagctctgtaggtcagaggaaacccccaggcaaatgaatytaggcgctgacaggtagaaggttagtgtgctctgcagtgttaagggtgaggggctctgggcagggcactgacagtgtcaactgcagtcaagaccttgttccactcagatccacctgtgtcctgtgttaggcttactctatcctatcactgcttcttcaaggtcacaaataaacattaaaaaaaaaaaaaaaaagacaacaggagcattagtgggccaggatctcactgtctactgctgcagtctttcccatgatgttcattgatcagct

SEQ ID NO: 206326 - DNA, 387 bp, Homo sapiens
taaactgatgacctctctcctatgctctttgttttcgttagcttattccttatatgctcctttctgtcgttttattggcatataaagagggtgaggaaccatatagctgtgcttatttggccttcagtcaaagcctaccttatctctttaacctaagttcctattccttcatcttctgtccacaagctaamcatcatgggaccctcaaatctatttccctttttcaagcctttgcatatgctctcctcctacctgggatttcattctccttatcatggccaacaaactttctggcttttcctcaaaattctggtcaaagggtaactcttgtattaaatttttcctatttttctctctctcttcaaacagttaatattgatgaattcc

SEQ ID NO: 206327 - DNA, 410 bp, Homo sapiens
gaacagttgagggaaagatggtgtggtgaaggaagccaggtgagcaagcaggtctaagcgggaaagcattgcttttcctacaggaattttcctgtgcattcaggctgtaaggatctcaacttttaaaaaagccacattgttctcccaagttgttggggagctggttcaccattgacttctgatctctggagatattttcataatcatggagctgtctttcttttcactcttttactctctttctagacaggcttcttggataccaagsgttggtggtgggtggggggaggttctggggatggttaaatttgcctgggcagcctcaaagttcaaaaaggagggacagggaagcttagctaagaaccaggagtttgacatacttaatctctcatttcatcctactgatgact

SEQ ID NO: 206328 - DNA, 555 bp, Homo sapiens
gcccctgggataatgtgagtttgtttcagaccattgcaataaagtgactattgcaataaagcaagtcacatgaggtttttggtttctaagtgcattataaaaattatgtttataccataatgtagtctagtgtgcaatagtattatgtctaaaagacaatgtacataccttaattaaaaatactttatagctaaaaatgctaatgatcatctgagccatcagtgagttggcatcttttttggtggagggtcttgcctcartgttgatgtttgctgattgatcaggtggtggttgttgaaggctggagtggctgtggcaatttttaaaaataagacaacaataaagtttgctgcatcaaaggactgttccattcatgaaagatttctctgtagcatgtgatgctgtttgatagcattttacccacagtagaacttctttcaaaattggagtcaatcctctcaaaccctgctgcttatttatcaagtttacaaaatattctaaacccttagttgtcatttcaacaatgttcatagcatcttcatcaggagtagattc

SEQ ID NO: 206329 - DNA, 425 bp, Homo sapiens
atgtggtcagacagattagaggaggagtgcttcagaaatcagcatgctcttcatgacgagaaacatctcagtttaaaattgatctctatttccacatgtccaaaatgactaacggagaaatgtacaaaggggtgacggaaacagaccattcacagccacaccccatgaagaaggagagttggcagaatactgctgctcagctttctacacctggggtgaccatctgtccactaccgactcagccagtggtcacatttccatgcctctgctcctgccaagaccactgaccatggagagaaggtcaacagtctgaggcagtactaaacctccagcccaagagctcaagcagctctaactgtgaggcagrctcttggcttccatcacatggtctgggccatcctcctagacccaccagcacttcttgc

SEQ ID NO: 206330 - DNA, 407 bp, Homo sapiens
atcgaattccacttcaaaataggttgcccctgggctaacaaagacggatacctcatggcaattattttcatagttgtgggcagattccttcgtccacgtatgtaacaccacaggctgttcctgttgccaggtctcaacatccagctatgataacaaatgagccaggggaaagaaaggttctatcactagacacctagccacatgcagcagactgtttctctatcagtgctccaggcagatggccttgacagccctgcacaaaccagcaggcaggctcgaagacaaacctgacattcccatcttcacacagatcaacacacgtccaccaygcagccgaggagatgtgcttttattacacacaaaaactccatgaccagcttgtaccttttcgctatgacagaactact

SEQ ID NO: 206331 - DNA, 596 bp, Homo sapiens
aatcttaaaattcatgataattgaccattaaattagggatcagaatattacagcctgcaggccaaatctgatctgatttatttttaagttttataaggtccaacatcaaatttaattttctctttatgcatcctgcttttgagatccattctaagtgctttttccctaatgcggtatgttgaacatattttcttatgattttttttttaagctttaaagttgaatcttgttcattaaatccatgataccttttgaggtgtgagatttargttgaggtttatttttcacctatggatgtccagttgtgccagcaatatttattgaacaggctatcctaccttcaatgaattgaatatttgtcaaaaatcaggtggggttatctacctaggactctttctgggttctcttttctcttacacccatctatgtgcctatccctctgaaaataacacactgtaacattaagtaaatcttaatattagctgaagttattcctcccactttattccctgccaagattgttttaactcttctagggctcagatcttttgcataagtttcagaataagtgtgtttatgtctacaaaaacacttgc

SEQ ID NO: 206332 - DNA, 328 bp, Homo sapiens
tcattttcttgcgtctgatctgagaggaaatgctccaatcttttaccattgtgtaatgttaattattgattgtttatacacatttttacgaactyggctcactgcaacctccgcttccaaggttcaagcaattctcctccctcagcctcccgagcagctgggattacgagtgcatgccaccatgcccggctaatttttgtattttagtagagactgggtttcaccatgttggccaggctggtcttgaactcctgacctcaggtgatctgcctgccacggcctcccaaagtgctggtattacaggagtgagccaccatgcctggccagt

SEQ ID NO: 206333 - DNA, 564 bp, Homo sapiens
cacagttgaatcctgcatcatgaaacagtcctttttcatggcttcatgatacaacactatgctgcctttcttttttcttattttgttttgttttgtttttattgttgttggtttttgacagggtcttattctatggcccatgctggagtgcagtggtgcaatccaggctcactgcaacctttgcctcctgagttcaagcgattctcctgcctcagcctytaaagtagctaggattacaggcacctgccacctcacccagatttttttttttttttttttttagtagagatggggtttcaccatgtcggccaggctggtctcaaactcctgacctcaagcgatccactcatcttagcttcccaaagtgattatactgcctttcttctcctttctagatcactgtctctagactcttctttctctgctttgaaccttcttcctagactacatttttgtttccttgccatatttgttcctatgttatgtcattcaattttagagttaaatatgacccctcaaatgccaatgaccaccaaatttatctctttatcccaggaagtcact

SEQ ID NO: 206334 - DNA, 510 bp, Homo sapiens
aagttgcagtgagccaagatggcatcactgcactgctgcctaggtgacagagtgagactctctcwcaaaaaaaaaaagtagaattaaatgaatgtgatgtgcatcacagcaatccactaacagaaataaatctcatccttttatatagtcaagcagatacaatgcaatacatacatgttctaagataaacaatagtcctcaagtaagccaactcaacagtgctattggtcctatgtagttcttcctaaatttgcatggtagctggaaaaaccatctgtgttaggtaattgccttaaccaaaggaaaataaatgtatcatgtctttatatcaagaagtagctttgcaacttggagtaaggcacctgaaaaagttagactcctacttaccacagaaactggaagatggagtgctatctttctgcataattccattctaaagaaatggcttccaggtacttaagaaaagcatttttgagtggtaaacctggcaataagcttttaaaaatattt

SEQ ID NO: 206335 - DNA, 510 bp, Homo sapiens
aagttgcagtgagccaagatggcatcactgcactgctgcctaggtgacagagtgagactctctctmaaaaaaaaaaagtagaattaaatgaatgtgatgtgcatcacagcaatccactaacagaaataaatctcatccttttatatagtcaagcagatacaatgcaatacatacatgttctaagataaacaatagtcctcaagtaagccaactcaacagtgctattggtcctatgtagttcttcctaaatttgcatggtagctggaaaaaccatctgtgttaggtaattgccttaaccaaaggaaaataaatgtatcatgtctttatatcaagaagtagctttgcaacttggagtaaggcacctgaaaaagttagactcctacttaccacagaaactggaagatggagtgctatctttctgcataattccattctaaagaaatggcttccaggtacttaagaaaagcatttttgagtggtaaacctggcaataagcttttaaaaatattt

SEQ ID NO: 206336 - DNA, 266 bp, Homo sapiens
aagaaaaaaagaagcaagatatggaaactgaggtatcatttaaaatacattaamtacattgccactctcttaaaattaagaataaatttctttaaatcaggcaatactaaggacttaaaatgttttattaaaaaattcataaaaagaagtttacttatgtattttgtcataagcttaaaaaaaaaaaaaaagaaaaaaaaaaacagagtggtttaggacctgctaaaaatcacctggatttctcatcagcacatttaactgaacaa

SEQ ID NO: 206337 - DNA, 478 bp, Homo sapiens
aaactttcccacatttttctgtcttcttctgagctcttcaaactgtttcgacctctgcctgttacccagttccaaagttgcttccacattttcaggtatcttttcagcaacaccctacctactctgctgataccaatttattgtattagttcattttcatgctgctgataaagacatacctgaaactgggcaatttgcaaaagaaagagtcttaattggacttacagttccacttgtgaggctgaggaggcctcacaatmattgtggaaggcaaggtggagcaagtcccatcttacatggatggcagcaggcaaagagaaaatgaggaagacaaaaaagcagaaacccctgataaaaccatcagcccttgtgagacttatttactgccatgagaactgtatgagggaaaccaccccatgattcaattatcttccaccaagtccctcccacaacatgtggggattatgggagtacaatt

SEQ ID NO: 206338 - DNA, 478 bp, Homo sapiens
aaactttcccacatttttctgtcttcttctgagctcttcaaactgtttcgacctctgcctgttacccagttccaaagttgcttccacattttcaggtatcttttcagcaacaccctacctactctgctgataccaatttattgtattagttcattttcatgctgctgataaagacatacctgaaactgggcaatttgcaaaagaaagagtcttaattggacttacagttccacttgtgaggctgaggaggcctcacaatcattgtggaaggcaaggtggagcaagtcccatcttacatggatggcagcaggcaaagagraaatgaggaagacaaaaaagcagaaacccctgataaaaccatcagcccttgtgagacttatttactgccatgagaactgtatgagggaaaccaccccatgattcaattatcttccaccaagtccctcccacaacatgtggggattatgggagtacaatt

SEQ ID NO: 206339 - DNA, 540 bp, Homo sapiens
tttaaatgacatgagtcttagctgtggagcaggggatgccaactttttctgtaaagggccagacagtaaatatttttcagctttgcaagccaagtagtctgtattggagctcttcaacactaccattggagtgcaaagctagccataaacagtacrtgtgcaaatgagggagtatgtgttccaataaaactttatttacacaaacacacagaggcttgaatttgtttcccataatttgccaatgccttccttagagtctagtcaataatctgtaagcaagtgagatgtcactgcagggccctgattcaaacagtatcaaaggattgattccttgtcattcatcaagcagtacaactgtcttctcccttaagaaaccagaattaatatagcaggaatgactttatcgatgttcaccagataaacctttcaaatcagttgctatagctaggatcaactgactcgcattttattcagttcctttctgtcccttcttttctacttctaattcctcctctgatatcaatcctgttatttgtagat

SEQ ID NO: 206340 - DNA, 560 bp, Homo sapiens
acaaactggtaatcctagaaaaaaatatttttatatataaataaatctttgcataagcaggatgtactctgagtagaggtgaagagatagtgartgtgaaagaattagagtgaaatttctacaaaatgtgctaaagatagataatagattaaaataataaggctgtaaggcggagtggtgataaagaggctcatataagtcaaacaaaagttccagaaaagagaaaatagatgattgattaaaattggacagaaataaagatttggaaaaatccacagtaaaatataatttcttctgatggaaggcgagatgaggaccaacaagcattcttggcaccaggtccagatgcagaggaagctctctctcctcaggggctccatccataccttggtgctgtcaggctggggctgcttttattctgcttctgtgtgtctgggagaattgtggaatgattggacattctcaattctatccttttgacatgagaagaaactaggaaagtaggcagcacttccaatttgggttcgttacctccgttctgtatcccccaaaccaggatt

SEQ ID NO: 206341 - DNA, 560 bp, Homo sapiens
acaaactggtaatcctagaaaaaaatatttttatatataaataaatctttgcataagcaggatgtactctgagtagaggtgaagagatagtgaatgtgaaagaattagagtgaaatttctacaaaatgtgctaaagatagataatagattaaaataataaggctgtaaggcggagtggtgataaagaggctcatataagtcaaacaaaagttccagaaaagagaaaatagatgattgattaaaattggacagaaataaagatttggaaaaatccacagtaaaatataatttcttctgatggaaggcgagatgaggaccaacaagcattcttggcaccaggtccagatgcagaggaagctctctctcctcaggggctccatccrtaccttggtgctgtcaggctggggctgcttttattctgcttctgtgtgtctgggagaattgtggaatgattggacattctcaattctatccttttgacatgagaagaaactaggaaagtaggcagcacttccaatttgggttcgttacctccgttctgtatcccccaaaccaggatt

SEQ ID NO: 206342 - DNA, 481 bp, Homo sapiens
ctggaaccctgaccgacactggatatgctcaatggtattttctggaagtttggtatgagagagcttgccctgtgatgctgagagccgtgggcccyggggctgggcactgctgcatttacatctcagctctgcaacctccatgcttttggacagtccatcatctccctcatttcctgtttccttgtctgcaaaatggggatggtgaatataagacctatgcatttagtagttacaaggagtaaatgaggtcgtttatgtaaaacatgtagaacaggacctgacacaaagccaactgccaaaaaatgtgagctattactcttacggaaaatgctattttattatgttaattttgattttccttttactattacaaggttaatgattttcatatttgtgttacccgtttctatttcttttgatagttatgttcacatgctatttctctttcagtgtgtcttttaaaaactattgtatggcattt

SEQ ID NO: 206343 - DNA, 477 bp, Homo sapiens
gaaggatgagccataaatcatatcctcagttaatgccattgttctaaaaaataagttgagatgttttattactaaaattatattctgatagtcttttcagatgagtagaaacagttctgttgatatgccaaatttagacagttctctaatacacttttcttaaacttttggcagatgttattacgtatccatcaagaagggttagatgataatttaattaaaaaacacactgcaagcacctattaatattattcctgggctacgatttgcattaattaaatatttgttgaatgaacaaatgggaaaatttgggaagaatcatgcttagctggactatctttyaatttttcaatgagcccacgtccttctggtacattttacaagaattaattcaaaaaggaaatgattcagtagacagatttctagcccagcaattagcactggggatttggcagaccacagcctcatgaagcttac

SEQ ID NO: 206344 - DNA, 201 bp, Homo sapiens
agatctttctgactgaggaactctaggtatgtctagttagcatctyacctctaaataatgtactagatttcttttccaatgtcagcctccagtgtcacccatataaaggcacaaaagatataaggagtcagcaccagagaattgagtttggggaagcattgcttgattccaaatcaaccttggagaatagcccagtggttg

SEQ ID NO: 206345 - DNA, 201 bp, Homo sapiens
agatctttctgactgaggaactctaggtatgtctagttagcatctcacctctaaataatgtactagatttcttttccaatgtcagcctccagtgtcacccatataaaggcayaaaagatataaggagtcagcaccagagaattgagtttggggaagcattgcttgattccaaatcaaccttggagaatagcccagtggttg

SEQ ID NO: 206346 - DNA, 201 bp, Homo sapiens
agatctttctgactgaggaactctaggtatgtctagttagcatctcacctctaaataatgtactagatttcttttccaatgtcagcctccagtgtcacccatataaaggcacaaaagatataaggagtcagcaccagagaattgagtttggggaagcattgcttgattcmaaatcaaccttggagaatagcccagtggttg

SEQ ID NO: 206347 - DNA, 387 bp, Homo sapiens
  misc_feature (1)...(387): n = A,T,C or G
gctcactatctcactggggcagcgcaacagaatctgttcttcagtactgcacaagtatgaagtgtcaacacattaaaaaaaaaatcacagttgttcttggggcctggcttattcccacagctcagacaccctgctcatcagggctcagtgtctgcaaatgatctatagatgaagagcctgctgcatcccctggcaagagggaggctgagggttkggtgtggaaggcaggatctcaggttcacactgtgggagctgctgcccattcagtcctagggaaaaaattctcatacactctaaccttgggttgcttcattttactggtttctcttaacccttttaagagtcactattgttaatcactaaactattgttcatcactaattnntg

SEQ ID NO: 206348 - DNA, 520 bp, Homo sapiens
tccctttatctcctcattatgttcaagtttttcattacatttataaatatatccataagaatgttttaacatgactgtatattaatttcatctcctctgtcatttctaggtattttttttttttttttttgwgatggagtctcactctgttgcccaggctggagtgcagtggtgccatcttggctcactgcaacctcctcctcccaggtttaagtgattctcctgtctcagcctcctgagtagctgggactactcgggagtgtgccaccatgcccactaattttttgtatttttagtagagaatttcaggtatttttctattaactgattttatttctcattagaaataatattttcctgtttctgtgcatatttagtaacatttgattgcgtactgaacactctgaatatcatgttaagattctggagtttgttatcctccttaagaaatttttgagttttgttttggcagtcagctaaatagtatgtagattagctgatccttttgtgtcttgtttta

SEQ ID NO: 206349 - DNA, 465 bp, Homo sapiens
gatggaaaacctgtagaaattacctgtccccaaaccctaatgctgcagtgggaaactgtgagagacagggaggttcagtgctataaataaagtcacacagccattcagcaatggcagagccaagaaccctgggaacgtgcgaatcccacgtttgcgattcccagagtcctgttcttgcagatgcaccaggcggcctctcctcaccatgagctgcatgaagtctaacacaattcaatatgactgaggattatttccttcttgacaaaagaatacagccacgtgattccacaaacaaaattaatatacataaaaaagaaccattttttccactttactcaagatgaacagaaatgtcttctttcaaaggcactgawatgagcattcccattcccatctggaattggatggaacacagagtggtgtcagagtctgaggcagtgcctcttcccttcttgtttgcctgtc

SEQ ID NO: 206350 - DNA, 513 bp, Homo sapiens
taatggaactttctttgagtttgccaagtgattctttcctcctctgggatctcatattcaaaacgaatatcctgatgcaaataacagcaggggaaggttcaagaataaagaaaagcaacaaagttttatcagttgctgccaacactataagcccaaatcagctttacagcaaagctagcactgatttcccaaagtacaatgaatcatggagaagatagcattgactgtctgccaagcactaagcacgattctgtgtattctacaggtactcattcatttaatcttcaaaacaaacttgtttctaaaaacacgatcattgtcaacattacattaggaaaggaaggcygaagagaggcttagcaacttgtcaaaggtgatgtctctaacaaggagcctgacaaggttcaactcctgtccgagtgtcgataattaatttatacagctcttgcaaatgcataagcaatcttttattctcacaggcctcgtgttgcaagcccattgtctataagctgc

SEQ ID NO: 206351 - DNA, 493 bp, Homo sapiens
taacagtttatgtaatttaataaaaatagtttatgtgctcctttaggtgttaaattcatatacagagatacattaattaagcctttctcacctgccttacctgaaaacatcatagattaaatgttagagccaaatatcaccctgtgggaaactaactgtagtttgagaggttgtgttttttgtttttttgyttttgtttttgtttgtttgttttttgttttttgtttttggaaggagaaacaaagagagttacaaaaaaataggaaggagaaactcggtgttatgtgtattgtccacaaaacaaatatacgtgaagagtatcttgttttggtttcaataattttattgtattttgcactacaaatggatatcttcccgtatgttcatggctttcaagtaaaaaatacatttctttaacttatttgatgatgtattagaaacaggcacatctaacatcttagaaatataagagaaaaatatttcttgtttttct

SEQ ID NO: 206352 - DNA, 415 bp, Homo sapiens
tctcgttcaagtagccaggagtggttctaattgtttgctcctttggtctcagcattgacttatactaaatgaagttgaatgcctaaaaactcatagcataatatagaggaagaagtcaaaagattaaaggaaatagaactgatggagtggatttatcactgtgaccattcacttacytcccctattccctctccagtattctctactaagaggtctggaagacacttcattcaccaacctaatgagaaatactttgagggcagtgccagcatatatgaaaagtaattcaattgcttttgtctgtaggctggaggagatactttcattgaaattgtcttttttacttcagggggtgtggccagattctaggtaaggtccaggcatcattttcataaggtagcttgacaggcatgat

SEQ ID NO: 206353 - DNA, 532 bp, Homo sapiens
gaattcctagtgacaccaaggttcttttctttccttgtttcatattcctcttccataatgaagatccagtttaccaataacatcaatatatgtttattcatttgctctgtcttatacatgatataacattggaattactatagcaataccactactaataataatctcaataaagtttaagatttctatgcagttttttatttatagcgtatagcccagtgaaggtatatagtcagatcgctatgcttatagttattttaattatatttttcacataggcaatttgaaactttttytaataggaaggttaagcctatttacttatcttgacataactagtatgtttaatctaactgatatgttgtatttactgttgttttatgttatatatgtttttcttttactcttttttaaaaagttatttttactaatacaaaaatcttcctttctctagatatttagaatgttggtcttagctcttatagtttcccagtctttttggtatttttgttgtcattactatgtttaattt

SEQ ID NO: 206354 - DNA, 604 bp, Homo sapiens
ctgtctctactttttaaacatacgaaaaagtgaaaaaaagaaaggaacttttcctctgtactcacaacttggatgtttggcacaaaaggcctagcttttgccctgtctctgctttcaacatgccttcttcactaatcatttctagcttttgatttaaaatgagagacatgcaactcttcttttcacttgaacacttagaagccactgtagggttattaaytggcaaaatttcaatgttgtgtctcagggaataaaaaggcctgagaaaagagagatgggaacagctggttggtggagtggtcagaatacatacaacatttattaagtttgccatcttttattcttctatgggtgtggttcatggcatccccaaacaattatgatagtaacataaaagagatcgctgatcatagataaccataataggtataataataatgaaaaagattgaaatattgccagaattaccaaaatgggacacagagacacacagtgagctgctggaaaatggcaccaagagacttgctcaacacaggattgctccaacccttcaatttgtttaaaaaaaaaatcagaagcaaagtgcaataaaccatggtgtgcc

SEQ ID NO: 206355 - DNA, 361 bp, Homo sapiens
agactatcctgggcaaccaacatggtgaaaccccatctctactaaaaatacaaaaattagctgggcgtggtggcgcacatctctaataacccagctaaccaagtgagcaattcctgtcccttttaagggctcacaagtctaagggggtccatgtgagagggtcgtgatcatgagagggtcgtgatcgrttaaccaagcaggtagtatgtgactgggggctgcatttggcaaactccatctctactaaaaatacccaaattcagcaaagtctcagatacaaaatcaatgtgcaaaaatcacaagcattcttatataccaataacagacagagagttaaatcatgagcaaacttccattcaca

SEQ ID NO: 206356 - DNA, 268 bp, Homo sapiens
taactttttgatatggggattacttcttatgccctactctaacttttytccttctcctagaaaactcagaactatgctttctaaaccaattcaaactttctcagtgaatcaacctggtctccctgaggcaaagttagcaattttccattacacatggttctctttctctgtaagaatatctaatgcaacgatgcaagtgtttctttccctcctggatatgcggggaactacttttggctgagaccaagacttaaaaccttgttctttc

SEQ ID NO: 206357 - DNA, 268 bp, Homo sapiens
taactttttgatatggggattacttcttatgccctactctaacttttctccttctcctagaaaactcagaactatgctttctaaaccaattcaaactttctcagtgaatcaacctggtctccctgaggcaaagttagcaattttccattacacatggttctctttctctgtaagaatatctaatgcaacratgcaagtgtttctttccctcctggatatgcggggaactacttttggctgagaccaagacttaaaaccttgttctttc

SEQ ID NO: 206358 - DNA, 268 bp, Homo sapiens
taactttttgatatggggattacttcttatgccctactctaacttttctccttctcctagaaaactcagaactatgctttctaaaccaattcaaactttctcagtgaatcaacctggtctccctgaggcaaagttagcaattttccattacacatggttctctttctctgtaagaatatctaatgcaacgatgcaagtgtttctttccctcctggatatgyggggaactacttttggctgagaccaagacttaaaaccttgttctttc

SEQ ID NO: 206359 - DNA, 268 bp, Homo sapiens
taactttttgatatggggattacttcttatgccctactctaacttttctccttctcctagaaaactcagaactatgctttctaaaccaattcaaactttctcagtgaatcaacctggtctccctgaggcaaagttagcaattttccattacacatggttctctttctctgtaagaatatctaatgcaacgatgcaagtgtttctttccctcctggatatgcggggaactamttttggctgagaccaagacttaaaaccttgttctttc

SEQ ID NO: 206360 - DNA, 419 bp, Homo sapiens
tgcatgaagcctggtcctgccctcactgggaacccccttccctctgggtaccagacagaattctatgcactttcctggaggctccatgctggtctgttcatttggaagtttgaggctgtccatgaggaagtaacaaaagagatatctcagagcaggttgtggggcacaggctgagcccttgcctagtccctccctagtccctttgcagagccagggctggaacaaggacctgtggwtaatgagggaactgctctgcaataaccggcctgagcagctgcttcaagaaacagccacaatcaaggcacctatagcccctggtgagtgactggcagcctcaggcccacctgccatctgtgagcaggttttcttgctaacaggatgaaagcaaagaaagctggaataagcccagccctctcagg

SEQ ID NO: 206361 - DNA, 564 bp, Homo sapiens
tctatatatgtacaacagtttgaagtcattattaagcaaagtgaaacaaaactgtcacagaattccctaagataaattattttgctttaatcttcaattcatcatgtgagataatcaagaccatgtgttattgtaaatatttctatctcataacacaacaacctgatttttattgtttgaaataaccgcaatataaatcagttaatttaaaattgcataaataatcctttcaaataaaattctgtctaaattttacattactcatatgttcaaatgataatgagctcataggcttttccaatacctcagtcaaaacattgtactgattccagctgtgggaatagtatctgaaagttattttacagatggggaaaacgtacttatgtgacattggcctttgcactactgtgcccttttgggtcaggaaaaatctsttcccttaaaatcctaaaatctcttctgtcaggtctgaagggtgggtgggaaacagagttttttaaatctaagccacagatgttttattccttgcttaaagcagtgactagataaaggccactagaagag

SEQ ID NO: 206362 - DNA, 564 bp, Homo sapiens
tctatatatgtacaacagtttgaagtcattattaagcaaagtgaaacaaaactgtcacagaattccctaagataaattattttgctttaatcttcaattcatcatgtgagataatcaagaccatgtgttattgtaaatatttctatctcataacacaacaacctgatttttattgtttgaaataaccgcaatataaatcagttaatttaaaattgcataaataatcctttcaaataaaattctgtctaaattttacattactcatatgttcaaatgataatgagctcataggcttttccaatacctcagtcaaaacattgtactgattccagctgtgggaatagtatctgaaagttattttacagatggggaaaacgtacttatgtgacattggcctttgcactactgtgcccttttgggtcaggaaaaatctcttcccttaaaatcctaaaatctcttctgtcaggtctgaagggtgggtgggaaacasagttttttaaatctaagccacagatgttttattccttgcttaaagcagtgactagataaaggccactagaagag

SEQ ID NO: 206363 - DNA, 564 bp, Homo sapiens
tctatatatgtacaacagtttgaagtcattattaagcaaagtgaaacaaaactgtcacagaattccctaagataaattattttgctttaatcttcaattcatcatgtgagataatcaagaccatgtgttattgtaaatatttctatctcataacacaacaacctgatttttattgtttgaaataaccgcaatataaatcagttaatttaaaattgcataaataatcctttcaaataaaattctgtctaaattttacattactcatatgttcaaatgataatgagctcataggcttttccaatacctcagtcaaaacattgtactgattccagctgtgggaatagtatctgaaagttattttacagatggggaaaacgtacttatgtgacattggcctttgcactactgtgcccttttgggtcaggaaaaatctcttcccttaaaatcctaaaatctcttctgtcaggtctgaagggtgggtgggaaacagagttttttaaatytaagccacagatgttttattccttgcttaaagcagtgactagataaaggccactagaagag

SEQ ID NO: 206364 - DNA, 564 bp, Homo sapiens
tctatatatgtacaacagtttgaagtcattattaagcaaagtgaaacaaaactgtcacagaattccctaagataaattattttgctttaatcttcaattcatcatgtgagataatcaagaccatgtgttattgtaaatatttctatctcataacacaacaacctgatttttattgtttgaaataaccgcaatataaatcagttaatttaaaattgcataaataatcctttcaaataaaattctgtctaaattttacattactcatatgttcaaatgataatgagctcataggcttttccaatacctcagtcaaaacattgtactgattccagctgtgggaatagtatctgaaagttattttacagatggggaaaacgtacttatgtgacattggcctttgcactactgtgcccttttgggtcaggaaaaatctcttcccttaaaatcctaaaatctcttctgtcaggtctgaagggtgggtgggaaacagagttttttaaatctwagccacagatgttttattccttgcttaaagcagtgactagataaaggccactagaagag

SEQ ID NO: 206365 - DNA, 517 bp, Homo sapiens
gatcaagaagccttcagtgttgaacatacaagcggcaatgggaaagacaatttcacaaatgtgaaaaaaaaaaagccaaaataggtattcaacacaaaaataatcccccaaaattcactgttccagttagtggaaatactatggaatctcctcttaatgaaaacatctcaattcatttttaaggatgagaaaatcacagagactgatagtgaaccagaagaaggtgaaattacagactctcagaccgagggtagttatgatgaaggcattaccagtaaaggcaatgcaactgcaaaagatactgaggaggcagatgaggaaaaagtgtggccctcatatatgagartaattgtcattagatcacctgtgttacagacaggatcattcttcatcattactgctgtaaaatctgctacaattggaagagaaaatgacatggagcatactcttcgaatccctgaagttagtataagtttcatgaagaaatttattttgaccatgacttacaaagttatgt

SEQ ID NO: 206366 - DNA, 495 bp, Homo sapiens
tctgttatatatttttatacccattaatcaacctcttttcaaacccctcctattcccagcctctggtaactatcattctactctttatctccatgatgtcaattttatatagctccagggcacacaagtccataactgcggtctctatccctgaccctactgacctgaaacatggcccccactttgattwccaggagcataaaccgctcatataagtgagaacaggcaatgattttctttctgtgcatggcctagttcacctaacattatgacctttaattccatacatttagctgaaaatgacaggatttcattcttttttgtggctgaatactattctattgtgcgtatattcccattttctttatccattcatccattgtttgacacttagattgattccatatcttggctattgtaaatagtgctgcagtaaatatgggggtacagatatcccgttgatacactgatatccttttttttttggatatatac

SEQ ID NO: 206367 - DNA, 201 bp, Homo sapiens
tctttatggaaaaagtttgccattccctagtctaaggtttagaktctgagcttatcattttagcctaatcccccttaccagtgactggctcaaaacaagtctgtgattccattctgactgttctactgagggaattcccccttcttctcatgcagagctgatgagggtaagttgtattaataggacatatgctcaggtttt

SEQ ID NO: 206368 - DNA, 201 bp, Homo sapiens
tctttatggaaaaagtttgccattccctagtctaaggtttagagtctgagcttatcattttagcctaatcccccttaccagtgactggctcaaaacaagtctgtgattccattctgactgttytactgagggaattcccccttcttctcatgcagagctgatgagggtaagttgtattaataggacatatgctcaggtttt

SEQ ID NO: 206369 - DNA, 474 bp, Homo sapiens
agtgtacgtcaatgcagagcatcaagcacggcgtaacaggtgcacagttgcctattcctgttcagagatgactgcrtcccacacactgtaaaatgaggaaatgcagagaagcagatgtaactgaagaagacagcaggagcaaaaaggagggacaaccacgacctaggagggcaccatgccagagaggcctggaccccacgctaggctcagtgcctgttatactcttgggacccagcgctttccttctccatcacgtggcatacttggcattatttgttgtttaaaatattgtccttagttttcacctttcctaggagacacaggcagaccctgtgacactacagctggcacacagtaggtgcatcacaaacatctgctgagttcacacactcttgccttctcaaaccttcttgtcaagtcttcagtgaaaaggaactgctgattgagcaagaattaaacttctagagactcctg

SEQ ID NO: 206370 - DNA, 474 bp, Homo sapiens
agtgtacgtcaatgcagagcatcaagcacggcgtaacaggtgcacagttgcctattcctgttcagagatgactgcatcycacacactgtaaaatgaggaaatgcagagaagcagatgtaactgaagaagacagcaggagcaaaaaggagggacaaccacgacctaggagggcaccatgccagagaggcctggaccccacgctaggctcagtgcctgttatactcttgggacccagcgctttccttctccatcacgtggcatacttggcattatttgttgtttaaaatattgtccttagttttcacctttcctaggagacacaggcagaccctgtgacactacagctggcacacagtaggtgcatcacaaacatctgctgagttcacacactcttgccttctcaaaccttcttgtcaagtcttcagtgaaaaggaactgctgattgagcaagaattaaacttctagagactcctg

SEQ ID NO: 206371 - DNA, 474 bp, Homo sapiens
agtgtacgtcaatgcagagcatcaagcacggcgtaacaggtgcacagttgcctattcctgttcagagatgactgcatcccacacactgtaaaatgaggaaatgcagagaagcagatgtaactgaagaagacagcaggagcaamaaggagggacaaccacgacctaggagggcaccatgccagagaggcctggaccccacgctaggctcagtgcctgttatactcttgggacccagcgctttccttctccatcacgtggcatacttggcattatttgttgtttaaaatattgtccttagttttcacctttcctaggagacacaggcagaccctgtgacactacagctggcacacagtaggtgcatcacaaacatctgctgagttcacacactcttgccttctcaaaccttcttgtcaagtcttcagtgaaaaggaactgctgattgagcaagaattaaacttctagagactcctg

SEQ ID NO: 206372 - DNA, 474 bp, Homo sapiens
agtgtacgtcaatgcagagcatcaagcacggcgtaacaggtgcacagttgcctattcctgttcagagatgactgcatcccacacactgtaaaatgaggaaatgcagagaagcagatgtaactgaagaagacagcaggagcaaaaaggagggacaaccacgacctaggagggcaccatgccagagaggcctggaccccacgctaggctcagtgcctgttatactcttgggacccagcgctttccttctccatcacgtggcatacttgrcattatttgttgtttaaaatattgtccttagttttcacctttcctaggagacacaggcagaccctgtgacactacagctggcacacagtaggtgcatcacaaacatctgctgagttcacacactcttgccttctcaaaccttcttgtcaagtcttcagtgaaaaggaactgctgattgagcaagaattaaacttctagagactcctg

SEQ ID NO: 206373 - DNA, 562 bp, Homo sapiens
cggcgtaacaggtgcacagttgcctattcctgttcagagatgactgcatcccacacactgtaaaatgaggaaatgcagagaagcagatgtaactgaagaagacagcaggagcaaaaaggagggacaaccacgacctaggagggcaccatgccagagaggcctggaccccacgctaggctcagtgcctgttatactcttgggacccagcgctttccttctccatcacgtggcatacttggcattatttgttgtttaaaatattgtccttagttttcacctttcctaggagacacaggcagaccctgtgacactacagctggcacacagtaggtgcatcacaaacatctgctgagttcacacactcttgccttctcaaaccttcytgtcaagtcttcagtgaaaaggaactgctgattgagcaagaattaaacttctagagactcctggatccactgaagtttgagacaagttgagatttgtttactgccatattcctagctcatagcatactgtagtcacttaaaaaatgtttgttgaataagtgagtgaattgattcaattg

SEQ ID NO: 206374 - DNA, 552 bp, Homo sapiens
tgggtcaaatagtacttctacttttagttctttaaggaatctccacactgttgtccatagtgattgtactagtttacattcccaccagcagtgtagaagtgttcccttttcactacattcacatcaacatctattttttttttattatgaccattcttgagagagtaaggtggtatcacattgtggttgtaatttgcatttccctgatcattagtgatgttgagcatattttcatatgtttgttggccatttgtatatcttctgagaattgtctatgaccatactgccaaaakcaatctacaaattcaatgcaattgccatcaaaaaaccatcatcattcttcacagaactaaaaaaaaaatcctaaaattcatatggaaccaaaaaagagcccacatagccaaagcaatactaaacaaaaagaacaaatcagaaggcgtcacattacctgatttcaaactatatcgtaagaccatagtcaccaaaacagcatggttctggtataaaaacaggcacatagacaaatggaacataatggagaacccagaaatt

SEQ ID NO: 206375 - DNA, 600 bp, Homo sapiens
tcaaggacttaaatctaggacctgaaagtataaaaattctagaagatgacatcaaaaacacccttctagacattggcttascatggatttcatgaccaagaacccaacagcaaatgcaagaaaaacaaagataaatagttgggatttaattaaactaaagagctttttcgcggcaaaaggaacagtcagcagagttaacagaaaatccacagaatgggagaaaatcttcacaatctgtatatctgacaaagaactaacatccagaatctacaacgagctcaaacaaattagcaagaaaaaaacaaacaatcccatcaaaaagtaggctaaggacatgaatagacaattctttggccactttttaatagggttgtttgtttttctcttgtaaatttaagttccttatattgaatattagatctttgtcagatacatagtttgtaaatattttttctcattctacaggttgtctgttcactctattgataatttcttttgctgagcagaagattttaagtttaattagatcccacttgtcaatagttgcatttgttgtttttggtgtctttatcatgaaatctttgcctgtttctatgtcca

SEQ ID NO: 206376 - DNA, 600 bp, Homo sapiens
tcaaggacttaaatctaggacctgaaagtataaaaattctagaagatgacatcaaaaacacccttctagacattggcttagcatggatttcatgaccaagaacccaacagcaaatgcaagaaaaacaaagataaatagttgggatttaattaaactaaagagctttttcgcggcaaaaggaacagtcagcagagttaacagaaaatccacagaatgggagaaaatcttcacaatctgtatatctgacaaagaactaacatccagaatctacaacgagctcaaacaaattagcaagaaaaaaacaaacaatcccatcaaaaagtaggctaaggacatgaatagacaattctttggccactttttaatagggttgtttgtttttctcttgtaaatttaagttccttatattgaatattagatctttstcagatacatagtttgtaaatattttttctcattctacaggttgtctgttcactctattgataatttcttttgctgagcagaagattttaagtttaattagatcccacttgtcaatagttgcatttgttgtttttggtgtctttatcatgaaatctttgcctgtttctatgtcca

SEQ ID NO: 206377 - DNA, 596 bp, Homo sapiens
gaaaaacacttagctcatcatctggcacatagtaggtactcaattaatgttccatataactctaccactactactactattactactactactgaacaggctgggcagctgctgtccagtatgttgaggcagaaaaaagactgaggtcagaaaactggtccaacctaytgaggaggaacctgagatccagaggcagaagtgacttgcctaaagttacccagcttataggagtgtgaaccagattccagggctacagatggtgggtgttgtgatttttagaacatactgaatccttggattctgacaacttaagtaataatcagtgaaaataaccagggaaatgcagtggcctagcagtcaaagacaaatttagctgtgcttctctccctctgtgcagtctccctgatgtttcataaagtatcaaagtgcattgattgaggataagaaatctgctattactgcaattcaaccaaacccctttccccagatcatacagtgcatgttccattacctttgagactttgacttttctcaccccataatttgtcaggctggtcttctattattgatcatttgatcagggatgaggtgtgaat

SEQ ID NO: 206378 - DNA, 559 bp, Homo sapiens
gagttaattagaatttgctcacacggttacaaagtgaagtcccttgacaggccgtgtgcaagctggggaaagagagaaaaactggtagtggctcagtccaagtctaaaagcctcaaaactggggaagccgagagtgcaggctgcagtctgcagcccaaggcctgtgagccccaaggaaaccactggtgcaagtcccagagtccaaaggctgaagaacctggagtctgaggtccaagggtgggaggagcagaagcaagcatccagcacaggaagaagaaagagagccagaagactcagcaaayaaacttatcccaccttctcctgcctactttgtgggtgcccacccacactgaatattggtcttcatctccttgttcaccaactcaaatgtcagtctcctctggcaacaccctcacagacacactcagaaacaatactttaccagacatccaggcatccctcaattcaatcaagtcgacacctaacattagccatcacagtatacaacgtagaatattaaattaagctaattgacatatccaccacctcgcctgcttat

SEQ ID NO: 206379 - DNA, 567 bp, Homo sapiens
gagagagagagaatagtagacattgtagaattccttgttagkcaaaaaccttggaagtcattctgaccactttttttttctttcattattagtcctacgttcattcacaacccagggaaggaaaggccaaaaatagcctccaaaccattgtgaagcagctgtctttggtgcgtgaaggcaagcacacatttggaagtccaagtttagatagtaaacagaggctatattgaaacagtaatcatgctaattaatcatcattttgttagcaaatgtgctgcactttgtattttcaaagcattgtatcatcattaattaatcagctgtaatcactattgcagtggcaaatcaaattatgtacaagacttgaaaagaaattgtttcatatggagtgcacttaaaaagtgcaagtctttttctttctgtttttgttttttatttatttgtttgtttctccatcgaacaggctgtgccatattctctttcacttttctgccctagcttatgctgttccttctacctagatcacagataactcctgttcctttgttagatatcatcataagcaac

SEQ ID NO: 206380 - DNA, 427 bp, Homo sapiens
agaaggaccatttcatttgtacattatttcttcctgtgattctgttttccaacaccttgcctcttgtttcaccatgaaagatgtacacacttcacaccaaaagggtaaaagctgctgctaggcagatgtggacttcaaatctctccaaggtcagacagtctcttaaaaatgtttaccacaaatgtaagattcrgcaccaagattcaactggatatcccactgtgacatctgatgattgtaatcaagatgatgatagttatgacggaaaaatgaatcttccagtagtgctccaagatgttaaaactgctcaagttgaacttttcagccaaatgactgacattgtccatatgataccaaaagtccaggaaaagactgacttgtatcaaaaacagatggaggtcctggaaaccagaatgaatgttaatga

SEQ ID NO: 206381 - DNA, 606 bp, Homo sapiens
gaatcacaaaaaaagcaatattccattttccgtgttgttgaccaagcagaaaacagaacgtaacttttaaaacgcttgaaaatcagggctatcaaaaatagagaacttctattcgccatgaactcgctgatgcaaacaatcaacgcacactgaaccgtgygtttttctgggtggtggtggtccctcgccaaatagtcagcgtttggttctccgcgtctgtagcgagaggagttacagtttggtaccggcagggaggaaatcgcctcgcaatctctggaggtggcctcctagaaagatcgccgggaggggaggagccccgattgtcctggaagaaaagcatggccccatccgggaagtcacagcttgccgggagcccagggctggcggctctgggtcctggaggtggcagacggcggagcagccggcctcgtagcccgggcctgcgcgcctggcaaggggctcagtgtgtgcgagtgaaagacgcacaccgggcggacctgcgtgggcttcggcctcgccccgccgcgcgcggggttgcggctgaacctgaccagggctcatccctgcccggcgagggtaagggcggcccgggatccgctgctgctc

SEQ ID NO: 206382 - DNA, 534 bp, Homo sapiens
accacctaccatctgccaagtatttggaaataatatagtaagaagtcactgtcctcattgagtttattatacataaaactccaaaatgtgcctataatatcagatttgctccaatatatatttagcaaaaatatcaactgagtgtcagggatatataaagacatttttaaacatcaatatttcaaaaaactaattctgatatactcttcagcaggaagcttctaggggacatatgccaccaaaataaaggagtaaacatgaaaaagaaaggcttaggatytaggaccatatttgttaaattgcaccaacatgccctggaaagccagaaagggtactacagaaagtttcagtcatcaaaggatatatacagtgacatttgttggacatcacatgaattaccactagtatttgttgagaccaaagtacttagtacacagaactattaggtatttctttttggcatagagtgtcattaaagaaaaaaaaaactgattcaaagggcattataaaatgagagcatttgaaaatatttga

SEQ ID NO: 206383 - DNA, 534 bp, Homo sapiens
accacctaccatctgccaagtatttggaaataatatagtaagaagtcactgtcctcattgagtttattatacataaaactccaaaatgtgcctataatatcagatttgctccaatatatatttagcaaaaatatcaactgagtgtcagggatatataaagacatttttaaacatcaatatttcaaaaaactaattctgatatactcttcagcaggaagcttctaggggacatatgccaccaaaataaaggagtaaacatgaaaaagaaaggcttaggatctaggaccayatttgttaaattgcaccaacatgccctggaaagccagaaagggtactacagaaagtttcagtcatcaaaggatatatacagtgacatttgttggacatcacatgaattaccactagtatttgttgagaccaaagtacttagtacacagaactattaggtatttctttttggcatagagtgtcattaaagaaaaaaaaaactgattcaaagggcattataaaatgagagcatttgaaaatatttga

SEQ ID NO: 206384 - DNA, 385 bp, Homo sapiens
ccatttgacccagtaatcccattactgggtatatatacccaaagtattataaatcattctactataaagacacatgcacacctatgtttactggagcattattcacaatagaaaagacttggaactaacccaaatgtccatcaatgatagactggatatccatcacctccaaatatttatcatttgtatatgttgggaacatttcaagtcttaccttctagctgttctgaaatatacaacacattattgttaattatagtcaccctcccctgctattaaatattagaacttattctctctgyctacccatatgtttgtatctattaaccatcttttcttcatcccttcccataacccttcccagcctctgataattatcattctg

SEQ ID NO: 206385 - DNA, 611 bp, Homo sapiens
gaaatcctctcctgccttttctcctattttagtggcctctgcttctctccactctcctttgctggagaagccgtctactccaaattttaaatcacaaagtttctcaaggattgaaattccaaggtctcttctctctaaccatatatttctatgcatgcctagcaactcccatagtgtaaccttaaaataaagacatactgacttttattataaaagacagttttcacctttcaatgcttctgagaatttatatcattcatgcctgaatattctctttttaatgcatttattaatttactcaacaatatttattgatggtctataattttttgaaaattcagaatgcaacattscaaagattaaaagaaaccctgccctcatggaatttacatttcaatggccaacacaagtaataaaccaacaaaacttgatgtgtaatacatgttgagtgtaataagccccatggagaaaaagcatttgagagtggtggtggttgcaacatggaaaagacaggaaagttcattacgaatgaaagcactgggtgaccctgtagaaaaaactgttacaccagaaagaaatggaattagataaagtaaagcctgtgttgtttt

SEQ ID NO: 206386 - DNA, 607 bp, Homo sapiens
tcttttgttactgttttttgtttgttcattttgttttataatcagaaagggaaacctatctaaaacaaagtcaaaacaaagggaagcagtgtcaaaaaatggagagagattcctacagacatagtctgtagatctggatttgtccatccttgaattttcatcaccccagactgtcagtaaaaatccataggtacatcatccttgattcagtattatttggagagcagaagggyggtaacttgggtatcctgtaatgatgtggtgcaggagtgggacacaaccaagagggatattgatgtgatctaaacaaaattaatctgaatggttttggaccatatctaacttgtctcccccttgggcctgggcattccatcgcaaacacaaattaactttgtttagttaaacataatctgtgtgttgcacaccagcatacacaagcatcttttttgtgaggtttgagtttgtcagggtattattgtgttataaatcaatatcactgccactacctctcagaaactaaatccttctagtgttcctgttgtttatatccatgaggggctattttgttgactgagagaatgatatgtttttatgactgtctcaaaga

SEQ ID NO: 206387 - DNA, 607 bp, Homo sapiens
tcttttgttactgttttttgtttgttcattttgttttataatcagaaagggaaacctatctaaaacaaagtcaaaacaaagggaagcagtgtcaaaaaatggagagagattcctacagacatagtctgtagatctggatttgtccatccttgaattttcatcaccccagactgtcagtaaaaatccataggtacatcatccttgattcagtattatttggagagcagaagggcggtaacttgggtatcctgtaatgatgtggtgcaggagtgggacacamccaagagggatattgatgtgatctaaacaaaattaatctgaatggttttggaccatatctaacttgtctcccccttgggcctgggcattccatcgcaaacacaaattaactttgtttagttaaacataatctgtgtgttgcacaccagcatacacaagcatcttttttgtgaggtttgagtttgtcagggtattattgtgttataaatcaatatcactgccactacctctcagaaactaaatccttctagtgttcctgttgtttatatccatgaggggctattttgttgactgagagaatgatatgtttttatgactgtctcaaaga

SEQ ID NO: 206388 - DNA, 607 bp, Homo sapiens
tcttttgttactgttttttgtttgttcattttgttttataatcagaaagggaaacctatctaaaacaaagtcaaaacaaagggaagcagtgtcaaaaaatggagagagattcctacagacatagtctgtagatctggatttgtccatccttgaattttcatcaccccagactgtcagtaaaaatccataggtacatcatccttgattcagtattatttggagagcagaagggcggtaacttgggtatcctgtaatgatgtggtgcaggagtgggacacaaccaagagggatattgatgtgatctaaacaaaattaatctgaatggttttggaccatatctaacttgtctcccccttgggcctgggcattccatcgcaaacacaaattaactttgtttagttaaacataatctgtgtgttgcacaccagcatayacaagcatcttttttgtgaggtttgagtttgtcagggtattattgtgttataaatcaatatcactgccactacctctcagaaactaaatccttctagtgttcctgttgtttatatccatgaggggctattttgttgactgagagaatgatatgtttttatgactgtctcaaaga

SEQ ID NO: 206389 - DNA, 634 bp, Homo sapiens
ctttgtttagttaaacataatctgtgtgttgcacaccagcatacacaagcatcttttttgtgaggtttgagtttgtcagggtattattgtgttataaatcaatatcactgccactacctctcagaaactaaatccttctagtgttcctgttgtttatatccatgaggggctattttgttgactgagagaatgatatgtttttatgactgtctcaaagaatattgccagggagatatggaaacctagacatgtaaccagaagaagcaaagacatcaagagacaaacatgcaagaagtagaaagccttccattgtgrctaattcatagtggatgaataggcaagtagaagagtgtaaaggctagttatggaaaagatgtgaaaatgtagagaaccccagatggcaggctgaggagccaggatatcccttcttaaatacgggagagccagagagtgggcttgagagagcaatgccttcttcccgggtgtgagtcagcataggatggcttaatggggagaaacaagcaagaacgatccatagagaagatgctgacgatagtttaaacagtaaataagaaaagtctgacccagagtcacagcaggagaagaggcattttggggaacagaacctaccgat

SEQ ID NO: 206390 - DNA, 634 bp, Homo sapiens
ctttgtttagttaaacataatctgtgtgttgcacaccagcatacacaagcatcttttttgtgaggtttgagtttgtcagggtattattgtgttataaatcaatatcactgccactacctctcagaaactaaatccttctagtgttcctgttgtttatatccatgaggggctattttgttgactgagagaatgatatgtttttatgactgtctcaaagaatattgccagggagatatggaaacctagacatgtaaccagaagaagcaaagacatcaagagacaaacatgcaagaagtagaaagccttccattgtgactaattcatagtggatgaataggcaagtagaagagtgtaaaggctagttatggaaaagatgtgaaaatgtagagaaccccagatggcaggctgaggagccaggatatcccttcttaaatamgggagagccagagagtgggcttgagagagcaatgccttcttcccgggtgtgagtcagcataggatggcttaatggggagaaacaagcaagaacgatccatagagaagatgctgacgatagtttaaacagtaaataagaaaagtctgacccagagtcacagcaggagaagaggcattttggggaacagaacctaccgat

SEQ ID NO: 206391 - DNA, 624 bp, Homo sapiens
taacccttatgaaatttcttcatttgaatagcctggtagaggcagtgaagaacaagaacactggtgtccattactccttcatctccatgcatcagtgttacaggaatagagaaggcaccaccatcaaggaaaagccaggacttayaagtccagataatgtaagagtgaaagaccaagagcccacaaaggtagaggaatctgttcccagtagcacagggcctgctaagatacagtgcaagaggcccagtaggtgacaggaaggagagagggccttgtggacactgagcctctccagatggaaaccccacatccctcagagttttctcagctttcttcctcttcagttcttactgatgtttgtttgtttgtttgtttgtttgttttgagacaaagtctcgctctgtcacccaggctggagtgcagtggcgtgatgtcagctcactgggtttcaccatattggccaggctggtcttgaactcctagactcaagtaatctgcctgcctcagcctcccaaagtgctgggattacagtcatgagccaccacgaccggccttattactgattcaagtaataaatcagtacttagctgctccattgtctttcaactcctggggctccccttg

SEQ ID NO: 206392 - DNA, 624 bp, Homo sapiens
taacccttatgaaatttcttcatttgaatagcctggtagaggcagtgaagaacaagaacactggtgtccattactccttcatctccatgcatcagtgttacaggaatagagaaggcaccaccatcaaggaaaagccaggacttataagtccagataatgtaagagtgaaagaccaagagcccacaaaggtagaggaatctgttcccagtagcacagggcctgctaagatacagtgcaagaggyccagtaggtgacaggaaggagagagggccttgtggacactgagcctctccagatggaaaccccacatccctcagagttttctcagctttcttcctcttcagttcttactgatgtttgtttgtttgtttgtttgtttgttttgagacaaagtctcgctctgtcacccaggctggagtgcagtggcgtgatgtcagctcactgggtttcaccatattggccaggctggtcttgaactcctagactcaagtaatctgcctgcctcagcctcccaaagtgctgggattacagtcatgagccaccacgaccggccttattactgattcaagtaataaatcagtacttagctgctccattgtctttcaactcctggggctccccttg

SEQ ID NO: 206393 - DNA, 624 bp, Homo sapiens
taacccttatgaaatttcttcatttgaatagcctggtagaggcagtgaagaacaagaacactggtgtccattactccttcatctccatgcatcagtgttacaggaatagagaaggcaccaccatcaaggaaaagccaggacttataagtccagataatgtaagagtgaaagaccaagagcccacaaaggtagaggaatctgttcccagtagcacagggcctgctaagatacagtgcaagaggcccagtaggtgacaggaaggagagagggccttgtggacactgagcctctccagatggaaaccccacatccctcagagttttctcagctttcttcctcttcagttcttactgatktttgtttgtttgtttgtttgtttgttttgagacaaagtctcgctctgtcacccaggctggagtgcagtggcgtgatgtcagctcactgggtttcaccatattggccaggctggtcttgaactcctagactcaagtaatctgcctgcctcagcctcccaaagtgctgggattacagtcatgagccaccacgaccggccttattactgattcaagtaataaatcagtacttagctgctccattgtctttcaactcctggggctccccttg

SEQ ID NO: 206394 - DNA, 506 bp, Homo sapiens
gagcaggcatcttggtgtcttttttgttttccttctcttatttgttcaatagatttcaaataacgtatgaatgattgattcagcctcatgaggctggctgtgatctaattccctgaggctgtctgcacagcaaaagagaaacaaaatcagagggatctggggatttttgcaaggctaaaataaaatggcawgtttgattactccctttgttttctcagttactaatatctgaactatttaaagagatccccaaatgccttggaaatagaaagtgatggcaatagtaaaatgatggtgactttgaggatatgaagcttttattcttactttaaaacctctgacatcgttttttcagacatgattaagaccaccaaagcaattttaccatcattccttctggcctttgctacttgacttgctagcaatgagtaataggtgcagtaatcccaattctgttaggtaaagacaagaagcgaaagggactaaatgccctttcagctaaatcc

SEQ ID NO: 206395 - DNA, 498 bp, Homo sapiens
aggctgttacagacgttttctgggggcgggggctggaaggctcaaatgcaaactcctcaggtgttgctctgcaaaggaagatacatacccaagcagctctcacaggaggcctgattcccctcagtagggaaagctcacagcagcrgtgataggtgtacaggtcctcagtgacccactgctttctacaacaggccacagaaattttgcttgactggatattgggctccagaaaatggatccttactcttgggttgtggggcttccaggtggtatgattagaaataagtagtctctcttctggggtgatccagggcagatgcacaagccttgacactagccatatgacttggccaattactttggcaacttagcaggaagatgtcaccatgacagcactaaccctgcctagacataatatcagaggcagcttggaggactggattcaagtacgtttgttaatcaggaagctagggctgtatctagtttccattgaactct

SEQ ID NO: 206396 - DNA, 586 bp, Homo sapiens
gctaacagcaaaattcatcatgtaagtatccatggttgaggaagcatcagtcttgttttttagtattttgagagatggactagaattcagactaggattggttgctatgatcactggactatactcagtttctatggagcttgggaaggccaggttgccagggataagtcctgaacaagttaccttttacctctcagaaggtttaaggcagaarttgcaaatgtcttcagagttcaactatattacataaatgaattattaagtgaaataatttaagagatagtagatactatggtaaaaatagacatgaacccatccaaatgagaaagtcattgcccagcaataaccgttgttgccctgtggaaatgtgggcctgatattgccaggtcttccttttatcaagaaaataagaaaaatgaaaagtttggagtttgacatcaaaattatatattgtaaaacaaaacctctctttggactggcttgagttcttggatcaaagacaatatggcttgttattaagttctaaagagcctaaaagggaaatgaggggtgggggtggaaataaggagaatgcagactaaagctt

SEQ ID NO: 206397 - DNA, 598 bp, Homo sapiens
aactcatagaggactgagtgatactgtaatatggaaagtctgagcctgcatacacttttgtcaaagcttcctcctttgagctatataccatgagattattaaatattagtaaaattttacaagcaaatctggcttcaatttttcatacattgcattcagttggccccaccagaagcctcccaaagtctgaaggtgcagggcattgatctaatttttagttagaggatcactagcaactcctcactagaaaggtgctggcagacaaaattttagagctgtagctataatttgaaatgttaggggatttagcaaaattgcataaacttttacctcatcttatgctttttttaaaaaaacaatgctgtctttatttcttaactcccaaataaaaaaatacatttacatgacatttagggtagaactacaaggmcccataaggattaagcatacaatccagttattataatgctgttaactaaaactttcagagtctaattgagttttggagaaggagtaggttataaaattgatgtctctatagatattatctttaattaaaactacttctgtgtatcatgtagttgaaactagtagctgg

SEQ ID NO: 206398 - DNA, 583 bp, Homo sapiens
tcataaattacccagtctcaggtagttcttcatagcagtgtgaaaatggactaatacagtaatcaaagccatgataaaaaaatctcccagtaagtaaaatcagagatctaatggcttcactgctgaattctaccaaacatttaaaaaattaataccaatcctgctcagactattccatagaatagagggggaggaaatacttccaaactcattctgtggagtcagtactaccctgataccacaccagacaaagacatatcaaaaacagaaaactacaggccaatatctctgatgaatattgatgcaaaaatcttcaaaaatactagcaaaccaaattcaacagtacattaaaaagatcattcatcatgagccagtgggatttgtcccagagatgcaaggatgaatcaacatatgcaaatctatcaatgtgatacatcatatcaacaraatgaagtacaaaaaccatgtgatcatttaaattgatgctggaaaaacatttaataaacttcaacatcacttcttgaaaaaaactctcaaaaaactgtgtatagaaggaatataaatcaacagaataaaagccatt

SEQ ID NO: 206399 - DNA, 377 bp, Homo sapiens
aagtacagtgcagattatgtcccttgatggtacctctaatcttctgtaataatgtggrtgatgattactgtttatgttatccaaggtaaaaatggatttgtatgtgtatacgtgtgatttttgatttagaagtggaaagggaggggaaatggaaccgctgagtcagaaagctagattggagaaatggattagcactgattatttctgattatttcaatcctgtacatgaggtaaatgcattagaaaaccacgtgattttcacattttaatatttgatttctgaatttctccaagtgataagtaaaaaaaaaacagcatgcagcagatgttattttatgttctgtttatcaagtggagacagttccaaagagcacagg

SEQ ID NO: 206400 - DNA, 377 bp, Homo sapiens
aagtacagtgcagattatgtcccttgatggtacctctaatcttctgtaataatgtgggtgatgattactgtttatgttatccaaggtaaaaatggatttgtatgtgtatacgtgtgatttttgatttagaagtggaaagggaggggaaatggaaccgctgagtcagaaagctagattggagaaatggattagcactgattatttctgattatttcaatcctgtacatgaggtaaatgcattagaaaaccacgtgattttcacattttaatatttgatttctgaatttctscaagtgataagtaaaaaaaaaacagcatgcagcagatgttattttatgttctgtttatcaagtggagacagttccaaagagcacagg

SEQ ID NO: 206401 - DNA, 618 bp, Homo sapiens
aagcttacagtattcacagttctttcttttctgtatcctctatctcactctccactaagaattcagagtgaagaaaatacttaaaatccaggtatattctgcttggatgagatctttgtgggtcccattttggggtgtttctgatttgaagcttcatagaaatgatggggagccatgaggtcattgtctccctagtgaaacagtggagagtaaacatagtgaaactgtagactaaacctgtttgtgtgcaacagagagggcatatgttgcagtaatgtcagaaagctatacattacgcaaaaacagctaayggccaggtgctgcattaccttcctagtgttatggttgtaaggccagtaaaacgaaaacctcagctgacaagcgatctttatagctcatctaggccaatgcatggtatgcttgtatgtatgtgatttgtgcatgcacatgtgaaagacagagaaataaagagcatgttagtaagggagaacagaaggtatctgaaagacaaaataagcatatttataaaattggagacataatgggattgggtcagtgtttccatctctttactagtggtgcatgtctgtagaaatgtattttgcaaaggttctcaat

SEQ ID NO: 206402 - DNA, 596 bp, Homo sapiens
tccccagacatagatagtcatgggaatcttaaatagaagaaaattgtagagattctgatgactgatgatgatgtttactgtttactcataatgcaaccaggtcacccatgggtggctagccacataggaacctttcgagaaaatgartgtagttaatcagactacacgtaagaggcaagattccagtttctgaagagaaaaagtgacgagaagattcttcagcaagaacaatttggcaagacagttctttatcaagatcaattcaagacccagtcatagagttattccatgatttatgcattcactcaatgtttattgagtgtatagtatattctgcaacctggccttggcattaggggtgcaataattttcaaaaatgcatttccaggaactagtggttatgtattagttatagtccttgaaaaataactatgtgagtaaatattttgcctattatttatttcctacaaaactgctaagagcttttataagcacatttatgttgctaatgtgtttttgcaaagggttatatatagtaggttgcatttttcatacacaacttgtttaatggtacatcctttaggaaatgctggcat

SEQ ID NO: 206403 - DNA, 596 bp, Homo sapiens
tccccagacatagatagtcatgggaatcttaaatagaagaaaattgtagagattctgatgactgatgatgatgtttactgtttactcataatgcaaccaggtcacccatgggtggctagccacataggaacctttcgagaaaatgaatgtagttaatcagactacacgtaagaggcaagattccagttyctgaagagaaaaagtgacgagaagattcttcagcaagaacaatttggcaagacagttctttatcaagatcaattcaagacccagtcatagagttattccatgatttatgcattcactcaatgtttattgagtgtatagtatattctgcaacctggccttggcattaggggtgcaataattttcaaaaatgcatttccaggaactagtggttatgtattagttatagtccttgaaaaataactatgtgagtaaatattttgcctattatttatttcctacaaaactgctaagagcttttataagcacatttatgttgctaatgtgtttttgcaaagggttatatatagtaggttgcatttttcatacacaacttgtttaatggtacatcctttaggaaatgctggcat

SEQ ID NO: 206404 - DNA, 596 bp, Homo sapiens
tccccagacatagatagtcatgggaatcttaaatagaagaaaattgtagagattctgatgactgatgatgatgtttactgtttactcataatgcaaccaggtcacccatgggtggctagccacataggaacctttcgagaaaatgaatgtagttaatcagactacacgtaagaggcaagattccagtttctgaagagaaaaagtgacgagaagattcttcagcaagaacaatttggcaagacagttctttatcaagatcaattcaagacccagtcatagagttattccatgatttatgcattcactcaatgtttattgagtgtatagtatattctgcaacctggccttggcattaggggtgcaataattttcaaaaatgcatttccaggaactagtggttatgtattagttatagtccttgaaaaataactatgtgagtaaatatttygcctattatttatttcctacaaaactgctaagagcttttataagcacatttatgttgctaatgtgtttttgcaaagggttatatatagtaggttgcatttttcatacacaacttgtttaatggtacatcctttaggaaatgctggcat

SEQ ID NO: 206405 - DNA, 596 bp, Homo sapiens
tccccagacatagatagtcatgggaatcttaaatagaagaaaattgtagagattctgatgactgatgatgatgtttactgtttactcataatgcaaccaggtcacccatgggtggctagccacataggaacctttcgagaaaatgaatgtagttaatcagactacacgtaagaggcaagattccagtttctgaagagaaaaagtgacgagaagattcttcagcaagaacaatttggcaagacagttctttatcaagatcaattcaagacccagtcatagagttattccatgatttatgcattcactcaatgtttattgagtgtatagtatattctgcaacctggccttggcattaggggtgcaataattttcaaaaatgcatttccaggaactagtggttatgtattagttatagtccttgaaaaataactatgtgagtaaatattttgcctattatttatttcctacaraactgctaagagcttttataagcacatttatgttgctaatgtgtttttgcaaagggttatatatagtaggttgcatttttcatacacaacttgtttaatggtacatcctttaggaaatgctggcat

SEQ ID NO: 206406 - DNA, 358 bp, Homo sapiens
tctttggatgacagtgtccttacctgtgtgatgtcattaatgacatctatacatagataatcatgacaatcaactaaagtaatatacgtgaaaatsactatatacatctgtttcttgaagtcaagaggtctacagattcttcccaactcttcccttaaaaacaactaaacatcatggaaaaagtattttaaactctcttttaaaaaatatagtaaagggatggcaataagaaaaaagaatgtaagcaatcaaaaactcagtaaacctgagaacctagagggataaagaggaaaatgaatttgagtttcaccctgaagacacttaccaagtctaaatgaacttagtattgggctttcac

SEQ ID NO: 206407 - DNA, 622 bp, Homo sapiens
tcagaacgtatgaggcaaattttcgatcttcctgacagttctatgttgtttctggccacatcccatayggacttagctataagatatgctgggaacttaagtagcagttttgtcctcgtgaccactcaaccaggcttatggcttgtgtatattttattaggaaagttttaaacacatagataacttgaaaatattttacacttaatattcagatacccacctactgtatcattaccattttatttaatttgctgtatcatgtagctatctgcctgtccttccctttatcaaccatccatccatctaatcatgtgattatcattgtttttaacagctcagatttattacaaggtaaacctcaatgcaagcagcacctatgtcaagaaataaagttttttcaatagcacagtccccccttcccatgttttcagttcttaaaaaaggaaatgatcccaaagaaaggcctttttttttccataaaggtgaaattttaagaaaattagcttactttaccttccctattttgtctttattggtacatttttctgtaagctgagaatgaagaaagataaaattgcacaaaaagtttatgcgatcaactttctcatagatttcctagtgc

SEQ ID NO: 206408 - DNA, 622 bp, Homo sapiens
tcagaacgtatgaggcaaattttcgatcttcctgacagttctatgttgtttctggccacatcccatacggacttagctataagatatgctgggaacttaagtagcagttttgtcctcgtgaccactcaaccaggcttatggcttgtgtatattttattaggaaagttttaaayacatagataacttgaaaatattttacacttaatattcagatacccacctactgtatcattaccattttatttaatttgctgtatcatgtagctatctgcctgtccttccctttatcaaccatccatccatctaatcatgtgattatcattgtttttaacagctcagatttattacaaggtaaacctcaatgcaagcagcacctatgtcaagaaataaagttttttcaatagcacagtccccccttcccatgttttcagttcttaaaaaaggaaatgatcccaaagaaaggcctttttttttccataaaggtgaaattttaagaaaattagcttactttaccttccctattttgtctttattggtacatttttctgtaagctgagaatgaagaaagataaaattgcacaaaaagtttatgcgatcaactttctcatagatttcctagtgc

SEQ ID NO: 206409 - DNA, 491 bp, Homo sapiens
gcgttgtacttcattggttccctgttacagtggaacacaacagagggcagaattctgctgatgcccacagaaggagcatttaaatcaaccctggaccagagaggaatcctctacctcagcaggaggaaactgggtcctagccagcatcatgaccagttgactaaattggccaaggatcctgagtaaatttgtgtgscagtcagggccacaagtactgcagtctttgaggaagccctggtgctgcactggtcttaaaggcaatcaacttggggcaccacccagtgtgacacaatctgtggttgccatgggattgcctgtatcacccctccccaactccaggaactgcagctctgggatagactccctctgcttgggggaagaagaaggaagagtatagagaactttgtcttgcaacttgggtatcagctcagccacagtaaaataaagcaccggacagattccttaatcccctgatgctaggtctttgctcc

SEQ ID NO: 206410 - DNA, 557 bp, Homo sapiens
tggattcctgtgtctattgatgtggcttctttcactcagcataattattttgtgatttatccgtgttgttgagtacatgagtcatttgttcctttttctaaatatatcacaatttgtttatctaaatttctgtttatagatatttgggttgtttccagtttcagctgtcattaataaagctactataaacattcatgtacaaatctttttgtaaacatgttttcatttctcttgggtaaatatctagtaaaggaatttctagaccataatgtaaatacatttttacctctatttaaaaaaacaccaaacagtttctaaaactgtttgcttttctgtttaatgattaytttttcactagtatttttggtgatttaaaagtttagtttataagcaaagtttaccataatagaaaaattctgcatgattggaaatggtttagtgtatattaaaagctggtgaagagaattagaagcctattatagtaacagaataatggatctctaaagatatctgtgtactaatccctggaacctgtgaatatggtactttaaatggca

SEQ ID NO: 206411 - DNA, 551 bp, Homo sapiens
agggtatcacatctgatgttactgtgcagttttattcatgatttactaattattttcttgcagagagaatagtgtttaacatactggactttcattgttttacatccctgctatcatgccacactatgggcattccgtaagaattacagtgttaacagaattcaataaagaggagaaaagaagacaaagacaaaagaccaaatctaaagtgaaaatttgcatccttattttaaatatgctgtacataaaaccaaataaaaaaataaatacatattytcagtagtaattagctatggcaattatggttaagtgttgttttgtttttaatagaaggtaaggtaagagaaaaggaataaatgagggaattaaatggagttttaagataaataacatagacaaggaaggacataaattttgtatctgcagcccagaaagctgagtttttgctttaaaaatgtgcaaaattaaaattagaaaaattgctctagacaattggaaggcactggaataaacattctttgggtccaattttaactgaccaataagcatag

SEQ ID NO: 206412 - DNA, 551 bp, Homo sapiens
agggtatcacatctgatgttactgtgcagttttattcatgatttactaattattttcttgcagagagaatagtgtttaacatactggactttcattgttttacatccctgctatcatgccacactatgggcattccgtaagaattacagtgttaacagaattcaataaagaggagaaaagaagacaaagacaaaagaccaaatctaaagtgaaaatttgcatccttattttaaatatgctgtacataaaaccaaataaaaaaataaatacatattctcagtagtaattagctatggcaattatggttaagtgttgttttgtttttaatagaaggtaaggtaagagaaaaggaataaatgagggaattaaatggagttttaagataaataacatagacaaggaaggacataaattttgtatctgcagcccagaaagctgagtttttgctttaaaaatgtgcaaamttaaaattagaaaaattgctctagacaattggaaggcactggaataaacattctttgggtccaattttaactgaccaataagcatag

SEQ ID NO: 206413 - DNA, 567 bp, Homo sapiens
  misc_feature (1)...(567): n = A,T,C or G
ctaggcctgccaaacttacatcccccttcgctatccactggatttcttacccttgacccttcaaaattttaatggcctagtgctatgcagttatctatattcatctataatgyctccctaaaacacataaaagttcttaaaaagtttcaaaaagggagacactataatgaagagttgtgttctcagataattaagattagtatagtgattttataaaatccatagttaccctttttcctttagacaaaatatccaatgccctatttccagccttttgcacatattttttattttgtccgtttccttcacagtggatcacattctgctcacttatgttgatttagaaggtttgaagctaaagataccatttgagcgcagccctgatgattttcatctttgctttaatttcattgtttgtttttttcttttagggctacatcccttctttttattatgagtactttaattttttaatttcctattctcataaagttatatgagtgaaaagcaatacaatattnnnnnnnnnnnnnnnnnnnnnnnnnnnnnnnnnnnnnnnnnnnnnnn

SEQ ID NO: 206414 - DNA, 567 bp, Homo sapiens
  misc_feature (1)...(567): n = A,T,C or G
ctaggcctgccaaacttacatcccccttcgctatccactggatttcttacccttgacccttcaaaattttaatggcctagtgctatgcagttatctatattcatctataatgcctcyctaaaacacataaaagttcttaaaaagtttcaaaaagggagacactataatgaagagttgtgttctcagataattaagattagtatagtgattttataaaatccatagttaccctttttcctttagacaaaatatccaatgccctatttccagccttttgcacatattttttattttgtccgtttccttcacagtggatcacattctgctcacttatgttgatttagaaggtttgaagctaaagataccatttgagcgcagccctgatgattttcatctttgctttaatttcattgtttgtttttttcttttagggctacatcccttctttttattatgagtactttaattttttaatttcctattctcataaagttatatgagtgaaaagcaatacaatattnnnnnnnnnnnnnnnnnnnnnnnnnnnnnnnnnnnnnnnnnnnnnnn

SEQ ID NO: 206415 - DNA, 567 bp, Homo sapiens
  misc_feature (1)...(567): n = A,T,C or G
ctaggcctgccaaacttacatcccccttcgctatccactggatttcttacccttgacccttcaaaattttaatggcctagtgctatgcagttatctatattcatctataatgcctccctaaaacacataaaasttcttaaaaagtttcaaaaagggagacactataatgaagagttgtgttctcagataattaagattagtatagtgattttataaaatccatagttaccctttttcctttagacaaaatatccaatgccctatttccagccttttgcacatattttttattttgtccgtttccttcacagtggatcacattctgctcacttatgttgatttagaaggtttgaagctaaagataccatttgagcgcagccctgatgattttcatctttgctttaatttcattgtttgtttttttcttttagggctacatcccttctttttattatgagtactttaattttttaatttcctattctcataaagttatatgagtgaaaagcaatacaatattnnnnnnnnnnnnnnnnnnnnnnnnnnnnnnnnnnnnnnnnnnnnnnn

SEQ ID NO: 206416 - DNA, 567 bp, Homo sapiens
  misc_feature (1)...(567): n = A,T,C or G
ctaggcctgccaaacttacatcccccttcgctatccactggatttcttacccttgacccttcaaaattttaatggcctagtgctatgcagttatctatattcatctataatgcctccctaaaacacataaaagttcttaaaaagtttcaaaaagggagacactataatgaagagttgtgttctcagataattaagattagtatagtgattttataaaatccatagttaccctttttcctttagacaaaatatccaatgccctatttccagccttttgcacatattttttattttgtccgtttccttcacagtggatcacattctgctcacttatgttgatttagaaggtttgaagctaaagataccatttgagygcagccctgatgattttcatctttgctttaatttcattgtttgtttttttcttttagggctacatcccttctttttattatgagtactttaattttttaatttcctattctcataaagttatatgagtgaaaagcaatacaatattnnnnnnnnnnnnnnnnnnnnnnnnnnnnnnnnnnnnnnnnnnnnnnn

SEQ ID NO: 206417 - DNA, 539 bp, Homo sapiens
gcaggtgcctgccaccatgcccagttaatttttgtgtatttagtagagatggggtttygccatattggccaggctgatctcgaactcctgacctcaggtgatccacctgcctcggcctcccaaagtgctgggattacaggcataagccaccatgcccagcctcaagaactcttttatagcacttatgttacacattctcagagagtctatctttcctgccttattttataactttcactgagatacagtgttgacacattttctgattttttttgcaaatccataagaatttttcttttattaatagagaacaggatttttttagtgtatatgtggtccttttattctcagtgctttgttgatgttgtcccttcatcttctacttccagtgttgtgaacaagaattcagatgctaatctgagctggttttactttgaaggtatttttcatctagatcagaaacttgcttgtttattaatttcttgtttgtttttatctgccttccatagaaatgcctactttttgagagcagggctatg

SEQ ID NO: 206418 - DNA, 539 bp, Homo sapiens
gcaggtgcctgccaccatgcccagttaatttttgtgtatttagtagagatggggtttcgccatattggccaggctgatctcgaactcctgacctcaggtgatccacctgcctcggcctcccaaagtgctgggattacaggcataagccaccatgcccagcctcaagaactcttttatagcacttatgttacacattctcagagagtctatctttcctgccttattttataactttcaytgagatacagtgttgacacattttctgattttttttgcaaatccataagaatttttcttttattaatagagaacaggatttttttagtgtatatgtggtccttttattctcagtgctttgttgatgttgtcccttcatcttctacttccagtgttgtgaacaagaattcagatgctaatctgagctggttttactttgaaggtatttttcatctagatcagaaacttgcttgtttattaatttcttgtttgtttttatctgccttccatagaaatgcctactttttgagagcagggctatg

SEQ ID NO: 206419 - DNA, 597 bp, Homo sapiens
  misc_feature (1)...(597): n = A,T,C or G
aaccttagaagtgacttgcgtgtccagcattagggactgggtaaatcagttttgctatgtccattatagagaatgtttcctggcaattaagcagaaattatggatactatagagcaacctggaatatttaaggagaaaaaaggttcctaaatgacatgcagactgactaattgcaagtcaataacgagcttgtctacctgggatcaaagacttgataggtgtaaagaanagctgtcctggcaatgctgtcagggagtgatggtgggtgctggttctccttcctgcagtctttttgaaggttgccttttaaatgtggaaaaataagaggaattgagccaagagttggggcatctggttgggtttgtgggtgacctagggcaagtcactgtcctgggcttcatttctctctccaagaagactggctggactggctgctctgaaccttcttctagcatgaaggaaccacatactgggggccaaagaagctgcccatcaaactggtgctagagagagagatgaggccaggagtgggctcgtggctcccytcactcactaggacccagcttctactggcataacagggtctcctattgggca

SEQ ID NO: 206420 - DNA, 521 bp, Homo sapiens
ggctgggaggcttcatctgttccaccctcccatcttacccaggagaaactgaggccagagggaggagggctccgaaggctgcagctgggaggtgagggccagccctggacccggctcactcctgagttggtgctcacagcacacgcaccctgcacgggcatttccagggtgtttcgggccctgcgatgtcaatcctcctggctcagctggtccagggtccctggacaggcctcctgccatctttccctggcctttgccagagcctcttcccacagaaggttggggaagggtggaggggctaggaacagagagctggagccccagcaggaagggggtgtgggtgagaagaggcaggcgggtatactggtgaaagcacaggtgggagaaagggagcyggtgtgtggagaggggagagggtagtattttggggtgaggtgtctgaggtgggggtggggctgtgtgctgagagtgggtgcagtgcttcaccaagaggcccctgcaggtgctgttctcttttttaa

SEQ ID NO: 206421 - DNA, 494 bp, Homo sapiens
gacaaactacagtaattaaaataagtgctggcacggggacagaataatattatcaacagaccaaaaaaaaaaaaactccagaaatagattcacacatacagaatcccttgatttctgacaaaggctccagtgaaattcaggtagaaaacatggtctttttaataaatagttatggagcaacaagataatctatatggaaaataattaaccttgattcctacctcmcagtacatacaaaaattagagacccagtatagacctatagtgtgaaaagcttctcaaaataaaaaaaaagccatagactatttttaatgaatttagtgttgatcacaatttttggaacagaataccaaaaaaaaaaaaaagcattaaccgttaaagaaaaagaaagtatttattggatttcattaaaaccagaacttccattcatcaaaaaacattataaacaaagcgattaagtggccaggtgcagtggctcacacctgtaatcccag

SEQ ID NO: 206422 - DNA, 494 bp, Homo sapiens
gacaaactacagtaattaaaataagtgctggcacggggacagaataatattatcaacagaccaaaaaaaaaaaaactccagaaatagattcacacatacagaatcccttgatttctgacaaaggctccagtgaaattcaggtagaaaacatggtctttttaataaatagttatggagcaacaagataatctatatggaaaataattaaccttgattcctacctcccagtacatacaaaaattagagacmcagtatagacctatagtgtgaaaagcttctcaaaataaaaaaaaagccatagactatttttaatgaatttagtgttgatcacaatttttggaacagaataccaaaaaaaaaaaaaagcattaaccgttaaagaaaaagaaagtatttattggatttcattaaaaccagaacttccattcatcaaaaaacattataaacaaagcgattaagtggccaggtgcagtggctcacacctgtaatcccag

SEQ ID NO: 206423 - DNA, 494 bp, Homo sapiens
gacaaactacagtaattaaaataagtgctggcacggggacagaataatattatcaacagaccaaaaaaaaaaaaactccagaaatagattcacacatacagaatcccttgatttctgacaaaggctccagtgaaattcaggtagaaaacatggtctttttaataaatagttatggagcaacaagataatctatatggaaaataattaaccttgattcctacctcccagtacatacaaaaattagagacccagtatagacctatagtgtgaaaagcttctcaaaataaaaaaaaagccatagactattyttaatgaatttagtgttgatcacaatttttggaacagaataccaaaaaaaaaaaaaagcattaaccgttaaagaaaaagaaagtatttattggatttcattaaaaccagaacttccattcatcaaaaaacattataaacaaagcgattaagtggccaggtgcagtggctcacacctgtaatcccag

SEQ ID NO: 206424 - DNA, 494 bp, Homo sapiens
gacaaactacagtaattaaaataagtgctggcacggggacagaataatattatcaacagaccaaaaaaaaaaaaactccagaaatagattcacacatacagaatcccttgatttctgacaaaggctccagtgaaattcaggtagaaaacatggtctttttaataaatagttatggagcaacaagataatctatatggaaaataattaaccttgattcctacctcccagtacatacaaaaattagagacccagtatagacctatagtgtgaaaagcttctcaaaataaaaaaaaagccatagactatttttaatgaatttagtgttgatcacaatttytggaacagaataccaaaaaaaaaaaaaagcattaaccgttaaagaaaaagaaagtatttattggatttcattaaaaccagaacttccattcatcaaaaaacattataaacaaagcgattaagtggccaggtgcagtggctcacacctgtaatcccag

SEQ ID NO: 206425 - DNA, 401 bp, Homo sapiens
ctatcccaaacaaaacagcaaaacaaacaaaaaaaaacaacaaaaaaaacacaaaacaaacctagaggaatcacattacctaacttcaaattatactatggacctatagcaaccacaacactayagtaatggcataagaacagacacagagaccaatggaacagaatagagaacccagaaacaattccacacacgtacagtgaactcattttcgacaaacgtgccacgaacatacactagggaaaagacagtctcttcaataaatggtgctggaaaaacttgatctccatatgcagaagaatgaaactagacccctatcttgtgctatatacaaaaatcaaaccaaaatggattaaaaaactaagacctccaactacaaaactacaagaaaacactgagaa

SEQ ID NO: 206426 - DNA, 362 bp, Homo sapiens
acaaaaaaaacacaaaacaaacctagaggaatcacattacctaacttcaaattatactatggacctatagcaaccacaacactatagtaatggcataagaacagacacagagaccaatggaacagaatagagaacccagaaacaattccacacacgtacagtgaactcattttcgacaaacgtgccamgaacatacactagggaaaagacagtctcttcaataaatggtgctggaaaaacttgatctccatatgcagaagaatgaaactagacccctatcttgtgctatatacaaaaatcaaaccaaaatggattaaaaaactaagacctccaactacaaaactacaagaaaacactgagaa

SEQ ID NO: 206427 - DNA, 615 bp, Homo sapiens
tctacacccaatgaagtatgaggcgttgttgtcaggttatgagtgcagaatcaacattttcaggtatgcaagatctcaaaagcttatctcacatagaccttttcctagaatgttaccagaaaactaaagcaagagaggagaggactctgagaaggatgcctaccattaacaaatggaaaggattaatcacctgatgcgtacctgckctaagagaagttttataccccaggcaaatatttggaatataaagcaaatagaaaattaagcaaattaaagaatgatgcaattactaactacaggaaaaaaggttttcaataaaataaatgtaatgaaagtaaatagttctgtaccatattagcagtcatgataatataaatcctgagtattgctttgatctgccttaccttcccacaaagaagtaacctttatagtacctttaccagaagaggggcttttcttctatgaagtagaggtggaactcattatattgggaaaaaagataaaaaacaaattctggaaaaatgatttgacaggcaacctttttttctcaaggggagcacagttttccttttaatgagaccctggcttttgagggttgaattgagtaacagtaaa

SEQ ID NO: 206428 - DNA, 531 bp, Homo sapiens
ggaagaaggattttaatggactcctgcaggctggagagattctgggccaaaggcaacggrggacggaaagttttgcaagaagatgccattgcttgtccaaagacatggtacatccgcatagggccggctgggatgctgagttctgatggggctagttcactggccacgtacagagcctctgggggagaaaaggctggaaggactgtcagtcggactgcgtgaggaagggtcttgggtgtgtaggcaaggacgttagacttattttgatggacaatggtggtactgaaggatatgtacagtctgacttggagtgtggccacacaagaggcaggagggaatcactggctgaggaatatgagccatgagaggaaaggagaggctagttgggggtgggcagcctgggatggtgtgggtggtgggaggcggtagcacacagagccagcagctggttggatggaggttggtgcccagcccagcccaggtgtggtgtagcaggtgctggtggggaagcttcacagagatttgagatct

SEQ ID NO: 206429 - DNA, 531 bp, Homo sapiens
ggaagaaggattttaatggactcctgcaggctggagagattctgggccaaaggcaacggaggacggaaagttttgcaagaagatgccattgcttgtccaaagacatggtacatccgcatagggccggctgggatgctgagttctgatggggctagttcactggccacgtacagagcctctgggggagaaaaggctggaaggactgtcagtcggactgcgtgaggaagggtcttgggtgtgtaggcaaggacgttagacttattttgatggacaatggkggtactgaaggatatgtacagtctgacttggagtgtggccacacaagaggcaggagggaatcactggctgaggaatatgagccatgagaggaaaggagaggctagttgggggtgggcagcctgggatggtgtgggtggtgggaggcggtagcacacagagccagcagctggttggatggaggttggtgcccagcccagcccaggtgtggtgtagcaggtgctggtggggaagcttcacagagatttgagatct

SEQ ID NO: 206430 - DNA, 458 bp, Homo sapiens
ccgtggtggcggcggtgctggggatggagaaaggtggctgtgttgttagacatgctttggggataggaccagcagaaccaggtgatgggttgatgtgggaagtgagaaagacagaaaaaagtatgggtgtcagattccccgagtcaaactaggagacttttgtttttactgagcatatgaagccatgcagcagcccaaccctctctttcatttaccttctgaatcrgcatacatgctttctcttttttccatatcagggaaagttgtctccttattccctttccatccagcatctccaagctgcaaattttgagcccctttttctgccatctttattgttttgcttgatctcttatcctcattctgtcatgtattttcaagttttcctctcctagtgtgctttttttgcttatataacaaactcaagttttatttgctctaacataaacccttctttc

SEQ ID NO: 206431 - DNA, 414 bp, Homo sapiens
gtaaaaatcaagtcaatattctccacctagagggcaaaccaatcgctaataagactattgggtttgcytccttccctatctcacattccccatttcctcagttgagcttcctgggatggcctcctcaacaaaccaccacactcaagggcttgttttggagtctgatttcagggaaacccaaactaagacaacatcaatcttgttgtttccctcagttccctggggacataatttaccattaactcaagttgatggacccttcaggattcattaaaacaagtttacctgcattatagggtgattcagggtgaaaatcaccagcagagtaagggagtacccaataatggcccctgatcaattctagtggtcttccctccttcttctaggtgccaagcttgactttgttttgaattc

SEQ ID NO: 206432 - DNA, 414 bp, Homo sapiens
gtaaaaatcaagtcaatattctccacctagagggcaaaccaatcgctaataagactattgggtttgcttccttccctatctcacattccccatttcctcagttgagcttcctgggatggcctcctcaacaaaccaccacactcaagggcttgttttggagtctgatttcagggaaacccaaactaagacaacatcaatcttgttgtttccctcagttccctggggacataatttaccrttaactcaagttgatggacccttcaggattcattaaaacaagtttacctgcattatagggtgattcagggtgaaaatcaccagcagagtaagggagtacccaataatggcccctgatcaattctagtggtcttccctccttcttctaggtgccaagcttgactttgttttgaattc

SEQ ID NO: 206433 - DNA, 548 bp, Homo sapiens
ttgatctcttccctcagttctagtatttcatcttcgaccttggttcctgacacagagctcctaagatctttgtaatttcctacgtgttaagagtgtctgacagagctctgaaatctcggaattccctgggcaatgggagcatcttttgttttgatgtgacttggtgggcttctggatagcctcagaatggggtctggttttcaggcgaaccaaccaagttattagagggttgaaagtttcagccccacttctgaccttcaagaagcaaagaggaggttgaagaggagttgatcaccaatggcctatgtaatgaaacctctataaaaaacccaaaaggatgggggtttggaggagcttccagatarctgaacgtgttgaggttcctggaggttggtgagcctggagagggcatggaagccctgtgccccttcccacatgcttgctctatgtgtttcttcataatagtctttgtgataatgggtgaacaaaagtaaaacgtttccctgagttctgtgagctgctttagcaaattaattgaaccgaagaag

SEQ ID NO: 206434 - DNA, 548 bp, Homo sapiens
ttgatctcttccctcagttctagtatttcatcttcgaccttggttcctgacacagagctcctaagatctttgtaatttcctacgtgttaagagtgtctgacagagctctgaaatctcggaattccctgggcaatgggagcatcttttgttttgatgtgacttggtgggcttctggatagcctcagaatggggtctggttttcaggcgaaccaaccaagttattagagggttgaaagtttcagccccacttctgaccttcaagaagcaaagaggaggttgaagaggagttgatcaccaatggcctatgtaatgaaacctctataaaaaacccaaaaggatgggggtttggaggagcttccagatagctgaacgtgttgaggttcctggaggktggtgagcctggagagggcatggaagccctgtgccccttcccacatgcttgctctatgtgtttcttcataatagtctttgtgataatgggtgaacaaaagtaaaacgtttccctgagttctgtgagctgctttagcaaattaattgaaccgaagaag

SEQ ID NO: 206435 - DNA, 548 bp, Homo sapiens
ttgatctcttccctcagttctagtatttcatcttcgaccttggttcctgacacagagctcctaagatctttgtaatttcctacgtgttaagagtgtctgacagagctctgaaatctcggaattccctgggcaatgggagcatcttttgttttgatgtgacttggtgggcttctggatagcctcagaatggggtctggttttcaggcgaaccaaccaagttattagagggttgaaagtttcagccccacttctgaccttcaagaagcaaagaggaggttgaagaggagttgatcaccaatggcctatgtaatgaaacctctataaaaaacccaaaaggatgggggtttggaggagcttccagatagctgaacgtgttgaggttcctggaggttggtgagcctggagagggcatggaagccctgtgccccttcccacatgcttgctctatgtgtttcttcataatagtctttgtgataatgggtgarcaaaagtaaaacgtttccctgagttctgtgagctgctttagcaaattaattgaaccgaagaag

SEQ ID NO: 206436 - DNA, 543 bp, Homo sapiens
taccctctagaagtaacacttaatctgagagctgaaggaggaataggagtaaccaggagaagagggagacaggtttttcagacagagaaaacagcttgtgtgagagctatgtgttgagagacgaggtgaacagttctaagagttaaagccctgatagccagccctgccacagcacaaaatgaaggcaaaatgtatattaaaaattaaatagaatcactacaactcatcagtatagccaatgacactaayactcataatgattatcatgttgataataataaatagtactatcaattttgtatacctactatatactagaccttatgttaggtaatggaaatacataccatttattgcacaaacttaactgaaaaacaacatgtagtttgagtattgccttatacgcatcccatccttcaaataaaatgacaaaaagaaaaacccgagttatagtttctgccttttatcccaataataaaacattggttaagaatatgctttttaggatgttaactatgtgtcattcaatttattaaataggtc

SEQ ID NO: 206437 - DNA, 543 bp, Homo sapiens
taccctctagaagtaacacttaatctgagagctgaaggaggaataggagtaaccaggagaagagggagacaggtttttcagacagagaaaacagcttgtgtgagagctatgtgttgagagacgaggtgaacagttctaagagttaaagccctgatagccagccctgccacagcacaaaatgaaggcaaaatgtatattaaaaattaaatagaatcactacaactcatcagtatagccaatgacactaatactcataatgattatcatgttgataataataaatagtactatcaattttgtatacctactatatactagaccttmtgttaggtaatggaaatacataccatttattgcacaaacttaactgaaaaacaacatgtagtttgagtattgccttatacgcatcccatccttcaaataaaatgacaaaaagaaaaacccgagttatagtttctgccttttatcccaataataaaacattggttaagaatatgctttttaggatgttaactatgtgtcattcaatttattaaataggtc

SEQ ID NO: 206438 - DNA, 534 bp, Homo sapiens
ctactgtaacacaaacagggctgaaacatgccccctgctcaccacattgcaggcaaacaggaggagagaagagctgtggccctagcagctgggcatggtggctcacgcctgtaatcttagcactttggtaccctgaggtgggagggtcacttgaggtcagaagttcgagaccagactaggcaacatagcaagacccttgtctctacaaaacatttaaaaattagccaggtgtgggggcatgctcctgtagtctctactactcaggaggctgaggtgggaggattgcttgagtacaacagtttgaggttatagtgagccaggtttacatcactgcacttcagcctgggtgasagagaaagaccttgtctctaataaataaatgagaaatcccccatagctacagatccagactcatcatttacaaaccctgcttctgtctaactgcaggagtcaattttgctatgcttctgtcactacataacaagtatacttctttctccagtttccaataacttgttcctcatttctttctga

SEQ ID NO: 206439 - DNA, 594 bp, Homo sapiens
ggaggagagaagagctgtggccctagcagctgggcatggtggctcacgcctgtaatcttagcactttggtaccctgaggtgggagggtcacttgaggtcagaagttcgagaccagactaggcaacatagcaagacccttgtctctacaaaacatttaaaaattagccaggtgtgggggcatgctcctgtagtctctactactcaggaggctgaggtgggaggattgcttgagtacaacagtttgaggttatagtgagccaggtttacatcactgcacttcagcctgggtgacagagaaagaccttgtctctaataaataaatgagaaatcccccatagctayagatccagactcatcatttacaaaccctgcttctgtctaactgcaggagtcaattttgctatgcttctgtcactacataacaagtatacttctttctccagtttccaataacttgttcctcatttctttctgagtcctcatcagcagtgtcctccaaatctagatttctactaacagtctgttcaaacgctttaatctttttcatattcctcaatatgtcttatttttatgtatttgttacagcagtattcc

SEQ ID NO: 206440 - DNA, 511 bp, Homo sapiens
tgatacaagctactatatggatgaaccttgaaaacagcatgctaagtgaaagaagccaaacacacaaatcacagattgtattagtccatttatatgaaatatctggaataaataaacccacagagacagaaggtggattagttgttacctggggctgtgggaaagaaggtaaggggagtggctgcttaataggtatggagcttccttttgggatgaccatgtttttaagtagatakagatgataactatacaacattgtgaatgtactgaatgccgctgaattgtattcctttaagtggattaagttacataaattttacctcctttttcaaaaagaaaccaacaaaaatgaaaaaaaaagaagcagcagcaatgaaggcttgaacttgggtattagccataggaacaggtggaggaaatgcataaaatatatagggtaggggtagaaacaagaaaatgttcaagaagttgtttgacagacgggcagaagcaggcaagacagagacgctag

SEQ ID NO: 206441 - DNA, 541 bp, Homo sapiens
gacacctgctctttttctgctcctatttttcacttgctattgaggatctgctagccattttaattccatttttaactccatgtgatttaagtggaactaagccttcccacaacccactttcagacctagaaacccatatcacgcaagagtacccaatccccactgatcatggccatagtaacagattcatgaatggtcagagcatccagccagaatgaagtcttttataggtgttgtgcttgcctggtgagtagaaggtatgcactattcctctaggatgaatagctaaaaagataaaactatatatgccaacagccatctttcctgctatgtctggraagtctacctaagagtaaaatcaacccacaggaaagtttagccgaaagataaaaggtctctacagaatacttatgacatttgttcatcctctagacccaccacctgaagccagactatgccttgactcttcagttataaaagcaaacacatcaattctctctcccctattaattttgcttgagctctattttcatcacttgct

SEQ ID NO: 206442 - DNA, 582 bp, Homo sapiens
aagcttcccctactagcctctaactccctgcagtgtgagatgatgtcttctttgggcgcacatagcattttgctggcacttgcaaaaacatcatgttcgaattattgtgctcagttatgtgcctgtccaatgacatgatgagatcttcaccagcataaccctgtcttattcaacttcatatagcccagtgcctggcattcatctaggcctaatgcttcaagatttccactaaactttttattactgagaaattgaaagccatcgcacagggcagcatcgttatgtgtaggtggcaaactggtgtccatgtgattgtgagtgaatgcacagtataagatacccttattgacagacatatgtgtttttacttcaatttacccatgtcaatgctggtatgtatcactcttcctttaaccatcatgattcatttattcatccatccatttgttcatatttgtkttagaaatggtggtccttgaatgaggcatactttttttttttccagaaactacaggtaaagtaaattttactctttctttaggtttctcccaggatgcgatttgtaaataaatgatcacatgc

SEQ ID NO: 206443 - DNA, 498 bp, Homo sapiens
accaagtgaccatgaactcaggactatgaacctcatccagggactctcccaataggccccgaacccataggaatgaccccctttcattcagcttcttctagttcaaagtacttcttgagattccttaggatttctgtgagctgagctgtgtcatggctgcaaattttaactgtaccagacatagttcttactatggtaaaaagcaaacagacatttcctattattggtctccataacctttcaagaatccagactgataaatgtccctggctgtgggaggtgactgacaggcaggagcctggcagcgcgttgtcacaggatgaatgacagctgagggcctgtaaccttttccsgtcataatagggagacagaaatgaaaatgttgtgtggagcacatcagattgtgattcagagcagggaggtaaggactaggagtctatggacttgcagagggagatgaataaagatgggtgcatgcacaggacagcaattttaggc

SEQ ID NO: 206444 - DNA, 498 bp, Homo sapiens
accaagtgaccatgaactcaggactatgaacctcatccagggactctcccaataggccccgaacccataggaatgaccccctttcattcagcttcttctagttcaaagtacttcttgagattccttaggatttctgtgagctgagctgtgtcatggctgcaaattttaactgtaccagacatagttcttactatggtaaaaagcaaacagacatttcctattattggtctccataacctttcaagaatccagactgataaatgtccctggctgtgggaggtgactgacaggcaggagcctggcagcgcgttgtcacaggatgaatgacagctgagggcctgtaaccttttccggtcataatagggagacagaaatgaaaatgttgtgtggagcayatcagattgtgattcagagcagggaggtaaggactaggagtctatggacttgcagagggagatgaataaagatgggtgcatgcacaggacagcaattttaggc

SEQ ID NO: 206445 - DNA, 362 bp, Homo sapiens
catggcactggttgttcatacatttgtcatgtgatttcctttaggatagaaactatctatcgttcatgtaaaattgaccttgaactctgtaaggaaggtggatgatgtcatctgtcatatcataactcattacaaaatattagtttcaggctttgtgttaagtgttagggagcaacaatggttgagatagattcaaatatgttcttcactctcatagaatttacttagataagcaagtatgagtatgtgyatatgtgtgtgtacactcatacatatatatgtttacatgcataaatgtgagcttagtaagtgcatagctttcaaccaaatgatgtgttgggagaccagcccaaagatttcag

SEQ ID NO: 206446 - DNA, 585 bp, Homo sapiens
cagtcttcccattagtattcagaaagctgtcgacagtctcatagagaggaaactcaaygttagttaagtctaaaggagaaagcagtaaataatctctgtatttaaatattgtcacattaactcatttttgattgtgagaaccactttttgtcttctcagacaatacaaccttctggaaatgcacctcctgtgacactcacagtggctggagtcctcctgtggggaacgtctgggggctccatttctgggccatttctcagctcactgccaaagtgtccatctggatatctattactgcacattacaacctgccttgccatcgtcagttagggatattttttggctctgagagatctgtggagaaaaaaaatgcctatatttcttttgattttgctataaaaatataaatgctctggtaggcattttctcctgatgtatcaaaaggcacttccatccatcgattttcagaatgcccttattgctacttttcttcatggtctggagagattgagtgacttgaccagtgtttcacagtgatttagaggaagagttaagattgaatcctgagttcccttattttttcct

SEQ ID NO: 206447 - DNA, 585 bp, Homo sapiens
cagtcttcccattagtattcagaaagctgtcgacagtctcatagagaggaaactcaatgttagttaagtctaaaggagaaagcagtaaataatctctgtatttaaatattgtcacattaactcatttttgattgtgagaaccactttttgtcttctcagacaatacaaccttctggaaatgcacctcctgtgacactcacagtggctggagtcctcctgtggggaacgtctgggggctccatttctgggccatttctcagctcactgccaaagtgtccatctggatatctattactgcacattacaacctgccttgccatcgtcagttagggatattttttggctctgagagatctgtggagaaaaaaaatgcctatatttcttttgattttsctataaaaatataaatgctctggtaggcattttctcctgatgtatcaaaaggcacttccatccatcgattttcagaatgcccttattgctacttttcttcatggtctggagagattgagtgacttgaccagtgtttcacagtgatttagaggaagagttaagattgaatcctgagttcccttattttttcct

SEQ ID NO: 206448 - DNA, 585 bp, Homo sapiens
cagtcttcccattagtattcagaaagctgtcgacagtctcatagagaggaaactcaatgttagttaagtctaaaggagaaagcagtaaataatctctgtatttaaatattgtcacattaactcatttttgattgtgagaaccactttttgtcttctcagacaatacaaccttctggaaatgcacctcctgtgacactcacagtggctggagtcctcctgtggggaacgtctgggggctccatttctgggccatttctcagctcactgccaaagtgtccatctggatatctattactgcacattacaacctgccttgccatcgtcagttagggatattttttggctctgagagatctgtggagaaaaaaaatgcctatatttcttttgattttgctataaaaatataaatgctctggtaggcattttctcctgatgtatcaaaaggcacttccatccatcgattttcagaatgcccttattgctacttttcttcatggtctggagagattgagtgacttgaccagtgtttcacagtgatttagaggaagagttaagaytgaatcctgagttcccttattttttcct

SEQ ID NO: 206449 - DNA, 552 bp, Homo sapiens
gctagtgagaagaatattcaaaggcaacaataagaattgcatttctaaaatgatatagtcctttggccacaaatggatcttattctcatttttgactgtgagattttaggacttgtacacagtatgtatgttcatctgagatgttctgcgaaatggtaaccatagccacatgcttcatacagagaaagttattcaagcggcaggatcctcctgtgcaaaattaccaatgctcataccattgtctgtgagagtcaactacasgatatgtaggaatgaaatccctttagaggatttgagaactggtgggataataatgaggagaggcagagtctaaccgtggctcagtcaccaggtggacagcatgagaagccattggaatttgtctcttttatctaaaagggataacaacttctggcccacctgctccatgagctgtaggcaactcctacagaaagcctcttaatggtcctccatgactgtagattcctccccttctggtccaccctacacttgctgccagaggaagcattttgaaatgcacatttactgtga

SEQ ID NO: 206450 - DNA, 565 bp, Homo sapiens
cttgctgttcatccctaacactaaggttgtagcctttggggttccagctttatgtaggtctcgaattttcactgaaactgtctgaggaaggtactattattattccctgttgacactgatragcaaactgaagctctcagagattgagtaacttgcctaataccacacagctagtcatactgtggtgagatgaggcggtggtctctagtcagctatgaacaatctctaaaacttatatctttgatttggctgaatcttaccaaccttacaccttcctgttcctcttcacaatagttacctgtttattcagaatattgctgttgcagagacttctgtaatgttcttcctctaaccctttatgtcatttacatcatatgtctgaccttctctaatgcatcctcttgtgtaaagacttccatttctccaagctcagctcaagtaacatcaaatgaaacctaacactggaatgtagacacccttcaactagagatttcattaatttttagattccatagtttcctaacaagactcactgaatagatactgtgttacacagtccagatcc

SEQ ID NO: 206451 - DNA, 346 bp, Homo sapiens
gaattccatttgattttgttagaaatatccacctcatgtattaccttttgctagatattggctgcctgttttctgtgggctggagsgggtgtgggttgtggaggggtggggcaggaaaagccacaacacattttgttcaactgtccaatatactgaccttcaattgccccttctgtcttctactcaacttttaattcctgcctctgtcctcccccaagcaacacatatgctgactctgaatgcagtgcctttctgaggtcctttgggtaggtgggcttctactgccctggcggctctcgtggtatattatctgctggacattctccttccgttttatttgtcacct

SEQ ID NO: 206452 - DNA, 497 bp, Homo sapiens
aatttaccataatgaatcaattacaagaaagtatttgttaaggcgggcagaagaaaacttttggaggtgatagatacgtttacagcatagcttgtgaagatggyttcatggtgtatacttatctccaaactcatcaggttgtatacttaaataggtatggctttttgtatgtcaatcatacctcaacaagttgtgtttttttaagaatgcattataattgaccacactaaactgatttcattttaccctccatatctaatcagtaagtttctatacttgtggaaaaaaagaacctattcctctggaatgtgctcttaattgcactgtgctgagggtattgctactggttgtgttaaatattgcattacatagaagtgtacatttttttacaatgaatttcacaaacatttgcattttaatgtgcacaatgaatctcaaatctctcttgagtctgcttaaagaccatttttttctcacatttcagtctctttggaaat

SEQ ID NO: 206453 - DNA, 497 bp, Homo sapiens
aatttaccataatgaatcaattacaagaaagtatttgttaaggcgggcagaagaaaacttttggaggtgatagatacgtttacagcatagcttgtgaagatggtttcatggtgtatacttatctccaaactcatcargttgtatacttaaataggtatggctttttgtatgtcaatcatacctcaacaagttgtgtttttttaagaatgcattataattgaccacactaaactgatttcattttaccctccatatctaatcagtaagtttctatacttgtggaaaaaaagaacctattcctctggaatgtgctcttaattgcactgtgctgagggtattgctactggttgtgttaaatattgcattacatagaagtgtacatttttttacaatgaatttcacaaacatttgcattttaatgtgcacaatgaatctcaaatctctcttgagtctgcttaaagaccatttttttctcacatttcagtctctttggaaat

SEQ ID NO: 206454 - DNA, 551 bp, Homo sapiens
attaatactacttgttctagaaaatattttctaaatcttaggagactagatatatcatgttctctcygtgcttccatagcatcctgtacttagtcctaagaagcactattgatattgtattgtgatagacttttatatctcttaaataatttatgttttatctctcaattcattaaactggtcaattatatttacattaatagtgtgtctaatgataaacctttctcttactcaaaggataaatatgaataaatcataagatatatttcaatgtgctgttgaatgttggttaatttttttttcaaatttttatgttgctactctttaagcaacactgcctattattttctttccttgtacattctctggttttaaaatcaagatcatatcaatcattttaaataagatagaagctattttatctatctctattttctacaactgtacaaggcaaggtaagtattttttgttcctcgaatgtttgatataattctcttatctggatatagaaatgtttgtgtatttttaatagtgagtgcaatttaccttaa

SEQ ID NO: 206455 - DNA, 551 bp, Homo sapiens
attaatactacttgttctagaaaatattttctaaatcttaggagactagatatatcatgttctctctgtgcttccatagcatcctgtacttagtcctaagaagcactattgatattgtattgtgatagacttttatatctcttaaataatttatgttttatctctcaattcattaaactggtcaattatatttacattaatagtgtgtctaatgataaacctttctcttactcaaaggataaatatgaataaatcataagatatatttcaatgtgctgttgaatgttggttaatttttttttcaaatttttatgttgctactctttargcaacactgcctattattttctttccttgtacattctctggttttaaaatcaagatcatatcaatcattttaaataagatagaagctattttatctatctctattttctacaactgtacaaggcaaggtaagtattttttgttcctcgaatgtttgatataattctcttatctggatatagaaatgtttgtgtatttttaatagtgagtgcaatttaccttaa

SEQ ID NO: 206456 - DNA, 389 bp, Homo sapiens
ctgaaataaaaatatttattaaatacatgtgtctataaaatattatgtggactcctcatctttataatatatagactaacttgcattgggaggagaaaaacaaaagttgtaaggggagaaaaacactaaatgagcaacgaatattgcatatgattaatgagagttcagggaaaagttaacttcacacrctttataatattgctgaaagtgtggtaaatatcagtatcttacaaatgtccatacgtgccccttgacccagcaatgtctcctgtaaaaatttatctcagaaaataattcagtcacatctgtaatcccagcactttgggaggccgaggtaggaggattttttgaggccagaagttcaaggccagcctgggcaacatagtaat

SEQ ID NO: 206457 - DNA, 561 bp, Homo sapiens
ttctctttggtatgcttttttgatgaaatgtcatgtacttaaaatagtgatgattctgtatttcttatttctagtagaatactttttaagagcttaaaagaattgtttcaacattttcctaaaaacataattatcagttcaaataagctcatcaattcagattgttgttctagttctgggaagaaatttgttactttaagkgttacaggttcacaataacaatacctaatattagcaagaaatatttaattcaagattttaaaatctgccttataattgaggtgaaattaaacttaatcaaacattttgattgcatcctcctgaaatctcagtcttcaaaggtgttcaatttctataaaatcagaatttttaagtgggagaggccattaaatactatgacaatccctttgttaatcaagaaacagaactccagacaggcaaaggatcttttccaaggtcatactggacagcagtaaagccagaatagaattcatctccagacatctcttgcaccctctctattacatccacactgtctgttttatatattatttttaacag

SEQ ID NO: 206458 - DNA, 507 bp, Homo sapiens
gaattctagttgatgcctatcacttaggatactggtgatggttaaacaaaagcacaaataattccaataatgctagttaacaacgaccatttctatattgtttattatgtgacagcagctgtgcaaagcactttacatacatcatttaatcctgacaacagcctttgaagatgttaatgataccactttacagttgaagaagctaagatttggggatggtaagaagctcgcccaaggtcataaggtttgtattgtagaaacaggactcttgcatccatattatagacgcttgataaatggtaattttgattctatctctcctttcctttaatttactttcttgagcakgggacattgggccattttatctctcttgctacaattgctgagagctctgatttcagcaacatctgtatcctcgaactttttgggtgaccctttattaacaagatgattcatttataagaatatttctgaactctgaccttggaatcaatatcttcttat

SEQ ID NO: 206459 - DNA, 473 bp, Homo sapiens
atgtggtttgctcttacgatgtctagggaatcaagagaatgtctaaagaatckatctgatttccacaggaaggagacagggccaaaaaaaaagaaaggaataatcttcatcatcatggggctctctgagcaaaatactttacagtatataaagtactcttgctcattttgtggcctttcagtttggttcgtttgctgttatcttaacaaatagggaggaacattgcccatttgtggttgaaaatgtgtgcccctccctgcccccatgatgtctacatcctaatccctggagcctgtgattatgtctccttgcatggtaaaaggaatttgcgtatgtgttgaaattaaggatattgggattatccttgattctctgtgtgggtccaacataattacaagcatccttaaaagatggaggcaggaggtcaataaaaaagagtttagactgctggctttgaaaatagagaaagggac

SEQ ID NO: 206460 - DNA, 493 bp, Homo sapiens
gattagtatgtggtttgctcttacgatgtctagggaatcaagagaatgtctaaagaatctatctgatttccacaggaaggagacagggccaaaaaaaaagaaaggaataatcttcatcatcatggggctctctgagcaaaatactttacagtatwtaaagtactcttgctcattttgtggcctttcagtttggttcgtttgctgttatcttaacaaatagggaggaacattgcccatttgtggttgaaaatgtgtgcccctccctgcccccatgatgtctacatcctaatccctggagcctgtgattatgtctccttgcatggtaaaaggaatttgcgtatgtgttgaaattaaggatattgggattatccttgattctctgtgtgggtccaacataattacaagcatccttaaaagatggaggcaggaggtcaataaaaaagagtttagactgctggctttgaaaatagagaaagggacaacaagccaagga

SEQ ID NO: 206461 - DNA, 474 bp, Homo sapiens
gtatgtggtttgctcttacgatgtctagggaatcaagagaatgtctaaagaatctatctgatttccacaggaaggagacagggccaaaaaaaaagaaaggaataatcttcatcatcatggggctctctgagcaaaatactttacagtatataaagtactcttgctcattttgtggcctttcagtttggttcgtttgctgttatcttaacaaatagggaggaacattgcccatttgtggttgaaaatgtgtgcccctccctgcccccatgatgtctacatcctaatccctggagcctgtgattatgtctccttgcatggtaaaaggaatttgcgtatgtgttgaaattaasgatattgggattatccttgattctctgtgtgggtccaacataattacaagcatccttaaaagatggaggcaggaggtcaataaaaaagagtttagactgctggctttgaaaatagagaaaggga

SEQ ID NO: 206462 - DNA, 474 bp, Homo sapiens
gtatgtggtttgctcttacgatgtctagggaatcaagagaatgtctaaagaatctatctgatttccacaggaaggagacagggccaaaaaaaaagaaaggaataatcttcatcatcatggggctctctgagcaaaatactttacagtatataaagtactcttgctcattttgtggcctttcagtttggttcgtttgctgttatcttaacaaatagggaggaacattgcccatttgtggttgaaaatgtgtgcccctccctgcccccatgatgtctacatcctaatccctggagcctgtgattatgtctccttgcatggtaaaaggaatttgcgtatgtgttgaaattaaggatattgggattatccttgattctctgtgtgggtccaacataattacaagcatycttaaaagatggaggcaggaggtcaataaaaaagagtttagactgctggctttgaaaatagagaaaggga

SEQ ID NO: 206463 - DNA, 592 bp, Homo sapiens
tcttggtatttgtcaaaatataccatgaaaggagtggtgacttgctccaaatgtaggactgggactgtgtctgggcttaccagtggaacaaatgcatttatgctgaggactctatttatcattttatgcatttgttggaatggataaagagaattcaaatttccaccatttactcatttctagatacatgtagaggtgcctagtgtgtaccaaaacttgtgctatgttttttcattggatttttataacctcttgtgaggtacataatgtcaccccaaaattacagacaaaaccaaaatccaaagaatttcagtaactttcccaaaataatatggctagtaagttcacgatcatgttctcattccatgttgcatacaggagaccccagctacgtcccttagaaaacaatttttatatatgtagccatctattcgattcttctcctcctcctgctcctcctccatcttcatcckcaattatcatttattaactaagggtttactatatgcccttagttaagacactaagtatattgagattgagagtgcactaagtatattgcatgaataattttatttttcctgtatgttac

SEQ ID NO: 206464 - DNA, 609 bp, Homo sapiens
ctgtgtctttacagtagaatagtctttataaccctttgagtacattcccagtaatgggattacactcagctatttttttaaatttttagtagagatagggtctcaccatgtggcccaggctagtctcaaactactgggctgaagtaatccacctgcttcagcctcccaaagtgctgggatcagaggcataagccactgcacccagcctccatctttttttaaaggaaataatttttactattgtatataacatattttgcaattctgagtaatattttattttcttctaggaaactactgtattagtttgttttcacactgctataaagatactacctgagactgggtaatttataaaaataaaatgtttaattgactcacagttctgtatggctgggaaggcctcaggaaacttacagttacagtggaaagtaaaggtgaagcaaggaccttcttcacrtggtggcaggagaaagagagagatcaaaggaaggagtgccacactttaaaatcatcagcactcatgagaacttactcactatcatgagaacagcatgggggaaaccatcccatgatcgaatcacctcccaccaggaccctcccttgaca

SEQ ID NO: 206465 - DNA, 543 bp, Homo sapiens
gctctgcagcatacagcacctacagctgcttttgtcagctggcattgagtgcttgtgggttttccaagtacacagcacaggctgtctgtggwtctaccatgctggggtcagaaggatggtgaccctcttcttatagctccactaggcagtgccccagtggggactttgtgtgagggcttaaatcctacatttcccctctgcattgccctagtagaggtcctccatgagggctccacccctgcaacaaacttctgcctagagatccaggtgtttccatgtatcctctgaaatctaggtggaggctcccaaagttcaacttttgtgttctgcaaaccgacaggcccataccacatgaaagccaccaaggtttggggcttgtaccctctgaagccatggtctgagctgtactttggccccttttagctatggctggatctgaagctgttgggactcagtgtgccatgtcccaaggctgcatcaagcaaagggccctgggcccagcccacaaaaccatttttccctcttaggccttcaggcttgtga

SEQ ID NO: 206466 - DNA, 574 bp, Homo sapiens
tatcaatatattttttaaacccctccaagttttcatgtgcagtgaagattggatttccaaggcaggactcagcctctgcctgttgacytagcagttcaggtgagtctaatgatccggctagtctgtgcaaggctggccacatagaaaacctttttgcagtaatagcagaaactctttcttggctctgatcatgatgaaaaatgtactctagtcttaggcttgagtgtgccaacagggtagtaggagtttttgtaaaacataacagagctaacatctatagaacctttattacaatgtaagtaatgatactaagaactttaaatggcaaattatgttcttcctcacaccactctgagggtagctacctatctgtattacctcctttatagacaaaataatttcctacggtcacaaagtaaggaaacgtggaacaaggggtccagtccaggaagtctgagtctttggtccctactcttagctctatacagtgctccctgctctagattgcatttggattcctgaacggcatcatgaagtaaagcattatcctctctactgagccagaaaagaggat

SEQ ID NO: 206467 - DNA, 574 bp, Homo sapiens
tatcaatatattttttaaacccctccaagttttcatgtgcagtgaagattggatttccaaggcaggactcagcctctgcctgttgacctagcagttcaggtgagtctaatgatccggctagtctgtgcaaggctggccacatagaaaacctttttgcagtaatagcagaaactctttcttggctctgatcatgatgaaaaatgtactctagtcttaggcttgagtgtgccaacagggtagtaggagtttttgtaaaacataacagagctaacatctatagaacctttattacaatgtaagtaatgatactaagaactttaaatggcaaattatgttcttcctcacaccactctgagggkagctacctatctgtattacctcctttatagacaaaataatttcctacggtcacaaagtaaggaaacgtggaacaaggggtccagtccaggaagtctgagtctttggtccctactcttagctctatacagtgctccctgctctagattgcatttggattcctgaacggcatcatgaagtaaagcattatcctctctactgagccagaaaagaggat

SEQ ID NO: 206468 - DNA, 622 bp, Homo sapiens
ggctgtttcaggtagtgtgataaaaattctctcaatatttcagtcaaactatttaagagtctttggaataaggaatataagccttctatgtcttaaaaaaaatttatggagattttttgaaaatcatgaaagcaccagattcaaaacattcagaaggcatcttggaagaaaaaaaaaatctcaggagacaatagtggaggactctamacaaagttgtattacagtattcttaagagtaaaatcaatgggacgatagagcaaaactgctcaactaatatacctaattcatagaatgtaatagctatttaggaaatgaaacatttattgttgatttatgatgtgctactaactctgctaagccctttccatattttattctacttgatccaccccaagacctaatgaggtagttagcacagggccactatcccttatccaaaacttttaggccaaattttgaaattcataactatttttattatttaagaatatatagtatatgtattgtatcttgtttaaccccaccagcagggtctgggatagcatgctgtaatcaaacacattaatattttgcaacaaaatatgtgcatattcacagactgtgggataaagaaatatcata

SEQ ID NO: 206469 - DNA, 539 bp, Homo sapiens
tcatcaagcagctccaagcattagaaccaaaatacaagatggtgttggtttctttaacttggttctttttacacacttgtgattttgttggtttgtttatttgctgtgtttttgtttttaaattttcaaatagttacagatatagcatagttccacttcatgtaactagtttacatatcayggcaacatcaaattgctgtaagagtttctaaatgctagctttcgatttctgtgctcttctcatcagcatcagtctacagaacgtactttgagcagcatagctctaatgtattgccttctattgctcaagaagtcttcaatggttaataggttctacatttacatgacctatctgaaagaaacatattaaatttttccaagacacaagttggaaaactgccaacagatgaacggtgtttttagtctgactcctcgggcccagaggtaagactgagcaggcaaaagtagcccagcagaggagcaagtctctgactgtttccctataaaatatgtctttgcattaaaagcataatataaat

SEQ ID NO: 206470 - DNA, 539 bp, Homo sapiens
tcatcaagcagctccaagcattagaaccaaaatacaagatggtgttggtttctttaacttggttctttttacacacttgtgattttgttggtttgtttatttgctgtgtttttgtttttaaattttcaaatagttacagatatagcatagttccacttcatgtaactagtttacatatcacggcaacatcaaattgctgtaagagtttctaaatgctagctttcgatttctgtgctcttctcatcagcatcagtctacagaacgtactttgagcagcatagctctaatgtattgccttctattgctcaagaagtcttcaatggttaataggttytacatttacatgacctatctgaaagaaacatattaaatttttccaagacacaagttggaaaactgccaacagatgaacggtgtttttagtctgactcctcgggcccagaggtaagactgagcaggcaaaagtagcccagcagaggagcaagtctctgactgtttccctataaaatatgtctttgcattaaaagcataatataaat

SEQ ID NO: 206471 - DNA, 539 bp, Homo sapiens
tcatcaagcagctccaagcattagaaccaaaatacaagatggtgttggtttctttaacttggttctttttacacacttgtgattttgttggtttgtttatttgctgtgtttttgtttttaaattttcaaatagttacagatatagcatagttccacttcatgtaactagtttacatatcacggcaacatcaaattgctgtaagagtttctaaatgctagctttcgatttctgtgctcttctcatcagcatcagtctacagaacgtactttgagcagcatagctctaatgtattgccttctattgctcaagaagtcttcaatggttaataggttctacatttacatgacctatcygaaagaaacatattaaatttttccaagacacaagttggaaaactgccaacagatgaacggtgtttttagtctgactcctcgggcccagaggtaagactgagcaggcaaaagtagcccagcagaggagcaagtctctgactgtttccctataaaatatgtctttgcattaaaagcataatataaat

SEQ ID NO: 206472 - DNA, 539 bp, Homo sapiens
tcatcaagcagctccaagcattagaaccaaaatacaagatggtgttggtttctttaacttggttctttttacacacttgtgattttgttggtttgtttatttgctgtgtttttgtttttaaattttcaaatagttacagatatagcatagttccacttcatgtaactagtttacatatcacggcaacatcaaattgctgtaagagtttctaaatgctagctttcgatttctgtgctcttctcatcagcatcagtctacagaacgtactttgagcagcatagctctaatgtattgccttctattgctcaagaagtcttcaatggttaataggttctacatttacatgacctatctgaaagaarcatattaaatttttccaagacacaagttggaaaactgccaacagatgaacggtgtttttagtctgactcctcgggcccagaggtaagactgagcaggcaaaagtagcccagcagaggagcaagtctctgactgtttccctataaaatatgtctttgcattaaaagcataatataaat

SEQ ID NO: 206473 - DNA, 603 bp, Homo sapiens
gacactctgccttctgcaacaaggcacctgtgctgaaggagacttttagcctctgcccttgcytccctgaatagtgcctccatgtgaagaagaccaagctaacctactggagacatggctccaccaagaaccagtagcagctgcctggacaaggccatcttagaccacccaaccctagtcaagacagcagaatgactgcagctcggtgaattgtgttttaagctgctaagttttcagtggtttattaggcagcaatacataactgaaataccctttcaccctcccgactttaggctccagcctttctgatcttctcttaagccttggaacatgccattgacttttccaccctgagactttgcatgttattccttatgcataaaatacattcctctttccacctgtcaaatggtttaactcccttttatcatttaggccactagcttaaaattcacatgcagagagaattctttactgagcaaccatataccccagatttcttattcttcatatcaggcttttcttattttttcattgcgcatatcacaaagggcaattaattaattaatttgtttgtttgtttgttattgcctattttccccc

SEQ ID NO: 206474 - DNA, 603 bp, Homo sapiens
gacactctgccttctgcaacaaggcacctgtgctgaaggagacttttagcctctgcccttgcctccctgaatagtgcctccatgtgaagaagaccaagctaacctactggagacatggctccaccaagaaccagtagcagctgcctggacaaggccatcttagaccacccaaccctagtcaagacagcagaatgactgcagctcggtgaattgtgtttkaagctgctaagttttcagtggtttattaggcagcaatacataactgaaataccctttcaccctcccgactttaggctccagcctttctgatcttctcttaagccttggaacatgccattgacttttccaccctgagactttgcatgttattccttatgcataaaatacattcctctttccacctgtcaaatggtttaactcccttttatcatttaggccactagcttaaaattcacatgcagagagaattctttactgagcaaccatataccccagatttcttattcttcatatcaggcttttcttattttttcattgcgcatatcacaaagggcaattaattaattaatttgtttgtttgtttgttattgcctattttccccc

SEQ ID NO: 206475 - DNA, 474 bp, Homo sapiens
tgtggctagtgttctaacaagtagcacagatccctagatccaagattacagaccagatgtgctgatcgcccttccagtatttatttcattattcaratacatttgtagagtccataaattcttgtgtctctggatgcagtccagatcccgttactggctgtatcttttacctccttatcccaagaacctagcacaatgtgacacacacagtagatactcaataaacactggtcaagtgaaaggccatcagttatctcaactgtaaacagggaattataactttttaaatacttgaaattaagataatggattgtaagattttgtgagttcttaatgctctgaaatctgtagaatctctacttcaataaatcctctatagtcttctgctttgatgtgttttcagtttatcattggctctgatattgtaaaattttaattgtgtgattttttcctaatatttatctatgtttggta

SEQ ID NO: 206476 - DNA, 474 bp, Homo sapiens
tgtggctagtgttctaacaagtagcacagatccctagatccaagattacagaccagatgtgctgatcgcccttccagtatttatttcattattcaaatacatttgtagagtccataaattcttgtgtctctggatgcagtccagatcccgttactggctgtatcttttacctccttatcccaagaacctagcacaatgtgacacacacagtagatactcaataaacactggtcaagtgaaaggccatcagttatctcaactgtaaacagggaattataactttttaaatacttgaaattaagataatggattgtaagattttgtgagttcttaatgctctgaaatctgtagaatctctacttcaataaatcctctatagtcttctgctttgatgtgttttcagtttatcmttggctctgatattgtaaaattttaattgtgtgattttttcctaatatttatctatgtttggta

SEQ ID NO: 206477 - DNA, 549 bp, Homo sapiens
tctctgtcacttttattgagtttctgtatactctaatttattaataaagggacaaaggaggaacatgggcatgttttactcttgtcattatctggaagagtttttcratgaaaccattgagcataaggtaattgctgtttctgctgaaagctcatctctatacagagtgaccttggctacaatccctgatgaaaatgaggaaacatgctgatttaagttggtcttataaaggccctctactgcagccctgctctggaggaaatcaatagacgtatctcagcagataaacacaaataaaaacatcctgcttagctttgctgaattcccacctcttctcacaagtaaaatggtaaaaataaactcattacctctagaacctatggagttagatttgatgatgtcatgtctcttccagaagtacattcttactctttgacttcccaaattatattaataatagaaggtaacagctctaacatttatggagcagttattctgtggcaggcaccatgttaaccacgtcatgtatggtatcttatttagatttca

SEQ ID NO: 206478 - DNA, 549 bp, Homo sapiens
tctctgtcacttttattgagtttctgtatactctaatttattaataaagggacaaaggaggaacatgggcatgttttactcttgtcattatctggaagagtttttcaatgaaaccattgagcataaggtaattgctgtttctgctgaaagctcatctctatacagagtgaccttggctacaatccctgatgaaaatgaggaaacatgctgatttaagttggtcttataaaggccctctactgcagccctgctctggaggaaatcaatagacgtatctcagcagataaacacaaataaaaacatcctgcttagctttgctgaattcccacctcttctcacaagtaaaatggtaaaaataaactcattacctctagaacctayggagttagatttgatgatgtcatgtctcttccagaagtacattcttactctttgacttcccaaattatattaataatagaaggtaacagctctaacatttatggagcagttattctgtggcaggcaccatgttaaccacgtcatgtatggtatcttatttagatttca

SEQ ID NO: 206479 - DNA, 505 bp, Homo sapiens
cccattcctggtgatgttaattttgatcacttgattaagtgggttctgacaggcttcactgctgtaaaattattcgtttccctttgtggctaatgagtatgttgaaaaatgtactgtgtatgaaactatgtaaatattccattattcatcggcctttcaatttattcattgatatatttctgtcaataaaaacacttggattctcattttactcaktaagtcacaatccattactctttgtattttttgttgctttaagtttctgtgtttgagcagtgggagccccttcaagctagcttatgtgtcttgatgtgtccccatctgtctttgatgacttctttatattctggccaagataggtgctccagggtcattttgtactttccctgtcccagccttagggtcagccatttctctaaagaaatatatatacatttggttgaaaacagtattttgaagccaagatgtgagtgctatgtgtgctcattgctattggaggattcct

SEQ ID NO: 206480 - DNA, 429 bp, Homo sapiens
atacctgagcgacgaaataatttgtacaacaaacccccatgacataaggttacctatataacaaaactacacacawgccgctgaactcaaaataaaagttaaaaaaattaaaaaaattctaaatggagggaatagcatattcaaatgctgtgaaacaaagaatgagcaatattttgaagaacaaaaggtagtctagcataggagtattagacaccgtggtgtaaaaatgagtaataaaattatatctcttgaggaacatttcatctgtgatgaaagagaggaatgtatcagaggatcagaggaaaaatgtgttaagtgatacgtattaatgtgtgcaaagtcctaaggaggtaaagcgagagtgactcggtttgcctggcagtcaaggaaggcgtcacacaggaggtaacttctctcttttgcttgatc

SEQ ID NO: 206481 - DNA, 429 bp, Homo sapiens
atacctgagcgacgaaataatttgtacaacaaacccccatgacataaggttacctatataacaaaactacacacatgccgctgaactcaaaataaaagttaaaaaaattaaaaaaattctaaatggagggaatagcatattcaaatgctgtgaaacaaagaatgagcaatattttgaagaacaaaaggtagtctagcataggagtattagacaccgtggtgtaaaaatgartaataaaattatatctcttgaggaacatttcatctgtgatgaaagagaggaatgtatcagaggatcagaggaaaaatgtgttaagtgatacgtattaatgtgtgcaaagtcctaaggaggtaaagcgagagtgactcggtttgcctggcagtcaaggaaggcgtcacacaggaggtaacttctctcttttgcttgatc

SEQ ID NO: 206482 - DNA, 587 bp, Homo sapiens
ttcatctgtgatgaaagagaggaatgtatcagaggatcagaggaaaaatgtgttaagtgatacgtattaatgtgtgcaaagtcctaaggaggtaaagcgagagtgactcggtttgcctggcagtcaaggaaggcgtcacacaggaggtaacttctctcttttgcttgatcataagtaccctgaaggcrgagatcttgtcttacattttttttattatccattttgcctagcatagtagcaggtacccaaggagtgttggataaattcctgatttaatgttatttgttgcaatgacccctgggaggctggagcagaggctggtagcatagaatgttgggtgtggctgtgacacgccaggttagcatgagggtgctgcccatgccacgtggctgtggctcttgtcctggggatgcataatttctatcaactcacttttatattcattcattgacattgaccacctcagtgttgtgcactgattccatgctggtgaatataaagactaatggctcatgcccttgcccttggcaagcatgaagttgggagacagagatgtaaacatattattacatcagtgtgacatgaga

SEQ ID NO: 206483 - DNA, 587 bp, Homo sapiens
ttcatctgtgatgaaagagaggaatgtatcagaggatcagaggaaaaatgtgttaagtgatacgtattaatgtgtgcaaagtcctaaggaggtaaagcgagagtgactcggtttgcctggcagtcaaggaaggcgtcacacaggaggtaacttctctcttttgcttgatcataagtaccctgaaggcggagatcttgtcttacattttttttattatccattttgcctagcatagtagcaggtacccaaggagtgttggataaattcctgatttaatgttatttgttgcaatgacccctgggaggctggagcagaggctggtagcatagaatgttgggtgtggctgtgacacgccaggttagcatgagggtgcwgcccatgccacgtggctgtggctcttgtcctggggatgcataatttctatcaactcacttttatattcattcattgacattgaccacctcagtgttgtgcactgattccatgctggtgaatataaagactaatggctcatgcccttgcccttggcaagcatgaagttgggagacagagatgtaaacatattattacatcagtgtgacatgaga

SEQ ID NO: 206484 - DNA, 545 bp, Homo sapiens
aatccataatatttaacttgtttatttgtttgttttctggctcattgactatttcccctattagaatggaagctgtcttactttttcaatgtgcatacggtgccgaagaaggtctaggcaaagccttgtccctgttgctgtcaagccactaaggagacaggtgtttcaaggcacaacccaaatacagggagaagtgcttaggtggccaaggaaggcttcaccagtacaatgaattttgacctgggctytgaatactgagtggtttgctgatggagaatgtgggctacagcttttccatgtgttgaataatgaagggagtgttttgtgtggtgtgcagtgtgcagcagctgaaggagggagagagatattcgcagacagctgcgggcagatctcacagcatttggatgatgcaaagtggagagtgtgtcaacctcccctaataccttgaatctagggaaaaagtgtattcctccagctgctgacactcagtgagagagtgacgcctctattgaaagtcgtctccttggtgtgcttctgaaggagaa

SEQ ID NO: 206485 - DNA, 545 bp, Homo sapiens
aatccataatatttaacttgtttatttgtttgttttctggctcattgactatttcccctattagaatggaagctgtcttactttttcaatgtgcatacggtgccgaagaaggtctaggcaaagccttgtccctgttgctgtcaagccactaaggagacaggtgtttcaaggcacaacccaaatacagggagaagtgcttaggtggccaaggaaggcttcaccagtacaatgaattttgacctgggctttgaatactgagtggtttgctgayggagaatgtgggctacagcttttccatgtgttgaataatgaagggagtgttttgtgtggtgtgcagtgtgcagcagctgaaggagggagagagatattcgcagacagctgcgggcagatctcacagcatttggatgatgcaaagtggagagtgtgtcaacctcccctaataccttgaatctagggaaaaagtgtattcctccagctgctgacactcagtgagagagtgacgcctctattgaaagtcgtctccttggtgtgcttctgaaggagaa

SEQ ID NO: 206486 - DNA, 573 bp, Homo sapiens
gatttctatatatatttactagactataaagtgtgcacaggcagaatccatatctaattccttttttatctcccatagcagcacrataactagcacataaatagctcttgacaaatatttatggaatgatttttaattattaacacattatcttaagttattaatacttgcttagtgattttaattattattaaattatttgttcaagaatcatttgaatacattctttttttttctcttgtactcattttttttttaatggatttcagccaacctctatggaagaaggaagagagggggaagcaatatttttatgtggttgagaataggggctttggaactagccagttggattagagtccctgctatgtggctttctagcctcagatttttcatctatataatgggatgatacttacaatagctacaatcatatatagctcctaggtttgtggtgctaagtacttaacctatgttatttcatcaagtcttacaaacaccttgtgaggggtgaacataccaaggtaagactggatgagaatagcaaagtgcctggttcataaaagaggccca

SEQ ID NO: 206487 - DNA, 573 bp, Homo sapiens
gatttctatatatatttactagactataaagtgtgcacaggcagaatccatatctaattccttttttatctcccatagcagcacgataactagcacataaatagctcttgacaaatatttatggaatgatttttaattattaacacattatcttaagttattaatacttgcttagtgatwttaattattattaaattatttgttcaagaatcatttgaatacattctttttttttctcttgtactcattttttttttaatggatttcagccaacctctatggaagaaggaagagagggggaagcaatatttttatgtggttgagaataggggctttggaactagccagttggattagagtccctgctatgtggctttctagcctcagatttttcatctatataatgggatgatacttacaatagctacaatcatatatagctcctaggtttgtggtgctaagtacttaacctatgttatttcatcaagtcttacaaacaccttgtgaggggtgaacataccaaggtaagactggatgagaatagcaaagtgcctggttcataaaagaggccca

SEQ ID NO: 206488 - DNA, 622 bp, Homo sapiens
cacttacacaaatgaacgaaatcactttatctttttaaattgaggatgtgtttctttgggcagtcaaaaaatcaaacttataaataatgggtcatttgtgtcctcacagtgtgactgaacaggcataggcacagaggctggaagaacaggttctgctctgtcactaccatttcctatttctgtgactttggagaggcaggcccttcataacctctccaagactcagttttatttgaaaaataagatgaaaatccttagcctcagargttaactgtgaaaagaactagcatagtcagtggcacaagttggttcatgatttcatttcagcctgggtctgactctttaggaaactggacttcagttgaataaactttgaataagtagaacattgggcagataactgcacctctgcatcatcaatgggcaaatgactgtacccacgttcctgcacctgtattctgagaagcttagattaaatgatttctgaaagtccttaaaatagtagtaattatatacaaatgatatgcaaagtactttatatatgtgtgtgtatgtatatacatttattttatacatatatatatatattttttttagacggagtctcactcacatttttaaa

SEQ ID NO: 206489 - DNA, 552 bp, Homo sapiens
tgccagttgttgaaagtttagcaagtttaatgaggtacagtacataatacttcataatgatattaaacgactatgtttctggttgataaatttactatattatacattttatcattattttggagtatactctttctgcttataaagagagttaactgtaaaacagcttctgacaggtccttcagaaggtatttcagaagaaggcactattatcccaggagatgacagctccatgcgtgttgttgtccttgaaggcattctagcaggacaagatgtgtaagtggaaggtartgataggaataaccctgcctctgtgtaagcctaggctagcgtgtgtgcttgtgttttcatttttaataaaaaagttttaaaagtaaaaaaaatgttaaatagaataaaggcttataaggatatgaagaaagcaaatatttttgtacagttgtacaatctattgtgatttaaggtaaatgtttattacaaaagagtcaaaaagtttaaaaacattaaaagtttattaagtaaaaagttatagtaagctaagattaatttatc

SEQ ID NO: 206490 - DNA, 586 bp, Homo sapiens
ccaaaaaaaaaaagatgtaataggaatagagagtaaagacttaatgattccagggagcagtatcaggagttaaaatattgattgtaaacatacaaattgggtaatgtattagttccattctcacacggctatgaagaaatacccaagactgggtaatttataaaggaaagaggtttaattgactcgtagttccactgggctgaggaggcctcaggaaacttacaatcatggtggaaggggaagcaaacacatccttcttcacatggtggcagcaaggagaagtgcagagtgaagtggagaaaaaacccttatagaagtatcatatctcatgagaactccctcactatcacaagaacagcatagaggtaactatctccatgactcaattacctcccactgggtccctcccacaacacttgggattgtgsgaactaaaattcaagatgagatttgggtggggacacagccaaaccatagcaggtactaaactgaggcttaataaagttctcttaatggaaaaatattgtgataggttgaattatgtcccttcaaaatttacatgtttaagtcctaacccctagtactt

SEQ ID NO: 206491 - DNA, 586 bp, Homo sapiens
ccaaaaaaaaaaagatgtaataggaatagagagtaaagacttaatgattccagggagcagtatcaggagttaaaatattgattgtaaacatacaaattgggtaatgtattagttccattctcacacggctatgaagaaatacccaagactgggtaatttataaaggaaagaggtttaattgactcgtagttccactgggctgaggaggcctcaggaaacttacaatcatggtggaaggggaagcaaacacatccttcttcacatggtggcagcaaggagaagtgcagagtgaagtggagaaaaaacccttatagaagtatcatatctcatgagaactccctcactatcacaagaacagcatagaggtaactatctccatgactcaattacctcccactgggtccctcccacaacacttgggattgtgggaactaaaattcaagatgagatttgggtggggacacagccaaaccatagcaggtactaaactgaggcttaataaagttctcttaatggaaaaatattgygataggttgaattatgtcccttcaaaatttacatgtttaagtcctaacccctagtactt

SEQ ID NO: 206492 - DNA, 613 bp, Homo sapiens
tagaggctgctgtaagtaaaactcctgtgtacgtggtgtagactcagcactctgacttcagtagtcctgttcatcactgagccttatggcttctacaggtttttagtaaatgtgagttgaatggatcactgttaagccttgcttttgcagagaaagaaaattcgatttaggaaagacaaacaagcatatgtgacattaggaaattgcagaatcctcccaagtcctgtgatttggggtgcattccactatgataagcagtgcagttcttgggccctggcttaggcaaactcctgtatcttgtactttccacttttacacagacaagtgggagacaggagagcataggaatgaggagttcatgttctaatgcttaccctgtgtgacttgaaccagtcaattaccctgcttatgcctcagttccctcatctgtaaaattaataatttttttaaaaatttctaaatttcttaccacttttaccccgctttgtttcttgagtcacccatatcttacctcctatgcagtggaagctaaaaacctrtaaactccatctttccccactactcatttgccagttacctttaataatcaatgagctggtttgtgtgctcaggt

SEQ ID NO: 206493 - DNA, 560 bp, Homo sapiens
atgagtgaatgaatgaatgaatgaatgaggattaaagagtatggtttaagaagtgttcaatttcccacagcttgaaaattgcagaaccaccccactatctgccctagaccctggaggtgaccagcacaggtagtgatatcctatgaacattaaaaccaggctggccaggcacagtggctcacatctttaatcccagcactttgggaggccaagaaacgcggatcacctgaggtcagagtttgaaaccaacctggccaacatggtgaaaacccgtctatactaaaactacaaaaattagctgggcatgttgrctggcatttgtaatcccagctactcgggaggttgaggtggaacaatcactggaacctgggaggcagaggttgcagtaagcagactgtcaaaacaaacaaacaaacaaacaaaaaactaggctaagattcaaaaacaatgcactgagagtgaattagcaagtaaatatcaacctacaagcaagagaggggatggtaatagctaaggcaagagtaatacttctagaaaaaaacagcatgccaaagaggagt

SEQ ID NO: 206494 - DNA, 358 bp, Homo sapiens
ggtgtttctgtttgtgccttatcggagggtacccatgtccctcctcccctrgcccatgacccaccgagctctgagagttggtattaaaaagatggtattgggtttgtcaaacacaccatttgggaatgatagcccttggcactattttaaagggctatcaccaagccatcagccctgatacatgtagctctgagaaacagtgtgcagaaataagagcatagcacatttgttttgtagttcagaagccaacccttattttattaaaatgtgtacaagagatggggaaggaaaaggaccagactgtactgtggccatgtacacaaaggcatgcaccacatcccagctctgctgccctggg

SEQ ID NO: 206495 - DNA, 358 bp, Homo sapiens
ggtgtttctgtttgtgccttatcggagggtacccatgtccctcctcccctggcccatgacccaccgagctctgagagttggtattaaaaagatggtattgggtttgtcaaacacaccatttgggaatratagcccttggcactattttaaagggctatcaccaagccatcagccctgatacatgtagctctgagaaacagtgtgcagaaataagagcatagcacatttgttttgtagttcagaagccaacccttattttattaaaatgtgtacaagagatggggaaggaaaaggaccagactgtactgtggccatgtacacaaaggcatgcaccacatcccagctctgctgccctggg

SEQ ID NO: 206496 - DNA, 439 bp, Homo sapiens
aaagggaagggctggcttcttggtaggggcactctgccagttctgcttgctgaaggccgctgagtatagctggtgtaatggtgtctccctgggtcaggaaacatgggcccagagaaagagcagggtgagagaaagtcactgtggcctctttagcattcatgccatgtcccatgtagatatttgtttacagaaacagaaaaaatctctgtctctgtctctctctatctctctctctgtctgtctgccttttgaggcagggtctccctctgtccctcactccaggatggagtgtagtgatgcgatcttggctcactgcaacctccacctcctgggttcaagcaattcttgtgcctcagcctcctgaatagctgggattacagacatgcaacaccacrcccagctaatttttgtatttgtagtagagatgggttttcatcat

SEQ ID NO: 206497 - DNA, 496 bp, Homo sapiens
ttggtgcatttcatcttgattgacagcaccctctgaagaatccaagaagagcagatgcctctgaaaggctgccccacctgagtgatttgggacaatggcatcrtagattaggatcatctgttcatgtgaatgtaattagcaaacttgatcaaaatggaataaaagtcaaagtgaaggttctaaaacatagcccacatggggaattagaaggttctcttttgacaccagacagcagtgtcaaccatagataagtcttggaaaactgattcctccatgttctttctctgctgttaaggcccctaacaatcacttgagggcaattcaaagcccagtttaattttgttgaagtctctctttcttcaagaatgaaaaggaatccttcccatctcactttcccaatcaggcagccaacattcatctaattagcaacttagagaactttggttgtattaatttgtaagagaagactggacaaaaatctccaaggacatatgtg

SEQ ID NO: 206498 - DNA, 496 bp, Homo sapiens
ttggtgcatttcatcttgattgacagcaccctctgaagaatccaagaagagcagatgcctctgaaaggctgccccacctgagtgatttgggacaatggcatcatagattaggatcatctgttcatgtgaatgtaattagcaaacttgatcaaaatggaataaaagtcaaagtgaaggttctaaaacatagcccacatggggaattagaaggttctcttttgacaccagacagcagtgtcaaccatagataagtcttggaaaactgattcctccrtgttctttctctgctgttaaggcccctaacaatcacttgagggcaattcaaagcccagtttaattttgttgaagtctctctttcttcaagaatgaaaaggaatccttcccatctcactttcccaatcaggcagccaacattcatctaattagcaacttagagaactttggttgtattaatttgtaagagaagactggacaaaaatctccaaggacatatgtg

SEQ ID NO: 206499 - DNA, 557 bp, Homo sapiens
gttggtgcagtggtggcaatatttagtgtttagcaatggcttgaggaggtttgcaaaggaaactcagaaagtcttgggagagttttctkaaatcctaggactttgagaaagttatgtcataattgtccagattgtagaaactagtgttgttgccctagtcccttatccagggaatcccttactttctgccatacttttaaatggccgtaatgtggaatcagaaacagtgggatggctcctattactcaactcagtgccttatgtggatcatctcatcccctccctacaaacaccctaagaggaatttggtattatttttctggaggttataaatggggaaagtgaggctcataggagctaaatgactcgctcaagaccacctgactagttaattgaagactcagtgtcaaaccaaggtttttctggccacagattctaaggtgattcttcaccttggggcgtaccatctcatgatggacaaagatgcacctgccttctgtgtattaaggataagagaggtcttagaactgtgaaaaaaggcagtaaaaattccattt

SEQ ID NO: 206500 - DNA, 562 bp, Homo sapiens
gtggtggcaatatttagtgtttagcaatggcttgaggaggtttgcaaaggaaactcagaaagtcttgggagagttttctgaaatcctaggactttgagaaagttatgtcataattgtccagattgtagaaastagtgttgttgccctagtcccttatccagggaatcccttactttctgccatacttttaaatggccgtaatgtggaatcagaaacagtgggatggctcctattactcaactcagtgccttatgtggatcatctcatcccctccctacaaacaccctaagaggaatttggtattatttttctggaggttataaatggggaaagtgaggctcataggagctaaatgactcgctcaagaccacctgactagttaattgaagactcagtgtcaaaccaaggtttttctggccacagattctaaggtgattcttcaccttggggcgtaccatctcatgatggacaaagatgcacctgccttctgtgtattaaggataagagaggtcttagaactgtgaaaaaaggcagtaaaaattccatttttaaatgcctcacc

SEQ ID NO: 206501 - DNA, 453 bp, Homo sapiens
aggttggtattttgcctgaaatcgcacccctacttggcctccttcccttcccaggccagcttcccacacccctataagcttccccagggagcctgtccttaacacttcacttgtgtacacattctcaactcacgatctgctttgggaaaacctacctaggasactctctgtcctcctttgctctcccccaaattcttgtccttatgcacatcacattccatgctgatggcttccatctgtgacacctgttttcggtctggtaaccaaggccttatataagacatgtgttaaaacatgaccatatagtttgtcatccaattcaagacactttgctcacgaaagaggatgctattaataattttgctcagcaaaatgtatatctaccaccctcattgcagggcttcaagttatgcaataagtcacattggagcctgtgaatggtgccagagtata

SEQ ID NO: 206502 - DNA, 574 bp, Homo sapiens
agttgaacaagagcaaagcatagaaagcttattcaaaaaaaaaaagaacaaaaaaactttctaaacttaagaaagatataaatatccacatgcaggaaggtcagagaacaccaaacaggtttgacccaaataagactaccctaaggcacatgctaatcaaactcttaaaagtcaaggacaaagagaggaccctaaaagcagtaagagaaaagaagcaaataacatacaaaagragctccaatttgtctgacaacagacttctgaatggaaaccactcaggtcatgggggaggaagacaacatgttcaaagtgctgaaaaaaaaacaaaccctgccacccaagaatatggcatccagcaaagctaccctttgaatatgaaaaagagataaagtctttttcagataaacaaaagctgagagaattaccaccaccagacccatcttacaagaaatgctaagagaagttagttaatctgaaaaaaaaaaccaaaaaacaaaaaaaaacactaacatgcaaaaaaaattttttttgaaggtataaaacccactggtaaaattaaatacacagataaccc

SEQ ID NO: 206503 - DNA, 574 bp, Homo sapiens
agttgaacaagagcaaagcatagaaagcttattcaaaaaaaaaaagaacaaaaaaactttctaaacttaagaaagatataaatatccacatgcaggaaggtcagagaacaccaaacaggtttgacccaaataagactaccctaaggcacatgctaatcaaactcttaaaagtcaaggacaaagagaggaccctaaaagcagtaagagaaaagaagcaaataacatacaaaaggagctccaatttgtctgacaacagacttctgaatggaaaccactcaggtcatgggggaggargacaacatgttcaaagtgctgaaaaaaaaacaaaccctgccacccaagaatatggcatccagcaaagctaccctttgaatatgaaaaagagataaagtctttttcagataaacaaaagctgagagaattaccaccaccagacccatcttacaagaaatgctaagagaagttagttaatctgaaaaaaaaaaccaaaaaacaaaaaaaaacactaacatgcaaaaaaaattttttttgaaggtataaaacccactggtaaaattaaatacacagataaccc

SEQ ID NO: 206504 - DNA, 574 bp, Homo sapiens
agttgaacaagagcaaagcatagaaagcttattcaaaaaaaaaaagaacaaaaaaactttctaaacttaagaaagatataaatatccacatgcaggaaggtcagagaacaccaaacaggtttgacccaaataagactaccctaaggcacatgctaatcaaactcttaaaagtcaaggacaaagagaggaccctaaaagcagtaagagaaaagaagcaaataacatacaaaaggagctccaatttgtctgacaacagacttctgaatggaaaccactcaggtcatgggggaggaagacaacatgttcaaagtgctgaaaaaaaaacaaaccctgccacccaagaatatggcatccagcaaagctaccctttgaatakgaaaaagagataaagtctttttcagataaacaaaagctgagagaattaccaccaccagacccatcttacaagaaatgctaagagaagttagttaatctgaaaaaaaaaaccaaaaaacaaaaaaaaacactaacatgcaaaaaaaattttttttgaaggtataaaacccactggtaaaattaaatacacagataaccc

SEQ ID NO: 206505 - DNA, 479 bp, Homo sapiens
aaggatgcaaggatgattcaaataatatgcaaataaacagacatgatacatgcatcaaaaaaatcaagaacaaaaaccatgtgatcatttcaatagatgctgaaaaagcatttgataaaattcaacatcccctcatgataaaaaccctgaaaaaactaggcatagaaagaacatagtccaaaatartaaaggccatatgtgacaaaccaacagccaatatcatatttaatggggaaaaaaatggaaaggtttccctctaagattgggaacaaggcaaggatgcccactgtcaccacttttgttattcattataatactgggagtcttggccagagcaattagacaagagaaagaaatcaaggacatccaatttggaaaggaagaagtcaaattagccttgcttgcagaccaaataatcttatatttaaaaaaaatctaaagactctaccaaaaaactgttagaactgataaatgaattc

SEQ ID NO: 206506 - DNA, 479 bp, Homo sapiens
aaggatgcaaggatgattcaaataatatgcaaataaacagacatgatacatgcatcaaaaaaatcaagaacaaaaaccatgtgatcatttcaatagatgctgaaaaagcatttgataaaattcaacatcccctcatgataaaaaccctgaaaaaactaggcatagaaagaacatagtccaaaatagtaaaggccatatgtgacaaaccaacagccaatatcatatttaatggggaaaaaaatggaaaggtttccctctaagattgggaacaaggcaaggatgcccactktcaccacttttgttattcattataatactgggagtcttggccagagcaattagacaagagaaagaaatcaaggacatccaatttggaaaggaagaagtcaaattagccttgcttgcagaccaaataatcttatatttaaaaaaaatctaaagactctaccaaaaaactgttagaactgataaatgaattc

SEQ ID NO: 206507 - DNA, 479 bp, Homo sapiens
aaggatgcaaggatgattcaaataatatgcaaataaacagacatgatacatgcatcaaaaaaatcaagaacaaaaaccatgtgatcatttcaatagatgctgaaaaagcatttgataaaattcaacatcccctcatgataaaaaccctgaaaaaactaggcatagaaagaacatagtccaaaatagtaaaggccatatgtgacaaaccaacagccaatatcatatttaatggggaaaaaaatggaaaggtttccctctaagattgggaacaaggcaaggatgcccactgtcaccacttttrttattcattataatactgggagtcttggccagagcaattagacaagagaaagaaatcaaggacatccaatttggaaaggaagaagtcaaattagccttgcttgcagaccaaataatcttatatttaaaaaaaatctaaagactctaccaaaaaactgttagaactgataaatgaattc

SEQ ID NO: 206508 - DNA, 479 bp, Homo sapiens
aaggatgcaaggatgattcaaataatatgcaaataaacagacatgatacatgcatcaaaaaaatcaagaacaaaaaccatgtgatcatttcaatagatgctgaaaaagcatttgataaaattcaacatcccctcatgataaaaaccctgaaaaaactaggcatagaaagaacatagtccaaaatagtaaaggccatatgtgacaaaccaacagccaatatcatatttaatggggaaaaaaatggaaaggtttccctctaagattgggaacaaggcaaggatgcccactgtcaccacttttgttattcattataatactgggagtcttggccagagcaattagacaagagaaagaaatcaaggacatccaatktggaaaggaagaagtcaaattagccttgcttgcagaccaaataatcttatatttaaaaaaaatctaaagactctaccaaaaaactgttagaactgataaatgaattc

SEQ ID NO: 206509 - DNA, 600 bp, Homo sapiens
acttttcatgtagtatttccttcctcacaaacccagaaaagctataattaaatcaatggtacaactttaacttgatgagatcttagaatggagaactatgagaaccattatttggttttaagttattgcttacggaatgtcatcaggatagagccaagtgatgcttctgagttaggatccaatagaaggtacaatgtactgaatgtgtgtgtccctccaatattcatatattgaaatccaaatccccaatatcatggtattaggatgtggggcatttgggagtagattagttcatgagggtggagccctcatgaacgagattagtgactttgtaaaaaagaacccagagagctctcccaccctccttctgccacatgaggatacagcaagaagtcagcatctgaagcaagccctcaccagacaatgaatcttctgacgccttgatcttggacttcccagcctccagaactgtgagaaataaatgtttgttgtttaagtcacccagtctatggtattctcttgtagcagcccaractgactaagacagaaggcaagactgaaaatcaagagaaatacagacaatagaaacacatttataaa

SEQ ID NO: 206510 - DNA, 547 bp, Homo sapiens
tccctgcacaaccctccccgcccccacccccggaaacagtacactttttatccccccaaaaaaagagttccttgtgaaaatgtttggaaaatgaaggaaagtctaaataaggaaattaaaggtattcagaaaagatgtcaacattttgatgtctatccttcaagtcatgttttcaatgggcatatatatccacatgtaggtattaacaaatgtataaacatagagtcttattatctctcaaaattggtaatatgttttattttagaaactgtttcttttcttgtatcacgaacgttttctcttggcattgaatagtctttatacgaaattttaaattgctgcataattattctatgtgtgcaagtgctcccctgatcccctctttaaaatcagaataaaaaaatattaagacagttgcaaagtattttggcatcataagtccaaacacttctctcaacttccatggttatgggcagccatcctggcatctcctatytaaagtgggaagtccagttatattagtccagccctgttcctttcagaattc

SEQ ID NO: 206511 - DNA, 393 bp, Homo sapiens
ccagaaggtggcaaagaaagacacttttgtcatgtgcctgttcctcttccttgatgttaaaacctacctttgagtccaccaaaagccccacagctctcccttctaaccacatttaattaaaatttctactgaggttttatttttaccgtctgaattctataaactttctgagaccagagggagaaaaaaggacataggaaacagagagagayacaactaggcagcttgggctcctcacccatccctactcactgccccctcatcttgtgctgtctgaatctctggtattgatgtctaagcagcacacaacattcctaaccgctggaggatctgaccaccggctccatggggctgatgacaccgacaaggccaagcaggaatgatgagactgtg

SEQ ID NO: 206512 - DNA, 393 bp, Homo sapiens
ccagaaggtggcaaagaaagacacttttgtcatgtgcctgttcctcttccttgatgttaaaacctacctttgagtccaccaaaagccccacagctctcccttctaaccacatttaattaaaatttctactgaggttttatttttaccgtctgaattctataaactttctgagaccagagggagaaaaaaggacataggaaacagagagagacacaactaggcagcttgrgctcctcacccatccctactcactgccccctcatcttgtgctgtctgaatctctggtattgatgtctaagcagcacacaacattcctaaccgctggaggatctgaccaccggctccatggggctgatgacaccgacaaggccaagcaggaatgatgagactgtg

SEQ ID NO: 206513 - DNA, 367 bp, Homo sapiens
tctatctctgcagttatagaacagaatctacatgcttctgttttgacccaggaaaatcagctagagtgcttgagtctggcaggaattacccagagcccacagctgtcagctagctgtcttgtttctgagcatgccctctaagtgagtggtcatatgtacttccctctttttcacaaggaggctgtaattctattcctcatgtggcccatcagctccagggagcagtgagctgtggaactccaaatcttctgagctaccatgagctatccgtgagtcayggaccatgcaagcctaagcgctgatattttgcccctgcgcacaccagcccgcatcacacaagatcgctgatcccaagtggtagaagggc

SEQ ID NO: 206514 - DNA, 557 bp, Homo sapiens
ttcttaaatctatagataagtttacagacatgtacatctttactgtgtttagtctttcaattcttgaatgcagtatgtctctccatttatttagaacttctttaacttctttcatcagtgttttgaagttttcagcatactgttactgcacacattttattagatttacctgcatttaatgttttggaactattgtaaatgctttataaaacttattgccaattatacattgtcaatgtataaaaatatggctggttttagtgtgtttatcttataccctgcatacttgatagttttacttattagtcctaggagtttccttttttacttttttgaagattccttgagattttctgtttagaaaatcatatcatctgcaaataaggacagttttatttcttcctttcctatctgtatgccttttatttcttcttacattactrtactggcttttagtgtcatgttgaataggaatggtgagagtgaacattcttatcagctcccagaagtcttctatttgtagtttcctaagagttgttttttttttaacatgaatg

SEQ ID NO: 206515 - DNA, 585 bp, Homo sapiens
catcaagaaatagactctattccttctacccttgaatgtgggcaagcctgtggcatagtttggtagtcagcttttggtcataaagttggctttactttgtttaataatattacatttttcttctatgtatctttgcctttggacacaaacattacctgggaggcaaaatcctttacttgaattaggcttgtaatttgttctctttaatcattatacttaacctttaatgacagttctctttaataactatagtctttagtgtgttttgagttgtattttttatatttttggagaaaagacttgtgaaagggaaagtgccagccttccttaagtcacaaaagtgctttgttaattcatttgtgcacatctttcaatgtaattgacatttccctggatgtttaaccataaaggccagaaagtataaatactgtagataccacaaagatactctgtagacaccacaaagctgttagtttaacatttaaatggtagcattattatatacaaagaggacaagagcagaggatataacatttggattgtagcttggctcttactaccyatgagactctgggcaggtctaac

SEQ ID NO: 206516 - DNA, 646 bp, Homo sapiens
tttatgcctgcagttatatcctctgtggacaaaggatataattttccatagacaaggaatgtttataatttaaggagaaacttttaatggacacatattggggggcaagatagattygattccaaaaagtcccagaaaaaaagtacatcatcatctgttcgccaagtctttcacagacagactttaaatacatggaagcatactaaatattggagccaaaccagaaggcaaggtaagaactcctgagctgcataatgctggacagatggtggctggagaattcaccagtaacctcaaaatctgcctgtaaagcataaaaagttctagagattctcataattcttaaatactaagtccttctgaaattaggagtccagatctcacccccaaaggatttgaagccaggggtaaactcaaacacaagctgcaacccataccagatctagttcaataagaacttagatcaggtctggcagaagaaggggctttctctgttccaaaattattttatatataagattcaacatacaataaaacataacattatatgagaaacaaaacaaaatgtaaatatcagaaaactatgaccaaaaaaggttatatagcatagaatcaaaactgaaccaagcatgaattttaacaggca

SEQ ID NO: 206517 - DNA, 644 bp, Homo sapiens
ctattaataaaggtcttccctgcatgaaggcagcctataaaggctgggagaaatgactgttttctcaaacgcccaaatttcagcaaataagcacaaggcatacaaagaaacagaaaaatatgcctcaatcaaaggcacaaaataaatctcccaaaaaaataaaagccctagatctcagaggtggagcaagatgatggaaagctccaccaatcatccccctaataggacaccaagttaacaactatctacacagaaaaaaaccttcatgagaaccaaaaatcagatgaggactcacagtatgtagatttaactttatatccctgaaagaggcactgaagagataggaaaaatagtcctgaatcacaatgccacccttcccccaccccctggcagcagcagcgtgagagcctctctgggcactggaggagggagaatacagcaattgtgaggcattgagctcagtgctgtcccattagagcagaaaggaaaattggaccaaactcagctgacacccaccaacagagggagcatttaaaccagccctagccctaggggaatcaccaatctcactgaatggaacttgagtgactgcaaaccttgccacagggsgctacagcacatgttggggtgttagggggagacat

SEQ ID NO: 206518 - DNA, 263 bp, Homo sapiens
tctgcaaaaaccacagtgttactgggcttggagtgccccgaaagcacatacagtttagatcacaacacccaagggctttkaaatatctagaaagccttcccaagaaggatggctacaaataaacccagatagcaaagactacaataaataaataactcttcaatgcccagacaccaaaaaacatctactagcatcaagaccatccaggaaaacatgacctcaccaaaggaactaaaggtaccagggacaagtcctggagaaac

SEQ ID NO: 206519 - DNA, 597 bp, Homo sapiens
ggaactgatattcttaatctcaatgcttactagctttgggatttggaaacagcctaacatgcttggaccacagctctcctgagatttaagtaggtcagctctaggattatttacagtttccaatactaatacttaatttcaacctcaaagtatcacrtggaaagtgtttgaggaatgggagaaggtagaggaggatgaagcagacgaagaggcagtttcataactggaggagaaggtaatatcagaagaatcctggtaaacctgtgaaggcatgccacggggcgagcatctctttatgttctgttttgcacatcagtttcttgctctttttgagaatataataggcactggaactagcctgagttatttacatcagaagcttttcaacttacagtgttcccatagtcttgtggcatgtaagtcattacaaaagcatttgttctcatttatttgttcagcccataatttgtctactaataatgtaatctgtttaccattcaatttaacctgagtgagtagccaatttcaagatattttaggtaaatttatcttttgttaggtaagttatcaacatgtataggtccctatagcaataca

SEQ ID NO: 206520 - DNA, 508 bp, Homo sapiens
aaaatccagtcatttcatgccgtccaagactgaatctcaggagcactaacatcttttctttttctttatttcaattgaaccagtagccagaatacctccattccctggccttgccagcttagagagttctctatagttaattataataagagcttaataacttaaaatatcttaaaggtaataattatcctccttatgctgtggactcatctgygtgttagacagtcacttggggatgggtattgtaattggagcagggctgcaacatttgatgagctggagattggagagtggggtttctgatacacacatttagtttccaaggtgacacagaatgtgctaaggaattgaaaagatctacgcctctcttttaagcataataaactcagaactacggcaatcagtccaggggatgaaggatagcaatgggccactcagggatgacaagatggcgaaaggtttgatgagatgtggcacactgaggcaatatatccaatttacagaggtt

SEQ ID NO: 206521 - DNA, 508 bp, Homo sapiens
aaaatccagtcatttcatgccgtccaagactgaatctcaggagcactaacatcttttctttttctttatttcaattgaaccagtagccagaatacctccattccctggccttgccagcttagagagttctctatagttaattataataagagcttaataacttaaaatatcttaaaggtaataattatcctccttatgctgtggactcatctgcgtgttagacagtcacttggggatgggtattgtaattggagcagggctgcarcatttgatgagctggagattggagagtggggtttctgatacacacatttagtttccaaggtgacacagaatgtgctaaggaattgaaaagatctacgcctctcttttaagcataataaactcagaactacggcaatcagtccaggggatgaaggatagcaatgggccactcagggatgacaagatggcgaaaggtttgatgagatgtggcacactgaggcaatatatccaatttacagaggtt

SEQ ID NO: 206522 - DNA, 508 bp, Homo sapiens
aaaatccagtcatttcatgccgtccaagactgaatctcaggagcactaacatcttttctttttctttatttcaattgaaccagtagccagaatacctccattccctggccttgccagcttagagagttctctatagttaattataataagagcttaataacttaaaatatcttaaaggtaataattatcctccttatgctgtggactcatctgcgtgttagacagtcacttggggatgggtattgtaattggagcagggctgcaacatytgatgagctggagattggagagtggggtttctgatacacacatttagtttccaaggtgacacagaatgtgctaaggaattgaaaagatctacgcctctcttttaagcataataaactcagaactacggcaatcagtccaggggatgaaggatagcaatgggccactcagggatgacaagatggcgaaaggtttgatgagatgtggcacactgaggcaatatatccaatttacagaggtt

SEQ ID NO: 206523 - DNA, 456 bp, Homo sapiens
tgtctctagctcctcctatctcccaaagcatatgcttgtgcctttattataacacctatcattgcacataattatctactcctcaacatacactcaccagacatcaagttcctcaagaacagagattccttcttgcccatcgctgtgtccttagtacatacatgagcatggcacattaatccaataatgtctattataaatgaatgaatatgtgagttcatgactcaagaatgytgtgtgctggagacattttacagaagcttttaggggaagttaccaaagtacggtcctattataacatggaagaaaatgaattaaataaaaagatataagaatgattaaaagggctgcactggtagtatagatagaacagcatgctaccatgagcaagacagaaactgtagaaactgatttttttttaagtccatcaggctgcattgactggagaggcagtat

SEQ ID NO: 206524 - DNA, 456 bp, Homo sapiens
tgtctctagctcctcctatctcccaaagcatatgcttgtgcctttattataacacctatcattgcacataattatctactcctcaacatacactcaccagacatcaagttcctcaagaacagagattccttcttgcccatcgctgtgtccttagtacatacatgagcatggcacattaatccaataatgtctattataaatgaatgaatatgtgagttcatgactcaagaatgcygtgtgctggagacattttacagaagcttttaggggaagttaccaaagtacggtcctattataacatggaagaaaatgaattaaataaaaagatataagaatgattaaaagggctgcactggtagtatagatagaacagcatgctaccatgagcaagacagaaactgtagaaactgatttttttttaagtccatcaggctgcattgactggagaggcagtat

SEQ ID NO: 206525 - DNA, 475 bp, Homo sapiens
ataaagtgaatagtctagtttttactgtgatatttgctacaaaaatgcatctcttaagtctatcgtgagttcaaagactaatcaatgtcactgtttagcttttgcataccccttatctctgaagaggattcagatcctacacgccttccaaagacatgggatagtagccacccactgcattcctaatcatcctactgtagaaatgtctctaaactgagaagagaaagggaatgaggataggcagaaatgtccctcatccatctgagaccgatctagaacarcctctagataagactctctactgtgacttatctcattctgacagagaccctgaaataaaacacggtcaatccaattagctcttatattactgttatttcattgggagtacaggtatgattcttcgagaggagaaaatatttttctttatggaattcccccaaagatcacaataattttctctgactgggtaatt

SEQ ID NO: 206526 - DNA, 551 bp, Homo sapiens
gggatagtagccacccactgcattcctaatcatcctactgtagaaatgtctctaaactgagaagagaaagggaatgaggataggcagaaatgtccctcatccatctgagaccgatctagaacagcctctagataagactctctactgtgacttatctcattctgacagagaccctgaaataaaacacggtcaatccaattagctcttatattactgttatttcattgggagtacaggtatgattcttcgagaggagaaaatatttttctttatggaattcccccaaagatcacartaattttctctgactgggtaattataacaacaacaacagcagcaacaactgtttattgagtgcctactatatgccaggcattgatctaagtgctttgagggttttacatgtaaaaaaaaaaaaaaaaaaaaaaaaaaaaacatgagaagcgttgtactaaaatcttcactaaccccagatagtgaacagcatgggaagatttatttccagtctaatgcagattccttgctctaaacaaaataataaatgtttattg

SEQ ID NO: 206527 - DNA, 551 bp, Homo sapiens
gggatagtagccacccactgcattcctaatcatcctactgtagaaatgtctctaaactgagaagagaaagggaatgaggataggcagaaatgtccctcatccatctgagaccgatctagaacagcctctagataagactctctactgtgacttatctcattctgacagagaccctgaaataaaacacggtcaatccaattagctcttatattactgttatttcattgggagtacaggtatgattcttcgagaggagaaaatatttttctttatggaattcccccaaagatcacaataattttctctgactgggtaattataacaacaacaacagcagcaacaactgtttattgagtgcctactatatgccaggcattgatctaagtgctttgagggttttacatgtaaaaaaaaaaaaaaaaaaaaaaaaaaaaacatgagaagcgttgtactaaaatcttcactaaccccagatagtgaacagcatrggaagatttatttccagtctaatgcagattccttgctctaaacaaaataataaatgtttattg

SEQ ID NO: 206528 - DNA, 455 bp, Homo sapiens
tcctagattttattagttgaagtgtaatctttccaaagcctaaataaggataggaacctcccctactccagatcctcaagcttccttttggatttaaagtcaaattcaactgcaaaccatggcatgcaatatgtcacacgatttggttcctgactaagctcagttcttattagccataatgttccatttwtttcactattttctgggcacactggtctttcattttcccatggatatgctaatttcaccccatcttggggctttgcacttgagtttcctctcactagaatgctctttcttcacagtttggcatggtttccccttttcattatataggacccaacttggaggaaatttcctccaagaatccttattcctaacccatgatttattttctttgtagttttcatcactttctgaaattgtcttttgtctttaggtctcaattgactatt

SEQ ID NO: 206529 - DNA, 455 bp, Homo sapiens
tcctagattttattagttgaagtgtaatctttccaaagcctaaataaggataggaacctcccctactccagatcctcaagcttccttttggatttaaagtcaaattcaactgcaaaccatggcatgcaatatgtcacacgatttggttcctgactaagctcagttcttattagccataatgttccatttatttcactattttctgggcacactggtctttcattttcccatggatatgctaakttcaccccatcttggggctttgcacttgagtttcctctcactagaatgctctttcttcacagtttggcatggtttccccttttcattatataggacccaacttggaggaaatttcctccaagaatccttattcctaacccatgatttattttctttgtagttttcatcactttctgaaattgtcttttgtctttaggtctcaattgactatt

SEQ ID NO: 206530 - DNA, 625 bp, Homo sapiens
gttgccatgcctgtcatgcctgaacagagggctcatgttcagattctctcagttctaccttcagatctattttagtcactgaacaaagagcctgaggaagccagagcttgkaggtattgcttttcaacaaagttaccctgaatctaatttggctgcactttgtgtatttaaaatataagcgttgtcagttgagcatagactattgtatgaattaatatatacatttaaaaaataataaacaggactaagatctagtggaaaaataagctaatctgtccactgcctacattctttctaatataggaaaatgacagaccaaagctaactggacagagaattaatagcatgatcatgagatgaggaatgcttacataagaagagacctcaaggttacagcgtttcaaaaaagtaatctgttgataactaaaactcaaacagcatatatttgcatgtaaataaccacagcacatatacatgtatgtatatgtctatatatataatcatttgtttcctttttttcccatttgattatattaatagctacaactcattaagtacttactatgctttaagccttcaatgatgtgtcctttatatattatgtgatatgatttagctgtgtatt

SEQ ID NO: 206531 - DNA, 625 bp, Homo sapiens
gttgccatgcctgtcatgcctgaacagagggctcatgttcagattctctcagttctaccttcagatctattttagtcactgaacaaagagcctgaggaagccagagcttgtaggtattgcttttcaacaaagttaccctgaatctaatttggctgcactttgtgtatttaaaatataagcgttgtcagttgagcatagactattrtatgaattaatatatacatttaaaaaataataaacaggactaagatctagtggaaaaataagctaatctgtccactgcctacattctttctaatataggaaaatgacagaccaaagctaactggacagagaattaatagcatgatcatgagatgaggaatgcttacataagaagagacctcaaggttacagcgtttcaaaaaagtaatctgttgataactaaaactcaaacagcatatatttgcatgtaaataaccacagcacatatacatgtatgtatatgtctatatatataatcatttgtttcctttttttcccatttgattatattaatagctacaactcattaagtacttactatgctttaagccttcaatgatgtgtcctttatatattatgtgatatgatttagctgtgtatt

SEQ ID NO: 206532 - DNA, 625 bp, Homo sapiens
gttgccatgcctgtcatgcctgaacagagggctcatgttcagattctctcagttctaccttcagatctattttagtcactgaacaaagagcctgaggaagccagagcttgtaggtattgcttttcaacaaagttaccctgaatctaatttggctgcactttgtgtatttaaaatataagcgttgtcagttgagcatagactattgtrtgaattaatatatacatttaaaaaataataaacaggactaagatctagtggaaaaataagctaatctgtccactgcctacattctttctaatataggaaaatgacagaccaaagctaactggacagagaattaatagcatgatcatgagatgaggaatgcttacataagaagagacctcaaggttacagcgtttcaaaaaagtaatctgttgataactaaaactcaaacagcatatatttgcatgtaaataaccacagcacatatacatgtatgtatatgtctatatatataatcatttgtttcctttttttcccatttgattatattaatagctacaactcattaagtacttactatgctttaagccttcaatgatgtgtcctttatatattatgtgatatgatttagctgtgtatt

SEQ ID NO: 206533 - DNA, 625 bp, Homo sapiens
gttgccatgcctgtcatgcctgaacagagggctcatgttcagattctctcagttctaccttcagatctattttagtcactgaacaaagagcctgaggaagccagagcttgtaggtattgcttttcaacaaagttaccctgaatctaatttggctgcactttgtgtatttaaaatataagcgttgtcagttgagcatagactattgtatgaattaatatatacatttaaaaaataataaacaggactaagatctagtggaaaaataagctaatctgtccactgcctacattctttctaatataggaaaatgacagaccaaagctaactggacagagaattaatagcatgatcatgagatgaggaatgcttacataagaagagacctcaaggttacagcgtttcaaaaaagtaatctgttgataactaaaactcaaacagcatatatttgcatgtaaataaccacagcacatatacatgtatgtatatgtctatatatataatcatttgtttccttttkttcccatttgattatattaatagctacaactcattaagtacttactatgctttaagccttcaatgatgtgtcctttatatattatgtgatatgatttagctgtgtatt

SEQ ID NO: 206534 - DNA, 461 bp, Homo sapiens
gctgttctcataatagtgaataagtctcatgagatttgatggttttataaagggcagttcccctgcacatgctctcttgcctgccaccatgtaagatatgccttggtcttcctttgccttccaccatgattgtgaggccttccctgccatgtggaactgtgagtccattaaacctcattttctttatgaattacccagtctaaggtatttcttcatagcagtatgaagtgcactaatacattatgtctgtaaagcagagattatgatccaaattttatagatgagkaaactgaaactccaatgagtaaagtaaattttagtctggaaagtagctaatcatggattcatatctagatttgtttaaattcagaattttcataacattgttagttaagattctccaatttatctatggttttttaaattaaaacatgtattcattcaaatgttctaaatgtgat

SEQ ID NO: 206535 - DNA, 424 bp, Homo sapiens
tgtaagtgtcctgaggcttccccagccatgctgaactatgagtcaattaaacctcttttctttataaattaccttgtcccaggtatgtctttattagtagtgtgagaatggactaatacaaaatgctagtaggatgtcatgggaaattgaagraattaccctccaagccaagagaaaagcctaaggctagaagagcctcatatttgaagagcacagaggcatccagtgtgacctgagtgttctgaatacagaggaaataaatggaggcagtcagggaggtggctggaattagattgtgtagggccgacattggatttattttaagtacaataggaagccactggaatgtgataaccagaggcttgatgtaatctagtctaatctattaaaggattgctgtctagtttgtgataaatggagcctt

SEQ ID NO: 206536 - DNA, 635 bp, Homo sapiens
catgggaaattgaaggaattaccctccaagccaagagaaaagcctaaggctagaagagcctcatatttgaagagcacagaggcatccagtgtgacctgagtgttctgaatacagaggaaataaatggaggcagtcagggaggtggctggaattagattgtgtagggccgacattggatttattttaagtacaataggaagccactggaatgtgataaccagaggcttgatgtaatctagtctaatctattaaaggattgctgtctagttygtgataaatggagccttgaccttggtgtcaagaaattgtccttgataccagcaaggccaatttggaggttattgccattctgagatgagaagcagtaatgacttggtgtttatttgagatagaaagcaagtaaaatagaaacattttctggtagtagaggcaagaaaacttggtgttaatattatcaaagcagataataagaaattgttactgggttgtagtaattatctcactgatatttaaacccttgggtttattggactgggtggccgatgtttgggtaagaaggaaatgagaagtgtttttaatatgggagataccttagcatatttataaacaaaaactgataaacaaggacaaaactt

SEQ ID NO: 206537 - DNA, 635 bp, Homo sapiens
catgggaaattgaaggaattaccctccaagccaagagaaaagcctaaggctagaagagcctcatatttgaagagcacagaggcatccagtgtgacctgagtgttctgaatacagaggaaataaatggaggcagtcagggaggtggctggaattagattgtgtagggccgacattggatttattttaagtacaataggaagccactggaatgtgataaccagaggcttgatgtaatctagtctaatctattaaaggattgctgtctagtttgtgataaatggagccwtgaccttggtgtcaagaaattgtccttgataccagcaaggccaatttggaggttattgccattctgagatgagaagcagtaatgacttggtgtttatttgagatagaaagcaagtaaaatagaaacattttctggtagtagaggcaagaaaacttggtgttaatattatcaaagcagataataagaaattgttactgggttgtagtaattatctcactgatatttaaacccttgggtttattggactgggtggccgatgtttgggtaagaaggaaatgagaagtgtttttaatatgggagataccttagcatatttataaacaaaaactgataaacaaggacaaaactt

SEQ ID NO: 206538 - DNA, 621 bp, Homo sapiens
tttgctagccattcaggcaaggagaatgaacatgctaagtggatcatgtgccatgtgttaatgatcatatgtacagccaaatatggattgcttwaaaattattgaattctgaatagaaacaaaagaggatatcagcattttttttcttgtgtaggaagggaaacttcctgctctaaagtctcccatgtatcactacagataaataaaacccaacatattcacctgaggatgtaataaaatttgccctttgatgtttatcctatagtttctaattctgtagaacaaagaaaaatcactgaacaaagtaacattatggcagattttattaaaaatttcactgtaaattatattaattataatatagaaatacaagtgatgaatacacttttttgcttctcctttagtcaggtgctttataagatattcattcattcatcctatgggcatatattgagtatctactaaggtggtgccattatcaacacagaagtgacccttgctctcaaaatcagactaatgatggggagaaaaattaaacaataatcatccttaattaattcccattgtggtcaaagatgtaaaggatgagttcaagagataagggaagactttgctgaagaa

SEQ ID NO: 206539 - DNA, 573 bp, Homo sapiens
aaatggtcccaggcagtcttgtgtgctccgtcctcccagctatactccactggaatccagtrtctgcctttggtggtagatgttcctgtttctccatcccttggctagatatatattatccattgataggcagctaagtttgcagccaattctcaatcatttcttgtggtgggggacagaaataatgtgggaagctaagttcaccatcaacccagggacttattagctggaagtttcaaactgccttgccactgaacaccataaacaacttcagaccacagctgacttggtgtttgctggtaggagggagtgagaaattatgccagaggtgggaaaacttgtcaagtcaagggggaggtctctttattcttcccctgtgcattcagagaggtgatggtgtctctctacctcattgaaacctgctcccaggagcttctgaagttggccatttagaacccagtgtgaatataaggcagtggattccctttttcaggaaatttgtattttgaatctagacctctttgattaaccagaaggtcttggctcctggtgaagaaaccatgaggagatggg

SEQ ID NO: 206540 - DNA, 332 bp, Homo sapiens
gctgtacctaacaatttaaaaaactagacctaaaaggaccaaactatttccamgtaatttaaccatgccccagaataaggctcatgaatattcaagggaatacaaaaatgtccattgtgttgcaagttaaaattcacaatgtcagcatccaaccaaaaattaacattatgcaaagaagcaagaaaatatgtcccataataaggagaaagatcaatctattgaaactgacctagaactggcacagatgttagaattagcagacaagggcattaaaagttattataactgaattacaaatgttcaaaaggctaaatagagacaaaatatattta

SEQ ID NO: 206541 - DNA, 592 bp, Homo sapiens
tggggaggagagtatgggccagtttgggaaaaagtgtccctaagtacagtatccccagagggggtggcagaaagggttcaactggtaaggcctatggtgatggtgaggggagcatgaaggtgaagaaacaggcaagcacaatagtcactccaagggctggcatgtgtccagagaataagccaccaggaaaccactccagagaacgagcagtgccagagggcatcagaggcagatggaaaattccaagacccatgccatgcttgagtttcctcctcctgtctgtggcactgctacctgcagctcactcacccattcattcccagtgtctcattagggtgtatcacctggaaaacttgctaaaatgcagatmcctttgcttcacatttggggtattctgattgagtggtgactggaccacatgctgagaaagctgttcatttgacaaaatggccttagcaccaattgagtgtcaaccactgtgacatttgggaagggtgggaagtaatgaatggccctacccttccttgatctcggcataagggtcgggggtggggagatttggggatcctccaccctagtccagggtccctct

SEQ ID NO: 206542 - DNA, 553 bp, Homo sapiens
cttgagatgggaagatcaccctggattatttaggtgggctctgtatcatcacaggggtcctgaaaagtgggagagggaggcaaaggagagtgatgtgatgcgaaaacaactcacctttgctggctttgaaatagagggagggaggggccaccaccaaggaatgcaggtggcctgtagaatctgggcaaggcaaggaaacagatcctcccagagcccacagaaatgaacgcagccctgccagcaccttgggtttggcctggtgagctctgcatcagagttctgacctacagaattgtaagataatgcctgtgtgtctaagccactcggcagcaayagaaaactcataatattttagaagatgagtcatggccatcagataagggctgcctggagatgacaagcagaaccagcatggggactggactctctctcaaggggtcccttattcaagataaacatgtggccctttcaacatacgatacttggtaaatgacgactcaaggaataaagatgtcgtgcatttgtaagctctctcacacacatgccagaattc

SEQ ID NO: 206543 - DNA, 597 bp, Homo sapiens
tctgtctcaaaaaaaaatttttctttaattaattccctgttttaaatgaaaatgaagaaagccaacagtgcttgaatttkgcactgacagctggtttgtgtgtgtgtgtgtgtgtgtgtgtgtgtgtgtgtgtgtgtgtgagatgaaatattttttggtgtgaatatatccaaggaacatcccatgatgtatttcggtgaaatatgcaaagcctgtatctatttccgtgcattctcagcatgagtggtaggcactcagtggtttggctcccccaaaatgcccgtgtcctcaagcccagaacctgtgaaaatgcaccttatatggcaaaaggaactctgcatatgtgcttaaattagggatcttaagaaggggggttattctgaattatccaagagggtttatcacaagcacaagggtccttaaagccaaagaaggaagcaggagggtcagagatttgaagatgctacgatgctttaaagatggagtaaagggccagggagtaaggaatgtgggcagactctaaaagccagaaaaggcaaggaaacagaccctctcctagagcctccagaaaggaatgcagccctgcccaatgccttg

SEQ ID NO: 206544 - DNA, 481 bp, Homo sapiens
gcccaggaggtaaaggctgcattttgaatgagattttgaaaattgtgatgaaagctatgggctctattaaattaattttaaggatatccaataaatgtgaaaatctttttaaaagtgactttaagcaaacagtactgctgcacattttgtttactttgcacatcaggaaaaatattctctttttttagacaggrtcttgctctgtcgcccaggctggacaggctggagtgcagtggcaaaatcagctcactgaaacctctaactcaggggtgtccaatcttttggcttccctgggccacgttagaagaagaattgtcttgggccacacataaaacacactaacactaacaatagctgatgaggtaaaaaagaaaatcacacaaaaagaatctcataatgttttaagaaagtttactgatttgtattggatcgcattcaaagctgttttgggcctcatgtggccctcaggccgggggttgga

SEQ ID NO: 206545 - DNA, 481 bp, Homo sapiens
gcccaggaggtaaaggctgcattttgaatgagattttgaaaattgtgatgaaagctatgggctctattaaattaattttaaggatatccaataaatgtgaaaatctttttaaaagtgactttaagcaaacagtactgctgcacattttgtttactttgcacatcaggaaaaatattctctttttttagacaggatcttgctctgtcgcccaggctggacaggctggagtgcagtggcaaaatcagctcactgaaacctctaactcaggggtgtccaatcttttggcttccctgggccacrttagaagaagaattgtcttgggccacacataaaacacactaacactaacaatagctgatgaggtaaaaaagaaaatcacacaaaaagaatctcataatgttttaagaaagtttactgatttgtattggatcgcattcaaagctgttttgggcctcatgtggccctcaggccgggggttgga

SEQ ID NO: 206546 - DNA, 481 bp, Homo sapiens
gcccaggaggtaaaggctgcattttgaatgagattttgaaaattgtgatgaaagctatgggctctattaaattaattttaaggatatccaataaatgtgaaaatctttttaaaagtgactttaagcaaacagtactgctgcacattttgtttactttgcacatcaggaaaaatattctctttttttagacaggatcttgctctgtcgcccaggctggacaggctggagtgcagtggcaaaatcagctcactgaaacctctaactcaggggtgtccaatcttttggcttccctgggccacgttrgaagaagaattgtcttgggccacacataaaacacactaacactaacaatagctgatgaggtaaaaaagaaaatcacacaaaaagaatctcataatgttttaagaaagtttactgatttgtattggatcgcattcaaagctgttttgggcctcatgtggccctcaggccgggggttgga

SEQ ID NO: 206547 - DNA, 485 bp, Homo sapiens
cttccataaggccaccaaccctatcagattaggaccacattcttagaacgacatttaaccttaagtacttcctgaaagccttatctccaaatacaatcagattgggggttagcrtttcaacatatgcattggggtggtggaacacaattcagtccatagcagtagccctgcccaccagggaagctcttggaccatctgagcccagcttgtccatggacataccactccaccagcctcttctctgcagaaaagcctatatgatgtgagaagagggaacacgagctctacacctttaacagagttttgggggaagtcattaaaacagagaggtgggcaagtttgatttccatgttgagaccagcagactgattccaaccttgtttgtttgtaattgacaatcactggatatgagctcagctgaagcacactgagaatgaggcggtggcattctagacctaaatctgccacttaacaatcacctgtca

SEQ ID NO: 206548 - DNA, 524 bp, Homo sapiens
caaaagtagcagggtgtggtggtgcatatctataattccagctactygggaggctgaggtgggagaattgattgaacctgggaagtgcaggttgcagtgagctgagatggtgccactgcactccagcctgggcaacagagtgaaactctgtctcaaaaaaaaaaaaaaaaaaaaggacactgtgtgccgtggaactctagctctggggaatgttcatggacagacggaaaaatacagtgatttgggacatactgggtcaagctggccttctcagcacaggacaactcagggtccttacctgtgtacaaatgtgtgtgtatctcccaaagagagaggaaatacacaatggtactcgtcaaattagttaactaaagaggccttgtatggagaccacctgtgacactcctcaggaagatattttgggaaaagctgccgtaaaaggaatgattgagtcttctcaatgtctagtagcaatgtagcctgagccacaaatgcgagccacatttgtaatgttaacttcccag

SEQ ID NO: 206549 - DNA, 524 bp, Homo sapiens
caaaagtagcagggtgtggtggtgcatatctataattccagctacttgggaggctgaggtgggagaattgattgaacctgggaagtgcaggttgcagtgagctgagatggtgccactgcactccagcctgggcaacagagtgaaactctgtctcaaaaaaaaaaaaaaaaaaaaggacactgtgtgccgtggaactctagctctggggaatgttcatggacagacggaaaaatacagtgatttgggacatactgggtcaagctggccttctcagcacaggacaactcagggtccttacctgtgtacaaatgtgtgtgtatctcccaaagagagaggaaatacacaatggtactcgtcaaattasttaactaaagaggccttgtatggagaccacctgtgacactcctcaggaagatattttgggaaaagctgccgtaaaaggaatgattgagtcttctcaatgtctagtagcaatgtagcctgagccacaaatgcgagccacatttgtaatgttaacttcccag

SEQ ID NO: 206550 - DNA, 438 bp, Homo sapiens
tcttgcttgggacgaagacagaatttgttaacttaaataagcatattaaaaatgtaagagcaattgcttaaaaaatagacatagactatacaatttcaaactagtcaaggaaaccaaggaagaataaagaaaactcartggatccattagaggactaaaaagatggaaaggaaaagaaagaagtatggtaaattaaaaatgcaaaattatatatcgggacaaaagtcccactatgtcggtaatcacagtgaaagtaatgaattaagctttctttttatgataaatagagtattcagatggataaaaagccaaaatctagatacacattgattacgagatgtaaatctaaaaaataaagacacagaaagattaaaattaaggaatggaagaactacatactgtgcaaatattaaccaaaaaagaactggtatagcaata

SEQ ID NO: 206551 - DNA, 555 bp, Homo sapiens
ttttcctatctctcagttaagaaacttgaccatcttcttccagttctaagtwtctaaaatcccttcccacttattgagcacttgatgggttctgaaagaggagaaatatggctccagcctctggagtctgtgtggtgagagcgggggtggagctggcatgagcacaaatcttctcatccagcctcggggaacctttccttcctctgaaccccacggcacatccagacatgactcacaaggcagtacccagtactcctctgtctgccgcaatcgccaacattgcagtgggtgataacctcggctcaccaagtggcctgcaaccctgctggggcaggatcatgtcctcagaactccattccacctggtagagggctgagcccctaggagaccagagctctattaactgccagaccttgtttagagagaagaaagaagatgcaacacaggaaacaggggagatttcccatgagaaagtaccaacagagactctagggagacgatatagtaaactgatttagaacccacaggagggtgctgggattatggatttgactt

SEQ ID NO: 206552 - DNA, 567 bp, Homo sapiens
tctgctctaatctttattatttctttcttcatacaaatttagggtttggtttgttcttgctcttctagttctttgacatgcatcattgggttatttatttgacatctttctatttttttatgtaggtatttattgctataaacctccttcttagcactgcttgctgtatctcacaggttttgatatgttatgtttccattttcatttatttaaagaattttttaaattttctttataatttcttccttgacccattggttgttcaggagcatgttgtttaatttccatgtatttgtacaggttccaaagttccactttgttattgatttctagttttgttctactatcatctgaaaaaacactagatatgactttgatgtttaggagaatttttgagacttattttctggcataacatatggtctatcctggagactgttccaygtgctgatgagaagaatgtgtattctgcaactgttgaataaattgttctgtagatgtctgttaggtccatttggtttaaagtacagtttaaatccaatgtttcttggttgattttctgttgag

SEQ ID NO: 206553 - DNA, 570 bp, Homo sapiens
ttattttaggatttgtcttatagcctgggatatggtccttgttggtgagtatgtacagctggaaaaaatgtttattctccagttgctgggtattgtgttctgtaaacatcagttaggctagggtgttgatatggctgctcagattctctatgactttactgaatttttgtcctgcagcctaccaaytgcagggagagtattcaaatatcccacaataattgtaaaatgttctatttcttcttttattctgtcaagttttgctttatgtatcttgaggatctattcttaggcacatatacatttatgattatgtcttccttattaattgactctttgtttttaaagctcatctcctctagtcagcatatagttggatcttgctttttaaagaacagtctattctggtaatctctgccttttaattggaatattttgtccactaccatttaacgtagttattaatatgattgtattaagactgtatttctttttagttgtccactttgtttttagttcctctgttctcccttcctacctttttcaattgaatacattttataattttgtttt

SEQ ID NO: 206554 - DNA, 532 bp, Homo sapiens
cgccacggaggcctttcttgggctctggccttctttgccccactctggctggctaacagccagcacccaagccttaagttaataggagacaaagagtggcttcaaaagtctccttagggctttggggaggaacttggagatgcttgaaaggggtacaggaagaacagatcccatgcatcactgcttctygtcagtaaggtgggtcatggtggatggcacccatggtacagtcctttctccactctggcagaggctaagatgctgcctcttgatcagagaataagcacttaaggcaatcataaccaatgccagcattctccatccgcgtggagtgtgcagaactgaccacggctgacagcatttaatttcccaaactaaactgggtagaatttgtttaatatctgtttagcttcaacaaccccattgaacatcaagaacaagtcaaaagaccagtgaggtttcgactaaactggatttgtttgtttttgttttgtttcactgctgtaaggagagggcaaacactacagaattc

SEQ ID NO: 206555 - DNA, 531 bp, Homo sapiens
gccacggaggcctttcttgggctctggccttctttgccccactctggctggctaacagccagcacccaagccttaagttaataggagacaaagagtggcttcaaaagtctccttagggctttggggaggaacttggagatgcttgaaaggggtacaggaagaacagatcccatgcatcactgcttctcgtcagtaaggtgggtcatggtggatggcacccatggtacagtcctttctccactctggcagaggctaagatgctgcctcttgatcagagaataagcacttaaggcaatcataaccaatgccagcattctccatccgcgtggagtgtgcagamctgaccacggctgacagcatttaatttcccaaactaaactgggtagaatttgtttaatatctgtttagcttcaacaaccccattgaacatcaagaacaagtcaaaagaccagtgaggtttcgactaaactggatttgtttgtttttgttttgtttcactgctgtaaggagagggcaaacactacagaattc

SEQ ID NO: 206556 - DNA, 544 bp, Homo sapiens
cggggctgctgacgccacggaggcctttcttgggctctggccttctttgccccactctggctggctaacagccagcacccaagccttaagttaataggagacaaagagtggcttcaaaagtctccttagggctttggggaggaacttggagatgcttgaaaggggtacaggaagaacagatcccatgcatcactgcttctcgtcagtaaggtgggtcatggtggatggcacccatggtacagtcctttctccactctggcagaggctaagatgctgcctcttgatcagagaataagcacttaaggcaatcataaccaatgccagcattctccatccgcgtggagtgtgcagaactgaccacggctgacagyatttaatttcccaaactaaactgggtagaatttgtttaatatctgtttagcttcaacaaccccattgaacatcaagaacaagtcaaaagaccagtgaggtttcgactaaactggatttgtttgtttttgttttgtttcactgctgtaaggagagggcaaacactacagaattc

SEQ ID NO: 206557 - DNA, 531 bp, Homo sapiens
gccacggaggcctttcttgggctctggccttctttgccccactctggctggctaacagccagcacccaagccttaagttaataggagacaaagagtggcttcaaaagtctccttagggctttggggaggaacttggagatgcttgaaaggggtacaggaagaacagatcccatgcatcactgcttctcgtcagtaaggtgggtcatggtggatggcacccatggtacagtcctttctccactctggcagaggctaagatgctgcctcttgatcagagaataagcacttaaggcaatcataaccaatgccagcattctccatccgcgtggagtgtgcagaactgaccacggctgacagcatttaatttcccaarctaaactgggtagaatttgtttaatatctgtttagcttcaacaaccccattgaacatcaagaacaagtcaaaagaccagtgaggtttcgactaaactggatttgtttgtttttgttttgtttcactgctgtaaggagagggcaaacactacagaattc

SEQ ID NO: 206558 - DNA, 559 bp, Homo sapiens
agatctcacttactgagctgctgttaagaccctactgtgctcagtgacttacaggctctgcctcgtgtaacctttacagccaccctgtgaaggaagctcccctgtcatgccacccacttcacaggcaagacggccaaggctcagggaacagattccctcaggacccatgggtagtgagyggcagaggggacacatacacccaggtaatgctgagagcaaactcagagaggaaggtagaggacgatctgagaaggctacgaacaagctgagacgaaccagggcggggggcgcataccctacctgtgcctgccaggtgccaaattccacatttatcttttctcacatttctccctgtattcgttttgtgttttcttccctgttttacatccaagcaacacctttctgcctcattcctccactgatatcactgcctctgccttgtgtgctcaagacacctcccattcgccatccccccaaccccccgccgccacagcatggcaggacagcctgttgggttttgggggcgggagggagcataggcctgtgaagcctcattcta

SEQ ID NO: 206559 - DNA, 559 bp, Homo sapiens
agatctcacttactgagctgctgttaagaccctactgtgctcagtgacttacaggctctgcctcgtgtaacctttacagccaccctgtgaaggaagctcccctgtcatgccacccacttcacaggcaagacggccaaggctcagggaacagattccctcaggacccatgggtagtgagcggcagaggggacacatacacccaggtaatgctgagagcaaactcagagaggaaggtagaggacratctgagaaggctacgaacaagctgagacgaaccagggcggggggcgcataccctacctgtgcctgccaggtgccaaattccacatttatcttttctcacatttctccctgtattcgttttgtgttttcttccctgttttacatccaagcaacacctttctgcctcattcctccactgatatcactgcctctgccttgtgtgctcaagacacctcccattcgccatccccccaaccccccgccgccacagcatggcaggacagcctgttgggttttgggggcgggagggagcataggcctgtgaagcctcattcta

SEQ ID NO: 206560 - DNA, 559 bp, Homo sapiens
agatctcacttactgagctgctgttaagaccctactgtgctcagtgacttacaggctctgcctcgtgtaacctttacagccaccctgtgaaggaagctcccctgtcatgccacccacttcacaggcaagacggccaaggctcagggaacagattccctcaggacccatgggtagtgagcggcagaggggacacatacacccaggtaatgctgagagcaaactcagagaggaaggtagaggacgatctgagaaggctacgaacaagctgagacgaaccagggcggggggcgcataccctacctgtgcctgccaggtgccaaattccacatttatcttttctcacatttctccctgtattcgttttgtgttttcttccctgttttacatccaagcaacacctttctgcctcattcctccactgatatcactgcctctgccttgtgtgctcaagacacctcccattcgccatccycccaaccccccgccgccacagcatggcaggacagcctgttgggttttgggggcgggagggagcataggcctgtgaagcctcattcta

SEQ ID NO: 206561 - DNA, 623 bp, Homo sapiens
ccaagattgagccattgccctccaacctgggcaacaagagccaaactccatctcaataaatacataaatattaaaaatatcataataaaatagatctcacttactgagctgctgttaagaccctactgtgctcagtgacttacaggctctgcctcgtgtaacctttacagccaccctgtgaaggaagctcccctgtcatgccacccacttcacaggcaagacggccaaggctcagggaacagattccctcaggacccatgggtagtgagcggcagaggggacacatacacccaggtaatgctgagagcaaactcagagaggaaggtagaggacgatctgagaaggctacgaacaagctgagacgaaccagggcggggggcgcataccctacctgtgcctgccaggtgccaaattccacatttatcttttctcacatttctccctgtattcgttttgtgttttcttccctgttttacatccaagcaacacctttctgcctcattcctccactgatatcactgcctctgccttgtgtgctcaagacacctcccattcgccatccccccmaccccccgccgccacagcatggcaggacagcctgttgggttttgggggcgggaggg

SEQ ID NO: 206562 - DNA, 588 bp, Homo sapiens
agcccaggccttaagaggaatcacctgtttccacattccccacttgtatttctgcctctgccatgagaaaaacatgcttcaggtcacctgctgctccaaggaggatgagagacctatggggaagacctggacccaatctgaagttagaactaagtgcaactgagcccagcctggattaaccaactccyagccaatccacagacacctgggtaagaatacatgaatgttgtcagccactgagttttggagtcatttgttaggcagcattattgtggcaatagctgactgatatactatgtatccctgaacagcatattgtttacttttgcttttttttttagctttgaaagatggtaattaatattgcatgtcattatctaatatttacttttctttcccactcaacatgatatgtctgagatctatgcagtagaatataatacagcagtataaatgaactacagcagcagccctctcagtttagagatgaggaaaagcaaaagacccggagagttcatgaagggctgaactggcttggaagcccaagtgtcattccttcagcagatatttattgaacataaactgagc

SEQ ID NO: 206563 - DNA, 584 bp, Homo sapiens
aagcttatgcttccatgttttcatgctgctccataattctcatcaggaagaaattggttttaagttaatttattcaaagtgtgattgactgcacctttgagactctcatgaacaaatatttacttttttttcttcaataaaatgagctctacagtagggcagttcttaattcaaatctaatcattttttaaaaaattcaactaagagtagaatcttccttccttccttccttctctttctttctttctctttctctctttttcttcctaccttcctttctctctttctctctctttcttttctgcctttttctttttctttccttctctttctctttctttctttctttccttctctctttctttctctttctttctttccttccttccttccttctttctctttctttctttctctttctttccttccttcyttctttctttctttctttctttctttctttctttctttctttctttctttctttctttctttctttcttctcagagacagagtctagctctgtcacccaggctggagtgcctgatctcagctcactgcaacctgcacctgctgggttcaag

SEQ ID NO: 206564 - DNA, 258 bp, Homo sapiens
attgatagacagttccttatgtctttgatgaataaaaaaatgggaaatctaaatatatatggcctgttgcacagttaaaagctcatcaaagcctgaactcagccatgcatggtagctcacgcctgtaacyccagcactttgcagggccaaggtgggaggatagcttgagcccaggagttcaagaccagcctggacaacatggtgaaaccccatttccacaaaaaatacaaaacctagccagccatggtggcatgcacc

SEQ ID NO: 206565 - DNA, 392 bp, Homo sapiens
tgctgaaaactataagacattaatgaaaaaaattaaacaaaacacaaatacatagatatcctgtgttcatgaattggaagaattaatattattaacatttccacacaactcaaagtgttctamagattcaatgcaattcctatcaaaattccaatggtatttttcacagaaatagaaaaaaaatcctctggtaatcatttcccaaagtgtgtgtacacatcaaatcatcacactgtacacttcaaatatatacaatttttatttgtcaattatacctcaatagagctggaaaaaataaataatacttttaataaaacaatgttggaataatttaactgaggctttacagggtattcacaagtttcatcaaaatttaataaagtgtgatgtgc

SEQ ID NO: 206566 - DNA, 392 bp, Homo sapiens
tgctgaaaactataagacattaatgaaaaaaattaaacaaaacacaaatacatagatatcctgtgttcatgaattggaagaattaatattattaacatttccacacaactcaaagtgttctacagattcartgcaattcctatcaaaattccaatggtatttttcacagaaatagaaaaaaaatcctctggtaatcatttcccaaagtgtgtgtacacatcaaatcatcacactgtacacttcaaatatatacaatttttatttgtcaattatacctcaatagagctggaaaaaataaataatacttttaataaaacaatgttggaataatttaactgaggctttacagggtattcacaagtttcatcaaaatttaataaagtgtgatgtgc

SEQ ID NO: 206567 - DNA, 377 bp, Homo sapiens
ctgaaaactataagacattaatgaaaaaaattaaacaaaacacaaatacatagatatcctgtgttcatgaattggaagaattaatattattaacatttccacacaactcaaagtgttctacagattcaatgcaattcctatcaaaattccaatggtatttttcacaraaatagaaaaaaaatcctctggtaatcatttcccaaagtgtgtgtacacatcaaatcatcacactgtacacttcaaatatatacaatttttatttgtcaattatacctcaatagagctggaaaaaataaataatacttttaataaaacaatgttggaataatttaactgaggctttacagggtattcacaagtttcatcaaaatttaata

SEQ ID NO: 206568 - DNA, 377 bp, Homo sapiens
ctgaaaactataagacattaatgaaaaaaattaaacaaaacacaaatacatagatatcctgtgttcatgaattggaagaattaatattattaacatttccacacaactcaaagtgttctacagattcaatgcaattcctatcaaaattccaatggtatttttcacagaaatagaaaaaaaatcctctggtaatcatttcccaaagtgtgtgtacacatcaartcatcacactgtacacttcaaatatatacaatttttatttgtcaattatacctcaatagagctggaaaaaataaataatacttttaataaaacaatgttggaataatttaactgaggctttacagggtattcacaagtttcatcaaaatttaata

SEQ ID NO: 206569 - DNA, 377 bp, Homo sapiens
ctgaaaactataagacattaatgaaaaaaattaaacaaaacacaaatacatagatatcctgtgttcatgaattggaagaattaatattattaacatttccacacaactcaaagtgttctacagattcaatgcaattcctatcaaaattccaatggtatttttcacagaaatagaaaaaaaatcctctggtaatcatttcccaaagtgtgtgtacacatcaaatcatcacactgtacacttcaaatatatacartttttatttgtcaattatacctcaatagagctggaaaaaataaataatacttttaataaaacaatgttggaataatttaactgaggctttacagggtattcacaagtttcatcaaaatttaata

SEQ ID NO: 206570 - DNA, 592 bp, Homo sapiens
tctctctttggagccttttcatcctaggagttctgagcttatgggaaatcacattcccaactcctgtcgctcccgggggttaggagccttttcatggccttaccttcctttttcaggatggacctggtgagcagccggcttgccactgctccccgctccttgctggggctgggacccatggcccaagggtcccacacagccagytggctggttcccagccacgtgccatgcagccttcctcttccccagccaagggattttactccattggacagtaattaaacttttctccttgtggagaaaccagttacataagaataagaagttcttccccaggcatttttaaactgttttttttttccttcaccttctccaccccatcagcagttaccatttagtgaggttttttctttcagaagaagttttgctaggctaggaatgataagcgcccctgtttatattctccgtaaagttttggttgtgaaaaaggatcttgtggggactgggttttcttctgcctgtcagtgtgtgtattgtgtgtgatgtctgtaaaaagagctctattaatttggcctaaagaaaaacgagtgct

SEQ ID NO: 206571 - DNA, 385 bp, Homo sapiens
aaggaatatccccttatttgaaagaagatgctttactgatttggtttgttttgcttttcaacctcaggcaaaatgatccagggatgagcttggggacaggaaggcatttatgccagtaatctcattgctttgccattwaagtagtatgtatgggaatgacaagaatgaaagaagaaaattgccacttatttatcatcattcagcttataacatggaggctacagtgacttccaaggacagtgctgataaagtctgaaaataacttgaatcaggcactagaggacatggctgtctacacatgcttgatgcaactgaggcaaatctagaaaattgagttaaaaacataccggcttgaaatctttttccttctgcatgtgtagacctg

SEQ ID NO: 206572 - DNA, 385 bp, Homo sapiens
aaggaatatccccttatttgaaagaagatgctttactgatttggtttgttttgcttttcaacctcaggcaaaatgatccagggatgagcttggggacaggaaggcatttatgccagtaatctcattgctttgccattawagtagtatgtatgggaatgacaagaatgaaagaagaaaattgccacttatttatcatcattcagcttataacatggaggctacagtgacttccaaggacagtgctgataaagtctgaaaataacttgaatcaggcactagaggacatggctgtctacacatgcttgatgcaactgaggcaaatctagaaaattgagttaaaaacataccggcttgaaatctttttccttctgcatgtgtagacctg

SEQ ID NO: 206573 - DNA, 385 bp, Homo sapiens
aaggaatatccccttatttgaaagaagatgctttactgatttggtttgttttgcttttcaacctcaggcaaaatgatccagggatgagcttggggacaggaaggcatttatgccagtaatctcattgctttgccattaaagtagtatgtatgggaatgacaagaatgaaagaagaaaattgccacttayttatcatcattcagcttataacatggaggctacagtgacttccaaggacagtgctgataaagtctgaaaataacttgaatcaggcactagaggacatggctgtctacacatgcttgatgcaactgaggcaaatctagaaaattgagttaaaaacataccggcttgaaatctttttccttctgcatgtgtagacctg

SEQ ID NO: 206574 - DNA, 605 bp, Homo sapiens
gataattcctattgtgaagaagttaggagtcaaagaatagtatagaaaggaaaatgacaatcaacccctcatccctgagctcttgctattttgagttccagggcatcctcccttttgtcttcaatctctctctgcactgactcctttttctcagtctataaatgtcagctctccctatctcaccttcaccattactactgaggggtaattgcacctacaacttatggttgtgcaataaatgaattaatataggtaaaatgtttctagcaatacccagcatgtagtaaacagtacaagtgttagttatttttaaatttattatttttaaacaaatgaagaaaaaaaatcttgtcctcctttaaccactgttatatcttttcctatcccttagttccttaacctctgcttacaccatamtcttcttaccccattgctgtttgatttctgctgtggccttgtagaagttcctaacccacaattaatatcttacttgagtgtttttccagctcagctgaatctccacagtcacctccacatcttcccagcatccacctgcctcacagagctggtcaatctgatgtcagatctggtccttttttatcttg

SEQ ID NO: 206575 - DNA, 619 bp, Homo sapiens
gcctgccatttggaatttcccttagcaagttatttaacgtctttgaaccttacttgcctcacctgtaaaatagcaaaaataatgaatgatatacataaaaaatatatatattttaaaaagtatgaagtatagtttctgacatttcctccttacactgcacttctagaaaaagtcctgagagccctggcgaggcccttggccaggacaggctgaaataatatgaatcgtgattctgttcctcctctgtcactatcctggtactgcctgtctgcctttccatctctgctgctccaccctggactgaccactctctggaatcrctataagtatgctaatgctagagcctttcagtttgtcgtggctctaagtcgagtctttaagaacaaaggctctttctcacctgcccacatgtcagttgctactgctattcctggagttagtcatggtttcagagatatttggatttaagaaacgataggaggcaggactctcctgtggttgccctttggtgccactggaatgtctacacatgcctttgtggttttgtggttaggtggttggcttcaaatttatagtcccacatggctttgggtgagaaaaagaatgtctttcaaaaacc

SEQ ID NO: 206576 - DNA, 526 bp, Homo sapiens
tacaggatgggcaaggcacagtggctcacacctgcaatcccagsactttgggaggccaagatgggtggatcacctgaggtcaggagttcaagaccagcctggccaacatggtgaaaccctatctctactaaaaatacaaaaattagctgggcatggtggtgggcacctgtaatcccagctacttgggaggctgaggcaggagaattgcttgaacccaggaggcggaggttgcagtgagccaagattatggccattgcactccagcctaggcaacaagagtgaaaatccggctcaaaaaaaaaaaaattctacaggatgacagcttgataaaactgcagctcatgtaggaaaacaaataaaacaccagcagtgtcctaattgaaagcatctagaggtactagtcattgatgaaacctggtgcttggtgtagtttttcaggtggtagactgtgtttatttccagtaggaagatttcagttttgactccagagatttacttctaaagttgtaaatctgtgcgcctgtat

SEQ ID NO: 206577 - DNA, 433 bp, Homo sapiens
gggatagcctagctagacgatatcctgaaatatgttttccaagttgtttgctttctccccatctctttcagggatgccaatgagtcacaggtttggtctctttacataatctcatattactcaaaggttttgttcattcttttttattcttttttcttgtttttgtctgactgagttatttcagagagctggtcttcaagcactgagatkcttttctcagcttggtctagtcttctgttaataattgtgattgcattatgaaattcttgtcatgtgtttttcagctctatctgatcaatttggttcttttttataatggccatttcacctatcagttcctgtatcattttattataatccttacatttcttggactgggtttttactttttcctgaatctcaatgatctttcttcctattcatattctgaatt

SEQ ID NO: 206578 - DNA, 433 bp, Homo sapiens
ggatagcctagctagacgatatcctgaaatatgttttccaagttgtttgctttctccccatctctttcagggatgccaatgagtcacaggtttggtctctttacataatctcatattactcaaaggttttgttcattcttttttattcttttttcttgtttttgtctgactgagttatttcagagagctggtcttcaagcactgagattcttttctcagcttggtctagtcttctgttaataattgtgattgcattatgaaattcttgtcatgtgtttttcagctctatctgatcaatttggttcttttttataatggccatttcacctatcagttcctgtatcattttattataatccttacatttcttggaytgggtttttactttttcctgaatctcaatgatctttcttcctattcatattctgaattc

SEQ ID NO: 206579 - DNA, 548 bp, Homo sapiens
cctacttctgtcaactcgtcaaactcattctctgtccagttttgttcccttgctggtgaagatttgtgatcctttggaagagaagaggtgttctgggttttggaattttcagcttttttgcgctggtttttccccatcttcatggatttacctacctttggtctttaatgttggtgaccttcagaaagagttttgtgtggaggtcatttttgttgatgttgatgctattcctttctgtttgttagttttccttctaagagtcaggcccctctgctgcaggtctgctggagtttgctggaggtccactccagaccctgtttgcctgggtatcaccagcagatgctgcagaacagcaaagattgcagcttgtttctttctctggaagctttctctcagaagggtacccrccagatgccagccagagctctcctgtatgaggcgcctgtcgacccctgctgggaggtgtctcccagtcagaagacatggggttcagggacccacttggggaggcagtctttcccttagtagagcttgagcactgtgctggg

SEQ ID NO: 206580 - DNA, 548 bp, Homo sapiens
cctacttctgtcaactcgtcaaactcattctctgtccagttttgttcccttgctggtgaagatttgtgatcctttggaagagaagaggtgttctgggttttggaattttcagcttttttgcgctggtttttccccatcttcatggatttacctacctttggtctttaatgttggtgaccttcagaaagagttttgtgtggaggtcatttttgttgatgttgatgctattcctttctgtttgttagttttccttctaagagtcaggcccctctgctgcaggtctgctggagtttgctggaggtccactccagaccctgtttgcctgggtatcaccagcagatgctgcagaacagcaaagattgcagcttgtttctttctctggaagctttctctcagaagggtacccgccagatgccagccagagctctcctgtatgaggcgcctgtcgamccctgctgggaggtgtctcccagtcagaagacatggggttcagggacccacttggggaggcagtctttcccttagtagagcttgagcactgtgctggg

SEQ ID NO: 206581 - DNA, 541 bp, Homo sapiens
tttgttatataggcaaactgcatgtcacaggggtttggtgtacagattattttatcatgcaggtagtaagtataatattcaataggtatttttttctgatcctctccctcctcccacccttcaccctcaagtaggctctgatgtatgttgttcccctctttgtgtccatgtattttcattgtttagcttccacttacaaatgagaatgtgcagtatttaattttcttttcctgcattagtttgctaaggataatggcctccagctccatccatattgctgcaaaggrcatgatctccttttttatggctgtgtagtattccatggtgtatatataccacattcttttaatccagtctacagttgatgggcatttaggttgattccatgtctttgctattgcaaatagtgctaagatgaacatatgcatgcatttgtccttatggtagaaggatttttatccccttgggtactcacccaataatgggattgctgggacaaatggtaattctgtttcaagttcgttgaggaatcaccacactg

SEQ ID NO: 206582 - DNA, 541 bp, Homo sapiens
tttgttatataggcaaactgcatgtcacaggggtttggtgtacagattattttatcatgcaggtagtaagtataatattcaataggtatttttttctgatcctctccctcctcccacccttcaccctcaagtaggctctgatgtatgttgttcccctctttgtgtccatgtattttcattgtttagcttccacttacaaatgagaatgtgcagtatttaattttcttttcctgcattagtttgctaaggataatggcctccagctccatccatattgctgcaaaggacatgatctccttttttatggctgtgtagtattccatggtgtatatataccacattcttttaatccagtctacagttgatgggcatttaggttgattccatgtctttgctattgcaaatagtgctaagatgaacatatgcatgcatttgtccttatggtagaaggatttttatccccttgggtactcacccaataatgggattgctgggmcaaatggtaattctgtttcaagttcgttgaggaatcaccacactg

SEQ ID NO: 206583 - DNA, 489 bp, Homo sapiens
cagctgtttctttcacatcctctcctaatcagctttatccttgttccttgtgtgtctgaatgtaataaattctttgaaccatacacttcaggtaacatgttcttatttaacgtactctcaataattcccargatgtttcagaaaggttggcgaactatggttgggttgtcaactgtgacagatttcagcataatttatagcagtgaaaacacgcagttctttgcagttccatcccacagaatccattccagcacaataaaagtcccttgggcttttagaggagcaagtccatgcaattgcctgctggctaagaaatcatattcctcaccttgatcttcctcttcaaatcagatctctaaaacacacttgctgttgggccctgggtatttgatttgacctcgaatacttttccttcttatatctcccagccaatagttctctcagtcttataaatctttaagcaggactaggcttcgttatcacttctag

SEQ ID NO: 206584 - DNA, 537 bp, Homo sapiens
aagagattagctgatcaaaggttaatccaaaggactgtccacctcaatgagaggtctacagtgagaataatgaagggtygtgcccctctttttagttcacaatgccatataactgaatctattccagggaaaaaaaaaagaatgggcaaaacctatacatgacagagtttaactttgaatttatagataaatcataaatttcacataatttacttttgtcatgatagaattctgtcttcattaattaagctcaagagataaataaaatttagtaatagaaaatttaaataaattgaattgtcaagaaccttggtttgtggttagaaatgcctcctttgcttacttataatcacaaataaatcgtgtctttaccgttttcatcccaactactcaactgatgtgattggccatctctgcagggaaatatgctctacttgatcacagaatgccataagctgctcagttaaatttgaactaacagtattttctcacaatataatatattcttcctgtgctgtgacttcctggtgctggttt

SEQ ID NO: 206585 - DNA, 537 bp, Homo sapiens
aagagattagctgatcaaaggttaatccaaaggactgtccacctcaatgagaggtctacagtgagaataatgaagggttrtgcccctctttttagttcacaatgccatataactgaatctattccagggaaaaaaaaaagaatgggcaaaacctatacatgacagagtttaactttgaatttatagataaatcataaatttcacataatttacttttgtcatgatagaattctgtcttcattaattaagctcaagagataaataaaatttagtaatagaaaatttaaataaattgaattgtcaagaaccttggtttgtggttagaaatgcctcctttgcttacttataatcacaaataaatcgtgtctttaccgttttcatcccaactactcaactgatgtgattggccatctctgcagggaaatatgctctacttgatcacagaatgccataagctgctcagttaaatttgaactaacagtattttctcacaatataatatattcttcctgtgctgtgacttcctggtgctggttt

SEQ ID NO: 206586 - DNA, 537 bp, Homo sapiens
aagagattagctgatcaaaggttaatccaaaggactgtccacctcaatgagaggtctacagtgagaataatgaagggttgtgccccwctttttagttcacaatgccatataactgaatctattccagggaaaaaaaaaagaatgggcaaaacctatacatgacagagtttaactttgaatttatagataaatcataaatttcacataatttacttttgtcatgatagaattctgtcttcattaattaagctcaagagataaataaaatttagtaatagaaaatttaaataaattgaattgtcaagaaccttggtttgtggttagaaatgcctcctttgcttacttataatcacaaataaatcgtgtctttaccgttttcatcccaactactcaactgatgtgattggccatctctgcagggaaatatgctctacttgatcacagaatgccataagctgctcagttaaatttgaactaacagtattttctcacaatataatatattcttcctgtgctgtgacttcctggtgctggttt

SEQ ID NO: 206587 - DNA, 615 bp, Homo sapiens
atattttgtactcattatccatccttacctcccccacccagacccccagtacacttccaagcctctggtaaccaccctactacwctttatgaccatcagttcaattgttttaattttcatattccacaaataagtgaaaacatgcaatgtttttctttctgtgccaggcgtatttaactcaacatagtgacccccagtttcattcatgctgttgcaaataactagcattttttttaaatggctgaatagaactccatgtgtatatgtgacaaattttctttatccattcatcagttgatgatgggcacttaggtttccaaatcttagctgctgtaaagagtgctgcaaacaaatatagacatacagatatcactttgatacactgattacctttcttttggatatataaattgttatactgattttttaaaatgttttgagcagtgggtttgctaaaccatatagtagcacaatttttagttttttgaggaacctccaaactattctccatggtggttgtactaatttatattatgaccaacagtgtatgatggttctcttttctccacatcctctctaccatttgttattgcctctcttttgaataaaagttat

SEQ ID NO: 206588 - DNA, 574 bp, Homo sapiens
accatttctttcttctgcttgatcaaatgtgctataaaagaaccccattgcttaattcagcatgccaattgcattttcagctccagaacttaagtgtaattgtttttaattatttcaatctcttaaatttatctgacaaaattctgaattcctactctatgttatcttaaatttctttgagtttcatcaacaaagctattttgacttatctttcaggaaggttgctgtttctccaggattgttccttggtgtcttacttagttaattgggtaaagtcatgttttttctttttttggatggtgttgatagtaatagatgttcttcaatgccttggcattgaagtagggtatttattgttgtcttcactatttgggcttatttgtacttgtcattattgggaaggctttccagacatttgaaagaacttgagtgttgtgatctaagccgtatctgctttaggaagcaccagaagcccattaatgctctggttcttgaggactcatgcaggtwccactttgatggtcttgaacaagatcctggagaattttctggattaccagtcagagattcttgt

SEQ ID NO: 206589 - DNA, 535 bp, Homo sapiens
tccctctccagcatcacttgttatttgactctaccattagcaaatctggtatataattatttttatagctacttactcccaatggattctcytaagctattttttttacattaagaatatttcttgcatagaaatagaagtggataattaacatgtatttacagattaagttaattctctgaaatttggttattatgtgaaaatacttctgcctttattataagttgatgactataactatatataatcagaaagcttagatataatagagggagtaagtcatatataaatgttgctatttattaatatcttctctctttgtcaaagttatatgagatacttataaataatttcactagcagtcaggagaagaaaagtgctgttagtttgatttagggaaaaaaggaagcctcatgaaaagtacaattttgacttgacaagtacagagggggataaatgttgttttacaaaaaataaaaataaactgtatgatgaaagcaaacagatgaacagttacaaatgagcaatcattggt

SEQ ID NO: 206590 - DNA, 535 bp, Homo sapiens
tccctctccagcatcacttgttatttgactctaccattagcaaatctggtatataattatttttatagctacttactcccaatggattctcctaagctattttttttacattaagaatatttcttgcatagaaatagaagtggataattaacatgtatttacagattaagttaattctctgaaatttggttattatgtgaaaatacttctgcctttattataagttgatgactataactatatataatcagaaagcttagatataatagagggagtaagtcatatataaatgttgctatttattaatatcttctctctttgtcaaagttatatgagatacttataaataatttcactagcagtcaggagaagaaaagtgctgttagtttgatttagggaaaaaaggaagcytcatgaaaagtacaattttgacttgacaagtacagagggggataaatgttgttttacaaaaaataaaaataaactgtatgatgaaagcaaacagatgaacagttacaaatgagcaatcattggt

SEQ ID NO: 206591 - DNA, 564 bp, Homo sapiens
attaggactaaaagcagagcctcaatatatggctgaacttttttctatttcatgataaaagttgaacccatgagaagttatttctcatagatgagcaaagaatgtggtttattgagatggaatatactcctggtaaaaatgctgtgaacgttattgaaacaacaacaaagaattaaaaatattattacctcaaattagttgataaagcagatttgagaggattgactttaattttgaaaaattctactgtgggtaaaatgctgtcaaatagtattacatgttacagagaaaactttcatgaatggaagagtaaatcaattttgcaaatatcattattttattttaagaaattgccacaatygcttcaactttcagcacaatcaccctgatcagtcagcatcaaaaatattaggatatgctgaagactcagattattgttagcatcttttagcaatgaaatttaattaagatatgtacataatttacacataatgccattgcacacttagactacagtgtagtataaacctaacctttttttttctttttttaaactttagggtc

SEQ ID NO: 206592 - DNA, 562 bp, Homo sapiens
caatatttccagacatcccaacaggagcaagacatgtgggtgaagtaggctttaggtgattccagacccaactaccgtataactgcattgcatgaaggactccaagatagaatcagcctgctgaccctggtaacccacagaagtatgagacacaatgataaaacactgcttctagcatctaagtttggatgtgtcttcttatgcaaagatagataaataartgtatgaatatttaccttttaaaacatcagttctttccaaattctcacaaagtatttgttaatagtaaatatattatttaaaacatctctttagttatgagagaagttgatagttacaatataatattgcctcactttgttttttaagtctaactctgtcaggcttacttcatgtcagttttatgtattgaaaactggactcattatagacataactcagagttgacatgatatttcctctatggccacaagctattctaagggactagttaaggttagtgttgacatgcctttgattttttaaaaaagttcatatataattttactgtttactattagtg

SEQ ID NO: 206593 - DNA, 646 bp, Homo sapiens
tgtactagtcaacacttagacatatccatttatataggatatgaagatgtgccaccctgatctcccttcaaatgagaactcttgctcatctatgtgctggaagtgctgtcaattgacagacttcagttgatgacccatgcagggattgctttggctgtagaaagcccccttgccaaagttcctgcccttccaggcatggcccacacccaaagactgattaaggtggaaacaaaagggtctagacattgtgctgaaacatagatcagtttttttttttttattatttcaattccatgtctatctgtgaggctggataatctatggacttcactgcttaattgttctgcttctcgcaatgcccaatcttgcttgctctccctttattccatagatattgataccaagggcacttcatgatgaataacttgaactataaactctgtcttagagtctgcttcctggagaacaaaaactgcaacaattgatgccaggggtggtccrgaaaaataggcaataatacacggtctgttgactagattacccaccactcaggtggcaatgacattcctatccatggtcataggtgatacatagataacacctggcacaaaagatagtccaattgtaaaaattttcaaaggtgatg

SEQ ID NO: 206594 - DNA, 344 bp, Homo sapiens
atttgcaaaagccaagaggtagaagcaatgttaagtggtcatcgatgagtaagtgcataaatgaaatgtggtgtgtacatacaatggaatgttattcagcctcaaaaaggaaggaaattctgacatatgctgctccgtggatggatcttgaagatactatgatcaatgaagtaagccagtcacaaagggacaaacactatatgattccacttacaaagttcctagagtagtcagattcatagagacagaaagtagaatggtggttgccaagggatcagggaggagagaaggaggagtagttgtttactgrgcaaagttttaattttgccaaatgaaaagaattc

SEQ ID NO: 206595 - DNA, 604 bp, Homo sapiens
atcacatatcaagtaccagaggctgtatttcttgattcaataaaaataccacatctggtattttattttattttatttacagaaagtaaggggttctggagcatttgtcctctagctcctgtcacccattggttgagggttgcccttagagacattatcactcttttagtttctgggctgtaattacatactggctgaggaagccccatgtctttagacaaggtcccgagacatcttgatgtgggatactatccaccacaaccacarctaaagtcagagctgaacaaaagggtgttaagtaaagacacactgaaagtctttactgtagatattattttaaaaatataaaactgaatagtagcgataaaatgttttgatgcatttaataccccaaaattatgactggaatatataagtccccaaaccaaaagggattaattgtaaaggataaaaagctacataggacaaaatggaagatacacatatggagagatacttaaaatacttactgataagagaaaacaaataggagagcaatttttcatcattttcatccatcagatttagaaaaaattagtcttttcaaatgttggtttgaaagctt

SEQ ID NO: 206596 - DNA, 569 bp, Homo sapiens
agctcattttaatggaataaactgcatggaacctacacttctcttatcaaatgaggcatcctttacttttacaggacagtcttaattgctcaagccacttggttagagtattattcaggctaattacctgtcagctatcattagaaacattaatggcacttttaaaaccacctattcctcaaaacttcctttgtggactgtcttgcaaaatgacacccaattgctggcacacaataaaatgctgtagtaatatttgaggggtaagggcagcacaaccaaaccacaatacattgggaaaactcaattttatgcaaaagcatgtggcttggcttattagtgatgtctcgagatgtcccactctctcttcagcccctccacactcaccggttgccggaggaggtgccagcccttcaagaaagtgcccactcattgattccagtgagggcttctgccccctgtcccttgctgwtttctaacaccagtaatggattcaccatgaagctcatgaagcttaagctttgggacttctcacgagcatagtccctttccaagtacctgtacccagttgt

SEQ ID NO: 206597 - DNA, 670 bp, Homo sapiens
acacttaaaaaccagcattaacaattctgaacttagaaaaatctcctatatcatgcccagtctatgcagtattatgttttctttcaactatttaatttctactatttgctagaccacattatttttgtattttctctcagtagattgtaattccttttcaggaatatatattgtagtacttcgtctgttgcatatgttcaatcgactatttgtttaacaatctgaaaaaaagacaaagcaaggtaattggaactatggttcaatgtaactgatttggtcctcttttttggtagtgtaaatttatttagcaaatatttattgagcgcttatctttctattagatgtcaggcattgtattaggtataaggtttccatgtagcaaaaatttatgatggagtaaagtcaaggtagtttttatagcaaaaatcaatattaaaaaagcaaaccatgtcttatgtaaaagtttccatcccttgcctttttagtgcatatcaaaacacacttcttattatactgtttctatggaaaaatgcattctaagtattaaccaacttttaagtggatgcttggctttcaatctktttaaattgaaaactgtttttctgtgaccccttttaacatcttgaagaagatgctctgaaagcttataaatctaggttaacaatcagaa

SEQ ID NO: 206598 - DNA, 608 bp, Homo sapiens
ttctaataggcatctataaatttcagaaaatacgcttgactagatagctagtacatttgatttgcagatatttgggtcacaaagtataacttcaatttagaaaagaagtaatacattttgtttactagctgttaaacctgcctggaaactcctctacagcaaaattctgactgttttccacacatctattgtattcctttttcactgtgtagcctgctatctatttccagtgtgtagcagttatgcaatttggrtgaaattaactcaactctgattgtgaatcccatgcttcttgacagagcaattagttcagtgatgagcatgtgagcctagtatttaaccaaagagtacaaggtgttctcctggctagagggctcattcaaggatgcctcaattaggatgaacttcagcccttgtgttctttaggtttgggaaggaaatacaattttcccatctttggatgtgaatgaagaaatacctcgtgtaagaccaccatcatataacctgcaaaaatcagccattgtgaatgatgccccaacagttactcagtgtacaataagcacagtcatacccagtgtctggattaagccccgattgctgcccactgc

SEQ ID NO: 206599 - DNA, 609 bp, Homo sapiens
ctcctatgcctgcagatacattcaatctcttgcttcccctctgtgttattcagggttctccagaaaaacagagccagtgatagagtttgccaattccagartctgcagggtgggtcagcaggctgagatgtaggagagctgaggatgaaggttctgtctaaaggccgtctgctggcagaattcccttttcttgtggcaggtcactcttttgttttattcaggccttcaactgattggatgagacctacccatgttatagagggcattctgcttactcatagttcactgacttaattttaatgtcatttgaaaatactctcacagaaacgtctagaatattcgaccacatatctgagcactgcggcccagccaaattaacacataagattaactttaaaaaggaaatattgcccttttgttctctctcccaaatatgagataaaactccaaaacactttctcctggtccatgtcacactatcccgcattgactttcctgtttcaaacaattcctctggaatgtctagacaccccctttctataggttagtgagtgtttggtgggaatggtgtcgaggattacaggagagtttggagagtgtgataagctt

SEQ ID NO: 206600 - DNA, 609 bp, Homo sapiens
ctcctatgcctgcagatacattcaatctcttgcttcccctctgtgttattcagggttctccagaaaaacagagccagtgatagagtttgccaattccagaatctgcagggtgggtcagcaggctgagatgtaggagagctgaggatgaaggttctgtctaaaggccgtctgctggcagaattcccttttcttgtggyaggtcactcttttgttttattcaggccttcaactgattggatgagacctacccatgttatagagggcattctgcttactcatagttcactgacttaattttaatgtcatttgaaaatactctcacagaaacgtctagaatattcgaccacatatctgagcactgcggcccagccaaattaacacataagattaactttaaaaaggaaatattgcccttttgttctctctcccaaatatgagataaaactccaaaacactttctcctggtccatgtcacactatcccgcattgactttcctgtttcaaacaattcctctggaatgtctagacaccccctttctataggttagtgagtgtttggtgggaatggtgtcgaggattacaggagagtttggagagtgtgataagctt

SEQ ID NO: 206601 - DNA, 609 bp, Homo sapiens
ctcctatgcctgcagatacattcaatctcttgcttcccctctgtgttattcagggttctccagaaaaacagagccagtgatagagtttgccaattccagaatctgcagggtgggtcagcaggctgagatgtaggagagctgaggatgaaggttctgtctaaaggccgtctgctggcagaattcccttttcttgtggcaggtcactcttttgttttattcaggccttcaactgattggatgagacctacccatgttatagagggcattctgcttactcatagttcactgacttaattttaatgtcatttgaaaatactctcacagaaacgtctagaatattcgaccacatatctragcactgcggcccagccaaattaacacataagattaactttaaaaaggaaatattgcccttttgttctctctcccaaatatgagataaaactccaaaacactttctcctggtccatgtcacactatcccgcattgactttcctgtttcaaacaattcctctggaatgtctagacaccccctttctataggttagtgagtgtttggtgggaatggtgtcgaggattacaggagagtttggagagtgtgataagctt

SEQ ID NO: 206602 - DNA, 528 bp, Homo sapiens
tatttaagtgtccattgtgctctttttgtatcagacttggaccaaaatctaatttcccccctagtctccataaactcccactcatcccaagacaatgtaggcattttggatctcctggtattagtgtcacctcagacctagaatttagccctctttgtaatattggatattctttcttctccagtgcattattatcatgtcaaatgggaggatcaaaggaatagacttgtaattacattgcaggggtcatcctcaaggcaacaggccttctctttaaccaacagattctacaaacttactkagatcttaaactggttgagggactgccattgtcaattttggtggtcgatatgagtcatatgatcaccagctcttgatatttatgctcatataaattgaacaataccaataagctgtcaatctatgtttcctctggagcaccaagatatattagctgccactgcagataacttagatcaagatattctgattgtcactctagccttattacaatttgataattatgtt

SEQ ID NO: 206603 - DNA, 506 bp, Homo sapiens
caactgctatcatgctgcccaatccccaaagcatttaaatcaatttcaaactactcacaatttcccatgatttaattaagcaaaacagctcagttgtatcagaaagttacttttctctaaatttttaacatattagttatatttgtgaatatttatatttccttggacaccattttagggaacatcctgggagtaaacgagctgccaagtttttttgtcatttagttttttcagaattatactactagattattaaagaacctctccctgctcaaatattgtcattaaaaaaaccatacgttagtttcattatttattaaatgttaatcatgtcttgactctcttccttttagctgtagtggtcttcaattctttgctactcacaaaccacctcaaagaattgtgaaaaatatcccttgcacatttttaaagttaacatctcaaaataaaatgttgcattatttaaaaaaaatctygaatgaaatctttcatagtgatttaatatc

SEQ ID NO: 206604 - DNA, 577 bp, Homo sapiens
tgacatttcacttttcattgtgttgtgttacatcttagttttagcaacttttctttttggagtttgataggaaaatctgtaaatgtaattgttctttgattctaacaaacatctctcagcctacccaatttatatttagttttcagttatggaggggaaactacagtcttcaagaatatcaattctagttatagattatgaacaaaaatacatttttgtttaatttgatattcacttggatrtcgagctacatagcatctatactactggttctgaatgcaacccacagtattttttagtctggcaagttttacaaatcgtatttaaagttttgggacatatcctcagtcaaaaggatcaaatttctatcaacataattaggaagtttctgaagtaaatttatttagagatagtaaaggggaaaaatggtaactaaggaaagaggcctacagtaagtagatgtagaaattcaaacttacttaaatgcaaattatttgtatttctcatcttgcttactcttctgaaaaggaactcaagcataaatatttaaacgtttcacaaatttttattttacaaa

SEQ ID NO: 206605 - DNA, 625 bp, Homo sapiens
ttgttattattatctagcattctttctccctagtcatcaggttaacatcactagattcctgtcatcccacattgacaattctctgtcagtgaagtttttcattagataggccacaactaattggcatgcagctttctaattacattcacatttcagaactcccaggccagtctgagtgcatgtgtggatcctatactctctcctaactacacaaacagtctcagattactttacataatattcttcccagttacaatttcaatctggagcctacaggtcaagcctagcatcagaaatctaattcattctctttgccatagcaattaaaatgcaacaaaaagaratttagccttcagaaacctactccaaattgtgtctttgcatacaaactctcatctttaaaaaggtacaaatagaagaattttcagatgctatttatgcatcactgcactgggacaaactcttaattgagaggtggcatactttagtataaacgtgaagaataaacttgctttccttctggaccatatatggtttaggtgaagacttgtacttgggtctgaggtcaaacaagacacttcccaggagccttgccattctactcctatgcagcatgctgaaatca

SEQ ID NO: 206606 - DNA, 306 bp, Homo sapiens
tcaagtgatcctcctgcctcagcctcccaaagtgctgagattacaggcatgagccaccatgcccaaccccactctacgattttgagtttagtttactttttctagctttttgagttgaataatccgtttgcttattctcaataaagttttctaacaatgtcattcaaaactatgatgtatatttattatgtatatttagcaatatctcatacattttgatatataatgttttcrgttcggttaatttttaatctatagttcagcttttatttttgccttaattaagggctattagaagaatgaatg

SEQ ID NO: 206607 - DNA, 561 bp, Homo sapiens
tgtgtcctgctaaggggtcacagaatgtcctcaacacagcccctggtgaggattaraaggaaggaggggtctggctgtgtgagtgtcaagtgtgtaacctccgtgtttgtctcatttgagatccctgcagtgaagttgaacgagctgctcgagaacttttatgtcaccgtcaagaagagcgacggctcggacttcctggccacctcgctccatgctattcgccgaggcctggaccgcatcctgaagaatgcaggtgtcggcttttccatcaccagcagcaccttcagctcctccaccaagaaactcaaggagaagctgtgggtgctgagtaaggcaggcatgtcgggcgcgcgttctcgcaacatcgtctacttctccctttctgacgaggaggagatgtggcaggcagggtgtctgggggatgacagccctatcactctcctgtccactgtggtcaagtacaacagccagtacctgaacatgcggacgctgcaggagcatgcggatctgatgtatggtgacatcgagctgctcaaagacccccaaaaccagccctacttt

SEQ ID NO: 206608 - DNA, 379 bp, Homo sapiens
ctccttaaaagtagttctattcaaggcctcagatagagacctcagaatgagggtacctgtctaggaattcaaatatgtgatgagcatgatctgcttgagacattgaatgtaacttccttcmaagactgcagtgtactggttgtgcactagtcctggggtgggagggtagcttccctctgaagggtctaccaggaaaagcctttgtaattaatgcctataggcaagcctgtaaaatcacatgcaggttttaaccaggagctcaactctttaatttcagcccttagtagttcagataatctcaatagatgccaattaaacatttgacaaaatgtaccatatgttcatggtaacagttctcaataaactaaaaatagaacag

SEQ ID NO: 206609 - DNA, 379 bp, Homo sapiens
ctccttaaaagtagttctattcaaggcctcagatagagacctcagaatgagggtacctgtctaggaattcaaatatgtgatgagcatgatctgcttgagacattgaatgtaacttccttccaagactgcagtgtactggttgtgcactagtcctggggtgggagggtagcttccctctgaagggtctaccaggaaaagcctttgtaattaatgcctatagrcaagcctgtaaaatcacatgcaggttttaaccaggagctcaactctttaatttcagcccttagtagttcagataatctcaatagatgccaattaaacatttgacaaaatgtaccatatgttcatggtaacagttctcaataaactaaaaatagaacag

SEQ ID NO: 206610 - DNA, 476 bp, Homo sapiens
taacggaatgtagaaatgtttactgattactcattatgtgtcaggcaatacaagcatttacatatttactatcrgaattaatctttgcaaaaacaatatgaggccagttatatcattatgcataatttacaaatgaaaaacttcagacagaaagaagttcagaaacttgacaagaatcaactgagcaattgtagtgcagcccgcatttgaaaactgcaggtatgttcctcgggcctacactccttcccacggcaataagccatcttcatacatattcacgtatacactactctgagacagagagagagagaaagaatgaaagtgaggcagtaagagggcaatagagggcttttttgggagagacagtgaatcaaaatgctaatgatgatcagatactatagccatttgtttagcatctgaaaactgagatttaacagaaaaaggcaaataaatgtataattgcaataaagtataag

SEQ ID NO: 206611 - DNA, 476 bp, Homo sapiens
taacggaatgtagaaatgtttactgattactcattatgtgtcaggcaatacaagcatttacatatttactatcggaattaatctttgcaaaaacaatatgaggccagttatatcattatgcataatttacaaatgaaaaacttcagacagaaagaagttcagaaacttgacaagaatcaactgagcaattgtagkgcagcccgcatttgaaaactgcaggtatgttcctcgggcctacactccttcccacggcaataagccatcttcatacatattcacgtatacactactctgagacagagagagagagaaagaatgaaagtgaggcagtaagagggcaatagagggcttttttgggagagacagtgaatcaaaatgctaatgatgatcagatactatagccatttgtttagcatctgaaaactgagatttaacagaaaaaggcaaataaatgtataattgcaataaagtataag

SEQ ID NO: 206612 - DNA, 476 bp, Homo sapiens
taacggaatgtagaaatgtttactgattactcattatgtgtcaggcaatacaagcatttacatatttactatcggaattaatctttgcaaaaacaatatgaggccagttatatcattatgcataatttacaaatgaaaaacttcagacagaaagaagttcagaaacttgacaagaatcaactgagcaattgtagtgcagcccgcatttgaaaactgcaggtatgttcctcgggcctacactccttcccacrgcaataagccatcttcatacatattcacgtatacactactctgagacagagagagagagaaagaatgaaagtgaggcagtaagagggcaatagagggcttttttgggagagacagtgaatcaaaatgctaatgatgatcagatactatagccatttgtttagcatctgaaaactgagatttaacagaaaaaggcaaataaatgtataattgcaataaagtataag

SEQ ID NO: 206613 - DNA, 476 bp, Homo sapiens
taacggaatgtagaaatgtttactgattactcattatgtgtcaggcaatacaagcatttacatatttactatcggaattaatctttgcaaaaacaatatgaggccagttatatcattatgcataatttacaaatgaaaaacttcagacagaaagaagttcagaaacttgacaagaatcaactgagcaattgtagtgcagcccgcatttgaaaactgcaggtatgttcctcgggcctacactccttcccacggcaataagccatcttcatacatattcacgtatacactactctgagacagagagagagagaaagaatgaaagtgaggcagtaagagggcaatagasggcttttttgggagagacagtgaatcaaaatgctaatgatgatcagatactatagccatttgtttagcatctgaaaactgagatttaacagaaaaaggcaaataaatgtataattgcaataaagtataag

SEQ ID NO: 206614 - DNA, 515 bp, Homo sapiens
caatgcatgcaaataaattgatatgaaacattacatgaaggataaaaatccttcatgatcatctgaatagatgcagaaaaatcattcaacataattcaacattctttcttaataataactcccaagaaaataggtatatagaatgaatttacctcaatataatacaatctgcatatgacaatcccacagttaatatcatactcaatggtgaaaaactgaaatgtttttctctaagatcaagaacaagacaaggatgtgcattcttgctacttctattcattgtagtactagaaatcttaaccagaggaattaggcaagaaaaataaaaagcatccagatgaaaagaaagaacaaaattatacttttgcagatgatsctcttatatgtagaaatttctaaagacttcaccaaacctctgttagaattttaaaaaattggtaaagttgggagatataaaatcaaaacacaaaaataaattttatttgtatatactaatagtgaactatttgaaaaat

SEQ ID NO: 206615 - DNA, 453 bp, Homo sapiens
cattagtttgtaagtcaatcactctaaacttctatgttgttttawtcacattttaaaatagaggaatataagcatagtagttcctatgagttaatttttttcctttagtgtacctttaaagcacaataacctttctttatagttttctagaaatattaagaattgtgtgctacttttgttctccttaattaagtattacatttctcttaagggcaagtttttcaattaggaacaactttgcccttaagcttattatctatttcatacagaatatttcagttgtaatttcactaatcagtacatttggaaagattcctcaaacacttttcagctatacaaagttatctaaaacaatttactttctctatgccaatgttttataggcccttctattattcagtttcaaatatgtaaaatatccttaggattcttgttacatttgcattataatcc

SEQ ID NO: 206616 - DNA, 453 bp, Homo sapiens
cattagtttgtaagtcaatcactctaaacttctatgttgttttattcacattttaaaatagaggaatataagcatagtagttcctatgagttaatttttttcctttagtgyacctttaaagcacaataacctttctttatagttttctagaaatattaagaattgtgtgctacttttgttctccttaattaagtattacatttctcttaagggcaagtttttcaattaggaacaactttgcccttaagcttattatctatttcatacagaatatttcagttgtaatttcactaatcagtacatttggaaagattcctcaaacacttttcagctatacaaagttatctaaaacaatttactttctctatgccaatgttttataggcccttctattattcagtttcaaatatgtaaaatatccttaggattcttgttacatttgcattataatcc

SEQ ID NO: 206617 - DNA, 453 bp, Homo sapiens
cattagtttgtaagtcaatcactctaaacttctatgttgttttattcacattttaaaatagaggaatataagcatagtagttcctatgagttaatttttttcctttagtgtacctttaaagcacaataacctttctttatagttttctagaaatattaagaattgtgtgctacttttgttctccttaattaagtattacatttctcttaagggcaagtttttcaattaggaacaactttgcccttaagcttattatctatttcatacagaatatttcagttgtaatttcactaatcagtrcatttggaaagattcctcaaacacttttcagctatacaaagttatctaaaacaatttactttctctatgccaatgttttataggcccttctattattcagtttcaaatatgtaaaatatccttaggattcttgttacatttgcattataatcc

SEQ ID NO: 206618 - DNA, 608 bp, Homo sapiens
gcccaatatcttatcatggaagcttatacatagtagatattcacataatcaaatttaaatttgtggatctcattcagttaaggagaagaggttatgcaaaatattaatcatagtctggttataggtctctaaataaaattatgggagtacataaaatatagttgtggtaaaaactagagatcaaatacagacagagagatactagaccattatttcatgaaacaaattagtaatttgaaataccatatttttcaaaaaactaagatgaaaaacatcaaccaaaagaaaaaaatactgtgtgaaagtatttatcaaggtatttaatcatrtattcagtttatttatcggcaacgaatgaccataattttgttaatgcagttaaataatggcatacaattttgtatttaaacatagtaattatgtgtgaatcacaatataaataataatgccacatctaacattctgtaattcctgtgtttccaaaaatattccaagtattatagaaacaattttctaattcagcttttacatactgatttattatgtatgatgtattgttctccatttaaaaatattttaccagtttttttgaataattaatgttgctg

SEQ ID NO: 206619 - DNA, 566 bp, Homo sapiens
ccagacatcacttcattccaatatctaattacatcatgcctcattaccctctgtctataaaacctaccccagtctctagctgaagaagacaagtttgagtgctgtcttctgtctcctttccagttgattgacagtaaacctttcttttctcaaaagcctgtgccatagtattggcttstaagcatgtttggaagtaagggcattgctagcttagtaacaaaaggacaaacctgggcaacataaaaaccttaagaataactaaagcctctacgaaaatgcctttgtttaatgaaagtagtagttgatttattgcttcaagaacttctttgattctactctgttaaattatttcagaaagcagagagtataaatgaggaaaaggtgaaaacattttctccaaattaaaaaaaaaaacaccaaagataaagagtactacacaatctctttatctctttaggcatttgcatatcaatgtttattgatttcaagtttagaattttgataacactggtcttttttgaaagtgaatccctgtaaggatccacaggaatgaagaaagcagagtt

SEQ ID NO: 206620 - DNA, 447 bp, Homo sapiens
gaaacactttagtaggctatgtatctatttaattccctggaaaccatgatcagttaacctactgacagatattcttgtgtgtccaagcattttgattattggtacctctctgatatctattatgataaatattaccaccttccctttcaggctaagtgctgccacttggtctaacacctttagaattcactcctgagcatgttccctgagtttctttacatatgcagtagcaaagtcttgcaattcttttggtttgtaagctacaatgtcatgagttatagtgtgtcccggccccttggagcatggtgaaatttcaccctagttatgggtctagtggcgacaaagtgtggttatggtaagtyttgagagaaatgagcatccattttcaaggctcttgccccaggtgaggttatcacaggatttccaagcaaggtaggcaacaaagag

SEQ ID NO: 206621 - DNA, 612 bp, Homo sapiens
ttcttaccatacatcttagcaacctcaacctataattttttctcatctcttatcaagttragaactttcactttttcatacaaaggaagcattttactgcttctctttggcacatctgaattgctagtaacactacttttgtaccctggggccattgtaacactacaacctataatttttttatttcttatcaagttgagaactttcactttttcaaaaaaaggaagcattttactgcttccctttggcatatctgaattgctagtaacatgacatttgtgctctgggcccatctaagtaaaataagggtggctagaacacaagcactgcaatactgagacagttgatctaataactgagatggctcctaagcaacgaaaggcgggtggcgtgtacagcgtggacatgctggaaaaaggagtgattcatgtcccgggtgggacagagcaggacagcacaagatttcatcacacttctcagaacagcatgtgatttaaaatttatgaattatttctggaactttccatttaatgttttcagaacacagttgagcactgaattcctggaaagtggaaacacagatgaagccaagggtggggactactgtactag

SEQ ID NO: 206622 - DNA, 491 bp, Homo sapiens
gaatatggccagaggaatagaaatcattctaccataaagacacatacrcaagaatgttcattgcagcactattcataatagcaaagacatggaatcaacctaaatacctgtcaatgactgactggattaaaaaaatgtagtacgtatacaccatggaatgctatgcagccgtaagaaaagaatgagatcatgtcttttgcagtaacatgaacagagctggagcctattatccttagcaaactcaaacaggaacagaaaaccaaataccacatgttctcatctataagtgggagctaaataataagaacttatgaacacaaagaaagaaacaacaaacactggggtctacttgagagtggagggtgggagggggaagaggagcagaaatgataactgttgggtactaggcttaatataggctgatgaaataatatttataacagccccccatgaaagatgtttacctatataataatccttaacaggtgccc

SEQ ID NO: 206623 - DNA, 491 bp, Homo sapiens
gaatatggccagaggaatagaaatcattctaccataaagacacatacacaagaatgttcattgcagcactattcataatagcaaagacatggaatcaacctaaatacctgtcaatgactgactggattaaaaaaatgtagtacgtatacaccatggaatgctatgcagccgtaagaaaagaatgagatcatgtcttttgcagtaacatgaacagagctggagcctattatccttagcaaactcaaacaggaacagaaaaccaaataccacatgttctcatctataagtgggagctaaataataagaacttatgaacacaaagaaagaaacaacaaacactggggtctacttgagagtggagggtgggagggggaagaggagcagaaatgataactgttgggtactaggcttaatataggctgatgaaataatatttataacagccccccatgaaagatgtttacctatataayaatccttaacaggtgccc

SEQ ID NO: 206624 - DNA, 633 bp, Homo sapiens
ttcattcttttatggccaaatagtattccactgtgtatacatatcatgttttctattattcagtcatctgttgatggacattgaggttgattttatatttttgctattgtgaattgtgctacaataaacatatgagagcaggtaccttcttgatataataatttcttttcctttgggtagattcccagtagtgggattgctggatcaaatggtaattctattttcagttctttcagaaatctgcatactcttttccatagaagttgtagtaattacatcaccaccaacagtgtgtaagcgttcccttttctctgcatcctcaccaacatctgttatttatttttttacttcatttaataaccattctgagtggtgtaagatgatatcttattgyagttttaatttgcatttccctgatgattgatgatgagcattttttcatatgcttattggccacttgtatgtcttcttttgaaaaatgtatattcatgtcctttgccactttttactggaattatttggggtttttgttgttgcggttgagttgcttgagttccatgtaaactctaggtattagtttactgttggatgcatggtttgcaaatattttctcccatttggcaagctgtctat

SEQ ID NO: 206625 - DNA, 604 bp, Homo sapiens
ttccttgtttttaagttttgttttttaaaatttacatctataacttttattgacaaatattatgtttatgatgtacaatgtgatattttgatatattatacactatgaaatgacaaaatcatgctgattaacatatctgttacctcacatacttatcatttttgtttgtggtaaaaatctaaaatctactccattaggaattttcaagtatacaatacataattgttaactacagccactgtgctataaaatagagcccagagtttattccttctgtctaactgaaacctcatattgtttgaccaacatcttccaatctttctcctcacacactccaccctcaacccctgatgtgttaggccattcttgcattgctataaagaaatacctgaaactggataatttataaagaaaagagatttaattggcttatagttctgcaggctatacaagaagcrtggcactggcatcggctcagcttctgggacggcctcagggagttttactcatgacagaaggtgacgtgggagcaggcatgtttcatggcaaaagcaggatgggcagaggggcacaggagtaggtgccacaccacttaaacagatct

SEQ ID NO: 206626 - DNA, 537 bp, Homo sapiens
gagcatataacttggaaatattagttttatgctagagctggcccatactggcttctgaaaaccaactccccacattccttcccaacacctcattcagtgatgtcacataggtagcttgaaattagccatagtgggaatatttayatcatggaaattgacaaatgctgaaaatcagggcttattttcagagttagcttactggcatgccactgagtataaagagtaatgttaaagaaaatacctgtgtaagtaaaacttttatcaataaatgggtgatcaacaacctctgacaattagtcaactaaaacaccctttagactgggcacagtggctcatacctgtaatcttaacactttgggaagccgaggtgggaggatcacttgaactcaggagttcgagaccagcctgggcaacatagtgagaccttgtctctacttatattttaaaataaattttaaaaaacaccctttatatagactgctaattgcttttagagcaaagagcattcctgctagaagttgaggaattcaatcctca

SEQ ID NO: 206627 - DNA, 584 bp, Homo sapiens
atgggaggatgtgcataagttatataaaaatactacaatgttttatatcaaggacttgagcatcctcaaactgtggtatttgggaaggggcaggagtgctggaaccaatgctgtgtggatactgggggatagctgtacacaggtagaaagtctaagtgccaaagtaaggaaggccttcctctggaggtagagcgctttactatagttcagtcataggcacctgtcctcatctttcaggagatgtggtgtccagcattacaatttctgctttactgcttcttggagttcaataccattccagaagaattctcaggcagatggcattggagaaaggttctttgactttctcctgtgggtaaaagccrcaactgccaacagcaccccttcctagagggagataggatcccaactagtccagcttctcagaatgcagttcttcaatgaataacactgatggcttccccttggttctgctccttagcctgaatgttctctctgacccttgtagtaagaatagaactaattttggtgtcttaggctgtatcagctcttctgctctgatgtaactgtcagtcttacctcac

SEQ ID NO: 206628 - DNA, 584 bp, Homo sapiens
atgggaggatgtgcataagttatataaaaatactacaatgttttatatcaaggacttgagcatcctcaaactgtggtatttgggaaggggcaggagtgctggaaccaatgctgtgtggatactgggggatagctgtacacaggtagaaagtctaagtgccaaagtaaggaaggccttcctctggaggtagagcgctttactatagttcagtcataggcacctgtcctcatctttcaggagatgtggtgtccagcattacaatttctgctttactgcttcttggagttcaataccattccagaagaattctcaggcagatggcattggagaaaggttctttgactttctcctgtgggtaaaagccgcaactgccaacagcaccccttcctagagggagataggatcccaactagtccagctkctcagaatgcagttcttcaatgaataacactgatggcttccccttggttctgctccttagcctgaatgttctctctgacccttgtagtaagaatagaactaattttggtgtcttaggctgtatcagctcttctgctctgatgtaactgtcagtcttacctcac

SEQ ID NO: 206629 - DNA, 500 bp, Homo sapiens
atatataaagataaatagctgcatatttatagactgtcattgagagtatatatgtacatatatgtatagaaagtataaactacataaatataaaaaaatgaagacagaagtacaatagctgaaaaatcatgatatggaaatacagaaggcagaagacatgaagtaattatctcattataatcagttttcagtatattataactgtagtactggggatatttcctggcatatttaaaacgaaagtagagtacttggggagaactttcagataagaacattagcatttattaaattttagaaaacagggttgaaagttattttggttcaaaggaaatatataggcagtatctcaaatgttatgtggaggaaacagtaaatttattttaaactcataaaaacgattggtggaggtcatattgaattagaatttgatgactataataaagaattgctcaaaaattagcactccttwatatacaataggctgctttgtaacatag

SEQ ID NO: 206630 - DNA, 587 bp, Homo sapiens
gtagtttgctgggccctgggtgagcgaatcaagcaggagcaagcagcagtgcttgaaagtgggctctggacggtcaccttagtgcataccactccctctgggttgacttcctttatgatggtacaggagctggagatgattctgaagtcactccatacaattaatgaaaatattaccgtgaagctatttccccagaacaaaaagcaggaaaagtgtcaatgactcacatttaaactcttattcatragattgcaaaaatgcagtgctcagacatttcacagagttctgaatgacttcctgggagtgtttacattgtaagatgattccatttcatatgtggtcagtgggttttcataaataaaatttctttttgggatgttgcaaatgcaaattttgctgatgatattaagataaatttttcttttagctctgtcttcatgtgttccaatttggtaaatttctatgacaaccatccctaccctggcaatcttgtattaagatgccaatctttctactttcaatgaacatttttagaggtatttcacattaaaaatagtatctttgtgttctttggtctcaaaaagtcc

SEQ ID NO: 206631 - DNA, 587 bp, Homo sapiens
gtagtttgctgggccctgggtgagcgaatcaagcaggagcaagcagcagtgcttgaaagtgggctctggacggtcaccttagtgcataccactccctctgggttgacttcctttatgatggtacaggagctggagatgattctgaagtcactccatacaattaatgaaaatattaccgtgaagctatttccccagaacaaaaagcaggaaaagtgtcaatgactcacatttaaactcttattcatgagattgcaaaaatgcagtgctcagacatttcacagagttctgaatgacttcctgggagtgtttacattgtaagatgattccatttcatatgtggtcagtgggttttcataaataaaatttctttttgggatgttgcaaatgcaaattttgctgatgatattaagataaatttttcttttagctctgtcttcatgtgttccaatttggtaaatttctatgacaaccatccctaccctggcaatcttgtattaagatgccaatctttctactttcaatgaacattyttagaggtatttcacattaaaaatagtatctttgtgttctttggtctcaaaaagtcc

SEQ ID NO: 206632 - DNA, 561 bp, Homo sapiens
tctctttggaactgatgtcatcaacatgggtagagaggggcctaccatcagtctagggtaaagttgaagagcaagaatggaaaaaataggggaaataaatttagaaaaagagaacaggacttcagacttggaatgaactctaaaaaattatctgttcaactcataccctttactgcaaccgtctagcccacccatgcctgaagggtagctaccctttacttgaacacgtctagataggagacagtctttatgaaacagcccatttcattttgtctggctgtaaggattagtaagctccttcttatagtgaacctcttttctctaatgtttgcatctggaatatctagattgcttattcacacwgcccaaattctgacaatctcctactgtctactttgtttttcactttgaagactaacccagtaagaaacttcaattttaagttgttagtttggcagttttcatgagcacttttaattttaaaacaagaatttccaagcaggataactggtcaactgtaaaaccacgaattctgtgaattttccaagttgggaaagcata

SEQ ID NO: 206633 - DNA, 545 bp, Homo sapiens
atctttatatactactgtatcgtttgaagtgacaatatatctatgcactacctgtaaaatttttttggtgagacaagaattcactactgctaccaccaccatcacccaagaggaagcacaaagaacattataaatggctttttgtttttcttagtgatgttgtctatctgcaagctagcccactaatatttgatccttactattaggggtcatcaaactacagtacatggatcaaactcagccagtcatctgttttttataaataaagtattattgaaacatagccayggtcatttgtttgcgtattttctattgctgcttttgagtacaaaggcaatgttcggtcattgcaacagagaccatatggccctcaaagccaaaaatacttaacatccagtcctttccaaaaaacatttgccaatataactccagaacaatgacaaagacaagtttaataggctctctagggctcagactcatgaatgaccccactctggtcatgctgtaatcaatttaacagccacagatactatcaataacagcaa

SEQ ID NO: 206634 - DNA, 556 bp, Homo sapiens
ttctcaaacctcaattcttgacctgtgctcacctgcaggcctgacaccatgtgtaagctgtcaaggcttgrggcttgcaccctctgaagcaatgacttgaactgtacgttggccccttttatccacagctgggacacagggcatcaagtcccaagactgcacaaaacagcaaggccctaagcccagcacagagaactattttttcctcctaggcctccctgcttgtattgggaggggctgccgtgaagacctcagacatgcctgggagacattttccccattgtcctgtaattaacatttgggtccttgatacttatgtaaatttctgcagcaggcttgaatttctcctcagaaaatgggtttttcttttctattgcatcattaggctgcaaattttccaagcttttatcctctgcttcccttttaaacacaagttccaattccacaccttatctttgtgaatacataaaactgaatgcatttagtaacacccaagtcacctctggaacactttgttgcttagaaatttcttccaccagataccctaaatcatctc

SEQ ID NO: 206635 - DNA, 578 bp, Homo sapiens
cataaagtgaaacattgtaaggagatcctactttcctgaagggtcaatgttaatttgagagctatgtactttaggaaaagctcccacttaccttagagctattctaaaacaacatagtgggtgcccaatgacaaacctggcaaaatgctttcacrtatttcttctcattgacagtgttctttaaaataaaggaccaacccaaagagtgttacctttatcctctccagcatcctcaattcattcaaaggtacaaaagtagttgcctaatagcagatagatggaagattcctgtccttcaaagatattggacctccagacactttgttgacagatatcagataccagaattcctcacactcaatgataacctgtaagttgcattactagggtataagaccagagttttaaaatgaaacattattataatagtgctacaattggaataaggtactatcttaatttaagaatatagacagtctttgctggtttgtagacttgaatcgacccctgtgcgcctgcgtggagcgcaccacttcctaaaacatgaaggcgtgcgcatccccggggaatacacttcc

SEQ ID NO: 206636 - DNA, 578 bp, Homo sapiens
cataaagtgaaacattgtaaggagatcctactttcctgaagggtcaatgttaatttgagagctatgtactttaggaaaagctcccacttaccttagagctattctaaaacaacatagtgggtgcccaatgacaaacctggcaaaatgctttcacatatttcttctcattgacagtgttctttaaaataaaggaccaacccaaagagtgttacctttatcctctccagcatcctcaattcattcaaaggtacaaaagtagttgcctaatagcagatagatggaagattccygtccttcaaagatattggacctccagacactttgttgacagatatcagataccagaattcctcacactcaatgataacctgtaagttgcattactagggtataagaccagagttttaaaatgaaacattattataatagtgctacaattggaataaggtactatcttaatttaagaatatagacagtctttgctggtttgtagacttgaatcgacccctgtgcgcctgcgtggagcgcaccacttcctaaaacatgaaggcgtgcgcatccccggggaatacacttcc

SEQ ID NO: 206637 - DNA, 368 bp, Homo sapiens
ggcgtgcgcatccccggggaatacacttccttcctggctcccatctcctcctccaagctgtacaatgaggtctgagcctgtagggagaagatctgtgaccctgaggcctagtttgagatgccttatgtggtacgactgcacaacctccaccagctgtctgcatcccagccctgtttcaccttcagccatcccaacacagatcctacgattgacaacaactgctactggaccttggagtttcccgtggaggtgaatacagtactgcatggctttgcaggmtacgttaagatgctttatcagtacatcactctgagtatctgtccagacagagactcactctcctgggatgttctcatggtttcccatcc

SEQ ID NO: 206638 - DNA, 600 bp, Homo sapiens
ttgggaagacttaaatttttctgtaacacctgttttatttttcacaatgcatttttcaccatttgaatttttgacctagwtgataaaaatgagaagctacttacggatttttagttactctattgtcatgaggcccccatgccaaaatacaatatgtatatcagaatgataaatctgcagctccaatctttagaaaatatgttcaaaattttattttttcgtgatcaattttgttttcaaatttattaacttctttaatgtctgcaacaaatataaatgaaaactgctacgtcatagaccatacatcacaatggccccagtgtaaagcattgactacagtggcttcattttaccagtcagcaatgcttaaagcatgaggaggtgctcggcacctggcaaagaggcattccaagtacagagagaagcacaagaaaagcctatatttgatccaaacataggtccaaactagcagctactttcgggtaaagcaaatagttttgaatggctaaaactaggctgctttatgtacggttggatcctaaagtacaagaagcaatagcaattcgtgcacctggagaagtagacaggagaggagcaacg

SEQ ID NO: 206639 - DNA, 600 bp, Homo sapiens
ttgggaagacttaaatttttctgtaacacctgttttatttttcacaatgcatttttcaccatttgaatttttgacctagatgataaaaatgagaagctacttacggatttttagttactctattgtcatgaggcccccatgccaaaatacaatatgtatatcagaatgataaatctgcagctccaatctttagaaaatatgttcaaaattttattttttcgtgatcaattttgttttcaaatttattaacttctttaatgtctgcaacaaatataaatgaaaactgctacrtcatagaccatacatcacaatggccccagtgtaaagcattgactacagtggcttcattttaccagtcagcaatgcttaaagcatgaggaggtgctcggcacctggcaaagaggcattccaagtacagagagaagcacaagaaaagcctatatttgatccaaacataggtccaaactagcagctactttcgggtaaagcaaatagttttgaatggctaaaactaggctgctttatgtacggttggatcctaaagtacaagaagcaatagcaattcgtgcacctggagaagtagacaggagaggagcaacg

SEQ ID NO: 206640 - DNA, 463 bp, Homo sapiens
gaaatgaacatcatgagtatcaggatatgatagatcatgctgctgtagtcaacaaccctaagtatcagaggcttaaatcaacaatttatttctggctaacactacctatctatcatgggcaagcagggactctcctattgtttccaggttagtcagtccagaactcaggctgatggagcatctaccatgtttaactttgctgattactgccaggaggaaaaaagattttggccattctttcaccaagtaactaattcacatgtcacttctctcccctcagtagccagatctaccacttgaccctatcccaccatgcaagaaaagagtgcaaatctaacatgtgcccagagtgtrgggattcatagagatttggtgaactccattaatgactatggcactagaaagcttctgggtattactattaagtgcatatttttgcctttaatccttgggttttactctt

SEQ ID NO: 206641 - DNA, 505 bp, Homo sapiens
gaattcttccgttttttgcctattcagtatgatgttgactgtgggtttttcatagatggctcttttattatattttgacatgtgttccttcaatgcctagtttgttgagggtatttaacatgaagtaatgttgaattttattgaaagtcttttctgcatctattgagataatcatgtggtttttggttttagttctatttatatgttgaatcacatttattgatttgcatatgttaaagcaaccttgcctcccaggaataaagcctacttgaatatagtggactagctttttgatgtgcagctrgattcagtttgttggtattttgttgaggatttttgcaactatattagtcaaaggtataggcctgaggttttttgtttttgttgtgtctctgccaggttttggtatcaggattatgctggactcgtaggatgagttagtgaggagtacttcctcctcaatttttggaatagtttcagtaggaatggtaccagctctttttta

SEQ ID NO: 206642 - DNA, 505 bp, Homo sapiens
gaattcttccgttttttgcctattcagtatgatgttgactgtgggtttttcatagatggctcttttattatattttgacatgtgttccttcaatgcctagtttgttgagggtatttaacatgaagtaatgttgaattttattgaaagtcttttctgcatctattgagataatcatgtggtttttggttttagttctatttatatgttgaatcacatttattgatttgcatatgttaaagcaaccttgcctcccaggaataaagcctacttgaatatagtggactagctttttgatgtgcagctggattcagtttgttggtattttgttgaggatttttgcaactatattagtcaaaggtataggcctgaggttttttgtttttgttgtgtctctgccaggttttggtatcaggattatgctggactcgtaggatgagttagtgaggagtacttcctcctcaatttttggawtagtttcagtaggaatggtaccagctctttttta

SEQ ID NO: 206643 - DNA, 620 bp, Homo sapiens
cttatattcttgtgaaatttcccatgttcaagtcaggagttgaaataacatattaggtttactaagtgctacttaattttagctctgtaaagtcaagaggacagcaatgggccaggaaatatattcccaatgtcagctatctattgcaggactgctcagagcccttaatatattaatgtgtcctatgtatctccagtggcagaccataccccatagggtcttctgaactaatttcactacagagccctttatttggttgcattttataaaattggagttccacagggcatatttggaaagcactggaatggtaaacctggcctcttcccaatgaactytgcctccatgcggaataaaagcaatggccgtagccagcttacctgatggatctattagctagcttgtctctcatttaactggacccaaggcaagcccatggaaatgcagttcatcaacttgttctaatggatttggattgttctcattctttaagagcctaaacccttccagagctaagtactcacattctatagaatataaagcactgtagatacctgtgaagtggtggattttctatttcctttcttattaaaaaaacatttccagtgtattgcttaata

SEQ ID NO: 206644 - DNA, 354 bp, Homo sapiens
attgttacccaaagtagggtaagtgaaatctgagcaggcaaaacaaaagacatattaatgcatatatatattatgcatatactaatgcataacagattatttcgaagatgtattactaatatgtgaatgtcgtttctctattagtactcaaagacaaatgagtggtaacaggttgcaaagggatttcaaaaataagagataaaatttaccatggataaaattctatttttctgtagatttctataaaataaatattttatttctatttttttttttagcggaacccatctatccagcatgayaaacattaagcatgaatgttgttcaactgcttgacacctacaacactgcttg

SEQ ID NO: 206645 - DNA, 590 bp, Homo sapiens
tttttattcctttaaaaattatttaaaatggcattatcaaaaggaggaagctccaggaccagtgacaagcgagcatgtcctgatgaaaccagtattctgattcattttcttgagctccagtcatattcctgccttaccgcaggtatctatttccacacagtatctattttcctgaattcagagatttaacaatctactttattcctactgagtgcatagcacaatgtatacatttttctctataaatcatttttgccattcacatttactgtttttagctcttatgacaaattccctattctaatataatgtctccttcctaaccactcttattcattgctaccattgttctgtmattttcccaaatcagtaatactccaagataatataattcttcactgaccccttcaggatgtagaactctcaagtttctcattattaaaatctgcactcagaatctgattaactaattcccatagaactatatatatcagttaaaaaatgaatcacatctttccagatcattccattttagaatataaaatgtttaaggtaaagttaatgagtcttttaaggtagaatttcaggca

SEQ ID NO: 206646 - DNA, 463 bp, Homo sapiens
atcttgcaacttagtaaatcaggcaaggaccatgaaaagaataaaagtcacactgacaggctgtcttagtccttttgtgttacgactaaggaacacctgaggctgggtaatttatagagaaaagaggttaatttggctcacagttctataggctgtacaggaagcatggttttggcatgtctcaggctgctttcactcataggaaaaggtgaagtggaaccagtatgcagagatctcatrgcgagagggaagaagagtgaaaggaggatatgcaagactcttttaaacaagctctcatgggaactaatagagttagaagtcacacattacctcaggaaggcaccaagccattcaggaggaatctacctccatgacccaaacacctcccaccaggcccatctccaacatcggggatcagacttcaacatgaggtttggatatatccaaactatatcacaggcac

SEQ ID NO: 206647 - DNA, 635 bp, Homo sapiens
ttgtttttatgtttctaggaaattctgattagtactactattcactgatgcagaaagacattcttttgcataaaagactgtttaacactctggacttttctaaagtatttagtagtgctaatttctggcccagccctaataggaattctgcggtaagaatgatgagaagggcctccttccttctcctcgaatggctttatgcgcacatgctttttaaaagttctttaagcaagacagagctgagtcttatttgtcataccttgggatttagtttcaycagctgtttttaattataaacatagcattaaaatagatattggtttaaataatgtagtattcttagtatgatttaagacttatgatttacctacatattatacatatttgataagaatgctaaatcaatatacccttactctgccagtgaacataattaaacatgtttcatttctgaataaatttaagtagatccaaactatttactgaatttactaaaatcacaggacattaaggaccagtagcatctatgccagagatttaccgttattgccagtaagaccgattctaacagcaaataacagtctgagactcctcatacctcagtgcttagaagcatgtctctcttgagctaccat

SEQ ID NO: 206648 - DNA, 303 bp, Homo sapiens
tttgatttgcttttccctgatgactcatgaggttaagcacctttttaagtgttcattaaattgataatattttggtctgacatctctagcatgagttctgaactgttctgaagaatttaagctttgctgttagccctgtgacccaaagcacctcagatgtgtgaaggagctactggccctgaggcctgtagcttggtgctgtgcagtccccgaccccagtggagtcagtgttctgaagaatttkggcattttgctttctgatcaccagtccatttcccgtttttctattttgtgacacctatt

SEQ ID NO: 206649 - DNA, 398 bp, Homo sapiens
aaggaagaataaaagaaaaaatctagaacattagaaaggaaaamagaatggacacagcgaaaatatgagtaaataaaatatatatttcttcttgagttttctaaattatgtttgatggttgaagtgaaaattttaacactgtatgatgtacttttacaggtatatgggaaaaatttaagaaaattatctaagaaactgggggatgtaaagagacataaagtcaggtaaggtttttacacttcaagttggtcaaatgttgataccagtagaccagttatgtatgtatgtataatgtaatacatagagtgaatactaaaaaaatacaaaacagtacactcaaaaacactatagacgaatcaaaaattcattctaaatgtatgttaaagtagcccacataa

SEQ ID NO: 206650 - DNA, 398 bp, Homo sapiens
aaggaagaataaaagaaaaaatctagaacattagaaaggaaaacagaatggacacagcgaaaatatgagtaaataaaatayatatttcttcttgagttttctaaattatgtttgatggttgaagtgaaaattttaacactgtatgatgtacttttacaggtatatgggaaaaatttaagaaaattatctaagaaactgggggatgtaaagagacataaagtcaggtaaggtttttacacttcaagttggtcaaatgttgataccagtagaccagttatgtatgtatgtataatgtaatacatagagtgaatactaaaaaaatacaaaacagtacactcaaaaacactatagacgaatcaaaaattcattctaaatgtatgttaaagtagcccacataa

SEQ ID NO: 206651 - DNA, 398 bp, Homo sapiens
aaggaagaataaaagaaaaaatctagaacattagaaaggaaaacagaatggacacagcgaaaatatgagtaaataaaatatayatttcttcttgagttttctaaattatgtttgatggttgaagtgaaaattttaacactgtatgatgtacttttacaggtatatgggaaaaatttaagaaaattatctaagaaactgggggatgtaaagagacataaagtcaggtaaggtttttacacttcaagttggtcaaatgttgataccagtagaccagttatgtatgtatgtataatgtaatacatagagtgaatactaaaaaaatacaaaacagtacactcaaaaacactatagacgaatcaaaaattcattctaaatgtatgttaaagtagcccacataa

SEQ ID NO: 206652 - DNA, 437 bp, Homo sapiens
tataccagagacatgcctagaatctctaaataagctgactactactaaagagcttacccagaaaaagtgagtctgtaaaaactggaacaagtccctaattctttaatgcatagacataaatgtaaggcaacaagaaacacacaaaaataagaagacgtaacaccaccaaagaacacaatctgctagaagcagaccccaaagaaatagcaatatacaaattgcataacaaagaattcaaaatagttatttttttaagaaagctaagcaaacttcaagaaaataaagagaaataatccaaaaaaaatcagaraaaccacaaacgaccagaacaagaaatttaacagagagattaaagacatttttaaagagaaattctagaccttaataatacaatgagtgaaatgtaaactgtggtagagagcatcaacagcaaaatt

SEQ ID NO: 206653 - DNA, 437 bp, Homo sapiens
tataccagagacatgcctagaatctctaaataagctgactactactaaagagcttacccagaaaaagtgagtctgtaaaaactggaacaagtccctaattctttaatgcatagacataaatgtaaggcaacaagaaacacacaaaaataagaagacgtaacaccaccaaagaacacaatctgctagaagcagaccccaaagaaatagcaatatacaaattgcataacaaagaattcaaaatagttatttttttaagaaagctaagcaaacttcaagaaaataaagagaaataatccaaaaaaaatcagaaaaaccacaaacgaccagaacaagaaatttaacagasagattaaagacatttttaaagagaaattctagaccttaataatacaatgagtgaaatgtaaactgtggtagagagcatcaacagcaaaatt

SEQ ID NO: 206654 - DNA, 579 bp, Homo sapiens
agtagagaaaaatcacgtaatcataaaggaagacagcaagagaggaagaaaggaataaagaacctatgcgataaccagaaaacaattaacaaatggcaacagggagtcattacatatcaataattaccttgaatgtagattataagaaaagagacccaactgtatgctacttagaagatactcactttagctgtaagaacacacagactgaaagtgaagggatgcaaaaacatattccgtgcaaatggaaaccaaaagacatcaggaatagtaattatactaatatcagataaagtaaactctaagtcaaaaactgtaaaaagaagcaaagaatttcattktatgataaaatggtcagtccatcaagagactataacaaaaatattaatttatatgtacttcacattagaccacataaatatataaagcaaatgttaatagatctaaagggagagagagactgtaattaaaatgatagtaatgaacttaaataccctattttcagctactgagagataattctgacagaaaattagtaaggaaatacgagacaaactaccctttagacctagtcgacct

SEQ ID NO: 206655 - DNA, 565 bp, Homo sapiens
actagtcacatttttgactagcactggggttaatatctcagttttaaccttttttgcactccaarcagaaaatgccttagattggaggaatgggtattatgaggggggctgtcactttccaccatcagcagcagatctggggaaggagtcacgcattatttgcagaataatggacctttctgattcacacaccctctagtcagctggtctgctcaccagggaaagcagatcaatgcagatttgggaaatcaaggaaaaacaagatggtgacactggaaagaaaatgaataaatgacaagtaaaaagagaaaagaaaggatattccaatattggcaccatgcttctccgcatatgtaatgccttcagtgcaccctccaagaaaggtatggatatctctcctttacacataaaagaactaaagttcagagagtttatgtcacctgcctaaggccattcagtgagcaaatgggtgaagtagaacttaaaaccaatctgtctgactaaatccaaaacatcacactgtgttcctgtcagtcatagtcagctttgtaaatttgtgttgtgt

SEQ ID NO: 206656 - DNA, 565 bp, Homo sapiens
actagtcacatttttgactagcactggggttaatatctcagttttaaccttttttgcactccaagcagaaaatgccttagattggaggaatgggtattatgagggggrctgtcactttccaccatcagcagcagatctggggaaggagtcacgcattatttgcagaataatggacctttctgattcacacaccctctagtcagctggtctgctcaccagggaaagcagatcaatgcagatttgggaaatcaaggaaaaacaagatggtgacactggaaagaaaatgaataaatgacaagtaaaaagagaaaagaaaggatattccaatattggcaccatgcttctccgcatatgtaatgccttcagtgcaccctccaagaaaggtatggatatctctcctttacacataaaagaactaaagttcagagagtttatgtcacctgcctaaggccattcagtgagcaaatgggtgaagtagaacttaaaaccaatctgtctgactaaatccaaaacatcacactgtgttcctgtcagtcatagtcagctttgtaaatttgtgttgtgt

SEQ ID NO: 206657 - DNA, 627 bp, Homo sapiens
gtaaaatataatggcattttaaataaagaactgaagagacatacccaaatgccagaaatgaccaaaatgctaaaaatcaggataggtgggtatattaggccattctttcattgccataaagaaatacctgagactgggtaacttataaagaaagagatttaactggctcatggttctgcaggctatataggaagtatagtagcttctgcttctagggagacctcaggaaacttagaatcatgrcggagggcaaaggggaagcaggcttgtcttacatggtcagagcaggagaaagagagagagtggggagataccacacatattttaactaccagatctcacaagaactcacaatacagtatcaaggaaggacgttgctaagccatttatgaaaactctgaccccatgatccagtcacctcccattaggccccacctccaacattggagattgcatctgaacgtgagatttggttggggacacagatccaccccatatcagtgagccagtgatcaacttatgtttggcaggcaggacgagcatgctctgtagtggattagttctcatgattcctaacacctgaagcagctcttaattccttcttatttgattgttttttcttattga

SEQ ID NO: 206658 - DNA, 627 bp, Homo sapiens
gtaaaatataatggcattttaaataaagaactgaagagacatacccaaatgccagaaatgaccaaaatgctaaaaatcaggataggtgggtatattaggccattctttcattgccataaagaaatacctgagactgggtaacttataaagaaagagatttaactggctcatggttctgcaggctatataggaagtatagtagcttctgcttctagggagacctcaggaaacttagaatcatggcggagggcaaaggggaagcaggcttgtcttacatggtcagagcaggagaaagagagagagtggggagataccacacatattttaactaccagatctcacaagaactcacaatacagtatcaaggarggacgttgctaagccatttatgaaaactctgaccccatgatccagtcacctcccattaggccccacctccaacattggagattgcatctgaacgtgagatttggttggggacacagatccaccccatatcagtgagccagtgatcaacttatgtttggcaggcaggacgagcatgctctgtagtggattagttctcatgattcctaacacctgaagcagctcttaattccttcttatttgattgttttttcttattga

SEQ ID NO: 206659 - DNA, 627 bp, Homo sapiens
gtaaaatataatggcattttaaataaagaactgaagagacatacccaaatgccagaaatgaccaaaatgctaaaaatcaggataggtgggtatattaggccattctttcattgccataaagaaatacctgagactgggtaacttataaagaaagagatttaactggctcatggttctgcaggctatataggaagtatagtagcttctgcttctagggagacctcaggaaacttagaatcatggcggagggcaaaggggaagcaggcttgtcttacatggtcagagcaggagaaagagagagagtggggagataccacacatattttaactaccagatctcacaagaactcacaatacagtatcaaggaaggacgttgctaagccatttatgaaaactctgaccccatgatccagtcacctcccattaggccccacctccarcattggagattgcatctgaacgtgagatttggttggggacacagatccaccccatatcagtgagccagtgatcaacttatgtttggcaggcaggacgagcatgctctgtagtggattagttctcatgattcctaacacctgaagcagctcttaattccttcttatttgattgttttttcttattga

SEQ ID NO: 206660 - DNA, 627 bp, Homo sapiens
gtaaaatataatggcattttaaataaagaactgaagagacatacccaaatgccagaaatgaccaaaatgctaaaaatcaggataggtgggtatattaggccattctttcattgccataaagaaatacctgagactgggtaacttataaagaaagagatttaactggctcatggttctgcaggctatataggaagtatagtagcttctgcttctagggagacctcaggaaacttagaatcatggcggagggcaaaggggaagcaggcttgtcttacatggtcagagcaggagaaagagagagagtggggagataccacacatattttaactaccagatctcacaagaactcacaatacagtatcaaggaaggacgttgctaagccatttatgaaaactctgaccccatgatccagtcacctcccattaggccccacctccaacattggagattgcawctgaacgtgagatttggttggggacacagatccaccccatatcagtgagccagtgatcaacttatgtttggcaggcaggacgagcatgctctgtagtggattagttctcatgattcctaacacctgaagcagctcttaattccttcttatttgattgttttttcttattga

SEQ ID NO: 206661 - DNA, 595 bp, Homo sapiens
tgctgaagtaggaggatggcttgagcccgggaatttgaggctgcagtgagctatggttgcactgcaccattgctagttgcatcaagaaattaaaaaatcaaccagaagggatcagtgtcaaatatggagaatttcttattttttcttttatgtacaaatwtgtgtaagaaatgaatttatataaaatacaacaaactggacaaaagtctgtaaaaatagctaaagtcaaaaataatttttgatttatttatttgtggggaaatttctgtattcttttgtagcaattaatgtcatggaaagacagtatccattgaaaatctagtttaggaattaaagtaagattagaaattagtctttaaaattgttttttgcctttgtagatcacatcaataggaatatgaaaacattattggcttcactaaaatatagtcttatatttaaggagccatttaagaaaaacacaattcaaaattatgaattaggactttaaacattgcaaaaatgctccctgcttatacttcacccagttttcaacttatatgatgtaaattttggaggaagagctcatataattccttgctttccattcaaattt

SEQ ID NO: 206662 - DNA, 595 bp, Homo sapiens
tgctgaagtaggaggatggcttgagcccgggaatttgaggctgcagtgagctatggttgcactgcaccattgctagttgcatcaagaaattaaaaaatcaaccagaagggatcagtgtcaaatatggagaatttcttattttttcttttatgtacaaatttgtgtaagaaatgaatttatataaaatacaacaaactggacaaaagtctgtaaaaatagctaaagtcaaaaataatttttgatttatttatttgtggggaaatttctgtattcttttgtagcaattaatgtcatggaaagacagtatccattgaaaatctagtttaggaattaaagtaagattagaaattagtctttaaaattgttttttgcctttgtagatcacatcaataggaatatgaaaacattattggcttcactaaaatatagtcttatatttaaggagccatttaagaaaaacacaattcaaaattatgaattaggactttaaacattgcaaaaatgctccctgcttatacttcacccagttttcarcttatatgatgtaaattttggaggaagagctcatataattccttgctttccattcaaattt

SEQ ID NO: 206663 - DNA, 368 bp, Homo sapiens
tatgcatatgctcccatgtgatttaaattatccctagattacatataatacctmatacaatgtaaactctatgtaaatattgattatactgtattgtttagggaataatgacaagaaaaaaagtctgtgcatgtttagtacagacacaaccattcatttttatatgtgaatattttccatcctcagttggttgaatcactgatgtagaacccataggtacagagagctgaccatacttcctaagtttgcagtttcttattcagaccttttgaccattgttctattgcagttactgtcattttcctatcaattaacaatgtctagacatttagacattgtattttctcaatattattcacttttttgcc

SEQ ID NO: 206664 - DNA, 479 bp, Homo sapiens
tccctttgtttccaatggtttcyctgagtatttttaatatttgccctctgcctcataagagtcgttaaaatttatctgcaaaacagtaaacaaaagtaaagaattaaaatggtcataatgatgatgagactttatatgtgtaaatcactaaacacaatgtctttagctcataattattcaataaatattttttctacccactttaatagatctacatgtttacaaaatcttctgcagaataaaactagatgagtaatattaatcaaattactagttgtaaaaaatcaattctaagcattccaattcactttgcattgatttgctcttgaaaacacttttaagggtttccttctggttcttttgtttccattcaaagcaccaagagacttgcatgcaataactgaggctttttatttttaattacagaagatttgtttgttcaggaatgtgtcttctgaaataaacctaaagttgatcat

SEQ ID NO: 206665 - DNA, 485 bp, Homo sapiens
gaaaatattcacaaagtattcatccagcaaaggcctaatatccagaatttatcaggaacttaaacaattcaacaaggaaaaccaatgccattaaaaagtcagcaaaaaacctgaacagatgcttctcaacagaagacacacaaggggccaaaaaactatgaaaaaatgttcaacatcactagtcatcagagaaaagcaaatcaaaactataatgagattacatctcacagcagtcagaatggctattactaaaaagtcaaaaaacaatagatgctggtgagactgcagagaaaaggggaaaaggaaggcttatacaccgytgaagagaatgtaaattagtctagccattgtggaaagcagtttagagatttctcacaggagttagaactattattcaaaccagaaatcccattactgggtatatatttaaaagaaaataaattttctaccataaagacaaacatgcacttgtatgttcattgcag

SEQ ID NO: 206666 - DNA, 371 bp, Homo sapiens
gctgacatacaggtagtggaggaagcamaaaaggacccattctcaggcccatttgtgttcggactggctaccggctcccttcagaagtcgacgccattttatcctaaagacactgtcagggctgacttttaaatgctcttttgatgtcaagattcacacggatttgatgatcgttttctacacttagggccctgtcgctcttctcttatattaccccatcaagttggtacttcataaagcctgaatcatcattactatcatcttaattgctaggcgggtttgggtgtaaatccaggtctggaggataaaatccctggggaattcccaggtgcgaagggagtggcccagactggggattcagcagcaggctg

SEQ ID NO: 206667 - DNA, 280 bp, Homo sapiens
agatcttcctccttccgccgctgacatacaggtagtggaggaagcaaaaaaggacccattctcaggcccatttgtgttcggactggctaccggctcccttcagaagtcgacgccattttatcctaaagacactgtcagggctgacttttaaatgctcttttgatgtcaagattcacacggatttgatgatcgttttctacacttagggccctgtcgctcttctcttatatyaccccatcaagttggtacttcataaagcctgaatcatcattactatcat

SEQ ID NO: 206668 - DNA, 592 bp, Homo sapiens
tgtacatcctcagttgctcaggtctaaagcagtgttttctaacagaaatatcacgtgagtcccaaatgcaacctgcatatataattttaagttttctagtagccacattaaaaaacataaaaaaataagtgaaattaactttaataatgtgttttattattaattattgttgtacattttattcagcccagtatattacccaggttactattatttcaacacataatcaacgtaaacaaattattgagatgctaactttctttggtgctaagtttttgaaatctgcaatatattttatactctacrtatctcagttaggactagccacatttcaggtgctcgttagccacagagactatggtctaccatattggacaggtctcagggatacaggcaggtcacttaaacatggatcattgctagtcactgagatcatcgccttctttcgctggactacttaaagtgctgatctaagactcagcatacagtgtttagaaatgttatttattttttcatgtagctaggtcttatttccctgaataaggacatatacaactaggatttacttctgttattttcccattagttcctt

SEQ ID NO: 206669 - DNA, 557 bp, Homo sapiens
attttcccataataagaaagatttcacaagccttgatgaaaatgtcaacttccgttcccttttgccaaaaaaatagcaagtttgcatggcagccttggttatctaatgatgcacagaagctctgattgtcagttatatatgcctttacttaatgaatataggaaagagaattcattattattccrtcaatgaagtttgacatcacagcatggatgtccattgattttgagcataacaaataccagattttaaaaaattaattgtgaaaaattgggaactgataaatcagaaattcatttgaatttaaaagcatctttaaagtattacaaccatggctggaaaaagcaaagacataaaacagacataatgaacttcctttgaagcattattgtgaagatgaaatactttctggtcttcttgttcaggaaacgcttgttcaattggattctgatttccacagaggtttctctttgtctaacttgaaatcgggtctgctaaggaatggggggagttcctaggcattttgtgtatcccatatgccattatccatagcccag

SEQ ID NO: 206670 - DNA, 557 bp, Homo sapiens
attttcccataataagaaagatttcacaagccttgatgaaaatgtcaacttccgttcccttttgccaaaaaaatagcaagtttgcatggcagccttggttatctaatgatgcacagaagctctgattgtcagttatatatgcctttacttaatgaatataggaaagagaattcattattattccatcaatgaagtttgacatcacagcatggatgtccattgattttgagcataacaaataccagattttaaaaaattaattgtgaaaaattgggaactgataaatcagaaattcatttgaatttaaaagcatctttaaagtattacaaccatggctggaaaaagcaaagacataaaacagacataatgaacttcctttgaagcattattgtgaagatgaaatackttctggtcttcttgttcaggaaacgcttgttcaattggattctgatttccacagaggtttctctttgtctaacttgaaatcgggtctgctaaggaatggggggagttcctaggcattttgtgtatcccatatgccattatccatagcccag

SEQ ID NO: 206671 - DNA, 621 bp, Homo sapiens
tgtgtttttccaacttcatatttttttccatctctgtgtttgtgtatgaatcattcctgaactaatttctaccagtaatgaattgaatatcaaagtcattctctattatagtgttatacaaccttcattaaatattgttagtatgctgttctttaattaggcccaattaagtgctttaggacacctcaatccttgactctagaatctctaaagtatatcttcaacagatacttgtataaaaatatttaatgactaaacctggaataaaaaacaatacctttatatacattaacttgaagatcagagaggctgtagttctcttcgccatcagtgaggctcactaagaatatgatcttacattctccctgtctgttctraattttgctgaccttcttatttgccagactactattttccagagtaaaggtaataagtggcaaggcattactcagtaattatgcacatatttgtaatatatagagaaaatgtcacaaaatttattattttaaaatgtgttacaactgctcaaagaaatcagagacaacacaaacaatggaaactcattccatgctcatggataggaagaatctatatcattaaaacagccatactgcccaaagc

SEQ ID NO: 206672 - DNA, 552 bp, Homo sapiens
gtcttttcaacaagtggtgatggaacaactgacattcacatccaaaaatttgaatcctgacacaaaccttacacacttcacaaaaattaactcaaaacagatcacaggcctgaatgtaaaacacaaaactatcaaacttatagaagataatacaggacaaaatctagatgaccaagggtttagatacaaccaaaggcataatacaagaaaaacagaattaataagctgtcctttaytaaaattaaacatttctgttctaataaagacactgtaaagggagtttctaaaaagccacaaaatagaataaaatatttgtaagagtcatatcagtaaaggattgttatgcaaaatatacaaagagttcttaaaactcaacaataagaaaacaaagaactgatttaaaaaatggcccaagggttgaacagatatctcatcaaataagcatataaaaagcatatgagaagattctccccattatatgttatcatggaaatgcaaattaaaatgacatgagctatcactacatgcctattagaatggccaaaatccaga

SEQ ID NO: 206673 - DNA, 625 bp, Homo sapiens
ttggctttccttctactcttttttcttctccttgatttacttttttaaaaaaattatggtcgtcttattgactaaatcttcaaatagatagatttcattatacactcttcttggacaatcttatctgcattaatatctgttttatatatattatatatacagataccatatatatatatatatctgtatctcatatatacagatagttcttgctttgcctggtgccgtgttaactgaaacaggtgcatattggaaccatgtstttgttttgtgcggtttaccataaaaccatgcaaagtaaggacacatttcctacatgtacaatatttagttaataagataccatgaaaaatgaggactatcttcattaattatatactccatctttattctgatccctacacctgaatacatagttttctaccagttatctccactggttttccaaaggtctttttcaaatttatatgtccaaatataactttttcagcctccatcgccagtcctcctggccatattctctatcacaagtaattagttaatcaacagaaaattattagtgtatattattcccaggcactatgctagatactactgatataatggtgatggtattttaacaaca

SEQ ID NO: 206674 - DNA, 567 bp, Homo sapiens
ttctctccttctgcttctgtcatcacatctcctgctgtgactgttgtcttcttgcatctttctaatgaacactttgaattacactgagtcatccagattatccaggataatctccccaggatatttaatttaataatacctgcgaagtcccttttgctatggaaggaaacatattagcagattctgaggaytaggatattaacatctttggaggtgtgattatttagcatctcacatagaaaaaggacttttgtattaataagaaaataacacacaactgcatataaatgtatgcaaaaaagatgagaagcaatctaggtaaaggtgcatatgggatactgacacccactcacatgagaaaaattgcatatactacttttttatcagatgacaatgatttgatatataaagaaaagaaggcacacacaaacactgtagggagaaggtgtaacctcagcattttttggaggagattttgggaaagaaatatacatgtgctttaattgagctattcaaggaacatttttttttcagtagaaaaattggggggaaatactccactgctta

SEQ ID NO: 206675 - DNA, 473 bp, Homo sapiens
gcaaattcctacttgacgatagccacatagatgatcagttgtcttgtggkattatatctggaagatcctcttaaataaaagtagctaccagaaagcttccctttgtgttccctgtgtgttccctgtgtaacacacaggcacacacacagatttttaagaaaaaacagaatgatttcccagctatcgaccctataataaattttagttaaggctgattgtaatgaacaatgaaacatttcaaaatgcagaggtttttttaagatgaaagggatttatttcattttaacttgtgtattattaatggagtacaagtgcaattttgctacattgatatattgcattttgatgacgccagggccttcagtatattcatcactggagcaacatacattgtacccaccaagcaacctctcattatccaccctcccaacccccaacttctccaagtccccattgtctatgattccatactc

SEQ ID NO: 206676 - DNA, 473 bp, Homo sapiens
gcaaattcctacttgacgatagccacatagatgatcagttgtcttgtgggattatatctggaagatcctcttaaataaaagtagctaccagaaagcttccctttgtgttccctgtgtgttccctgtgtaacacacaggcacacacacagatttttaagaaaaaacagaatgatttcccagctatcgaccctataataaattttagttaaggctgattgtaatgawcaatgaaacatttcaaaatgcagaggtttttttaagatgaaagggatttatttcattttaacttgtgtattattaatggagtacaagtgcaattttgctacattgatatattgcattttgatgacgccagggccttcagtatattcatcactggagcaacatacattgtacccaccaagcaacctctcattatccaccctcccaacccccaacttctccaagtccccattgtctatgattccatactc

SEQ ID NO: 206677 - DNA, 470 bp, Homo sapiens
ggtcaattaaatatgctttggtttaattcttttgaaagggaacacgggcttctaaagccttccatatcaccattcttaccataataaccctcactctacaggtaaggaaaccaatgtagagattttgcctaaacacaggatttagggaaacaacttcagagtaaattcttggtctcactgagtctattgtgatatatactagtggcagaacagcatttactacttaacctcctcactctgactgaaagatcacatcatccctggagaatttattttrtctcaaagtcagtatccgaatagttcctgaaaagtttgaaagtttccatctctttgtatatattcacaaaaataaatggctacaggtttgtgatatagctgactctcctctgactcaggtgtgagatgttttagtgaatattaactaggcagtccttaataggcttgcttgtggttttgtcactgggacatca

SEQ ID NO: 206678 - DNA, 585 bp, Homo sapiens
taggcagttgtaacacagtcagtggtaagaatttgtgtatctaaacagaagcggtaatgtgttgcactatgacrttacaatggctacagcatcactaggcaataggaatttttcagttccattatcatctttttttttttttaaaggcagtcttgctctgttgcccaggctggagtgcggtggcactgtctcagctcactgcaacctctgccttctgagtttaatgatccttctgcttcagcctcctaagtagctgggattacaagtgtgcaacaccaacgcctggctaatttttgtattttttttagagacaaggtttcaccatgttggccaggctggtctcaaactcctggcctcaaatgacccacctgccttgcctctcaaagttctgggattacaggcatgagccaccatacccagcccagttccattataatcttatgggaccaccatcatatatacaattgattgttgactaaaacatcattatacaacacataactatatatactatgctttttcctatacatgcctccctatgttaaagtttagtttataaattaggtacaataagatattaacaac

SEQ ID NO: 206679 - DNA, 506 bp, Homo sapiens
atagtggaagaaataaaacactattttttaaaaaaaatacattggttaagaaaaaaagaagattcaaattattaatgtcagggatgaaaataggaatatcactacagacctcagaaactacagagactaaatatatagtcaagtaaaatatgaacaactttattctaattaatttgaccatgtaggtgacttggttaaattctttgaattacacaaattatacatttataaaagacacaaattacaaattactcaagaataaacagaaaacccaaataggcttatttgtaataaagaatttgaatttatattttaaaaaccctcccacaaagaaactacaggctgagatttcttcactagtaaattctatcaaacatttctgaaaraaattaaaccaattctaagcaaaatgcttcacaaaacaaaagggttttctaaacttattttatgagaccaacattactctaatagcaaaatcaaacaatgacaatataagaacagaacac

SEQ ID NO: 206680 - DNA, 481 bp, Homo sapiens
ttggcctaaaaaaactcttaaacatgatgtctctccttttgtaggaattaatagcattaattacaaataataataygtcatttagatttatctatgaattgtactaatttttggcatacattttatttaatcctatctcatctgatattttggattttgtttttattttttgaagaataagaagttctagaagataggatgggtaaagaggctgggcgtggtggctcacgcctgtaatcctggctctttgggagaccaaggccagcagatcacctgaggtcagaaactctgggccagcctggccattacgacaaaaccttatccccactaaaaatacaaaacttagctgagcatggtggcgcatgcctatggtcccagctactcatgaggctgaggcacgagaattgcttgaacccgggaggcagaggttgcagtgagcagagattgcaccactgcaccccaccccgggcaacaaagtgag

SEQ ID NO: 206681 - DNA, 481 bp, Homo sapiens
ttggcctaaaaaaactcttaaacatgatgtctctccttttgtaggaattaatagcattaattacaaataataatacgtcatttagatttatctatgaattgtactaatttttggcatacattttatttaatcctatctmatctgatattttggattttgtttttattttttgaagaataagaagttctagaagataggatgggtaaagaggctgggcgtggtggctcacgcctgtaatcctggctctttgggagaccaaggccagcagatcacctgaggtcagaaactctgggccagcctggccattacgacaaaaccttatccccactaaaaatacaaaacttagctgagcatggtggcgcatgcctatggtcccagctactcatgaggctgaggcacgagaattgcttgaacccgggaggcagaggttgcagtgagcagagattgcaccactgcaccccaccccgggcaacaaagtgag

SEQ ID NO: 206682 - DNA, 593 bp, Homo sapiens
caattcaaaacaacaataacaccaccaacaaacacctaatgtgttctactggcaaggactaataatagtgtcagagcaaaagcaaagaaaaaatatatataaagataaatagaaaaattacagatgtgtggtttaataaaaaccaatatacactttaaatgtgatgctctagaacactgactttaacctttgtctcaatttccttatctgccaaacagaattattataatagctaaataaaaataaatcttatgtagcatttttaatacagtacctggattatatgttaagtacttagtcaatatcttctgatttattacaacttttattcctatgatcctatatagtaaataattgaaaatgacattaggtatatttgcttaaaatgtaagtattttatgaatgcatcatattttacaaagtatatcttttatagtcatatgattttgtttttttattctaataattctgtatgtgcaaaaaagtggaaaatgtatttcctgttctgaagcaaatcaaggagaayagacaattaagtgctaaattgagcataatattatgagggcacaatactcagagaaggtttcagaaaa

SEQ ID NO: 206683 - DNA, 582 bp, Homo sapiens
cggtcatcttgaagctatcctctttcatatcttttccttatcacatcatatctatttccctataggtcctcaaatttattagcacagagttacagtcttaggaattcaattcctctcattctgaactgtgagtaattgtgattgatgttgttatttcktccttctttcctctctttccttccttactttcatcttttcttttccttctttttttagttcttcccttcctttcaatgaagcacagtagaatgtttatttttttaaatgcaacatccctcacttgaagtctttcaaagactttagaataaagtccaaattatctactaatataaaacaaagtgcttctcaggttggtatttatctacttcggtatctcactgccatcctaattctatgctgaatactggctttattttatcatttaatctttgcacatgaagttaaaatatccttcactccctctatatccattctctgcctataaatatcctgctggttccaagatccattccaacttgtacttgtctgggaagtcttctttggcggtcctaaaggtggaacctcatcctcttgggaattctc

SEQ ID NO: 206684 - DNA, 505 bp, Homo sapiens
ctgcaacctccgcctcctgggttcaagcaactctcctgcctcagcctcctgagtagctgggattacaggctcccaccaccatgcccagctaatttttgtatttttagtagagacagggtttcaccatgttggccaggctggtctcgaactcctgacctcaagtgatccacccacttcggcctcccaaagttctgggattacacgcatgagccactgcacctgggcacttatttcaaagtttgtctgggtcagagatgtccatgaaacactcgcatatatgattgttgaattagaatgattttgkagtagatctgtactgaagatagagatactggaagctattggatttcattaaatcacccaaagaaagtgagaagatttgtgtccagagaagtaaaaggaaatccaggagaaaaccatctcatgaattccacgggaagacagagttttaaatagagagtatttaacagaagttaaggaagatcagaatgaaagtgaatattga

SEQ ID NO: 206685 - DNA, 511 bp, Homo sapiens
atgtctttgagttctttgaactttgcttttgcagtatctaatctgctgtttatctatttcaatgtatttgtcatttgaggtgttttttttttttacttttatatgaactccattttgttctttttgatatcttccattgctttcttcataatattcctgttcctctaccttgttaacatatggaacattcttataatagctatgtaacagtcctgttctaccagttccatcatgcgtatattttccaggttattgatattrttcacctgattataggtcatattgtcctgtttctttgcatcctggtcattgtttactggattcgtgaaattttacatttcatattgttggatgctgtgttgtattcctttaaataatattatattttgttcgcacatggattttagttatttgcaattggattcattcaagacttgctcttaagtatctagtgggtccatagcagctttttgtctaggtctaatttgtcaccagttctaaagcagtaccc

SEQ ID NO: 206686 - DNA, 617 bp, Homo sapiens
gagcccacttttgtttatttctagctgctttggaaataagcagttttcttcatcgttgtctgtttttttattctcrcatcctcaggaagcttcattgttctgggcactgtagagaataaattgtccttgaccctagagtgcttgaggatgacaccctgagccacctgggtgccagatgggcacggttgatactcaacacttacacattggtccatcttctccagctgtttatagctggagtccattctgattggagggcgcccatgccatagttactaaatggttttaatatcccccctgttgatgggcatcgaaggccacagttacagaccttcaggacagacatctgtataccttgatgggcatatggatggatgatacatatcaacagttgccctgatagttatcctgacccagcaccaatatacaataacacagatcccctgactagagccgcgctggtgcacacagtagcctaagcaggcataagcagagctaactgaaagatttagggatcctgaagttttccacaccaaacaagacactagtgctttagggagagcagggggcaaatatttaggaggtggtagagctaacaatgttccccttgccttctc

SEQ ID NO: 206687 - DNA, 373 bp, Homo sapiens
tctattcttggccttggcgggcttgatgtggaggcatgtgtgggtgttcycttttaatttggggtccagaactgtctgaggcctggaccggtaattatgagagcagcaccatttatggaaacagcccttgaagcaagccagtgatgagacccggctggaaatacctcagcatggagccctgggctcgcctcgaggcggtgctgagatttctgggtgggagaagccccttcaggacgcagaaccaacaggtcatgagtcccgccctcccttggcctgcagaggctgtggggcccaagccttcttttgggtctgaagtgcccctgccccaccgcctttgctgcctgtgggaccagccaggcaggcccagcccatg

SEQ ID NO: 206688 - DNA, 373 bp, Homo sapiens
tctattcttggccttggcgggcttgatgtggaggcatgtgtgggtgttcccttttaatttggggtccagaactgtctgaggcctggaccggtaattatgagagcagcaccatttatggaaacagcccttgaagcaagccagtgatgagacccrgctggaaatacctcagcatggagccctgggctcgcctcgaggcggtgctgagatttctgggtgggagaagccccttcaggacgcagaaccaacaggtcatgagtcccgccctcccttggcctgcagaggctgtggggcccaagccttcttttgggtctgaagtgcccctgccccaccgcctttgctgcctgtgggaccagccaggcaggcccagcccatg

SEQ ID NO: 206689 - DNA, 373 bp, Homo sapiens
tctattcttggccttggcgggcttgatgtggaggcatgtgtgggtgttcccttttaatttggggtccagaactgtctgaggcctggaccggtaattatgagagcagcaccatttatggaaacagcccttgaagcaagccagtgatgagacccggctggaaatacctcagcatggagccctgggcycgcctcgaggcggtgctgagatttctgggtgggagaagccccttcaggacgcagaaccaacaggtcatgagtcccgccctcccttggcctgcagaggctgtggggcccaagccttcttttgggtctgaagtgcccctgccccaccgcctttgctgcctgtgggaccagccaggcaggcccagcccatg

SEQ ID NO: 206690 - DNA, 602 bp, Homo sapiens
agcttcagcatccggccaagttgttgctgtgtttgtatttgtacagtattgagaaagtcctgattcagaccaataagtggttggaaatgctaaaaggttttttgttttggtttgttttaaactaaaggccttacaatctcaagacgctctttgatggaacagatcacaggggaagccttattctgaggtttgctttaaaaaaatctgcagcacaagctagtggccttcaagctgctaaaatgtccacctaatwcattagagtgagttgggttttattacacatttttaattgtttaaaacatagtccgaagaagaaagaaaataaattggattcacatgtgtgcagactccctgaaacatggggcttggggaagctagtttggaaatccctgacccccttgagtaaggtccagactccttaacatgatccccaaggccctctgtgggctcttccacatccctccagctcttcttccaacaatcctgcattcttcattcagtacttattcaggaacacagtcctgagcttcagagacatctgcatgacttttgcctgtcctgtttccctctccctgggaaactccacctactcaggctttaag

SEQ ID NO: 206691 - DNA, 562 bp, Homo sapiens
ggtgatgagggggacattcacactgcagaagagtaaggacatcccagcaaggtcatcctgcagccaagacccaggtcagttctggagaagctgaaggcgtgggaaaacccgccagccttgggaggctccccaggccccagagtgaccccgttcttggagcactggtcctttgtccccacagtgagagggtggaccccatcaccttccacagctgtgctgacacctgcccacccacccctcatacaaagtcacttaggtggccaaggaaaaagtaacctcagatcccaaagtgtttcttccaggcccggaaggtgcaggaagcggccagccactgattgcccggctggcacctgcagcaatgatgctattctcactcatccgattggtgagcagatttttctgattcttygattcttctttgtgatatttaaagaaagcctatgtgacagtgccactatcacctctccaaattcttgctgtctcctcatgtcaacatggagtgtgcagtgctaagatgtcttccacggctgggctttgcctccatatctgtgggcaggatatc

SEQ ID NO: 206692 - DNA, 533 bp, Homo sapiens
ggtgatgagggggacattcacactgcagaagagtaaggacatcccagcaaggtcatcctgcagccaagacccaggtcagttctggagaagctgaaggcgtgggaaaacccgccagccttgggaggctccccaggccccagagtgaccccgttcttggagcactggtcctttgtccccacagtgagagggtggaccccatcaccttccacagctgtgctgacacctgcccacccacccctcatacaaagtcacttaggtggccaaggaaaaagtaacctcagatcccaaagtgtttcttccaggcccggaaggtgcaggaagcggccagccactgattgcccggctggcacctgcagcaatgatgctattctcactcatccgattggtgagcagatttttctgattcttcgattcttctttgtgatatttaargaaagcctatgtgacagtgccactatcacctctccaaattcttgctgtctcctcatgtcaacatggagtgtgcagtgctaagatgtcttccacggctgggc

SEQ ID NO: 206693 - DNA, 600 bp, Homo sapiens
ggggattttttttggttggtaggttaattattgattcaatttcataactagatattggtctgttcaaagttttaattcttcctgattcaatcttrggagatttcatcactgttttttttcctgatcatttggtgtagaagatgattaattttgctgatcttctcaaagatccaggtttttgtttcattgattgtatgtttttgttttgttttggtttttatttcattgttttttcttcttatctttattattttctctcttctgcataatttgggttttcatttgctctttcctttttagtttttcttttttttgtggaagctgaagtttttgatttgagacatttcttcttttccaatataagaatttatcagtttctgcctaagtactgctttagtggcatcttataaattttgatatgttgtttttatttcatttatttcaaaatactttccaatttctttttttttcctttggcctatgggctatttagaagtaagttattcagtttttgaatatttggatattttccagatatctctttgttactgatttctaatttaattccatcgtgagcaaacatttgtctgagttgaattc

SEQ ID NO: 206694 - DNA, 300 bp, Homo sapiens
caggattcttttcattttttatccaagtagcctaaatgacacaagaccagtatccacatttatttccacacagtcctaattcatgacaaatgtacttattttctgccatatagcctcttttttaattaagaaaaccatatcctatttctaacttattactattaataacagcacaggcatcaaatttcaagatgactggtttgggcacccctttttcttctgttttggctaacactttacacgtatcatttatgagcycccagcagtcctcagtccttaatcttattttaaaaactgtgg

SEQ ID NO: 206695 - DNA, 542 bp, Homo sapiens
tttgctgccagggcccttagacatgggggccaggctttggaaaccccatctagttgttttgagagataggccactggccttggccagggcctcacagtctgggttaaaactccaactgtcattttctttctttctgacacatagggtgtaaagggttttgtcaggtcgggtagccccagggctggggccaacatgagtttttcttttaactcatgaaaagcttgttgctgttggttgtaatagatgtattatccagtctatatttttattaactgtcacccaccaaaatattgactaaaatcctgctgctatttgatttcaagctttaaattgatctggtattctccatgggactccaattgtgtctaagtggacgtgagagtcaaaagatccataaggggcttctctcgctttatgatgtcttatttttcctccctctggttgatgaaatgccagggtgaaagagatagccaattggactaaagtataagtgccactccagttattcagcagagtgyccagtaaaggtccaccacaatacc

SEQ ID NO: 206696 - DNA, 586 bp, Homo sapiens
agaaaaaaaaaatgaacattttatgtgggataaaatattctaaccaatgaatgaatgaacatcagtatgctaataacagtatttcattgagaagagaattactgcagaaaacttgagaagagagagccatggcatccattacttttattcaacatacagttgagcaccaaccctataacctgtactgagctaggcactagggaatataatgttggaaaaaacaacctcattcatacatacactctggaaacatacaagctcattggggatacagagtaaataattaaggtggtcataaaaggccactttggcaacaactggtaattactttcacttcatttttataggaaataactcttaaaaccagctacaaataaagtattcatacagacaaaaagatstgcttcagtccttaccacgtttttataacataaaatagccttggacaaatattgagtggtatcctataagaattccagaaaagtattctctctctaaaagtcagcaaagtcttgggcatgaaatcctataataagtcaacacaaccacagcaaagaaatcaactcacaattgttactcctgttta

SEQ ID NO: 206697 - DNA, 600 bp, Homo sapiens
tgactgaacctatgaattaaagatattcacacagaagaagaaagagcaagagcaaaaagtttggaaaattaatttcaggaaataactgaggaaagcttcctagtctagcaaaagatatagataccctgatacaagaagctcagtaaatacattgcaagaaggacctcaccatgacatagaggcatcagactaagatcatcaaggaaaaaacctaaaatcagcaaaagtgtctagtcatctataaatgataccccactagactaatagcagacttcttagcagaaactctatgagccagaatggagtgggattcttttatcaaaagtggttaaattaaaaaaaaaatgccaaactcaaattttgtattctctgagaagatggataaattcctcgacacatacactctcccaagactaaaccaggaagaagttgaatctctgaatagaccaataacaggagctgaaattgtggcaataatcaatagcttaycaaccaaaaagagtccaggaccagatggattcacagccgaattctaccacaggtacaaggaggaagtggtaccattccttctgaaactattccaatcaatagaaaaagggg

SEQ ID NO: 206698 - DNA, 478 bp, Homo sapiens
gaattcattttcaaacttaccacctggaaatctgtttctttatatcccataaggtatcagctttttctaagagaattggggagttccctacaattgtaagcctaatatttggtgattacagtattgagaggtgacaatgtgctagcagcccttgctcactctcagtgcctccttggcctcggcgtccactctggccatgcttcaagagcacttcagcccrtggctgcactgtgggagcccctctctgggctggccgaggccagagccagctccctctgcttgccgggaggtgtggagggagaggcgaggcgggaaccggggctgcacgtggtgcttgcgggccagggcaagttccaggtgggcgtgggctcggcaggccctgcactcttggagtggccctgggctgtgaggggcttagcacctgggccagcagctgcagagcgtgcatcaggtcccccagcactgccggcccgcctgc

SEQ ID NO: 206699 - DNA, 565 bp, Homo sapiens
gtaattatgataaaatcatgacagagtgttagacaaatgtctgagttagactgggaaaagttgacttagacattttggaatctacaaaaagaggacatagctcttggcaccagaaagtctaagatggttgaaaaacatttggaagtgctgttggtcatgaatgtcataaagactgtaggacactgaaaataacaagaactaacatgtttgatgtgttaggtaatatcctgagtgctttacatcattcatttaatcctcataacagccctaagaagtagcaattattgttagtcccattttacagagtgagaaactcaggctyatcaaatttggataacttacctaatgtcaaatggcctataagagacagagttcccaagcccaacttttaaccacaatgctaaatgccttcctaacttgcactctttttgctttaacatcttgggggtaggtgtgggtaaagtagaaggttcctgggagctataactacctgagtcaaaatgcccttctttgagacaagcctaagataacacctaactcttcccaatacggatgcttgacttca

SEQ ID NO: 206700 - DNA, 561 bp, Homo sapiens
ggactccaccccagaaacttcaagaaagaatatttttcctttctaacacccccacctaaaagtcatctctaataaacccagctggaaragtgccttgcagatgcaaagaagccctgttggtatctcgtgggcagcactttgaatcaggagcatgcaatttagtttaacctgtagaccactgctaacccaagacagaacaggtaaggctgctcatgaccttggcctgtttcctgctctcctccttggcaatttttcctctccagagtcccttattgcttctctcttgcagtaatggaaaagccctccttgacctctgtcccaggagtgggagaccgaacactcttccttccagccaggggcttcggtgggcagcattagcagtggaaacacagccttgctcatgcagaaaaccccaagggaaatatctccaatgcccaggcacttaaaccttgcacttaggttcagatgtcaagaacgagagcctgcacatcccggatctgctaatagagtcggcaggattagacaaaccctgaaattacacagactctggagacagaggga

SEQ ID NO: 206701 - DNA, 457 bp, Homo sapiens
tacaaaatttacatacaaggggaataattggatcccaaggtggcaagggccaagtggcagcactcaactgtcaaaggcaaggtgagagtagctactgtaatggacagcaaaggcaaagtggcaatcagaatactctgactctaagtgaagtaactcaggaatggaaaaccaaacattgtatgttctcattgatatgtgggaactaagctatgaggacgcaacggcataagaatgatacagtggactttggggactcaggggcagtgtgggaggggggcgagggatgaaragactacaaatatggtacagtgtatactgctcgggtgatatgtgcatcaaaatctcacaaatcaccactaaataacttactcatgtaaccaaataccacctgtaccccaataacttatggaaaaaataaaaataataataatttaaaaaagaatactctgactcatgt

SEQ ID NO: 206702 - DNA, 610 bp, Homo sapiens
tttatctgctatggggacaaacgatactaggctgggagcttttggggtttgggcctgggtctcatctgtcactgtatccccaagtgttgagctcaggatctgctcwaagaatattaaatgtgtgtttaatggacaaatgaatgaatgaacaaatgaatggaccgatagtcaagtcctggctgaacctggtgtttttccgattaatgagaaacttacatggccctgagagatcgtagagataactttatcagactcagagcaaatctgaacttatttatcctcaaaatactctgtgtggtagggaagaaagtacacattataactgtttcacagatggcaaattgaggtagatgtgggatgtgacctgctgtgtgtctttgggcaagtgacaaccccatgagcttcagtgttctcaggcaaaaactgtgagtaaatatcagtgcccactgtacctcattgtgttgtttgaagactaagtgggataatgcacacagagtattctgagcatgagagcaatgctcagacatatttaccgtatgtatcttgcagctatgtcttcatttaatccacacaatcttatgagtttgtatccatagtttacagataagga

SEQ ID NO: 206703 - DNA, 610 bp, Homo sapiens
tttatctgctatggggacaaacgatactaggctgggagcttttggggtttgggcctgggtctcatctgtcactgtatccccaagtgttgagctcaggatctgctctaagaatattaaatgtgtgtttaatggacaaatgaatgaatgaacaaatgaatggaccgatagtcaagtcctggctgaacctggtgtttttcygattaatgagaaacttacatggccctgagagatcgtagagataactttatcagactcagagcaaatctgaacttatttatcctcaaaatactctgtgtggtagggaagaaagtacacattataactgtttcacagatggcaaattgaggtagatgtgggatgtgacctgctgtgtgtctttgggcaagtgacaaccccatgagcttcagtgttctcaggcaaaaactgtgagtaaatatcagtgcccactgtacctcattgtgttgtttgaagactaagtgggataatgcacacagagtattctgagcatgagagcaatgctcagacatatttaccgtatgtatcttgcagctatgtcttcatttaatccacacaatcttatgagtttgtatccatagtttacagataagga

SEQ ID NO: 206704 - DNA, 610 bp, Homo sapiens
tttatctgctatggggacaaacgatactaggctgggagcttttggggtttgggcctgggtctcatctgtcactgtatccccaagtgttgagctcaggatctgctctaagaatattaaatgtgtgtttaatggacaaatgaatgaatgaacaaatgaatggaccgatagtcaagtcctggctgaacctggtgtttttccgattaatgagaaacttacatggccctgagagatcgtagagataactttatcagactcagagcaaatctgaacttatttatcctcaaaatactctgtgtggtagggaagaaagtacacattataacygtttcacagatggcaaattgaggtagatgtgggatgtgacctgctgtgtgtctttgggcaagtgacaaccccatgagcttcagtgttctcaggcaaaaactgtgagtaaatatcagtgcccactgtacctcattgtgttgtttgaagactaagtgggataatgcacacagagtattctgagcatgagagcaatgctcagacatatttaccgtatgtatcttgcagctatgtcttcatttaatccacacaatcttatgagtttgtatccatagtttacagataagga

SEQ ID NO: 206705 - DNA, 649 bp, Homo sapiens
gtatatttcatcataataaaaaaaatttaaatcacgtttgtgtttgcctttggaaggcatgatgcaattcttcttgccagaaagtttcctttttcaaaggtcagccagaacaatatctaaatgccttagtactccctgaaaaaattaaaaaagcaacccagaaggttgctaggaaatatgaaatttaacttgttctgagatacacaaataagcaatttgcagaagaaaaaccagtggccaatacacctatgaaaaaaattctgaacctcactataataatggcagtgctatggtttggctctgtgtccccacccaaatctcacctcaaattgtaatccaggtttcaagggagaaacatgtagggaggcaattggatcatggtggcagtttcccccattctgttctggtgatagtgagtgagtkctcaccagacctaatggttttttaagtggcagttccccctgctctctctcttttgctgccctggaaagatgtaccttgcttccccttttccttctgccatgattgtaagtttcctgagacttccccagccatgtggaactgcaagtcaattaaacctcttttctttagaaattacccagtctctggtagtatctttatatcagtgtgggaacagactaatacagac

SEQ ID NO: 206706 - DNA, 649 bp, Homo sapiens
gtatatttcatcataataaaaaaaatttaaatcacgtttgtgtttgcctttggaaggcatgatgcaattcttcttgccagaaagtttcctttttcaaaggtcagccagaacaatatctaaatgccttagtactccctgaaaaaattaaaaaagcaacccagaaggttgctaggaaatatgaaatttaacttgttctgagatacacaaataagcaatttgcagaagaaaaaccagtggccaatacacctatgaaaaaaattctgaacctcactataataatggcagtgctatggtttggctctgtgtccccacccaaatctcacctcaaattgtaatccaggtttcaagggagaaacatgtagggaggcaattggatcatggtggcagtttcccccattctgttctggtgatagtgagtgagttctcaccagacctaatggttttttaagtggcagttccccctgctctctctcttttgctgccctggaaagatgtaccttgcttccccttttccttctgccatgattgtaagtttcctgagrcttccccagccatgtggaactgcaagtcaattaaacctcttttctttagaaattacccagtctctggtagtatctttatatcagtgtgggaacagactaatacagac

SEQ ID NO: 206707 - DNA, 556 bp, Homo sapiens
ccacagggcatgggatttggcctctgtgagctactgccacatgggctagctgacacaacctgtaagtgagggagagttaatgccctgtggggtgaaccttggtcactggaagacaggatgtaaaaagcagttgggcagatccattttctctcccttcctctcttcaatggactattcttgaagcatggtttctctgcacagcctatcctaaggacatcacatgtggatgagctgatgtatctgytaatggactggctgtgtctctttgtggctcacagtgaagtggtggccagtgtggtaatgcatcatcttgcacggttttccctgcttctccatccttcactttccatgcccttgaattgtacctcccaagtaatgtattagctcttcatccttgcctcaggctctgtattctgaggcaagctcaagcaattagcatgatgttcagagatctatatgcaagccattgtggtgctgagacagtgaaaagttcagcaaaatagggtagcaaataaataaatgatggtacatccacagtatgaaatattacatgttg

SEQ ID NO: 206708 - DNA, 426 bp, Homo sapiens
tgctcatttctttctcagattctgcttcctaggaaacaacttgaaatatctggcaattcttggatagaaagccaggctccatgattcatctttttattcttccttctctccttgctttctttcattcttttgttcattcattcattcatatgtgcattaatgtaatgaacaaaagctaggagccctgcaytaaccagaaattcatttcaaggcactgggtttagcagttttatgaagatgtttgtggatgtggtttcctttgcattcatcttgtttggggttcaaggcactccttgaagccaaagcttgatgtcttttgtctcttttggaaaattcttgatcactatctcttcaaattttgcttctcttccttcttcctctcctctccctctggaatctcaatcaaaaagaccttttcaatgggtc

SEQ ID NO: 206709 - DNA, 594 bp, Homo sapiens
aggaagttctattcagcttcttagtctctcagccgccattttggaattagcaagtatcttgagaggaaatgcagtattgaactttgggctctttcctctgtgcctcctttctttctggagtcatggcctgatatggtttggctgtgccccaccccccaaatctcatcttgaattgtagctcccataattccctcatgttgtgggagggacccagtaggagataattgaatcatggggttggcttcccccatactgttctcatggtagtgaataagtctcataagatctgatggttttataagggaaaacccctttcatttggttctctcattctctcttgtctgccaccatgtaagaatgtaagacgtgcccttcaccttccaccgtgattgtgargcctccccagccacatggaactatgagtccattaaacctctttttctttagaaatcactcagtctcggatatgtctttatcagcagcatgaaaacggactaatacgtggccacactcaagccctcacttccttggtagcttgataataccttcaaacatttttaaaaatatattttatccagcttttccagttattct

SEQ ID NO: 206710 - DNA, 560 bp, Homo sapiens
ctgcctttactgagattttttttttttttaattagctgggcatggtgacatgtgcctgtagtcccagctacttgggaggctagggtgggaggatcccttaagcccaagagtttgaggctgcagtgagctatgactgcaccaccgcactctagcctgggtgacagagggggaccctgtctccaaaaaaaaaaaaaagttccaaaacttcctacaaagtgaacagtcttcaacttttattttccttttctaatgaggtaaaaaggtaggctgaaattaaggaaatgaatatttgtagaaaatgtcagctcaragtaacagctgcaggcttggatagattgccagtgctacctttagattctcagaaagaaatagaggtagtgttattcatgccatctattttcttctttatattttctgtgtctttcaaattgcctaacatcagaatttatggtttttataatagagaaggaaaagtctttaaaatcttaggtttagccagtatattttacatatgggcatagggatactggaaggatactcaccaacatgaaaacaatgtt

SEQ ID NO: 206711 - DNA, 594 bp, Homo sapiens
gctggggacccttgtggtctaggcaatggggaggctctacactaagataatgggatgggaatgaagggccgacatgcttgatcaagataattccactaagaagtaaacaggatctagccactggttaggtgttggcaggacgtcagggataaatggaggaatagggttgtggtgaaaagaaagcaggactctctgttgatttttgtggaaaaagggtggggttttatttgatttaatctggtaattttactgagaatctgaatactttgattgtctcttttaaggtcttgaaaccttaataatttgccatctctgctcctgttcctcttctttttgcatgtcccctcaggccaccagtgggtttctgagactaacaatctgaagtaatttttgtaggcgtcgttgaatatgcatcattcccacttcctatagaggagagatagcaaactggaaactcagcagccaagtacagcagcccatagrcatgtttgggctcagtattttgttttgttttgaacttgagttaacatttttaaaaactgagacttccccaaactctgaatttatcgccttttttgagaagtcagaagatct

SEQ ID NO: 206712 - DNA, 499 bp, Homo sapiens
ttatgagggctctgccctcacaacctcatcacctcttaggtcccatctcccaacactgttgcattggggattaagtttccaacacatgaacttctgtgggcacacattcaaaccacagcatggtacagccattttggaaaacatttataaaaactgaatttgtctatatcctgtgacccactttttcactcattggtgtatgcccaccaaaaatatgtagtatgttcaaaagacatgtaygagaataatcacagcagcagtatttgtacagccccaaactgaacgccatccaaatggcctacagtattagaatggatacattatagcatatccacatatggaatcctacccaacagggagaatgaagatctacaacatgccacattacagaaagatctcacacatttaatgttggtcaaaataagccagacacaaaaagagtacacagtgtatgattccatttatataaatgtgcaaaggagtaactgcgagggggctt

SEQ ID NO: 206713 - DNA, 499 bp, Homo sapiens
ttatgagggctctgccctcacaacctcatcacctcttaggtcccatctcccaacactgttgcattggggattaagtttccaacacatgaacttctgtgggcacacattcaaaccacagcatggtacagccattttggaaaacatttataaaaactgaatttgtctatatcctgtgacccactttttcactcattggtgtatgcccaccaaaaatatgtagtatgttcaaaagacatgtacgagaataatcacagcagcagtatttgtacagccccaaactgaacgccatccaaatggcctacagtattagaatggatacattatagcatatccacatatggaatcctacccaacagggagaatgaagatctacaacatgccacattacagaaagatctcacacatttaatgttggtcaaaataagccagacacaaaaagagtacacagtgtatgattccatttatataaatgtgcaaagragtaactgcgagggggctt

SEQ ID NO: 206714 - DNA, 394 bp, Homo sapiens
ccataggcagcaatgtcaaaaccttaaagataaccagttatattaagaatatccaactaggacttctccaagaccatacttaccagacattcttcctaatgtaatctttccctggtgcagctatcctactgaatatgtggacatatcatttgacrtaagtatctctgtctggtagcagaattgatactctggtattctcactaatctataacccaagtctgctctgagagactgatcgagttcagggccttgaaaagttgattactagactctagcaaatatttaccaaggccatctaataatgggtgtttgagaggtcagctgacaccccagagagcatttcaattttatcttgccctaacttcagcataggctaaattacccgttttttcaa

SEQ ID NO: 206715 - DNA, 441 bp, Homo sapiens
gaattcgaatatagcaaaacattaaaattggtggatctagctgaagaatatatgaatgtttatcatattattcttaatttttattgaagtatcacatacttacagaaaagtatgcagatcataagtgcctattatagagctrttcttgatatttttctgtaggattgaaattttttaaataaaattttggggaaaagaaaactggtcacagactaggttctatatactgtcagttagtcacacatgcctaggcgagcggactctgaaactaatgtcactgctaccaggtatctcctctacttggagcagatagctgaagtcaaggtaaacttcttaggattaaattttacgcctttctagcacttgccacagcctcaaactctctatcgcataacacaacgaaacatcatagctctcctgtgtcttgtgagaccgtcctac

SEQ ID NO: 206716 - DNA, 512 bp, Homo sapiens
caccttggtgctttctttcttggaaagttgttactwttttattcaatttccttaacagatacagacctattcagattatctgtctctccttgtgagctttagtaattagtgtttttcaaagaatcaatccattgcatctaagttatcaaatttaacttacataaaagttagattttatttaagcatagaattgttcatagtattattttattatcctttaatgtccatggaatcagtacatgagcctgcttctattctgatattggtaatttatcttttctcttttttctgattaatctgcctaaatctttattagttttattaatctttttaagaaacaatttcattgattttctctattgttttcatgttttcaatttctttgatttctgctctaagttctattctttcttttcttctgctttaggctaaaactgctcttctttctctggttccctaaggtagaaacttagattattttagatcttttttcttttctaataaacgaattc

SEQ ID NO: 206717 - DNA, 512 bp, Homo sapiens
caccttggtgctttctttcttggaaagttgttactttwttattcaatttccttaacagatacagacctattcagattatctgtctctccttgtgagctttagtaattagtgtttttcaaagaatcaatccattgcatctaagttatcaaatttaacttacataaaagttagattttatttaagcatagaattgttcatagtattattttattatcctttaatgtccatggaatcagtacatgagcctgcttctattctgatattggtaatttatcttttctcttttttctgattaatctgcctaaatctttattagttttattaatctttttaagaaacaatttcattgattttctctattgttttcatgttttcaatttctttgatttctgctctaagttctattctttcttttcttctgctttaggctaaaactgctcttctttctctggttccctaaggtagaaacttagattattttagatcttttttcttttctaataaacgaattc

SEQ ID NO: 206718 - DNA, 512 bp, Homo sapiens
caccttggtgctttctttcttggaaagttgttacttttttattcaatttccttaacagatacagacctattcagattatctgtctctccttgtgagctttagtaattagtgtttttcaaagaatcaatccattgcatctaagttatcaaatttaacttacataaaagttagattttatttaagcatagaattgttcatagtattattttattatcctttaaygtccatggaatcagtacatgagcctgcttctattctgatattggtaatttatcttttctcttttttctgattaatctgcctaaatctttattagttttattaatctttttaagaaacaatttcattgattttctctattgttttcatgttttcaatttctttgatttctgctctaagttctattctttcttttcttctgctttaggctaaaactgctcttctttctctggttccctaaggtagaaacttagattattttagatcttttttcttttctaataaacgaattc

SEQ ID NO: 206719 - DNA, 383 bp, Homo sapiens
agaatgcactatatagtcagtgtttagtatgttctaggcactagattaattactttatatatactctgactaatgcccatgccaacttttcagagaagcaggatatttatcccttctttgtggctgaaaagacttaaagactaagtatctkaagtaatacaattagttacttctgagaaactgggaggaaaatccaggtttatagggtttcagaatgggtacagttaactagcaggccattctccctgtgataatgaagtgagctagtataagtgaagtgtttggcactaccctaggagtgagtgggtcctccatagagggttgttgaaattatctttcctcccaaggtgaagccgttttcaccttctggagacaatcattca

SEQ ID NO: 206720 - DNA, 383 bp, Homo sapiens
agaatgcactatatagtcagtgtttagtatgttctaggcactagattaattactttatatatactctgactaatgcccatgccaacttttcagagaagcaggatatttatcccttctttgtggctgaaaagacttaaagactaagtatcttaagtaatacaattagttayttctgagaaactgggaggaaaatccaggtttatagggtttcagaatgggtacagttaactagcaggccattctccctgtgataatgaagtgagctagtataagtgaagtgtttggcactaccctaggagtgagtgggtcctccatagagggttgttgaaattatctttcctcccaaggtgaagccgttttcaccttctggagacaatcattca

SEQ ID NO: 206721 - DNA, 383 bp, Homo sapiens
agaatgcactatatagtcagtgtttagtatgttctaggcactagattaattactttatatatactctgactaatgcccatgccaacttttcagagaagcaggatatttatcccttctttgtggctgaaaagacttaaagactaagtatcttaagtaatacaattagttacttctgagaaactgggaggaaaatccaggtttatagggtttcagaatggktacagttaactagcaggccattctccctgtgataatgaagtgagctagtataagtgaagtgtttggcactaccctaggagtgagtgggtcctccatagagggttgttgaaattatctttcctcccaaggtgaagccgttttcaccttctggagacaatcattca

SEQ ID NO: 206722 - DNA, 383 bp, Homo sapiens
agaatgcactatatagtcagtgtttagtatgttctaggcactagattaattactttatatatactctgactaatgcccatgccaacttttcagagaagcaggatatttatcccttctttgtggctgaaaagacttaaagactaagtatcttaagtaatacaattagttacttctgagaaactgggaggaaaatccaggtttatagggtttcagaatgggtacagttaactagcaggccattctccctgtgataatgaagtgagctagtataagtgaagtgtttggcacyaccctaggagtgagtgggtcctccatagagggttgttgaaattatctttcctcccaaggtgaagccgttttcaccttctggagacaatcattca

SEQ ID NO: 206723 - DNA, 517 bp, Homo sapiens
aaagggtagtcaggggagggagccaggggaaaagcagtgaagtacccccatctatattcatttgtctctgcttaagttgattttaatgtcagagtttgcttacactttttaaactgtgtaacatatttcaaagagacaagttcaattttcaagtcaaacagcagataatggcatcagggatgcctgcaaccacaaaggaaatatacataaagagggcaaaatgcaagttaaatgtttgcataagcagccagatggaaatgagatttcaaatggtcccctcactacctggagctctctcggtactgtatgtttttaggacrctttctagtcactaaaatcatactgcattactattatctctattatacatgcgcatcagttaataagaaaccaaaatattaagtaatttttcagtggctatacttagcaagaaagtgacaaagatatgaatggccctattcagatgagaactaaaatattttgctcactttagggacacagaattcattaaataccc

SEQ ID NO: 206724 - DNA, 622 bp, Homo sapiens
atctggtctcacaatcaccacttccttcagactcagtagagggttatttatcagcaatcttggcgatcattcaaccctttttcgagaagtttttaatccctagcaacttctaaacacaatgaaacctttaaaaacttcaaatakagaagcattttatctcccttcaaagcagactgttttaaattgccaaattttgtggtttaattgatctttttcatctttcctcaagatatctctataaaacaagaatgagtattctgttactatcacactatgcatctaatgacaacagaagagaattttaggctatagccctttagactgaacaggtttaaaatttaactggtatcccaaggtcaagttattcaaattgctcacaaatagtttttcttttcagactttatttatcctaagatagtatcatattttaatgatctctatggtaagcatatgtttttaagatgacataatacatgagttaaaaataatattacttgcaggaaaagaaattgttaaaatacttccctttctcagtgcttgacaaatagtagttactcaatgaggtttcttaaacaaagtggatctttttcatgtggttgtatctaggtatacatgaagcaca

SEQ ID NO: 206725 - DNA, 622 bp, Homo sapiens
atctggtctcacaatcaccacttccttcagactcagtagagggttatttatcagcaatcttggcgatcattcaaccctttttcgagaagtttttaatccctagcaacttctaaacacaatgaaacctttaaaaacttcaaatagagaagcattttatctcccttcaaagcagactgttttaaattgccaaattttgtggtttaattgatctttttcatctttcctcaagatatctctataaaacaagaatgagtattctgttactatcacactatgcatctaatgacaacagaagagaattttaggctatagccctttagactgaacaggtttaaaatttaactggtatcccaaggtcaagttattcaaattgctcacaaatagtktttcttttcagactttatttatcctaagatagtatcatattttaatgatctctatggtaagcatatgtttttaagatgacataatacatgagttaaaaataatattacttgcaggaaaagaaattgttaaaatacttccctttctcagtgcttgacaaatagtagttactcaatgaggtttcttaaacaaagtggatctttttcatgtggttgtatctaggtatacatgaagcaca

SEQ ID NO: 206726 - DNA, 569 bp, Homo sapiens
gaattcttactgtcagatccctataacctattgtcattttcccttttatcctggtgttttgatcaacaatttatattattagatcctaacaattccattagtaacaacgataactctttttggggaacttttactcggaaaattttcatagaaattcaaataccctaacttctcctaatcttcaaaatcctctattttctaaaatttattcattcatcaaaatgctaaaagtagaaagttttgaatgtatcttaaggacgtaaagataaaattaaccaaacatacacttaattttgtgccttgatttttcccacaatacagttaaaccacagagggtwtaaaacctttttacataggccccctcagtgatttttaaagtcttttttgaaaagtaagagccaagacaaaccaattgctctatttctggccagctgagcagcgataaccagaggatggtcattaatcatcaacaaattacaaggcaatcactacaccaagtcaaaggtaaaatcaattacagtgacaattaaagtacccaaacgtcaagctcaaagcccctgtagttaata

SEQ ID NO: 206727 - DNA, 587 bp, Homo sapiens
agtaatatcttcctattcactcctgggtattagaaataatatcacaaagttgggggtgtacaccccctgcgatactggaagtagtattattttctcgccccctggatattagaaataatatcacaggggggtttacacccatgaaatattggaagtactatcatcctttcttctgctggatgttaggaacaatctcacaggaggggtgtacaccccctgcgatttggggagtagtataatctccccccttgatattagaaacaatatctcagggggcgtataacccccctgtgatattgacagcaataataatcttctccctctttggatataaaaaagtcacaagtggggtgtacaccccctgcgatatcgggagtaatatcatcctcttttctcctgaatattaggaataamatcaaagggtggttgtacaccacctacgatattaatagcatcttctctttctgtagacattaggaacaatatcacagtgggggcgtacactccccccgtgatattgagagtaatatcatcatctctttccctgggtattgggaacaatatcacagaggggttttacacccact

SEQ ID NO: 206728 - DNA, 589 bp, Homo sapiens
cttcccttcttgatattacaaactatatcacaggtgtacaccccctgtgatattgtgagtaatatcatcctctcttcctctgtatattgcaaacaatatcacagagtggtgttgaccccctgtgatattgggagtaatattatcctctccttccctaaatattatgaacagtatcataggaggttgtacactccctrtgatattgcaagtaatatcatcctctcgaccctgaatattacgaacaatatcacaaaaaaagtatacactccttgcgatactgggagtaatatcatcctctcccttcaaagatattaggaacaatatcacaggggtggtgtacaccccctgcgatattaggagttatgtcatcctctcttccccaaaaatattaggaacaatattacaggaaagttgtacacctgctgcgatattaagagtaatatcatcctctattccactggatattaggaacaatatgacgtgagagtggacaccccctgtgatatttggagtaatatcatcctccctcccctggatattatgagcaatatcagtggggggttgtacaccccctgcatattgggagtaa

SEQ ID NO: 206729 - DNA, 474 bp, Homo sapiens
gtacttgtttgcacgggaattatatgaagtataaaaacttaaggaaaggtaacatagttgatgcttttatatcatcttgaaattatagaaagaacagggacttggaatgtgacagattatgggggcaaaatgggttatgaaagggagagaaaagaaagacttggctagcaaaggtggtcttaccatgcaatgaaaaccttgaaggtagaakccatcagagagaatagatgctaaatgttttgtcagacctttaaaagcatgagactctcagtaaatctttcctagattcagacaaggggtggtgtggttcagagagagcctgtttgcatctgttgcacccttcactttatttcttctacagatgcaaatctccacaaaagtcagcttttcaattattcttgtatttctatcttcactgaaatgccatcttgaaatacatcatagaagtatattatagggtttaatattttggtt

SEQ ID NO: 206730 - DNA, 474 bp, Homo sapiens
gtacttgtttgcacgggaattatatgaagtataaaaacttaaggaaaggtaacatagttgatgcttttatatcatcttgaaattatagaaagaacagggacttggaatgtgacagattatgggggcaaaatgggttatgaaagggagagaaaagaaagacttggctagcaaaggtggtcttaccatgcaatgaaaaccttgaaggtagaatccatcagagagaatagatgctaaatgttttgtcagacctttaaargcatgagactctcagtaaatctttcctagattcagacaaggggtggtgtggttcagagagagcctgtttgcatctgttgcacccttcactttatttcttctacagatgcaaatctccacaaaagtcagcttttcaattattcttgtatttctatcttcactgaaatgccatcttgaaatacatcatagaagtatattatagggtttaatattttggtt

SEQ ID NO: 206731 - DNA, 474 bp, Homo sapiens
gtacttgtttgcacgggaattatatgaagtataaaaacttaaggaaaggtaacatagttgatgcttttatatcatcttgaaattatagaaagaacagggacttggaatgtgacagattatgggggcaaaatgggttatgaaagggagagaaaagaaagacttggctagcaaaggtggtcttaccatgcaatgaaaaccttgaaggtagaatccatcagagagaatagatgctaaatgttttgtcagacctttaaaagcatgagactctcagtaaatctttcctagattcagacaaggggtggtgtggttcagagagagcctgtttgcatctgttgcacmcttcactttatttcttctacagatgcaaatctccacaaaagtcagcttttcaattattcttgtatttctatcttcactgaaatgccatcttgaaatacatcatagaagtatattatagggtttaatattttggtt

SEQ ID NO: 206732 - DNA, 554 bp, Homo sapiens
catttgagagaagaaaaatggtatgagatttttttttttttacctagaaaagcagaatcttctataagatattatctaaatatgcccagtggggacttcaattttaaataaaatgaatattcaaaatggaagacacttgaattttcttctaatgtggtgggaaatgagagtgaaggacttttaaggaagattacctgagtcctagaaaagctgctattttttttccacttgtgagggaggtgttgcatcagttcaagtcctctgagaagactctcagaattctagcacaggagatttattgagtgcaacacctgtaaaggataaagttagagagagcagaagcgggcacaaaaaaccttcagagtgtgatgttgrtcagatatctatgaaaggagagtcagaaagaaggagaattgggaaggaaaggtttgagatcatagcatgcttctgataaagccttagtcaagagaaagggaatttccaagcaaaagttgcccactgaaggtgttccacattgcacaagaatagctcagctccaggactctggccatgct

SEQ ID NO: 206733 - DNA, 379 bp, Homo sapiens
aatagattttcaagatgtgagttgtgctactcaattaggaaaaaataaaaagaaggaacaaagctttttccttttttttccaytttaaaggtgaagaaagtaaacacatcatgcagatgaaaatggctctagacgttctggctgtaacgttgttatcaatgaaatcctttcccacttgttccagctgagtgaagactgcaggcctcttgtggataaaaatctaaatgcttcaatggcactgaaagacccatgtgcccatcagcattagcaaagctggacatttcttttgcattttctttgtttgggtaagaggcctattttaaattataatatacaagaaggtaagttatgtaaacctcaaagcctatgtattgtaaat

SEQ ID NO: 206734 - DNA, 379 bp, Homo sapiens
aatagattttcaagatgtgagttgtgctactcaattaggaaaaaataaaaagaaggaacaaagctttttccttttttttccactttaaaggtgaagaaagtaaacacatcatgcagatgaaaatggctctagacgttctggctgtaacgttgttatcaatgaaatcctttcccacttgttccagctgagtgaagactgcaggcctcttgtggataaaaatctaaatgcttcaatggcactgaaagacccatgtgcccatcagcattagcaaagctggacatttcttttgcattttctttgtttgggtaagagkcctattttaaattataatatacaagaaggtaagttatgtaaacctcaaagcctatgtattgtaaat

SEQ ID NO: 206735 - DNA, 621 bp, Homo sapiens
tgactgtgaccatcacatatgaaggtggtaagccacagggcacaccgtaaccctggtagctctagccatgttttatcttcttgcacaaaacttaagtggcatcaaaaaagttataaatgtttattgaaagcaataaaaaataagctacagtttatgaatatagcaaattgccttgatatcacataatagtctttctcatatgatgcaatatgaaactccaaatagatgtcaataaaaggattcctattcttaatttttttaaacttgctcacctataatcaaagatacagcaaakacaccttagtttttcttaaaagaggcagactggatgctaacaattaatatcacttattaaaaaacattattgaaatccaaaaaatgagagaatgatatctaaatgaaaagccaccctaaaagagtgaaataggctaaaaagtgatgttattcaacaatattgcttgatgaggacaagcttaattctcaactcgaatatcatgtttttttccatcatttagctccataagactggatctccatcttttaacctgtaacacatggataagtaaaaaatagattctgaactagatcagtaatacaaatggcaatggaatttgaggaatt

SEQ ID NO: 206736 - DNA, 495 bp, Homo sapiens
aacacttggtttcattattgttttctgttctttgtttatctctgctttcgtcttcatcattttctttcttctgctagctttaggtacagtattgtatgagtctgttctcatgctgctataaagaactgccygagactgggtaatttataaaagaaaatggcttagttgacttatagttcagcatagctggggaagcctcaggaaacttacaatcgtggcatatggggaagcaaacacatccttcttcacattgcagcagaaaggagaagtgcagagcaaagtagggggagcctcttataaaaccatcagatctcatgagaactcactcactatcatgagaacagcatggaggaaccacccccatgatctaatcacctcccacaaggtccctcccccaacacgtggggattacaatttggattacaattcaagattggatttcaggtggggacaaagcctaatcatattattctacccctggccccttccaaattt

SEQ ID NO: 206737 - DNA, 495 bp, Homo sapiens
aacacttggtttcattattgttttctgttctttgtttatctctgctttcgtcttcatcattttctttcttctgctagctttaggtacagtattgtatgagtctgttctcatgctgctataaagaactgcccgagactgggtaatttataaaagaaaatggcttagttgacttatagttcagcatagctggggaagcctcaggaaacttacaatcgtggcatatggggaagcaaacacatccttcttcacattgcagcagaaaggagaagtgcagagcaaagtagggggagcctcttataaaaccatcagatctcatgagaactcactcactatcatgagaacagcatggaggaaccacccccatgatctaatcacctccsacaaggtccctcccccaacacgtggggattacaatttggattacaattcaagattggatttcaggtggggacaaagcctaatcatattattctacccctggccccttccaaattt

SEQ ID NO: 206738 - DNA, 513 bp, Homo sapiens
agtgactcctttatatttggctgtctcgttacttctaaaatatttcatattcataaaataaaaatgttttaataatgttatatatttgtaaaggcatttacaatcttcaaacttctgcatgaaaaatctctcagaagtcaaaaatggatttactgtcctgatgtaaaataacctgcaaatcttactttctaattttggtgatatatgtgtaaaaagaaataaatcatctcatgaacaaaattaaaaaaaaaacaaaaactgagaagttgcggtgagttctgaggcagtacggtgtggcatragaatgcaggctctgaatctacagactgcctggttcaaatactagctctgccaaaaactagttacataaatggagcagattatttaacctctctttatgcctcaattttctcatttacaaaattgttgttagcattaagtgtgttaatacttataaaatacttcatatttatatgtatgaagtattattactgctttaaaataccattgact

SEQ ID NO: 206739 - DNA, 558 bp, Homo sapiens
agtgagtgattgaactgggtaaaactcgtcttaaagttgcagcaggttgtttcagtagtctttagataaaactggcatcaggttacagttggcaggttcagcagccaggcttacagacaattacatttttggagcaatgttatgtgccctgagwgcttttccctgctggcttttcaactctgttttagttgggtgtgataagaataacccaatatgtattatcaactttcgcaataccaaagatgctcatagctttaacacagatgtattgtgagggaaaaagactcagtagtgttggaaattggaaattattctataaattctttctctctatagtacacaaattcttcataaagttttctgtcttttttgggggatagggtcttgctctgtctcccaaacttgagtgtaatggcactgtattagtccattctaactttgctgtaaagaaatatctgagactgggtaatttataaagaaaagaggtttaattggctcacggttctgcaggctgtacaggaagcatgatgctggcatctgctcagcttctggggaggc

SEQ ID NO: 206740 - DNA, 558 bp, Homo sapiens
agtgagtgattgaactgggtaaaactcgtcttaaagttgcagcaggttgtttcagtagtctttagataaaactggcatcaggttacagttggcaggttcagcagccaggcttacagacaattacatttttggagcaatgttatgtgccctgagagcttttccctgctggcttttcaactctgttttagttgggtgtgataagaataacccaatatgtattatcaactttcgcaataccaaagatgctcatagctttaacacagatgtattgtgagggaaaaagactcagtagtgttggaaattggaaattattctataaattctttctctctatagtacacaaattcttcataaagttttctstcttttttgggggatagggtcttgctctgtctcccaaacttgagtgtaatggcactgtattagtccattctaactttgctgtaaagaaatatctgagactgggtaatttataaagaaaagaggtttaattggctcacggttctgcaggctgtacaggaagcatgatgctggcatctgctcagcttctggggaggc

SEQ ID NO: 206741 - DNA, 529 bp, Homo sapiens
aattgctccaggtggtggtggatgcctacaatacggaaagcattgtgctaagagcttctgggatgcaaagtgaataagattatctatatgaattacctactttcagaacaaggctttctatgtcttaaaataaaggaagagaaggtattgtctgatattttctggctttatgactctgaaggcccttttatagacttcaggaaaaagtttatattaacactaaggaaagatgtgaatggtttatttgtcatccagcttgggaaattcacttctctgagtgtctttccaaatgtgcatattggctgatgtgatgattaattttatctatcaacttggctaggccaggggacccatatattttgccaaacacatcctgatgttgctttgaaggtgtcttttggatgagattatataaatcagttgactttgagtaaagcagataaccctccayaatacaggtaggcctcattcaactcattcaatcagttgaaggccttactggaaaaaaaaaaaaataaagactgacttc

SEQ ID NO: 206742 - DNA, 523 bp, Homo sapiens
tagtgatgttgaaattttaaaaagttaaaaatttggatatataatatataatacctttgtactagaaaaatagcaattttgggtattttaaatatgtatgatattacctgaaaaagaatacatttaacagtttggaaacttccaaaactgagataccttccaaagaagtaatttaatgatctcttctaatttcaaagaatttcctatgccctgatgtttatttgcaagaagtaaatggatgagaaagagtatccatkactatttttcaggaaataaaaatagtagagcaaaataccttttgttttcaccacaaattttcagtaacaaaaaaataagccaaacaaaaactgcaattaacatgactatgaagaaatattagtgaacatctactatatgtcaagaacaataattgacacatagtagttactcatatttgttgaatgaatgagagtttttggatattaattcctagtgagaatgtaaagaaacagccacatacataacaatcagggttttagagcta

SEQ ID NO: 206743 - DNA, 385 bp, Homo sapiens
taacatcttagtggtactctcattaattaatgaattaaataaaatatttgacaaagtttgctttctatttgtgtggtaatagttttacaataaaaaatccttcatcaagagctttaaacaatttatagaagctttgttttttctttcaattataaacctataagtaaaaaaattcgccacaaaattagaaatgttctgatttgcttagtcaactcctattaaatgtttctgtctttggtgttgaacaaaggttgyaaaagtaatgagataatatgagaatgtgctttgggaactgcgaatctggagtcactggtccatgaggaatctaggataagaagaaggaagctgtgaagaatggttggctaacagtgctggcaaggaattc

SEQ ID NO: 206744 - DNA, 562 bp, Homo sapiens
tgactcttcctttcacttgaacacttagacttcctttcacttgaacattgtaaggttattaaatcactcaatttcaatattgtttctccaggaacagggaggcccaaggagagagtgagagatgagagaatggctggtgcagctgtcagagcacacacaacatttacatattaagtttgccattgtacataggtgtggcttgtgatgtcccaaaacaattgcaatggtaacatcaaagatcgctgattacaaatcactagaacagttataataataataaaaaattttgaaaatattgcaaaaattaccaaaatgtgacatagaggcaggaagtgagcacacgctgttggaaaaaatgactccaacagacttgctcaacacaaaattgccacaaacctttaattggttaaaaatgcaacatctttgaagcaccttaaagcaaaaaaaataaaaygaggtatgcctgtagtggtcatgccatcctactcactacccagatgtggttgagcaagtcactaagctcatttctccatatgtaagatgagacaacattgacaagctt

SEQ ID NO: 206745 - DNA, 573 bp, Homo sapiens
ttactagtattttattgagaatttttgcatctatgttcctcaaggatattgcctgcactttcttttcctgtggtgttcttgtctggctttgataatagggtaatattggctgcgaaaaataaatttgaaagtattctctcctcttcaatttttgggaaaaaatgagaatatttggtgctaattctttaaatatttggtagaatttaacagggaagccatcattttctgggcttttctttaatgggagacattatatcatttattyaatattcttactcattattagtctgtgcagattttctacttcttcatagtttagtcttggtcaattgaatttgtctagaaatttatccattttttctaggttatctaatttgttggcatgtaattgttcctaataggttcatgattccttctgtggtatcagttgcaatgtcttctttatttatgtgagtcttttctttgttttgtagatctattattcttttatttctctcttgcttctgtaaaaataaaaaggtgaaagttgatcaattttgtttatctttttagaaaaaacaactcagttttgtg

SEQ ID NO: 206746 - DNA, 483 bp, Homo sapiens
taactcacataagtgaaatcatgtagtgtttgtctttttgcaactggcttatttcatttagcagaatgtcctcaaggttcatctatgttgtcaaaaatggcagatttccttcttgtttaaggctgaatagtattccattttcagagaactatcattgttttcagtagtgtaccacattttctttatgcattcatctgttaatgggcatttaggttatttccaaatcttggctgctattcttttatgttttctaaattatcttagggcaacgtttttgtctttattttggtcttttgtgtatgtgtggctctttttacatgcctgttgaccctcattgyctatttatatttaagtctgaaaccatgggctgattggtctaggtaggttcatgtggctctctgctgcattgcataaaaaggtatgttccccagtgggtcccttggagtagaaagtcactggagagtctgggtattactggggctg

SEQ ID NO: 206747 - DNA, 558 bp, Homo sapiens
ttttcacagaaatagaaaaaagcaatcctaaaattcacagggcaccaaaaaaatgtacaaatagccaaagcaattctgagcaaaaagaacaaagctggaagcatcactatcagacttcaaaatatactacagacacaaaaacattatggcatgcataaaaacagacacgtagaccaaaagaagagaaaaaaaagtaagccagaaagaaatccacatatttacagccaactgagtttgacaaaggcaccaagaacatacactggggaaacaacaccctcttcaataaatggtgcttggaaaaaacagcttaagattgattaaagacttacttaaatataagacccaaaagacccaaaaatataaaactactggaagaacacatagggaaacattctgtctcggaaaagcttttatggctaaaaccttaaaagcacaggcaacaaaaacaaaatgagataaatgggactatattaaactgaaaayattctgcacagcaaaggaaacaatggagtgaagaaacaaccttagaatgggagaaaacatttaaaaactattcat

SEQ ID NO: 206748 - DNA, 475 bp, Homo sapiens
tggggtataaactgtatttaatggagttataacagaggactcctgaaacctagagaaaaatattaatayccaagtacaagaaggttatagaataccaagcagatttagcccaaagaagactatctcagggcatttaataatcaaactcccaaaggtcaagattaaagaaaggattttaaaagcagcaagagaaaaaagtaacatacaatggaactccaatacgtctgggtaataaaattttcagtggaaaccttacagaccaggagagagagacatgagatatttaaagtgctgaaggagaaaaaaatacttttaccctagaataatatatctcataaaaaatctttaaaatgtaaagtaggaacagactcttcaaataatcaaatgttgatggatttcatcaaagtagacctatcgtacaagaaatcctaaaggaagtatttaaatcagaaggaaaaggagggcattactgatc

SEQ ID NO: 206749 - DNA, 475 bp, Homo sapiens
tggggtataaactgtatttaatggagttataacagaggactcctgaaacctagagaaaaatattaatacccaagtacaagaaggttatagaataccaagcagatttagcccaaagaagactatctcagggcatttaataatcaaactcccaaaggtcaagattaaagaaaggattytaaaagcagcaagagaaaaaagtaacatacaatggaactccaatacgtctgggtaataaaattttcagtggaaaccttacagaccaggagagagagacatgagatatttaaagtgctgaaggagaaaaaaatacttttaccctagaataatatatctcataaaaaatctttaaaatgtaaagtaggaacagactcttcaaataatcaaatgttgatggatttcatcaaagtagacctatcgtacaagaaatcctaaaggaagtatttaaatcagaaggaaaaggagggcattactgatc

SEQ ID NO: 206750 - DNA, 548 bp, Homo sapiens
tcctctttcctttcctctccttaagcagaaagaaagggtctcttctggatccatgagctgtgcaacctgggattaggagagtggtactgccatcactcccttggctgccccagctgttttttcaatatgttgcattccctcttaatccactgtctcttggcctagttcaacactaggactcacctaagagctgcagtctttatggcctrgactaattttcaagtttgcttggagacacagcgtgctgtagtccttgctggtgaggtttgcaagcactcaagtttagactactgggatttgtgattcccttttggctagggctggtttgaatgctcccttcatgggcaagcctcaactgagtttggtcatgtgtttctatctgctctttcagggtagcactgagttcactgcctcacaattgctgtcttttctctcccccagcacccagagatgctctctacaccaggccactgcccttatgggtgtgggaagggtattggcagttcaggacttttttttttatctcttcaatttctttattaacgata

SEQ ID NO: 206751 - DNA, 548 bp, Homo sapiens
tcctctttcctttcctctccttaagcagaaagaaagggtctcttctggatccatgagctgtgcaacctgggattaggagagtggtactgccatcactcccttggctgccccagctgttttttcaatatgttgcattccctcttaatccactgtctcttggcctagttcaacactaggactcacctaagagctgcagtctttatggcctagactaattttcaagtttgcttggagacacagcgtgctgtagtccttgctggtgaggtttgcaagcactcaagtttagactactgggatttgtgattcccttttggctagggctggtttgaatgctcccttcatgggcaagcmtcaactgagtttggtcatgtgtttctatctgctctttcagggtagcactgagttcactgcctcacaattgctgtcttttctctcccccagcacccagagatgctctctacaccaggccactgcccttatgggtgtgggaagggtattggcagttcaggacttttttttttatctcttcaatttctttattaacgata

SEQ ID NO: 206752 - DNA, 423 bp, Homo sapiens
cagcaatttattgtggggatgacttacacctggcaaatgctacccacactgaagggactacagttgtttcccaacaaaatccctgttgggactacaatacccaagtgggaatatgggccagcagctatatgctcctaatagaggcagcaaaatagagtaaggtcaaccctacaarccataataaaatacacactgtacataaggggacaaatgaattttttttgcattgctcagatgatatttattactatttctgccacctatataatttttttattattacactttaaattctggggtacatgtgcagaatgtgcaggtttgttacataggtatacacgtgccatggtggtttgctgcacccatcaacccaccatctatattaggtatttctcctaatgctatccctcccctagcccccta

SEQ ID NO: 206753 - DNA, 423 bp, Homo sapiens
cagcaatttattgtggggatgacttacacctggcaaatgctacccacactgaagggactacagttgtttcccaacaaaatccctgttgggactacaatacccaagtgggaatatgggccagcagctatatgctcctaatagaggcagcaaaatagagtaaggtcaaccctacaagccataataaaatacacactgtacataaggggacaaatgaattttttttgcattgctcagatgatatttattactatttctgccacctatataatttttttrttattacactttaaattctggggtacatgtgcagaatgtgcaggtttgttacataggtatacacgtgccatggtggtttgctgcacccatcaacccaccatctatattaggtatttctcctaatgctatccctcccctagcccccta

SEQ ID NO: 206754 - DNA, 474 bp, Homo sapiens
gcattctggcccagatactgtgcttttaccatggtctttacaacctgcagaccagaagattccctcctgtgcctacgccaccatggccttgggtttcaagcacaaaactgggtggccacactgagctagctgcaggagttttttttcataccccagtggcacctggaatgccagcgagacagaaccattcactcctctggaaagggtgctgaagccagggagccaagttgtctggctcggcrggtcccaccccccatggagcctagcaagttaagatccactggcttgaaattctcactgccagcacagcagtctgaggttgacctgggatgctcgggcttggtgggagaaggggcatctgacattgctgaggcttgagtaggtagttttaccctcacagtgtaaataaagcttccaggaagttcaaactaggcagagcccactgcagctcagcaaggctgctgtggccagact

SEQ ID NO: 206755 - DNA, 474 bp, Homo sapiens
gcattctggcccagatactgtgcttttaccatggtctttacaacctgcagaccagaagattccctcctgtgcctacgccaccatggccttgggtttcaagcacaaaactgggtggccacactgagctagctgcaggagttttttttcataccccagtggcacctggaatgccagcgagacagaaccattcactcctctggaaagggtgctgaagccagggagccaagttgtctggctcggcgggtcccaccccccatggagcctagcaagttaagatccactggcttgaaattctcactgccagcacagcagtctgaggttgacctgggatgctcrggcttggtgggagaaggggcatctgacattgctgaggcttgagtaggtagttttaccctcacagtgtaaataaagcttccaggaagttcaaactaggcagagcccactgcagctcagcaaggctgctgtggccagact

SEQ ID NO: 206756 - DNA, 405 bp, Homo sapiens
tttaagccatgaatctatgtcaagttagtatttgtgagtggtgtaagatatggactaaatctcagtcttttgcatgtgcatattccaaagaccatttattttccaaagaygatttattgaaaagacagtcatttctccattatgtattcttagcattcatgtcagtattagttgactgtgtacacacgagtttatttcaaatctgttccattgatttaggtgcctgttttaggccagtgtcatactattttgattgaaatagctttgtaatatagtttgaaataagaaagcatgatgcctctaagttttcttttttcaagattgttttggcattttgaggtcttttgtggttctctatgaattttaagattgatcttttctattctttgaaaaatgccattctac

SEQ ID NO: 206757 - DNA, 601 bp, Homo sapiens
gcaaagacactcaagaaaagaaaactacaggccaaaatatctgatgaagtttttcctcttttttgatgtaggcaattatacctataaccttataactgagtactgcttttgctgtatctctttgatgtaaaaatcctcaacaaaatgccagcaaacmaattcaacaatacattagaaagatcattcatcatgaccaagtgggaatcatccctgggatgcaaggatggttcaaaatatgcaaacaaatcagtgtgataccttataccaacaaaatgaagaagaaaaaacatattactatttcacttgatactgaaaagcttttgataaaattctacatctcttcatgataaaaaccctcaaaaaattggggatagagagaacatacctcaatataatgaaatccatatatgaaagaccctcagccagtatcacagtgattggggaaaaactgaaatctttcctctaaattctggaaaataacaaggatgtgcactatcactactgttactcagcatagtactggaattactagctagagtaatcatgcaagagaaagaaataaagggtatccaaattggaaaggaagaagtaaaattaccct

SEQ ID NO: 206758 - DNA, 597 bp, Homo sapiens
atatttcttgagcaatatcccacaaggaaaggcaaccaaagcaaaaatggaaaaatgagatcacatcaaattgaaaagcttctgcacaccaaagactataatcaacaaagtgaagtgaaaacccacagaatgggagaaaatatttgcaaactacccgtctgataagagattaataaccagaatttaaaataagtggaaacaattctatatgaaaaaatctaagaatctgatttgaaaaaggtcaaaagatttgattagacctttctcaaaagaagacatacaaatggcaaaccagcatgtgaaaaggtgtgcaacatcattgatcatcagagaaatacacataaaaactacaatgaggtatcatctcaccccagttaaaatggcttatatccaattgactggcaataacaaatgctgacaaagawgtagagaatagggaaaacttgtacactgttagtgtgaatataaattagtacaatcactatgtaaaacagtttggaagttcctcaaaaaaactaaaaattgagctaccatattatccagcaatgccactgctatttatatactcaaaagaaataaaatcagtatgtcaaagag

SEQ ID NO: 206759 - DNA, 607 bp, Homo sapiens
attttttttgcaactgagcactctttaaaagtgaccaataaaaatgatgactcatctcactatgaagcattacttccatttgaataccatctgttactttgcatttctttgatataacttgcattttgatatattttgatgtgacaatcaaagaacaatatcatctacaaaacttatgaataaaaactgtttatcttagaattacttttgcttaatataacattaaaactttaaaaatactttaaaaattacctagtgttcccttactggaatatttaaaatggcagagcatatgttscatgaatcaagatgggtggctgacaagggcataaatgtgttgctataaggatatattacaggtatgatactttacagctgccgcatctctattcagattatttaaaggtttctgggtcagccacttcttatttattcaaatttatattgagtagctccagaaagcaaagctgacaaaatgattaattagactgtagctcattggcagactatagtttaatataattaatagagctcgagttcatcgttaaatatgattatggtctttgtttaaaaatgtcaaattatattttccagttgttacaaaatc

SEQ ID NO: 206760 - DNA, 502 bp, Homo sapiens
acatggggctcttggctgggtggtagcagtttctcctggaaactggggtcagggagagaaatcagtgacacagagggcctgtttctgaacagatagataggatcagaccttgagagacaacttgataggatagtaatttaggaaatggaaggcagaatttccttgggcctgtcagctctgcatcccagcatgcttctggttgccttgacaactcaacaggttaaacttcttttctgggcatcagtgtctgctcaggcaggaggtgacagaacccctggaggtgtscagatcttcagcaggcagatgactcagagctcaggctgaccttcaccttgctgggctagctggccttgggttgtccctggctgcctgcatgagcttacgatcatgtccaaccagctgcctctgcctcctatccctcctattcatccatccattcatccatctgtttatccagtaagcagtcattgagcacctgctgtgtgcctggcctcatgctagc

SEQ ID NO: 206761 - DNA, 604 bp, Homo sapiens
agtaagcagtcattgagcacctgctgtgtgcctggcctcatgctagcttctccaggcaggtacatgagttcctggccctctctccaggtcaaacaggaataagctgggaggtcaggaagtccatagaggctttacacctggcatatgtgtgggtccatttagaaagatactctcaacacatgcaatgttgcaagcctgtcacccaacgtctaccagacccttcttatagatgcgtcatttgcaaaaacaaaaacagtctgttttctttcacttaacactgcagggtggacctcttaacctctttccatatcgagacggatttttttcacccatttcagtggctttcagtgttcgttgtaaagatgcaccattagtttatttagccagctcctttctggttcatatttaaactgtttgtagttttatggctattcctgaattatttctgtttcctccgatgtcatctttttctgtttgcttcttttgatgtctcttgtggtggaggctgtcctcagatgcytgatgagccctagttacccattcatagttgagagtggagcaataaacatgtgattgattttgttttgtttttgagacagggtct

SEQ ID NO: 206762 - DNA, 278 bp, Homo sapiens
tttatatgtaggtgtagacctgttttgtatggaaaatatacttagcctaaaggatagtggctttctacaacctctcatgcagtgtacttccaggagtatttgtgagggctgtaggaaggaaaaacaaaactaaaataaagttcatgaacatactctcctcctctytaagtcaaaatatattagtattttctgtgtgacagaaccactgctagtgtcttactttctaatcttttcagtggctttttaatttgtgtatttatttgcatgtagcctagcaa

SEQ ID NO: 206763 - DNA, 526 bp, Homo sapiens
ggtaacttaacagtttaaagtgtattattacttagccttcatagtctctataaggtatttgagtaggaagataattatggctgagtgcattggttcatacctatagtcccagcacttcgggaagctgagatgggcagatagcttgtatccaggtgtttgagaccacctgggcaacataggcagaacctgtctctacaaatagcaaataagttagccaggcatggtggcaaatgcacctgtagtctcagcttctcaggaggctgaggtgggaggatcacttgarcctcggtggtcaaggctgcagtgagctgtgttcatgccactgcactccagcctgggggacagagtgagactctgtttcaaaaaaaaaaaaaagttaattatttatgttgaaatactgactcaatatgtttctggaagaaattttgagctttaaaatttttccagattagaggtttatgagctaaatattctactttctctttagccatttatctctgtgtgaaactgaaccaaaaaattagag

SEQ ID NO: 206764 - DNA, 612 bp, Homo sapiens
aggcattaggaagcaatagcatccacttgcctgctagtattcttatctagagcttatctatgacactgtcttttcattgctttgttaataaatcttagtgatattaacttcatgagcactggtttctttgaattggcccagccaactccagatacgctgtttatttctttgtgcaaattaaacactgacatggtgaaacaataaaaaagaggagtgggaaaccattaacataaatgatatcaagtattaaaagtaatatagttggaaaataggatgggaatttccagtccttagttgtaaaataaagggggctagcctgtctctaacattgctcaaatttactaaaaatattgatttcagaaaatctaaacatccacacaattagtgactcatacttttgttcagttaatatttcagaaactatattttttatttatttaaacagaaaatagtaaaattattttcactttggtataatagtaattttrattagattatttacgtttgtagtatttctgacaatagcttatcagattaatattataaacatttcaagggtgttaattacataagggcctatgctagttgcctccagctcttttataaggtact

SEQ ID NO: 206765 - DNA, 578 bp, Homo sapiens
gttctttgggccaggagctaatcactagtttcagtgaagacactatatgtttgttaaagacaaccaaccactaacagccagggcagctcacaggcagagtaggaacctcaaaaactctacatctgctcaacagaagttcagatcctatttctctcatgcttctccagctttacatatgtttctccaaagctgttccacagagctaccctcaacatttgagaacaaatgtrtatcttcatgaacctgacagtttaatccaaagaaacccatctcaagatcaatgtttcttatcatcttgtgtttcaacttaaaagtagattcaaatttggccctttatcctataactccaccactaccaccaataaagagccatgtccattttctaaatcagaattttgtagcatctgacattctgcctgaatgcaataaatatttatttaattactaaattatacatccgagttgactttaatggaaagaggtatatcttcctatattttcaagtaaaatcagtgcaccaggaatacccttcatgattactctgttgcgtcaagtatcaaaggcacatatcacagttt

SEQ ID NO: 206766 - DNA, 457 bp, Homo sapiens
attttacaaaactagttaaaaggcctctttttccaaaaagttttttgactcatcccagatgtaaatgattttctttatgagctgctgttgtacttagtgtctgtgtgtcccctctctttggtactkagcccataatgtcgtgtcttgtactcacttctttccatggtttacttactcaactgattgcaagcttcaagagagcagggaggatgcattatgccttctttgtaatctatgccagcctaacacagtccctcaaacagagtgaggatgatcagccatatttacaaagcaatcagtaattcgaatccagcccttccatgcgaccctccttccatgactaatttcacacataactgtgtgatggatattactaaatgttgtgccatatatatcacaagctacagaaaacctgcatggacaaacataagctagccttttcaagcagtttttcact

SEQ ID NO: 206767 - DNA, 594 bp, Homo sapiens
gtttaatcctttaatcaacataacttgggagacaatgtacaggatgaaagagaatgggtgagtgaggaagatcagttaatatagtccatataagaggtttttaaaaaaatgttcagaattaatgtgatgstggtcaagtttaaaataggaagtaggggaatgtgggacagtcagaagaagccctatttgctgtgatgatcaattagttttcacagggtaaacaagagtcacatatagcttggctatttctagtttaacagacttgaaaagtgacagtgctgtttaccagagtggtggtcaggggcacagaaagaagacatttggagggaaaggataatgagtttagttttggacacagtgagtttgaatccttgccttcatggaacttccattcacagtttctctaaggaaccacatgtacataaaacacagacatatactgaatgaatggaaatgctgaatctgaccattttgataaagatatattcatgacaacttttctttaaaccacatgagctagaatttatagaagataggctaacagttatatcacatgtttcaatgcattccattttttacttttcagaccttttt

SEQ ID NO: 206768 - DNA, 328 bp, Homo sapiens
cagttacttacaaagctaagcaagcatttgatccatgattttaaatattcattttttcagagcatttcctgtagctagtttcccacttaagttctctttagtgtatacaaaaatggcatgttaagctgcctgagcttttcaacatggatgagttctaaagaacctcaacatctagaaggatccttgtttgtgaggtttaatatcatatggttawatttgctaactttcagataatttcaaataagaatagcgtacaatccattgtcaatattaattctttaaaataaccatcctctccatactttagtctctaatagattattctgat

SEQ ID NO: 206769 - DNA, 530 bp, Homo sapiens
gtggctgagtttgctgtttacatacacagacatctctcaagaatgagaagactatgggccttttaagagtagattttattttaaactccaattaagaaaaaaaaattcttggttgtgaaattcagactgaaattagaagtgtaaatcctgttttcagtgtcattggcaaaagaagaagactgagaattgttgagtgtacattttatccctgtcgagcaaatctagcagatagccttgcaactgtttagcgcatacccagcagagagctcagtgaaacattgctacctcagtttgcttcatggcactagacaaggtttcccctgccactatcctcaggcagtagatggtgtcagtcactaacctcaggcactagatgatgttcccctagccacygtcacttctatcttggatgaagaagtagatcccactggatttaattacattgtgtagcttgtacaaccataattaagttatttgggttttgtttttatcctgatttaccatcattaaaacagagagaaagaatgaca

SEQ ID NO: 206770 - DNA, 610 bp, Homo sapiens
ctttcctgggtcagatgtaatatatcatgtttgtgccagcatctagtttcccttcttccaaatgtcattcctgatttaaatttgcaaaagtcactctcccattccataatattattaaccataatacttggaagttgctaatacactgtgtcgactttaacttttactctgggaggaaaatacacacaaattctacatggagaggttttcagaagtgaaactttattctgttttctagaaggggattttctatatgacctctttgcattctcctgttgtcttgagtgctgtwgagtaccacattgaatggtggaggatgagtctagacagagctaaatctacttctttattttggaagagaaattatataaccttccacaactgaatttgattaaacatattgatatgtgagagggccggaataggtagtctctggaagttaaggattataacattattcataaaaatgttagtgaaataatgggttaatttgtttttggaagatgattacctacaaatgagtctaagtttacctctttttttctttctctgaaagaaaaggaaaatatacgtaaatccttcaaggagaggttttcagaagtgaagatcc

SEQ ID NO: 206771 - DNA, 511 bp, Homo sapiens
aatgtccaacaggtatttacacatgtctaatgggcatttccacttgaatggccagaatacaaattaacacattcatttctgccacatactcactcttctctcttccctgtcttcctcaaattagttaaaactagtgaggtcacccattggatttataccacagaaaacaaagtccaaatttcttgttatctaaagcatattgcgtggaaaatattattcataaaaatgatcatttccctattttttatcagtaacttaaatcagggaacaattattattgggaggaaatttttagtctgaggttgccttttttgcctctgtcagccatcccaagatgtcattagcagtgtgcagtagtgaaaatgatccttagtaactctaaaccaaatatcattaggtagcataattaggtaaattttctccacaaaaacatacaacattttgcaaagtcaaatrgaatcaatttttggagtttctgtaggctttaattatttgtatggttattgaattc

SEQ ID NO: 206772 - DNA, 585 bp, Homo sapiens
ataaccaatgagccaaataaaaaatttcaaagaaaactggtaaatataaagtcaatgaaaccaaaagtatttttaaagctaaataaactggatacatcttcagctaaactgatcaataaaaaagattgaaactataacttagcaatattaggaatgaaagaagggatatcaataaaaattctatatacatcaaaaagatactaaagaaacagtgtaaacaactttatgccatggcattcaataaattagaaaaaaatgtacaaattctttaaaagtcacaggttatctaaactgacagaagaagaaatagaaaatctgagtaccatcatgtctagtaaagaaattaatagccattttacaaggaaaattccaggctctcatgatctcaacttttaattctaccaaaartttaaggaagaaataataattaaataaaattctttcagaaaatggatgaggagggaagacctccagatttattttatgagactagcagaatcctaatatcaaaattgaatgaagacattgctgataaaacaacaaaaaacaacccctaaaccacaaaaaaagaaagaaagaaaagaa

SEQ ID NO: 206773 - DNA, 572 bp, Homo sapiens
agtttgtaaatggagttggcaatagtctgaggcagcagtgagaggggaggggtgaaaatgcagtgaacattctttctgcgtgtttctatttggcaagaaaccttctgttttcctaatggaaactttgacacactcagcctgtatcttttcatccatatccagctcatcttctgaacattcttagacctttattctgtcagacaagaaaaaaataggaaaggtcactaaaatctcagtctaatttaactgtgatgctttcgtggtaaactacttgagggagttcattgcttcatgtgagtacaccacgaaccctcaatgcgggggaggaaaagcagcctcatcagtaaatattaactttccaaagagttcaagactctggggactccagwtagcttgaaagaaaggaacagatggatggaaaaagacacaatcaattcctgaccacaagtaccaaatgtaaggattctagaattttatccatggcagcagggccatcccattttcaagacttcttttgggtttaaaaatgctgatatttatgatagttaataaaaatgctttacgtccctaat

SEQ ID NO: 206774 - DNA, 514 bp, Homo sapiens
tttccatccatctgttcctttcatatatatatatccagaagaataaaagaggggctgaaaatgatatatatatatgacttatacatatagcatatataacattatayacacacacacacacacacacacacacacacacacacacagtgcgcacatgaggagggagcccagtgaactgatctttcccaccattaacttctcactcataggatagttgatctttacagggaccaacttgctaaactagcagtcacaacatcaaggttgccaagacgtagatcctcctcccataaacaaggcattggtttggatttgacggcatcaggctggcctatgttggggttggccaggagcaggaggagctcaataggatttttagttgaaagactgagaccatgacaaggggcaacatcaacccttcccctttactgagcaagctgactgggaacagaattcaaacagtctgtccaaattaggagggctggaagcagatagatgttgaagtaaagagcca

SEQ ID NO: 206775 - DNA, 574 bp, Homo sapiens
cagcatggcacatgtatacatatgtaactaacctgcacaatgtgcacatgtaccctaaaacttaaagtataataaaaaaaaaaagaaaagtaaaaaaaaaaaaaaaaaaagaaaattagattctagcttctcactctgctgttgcctggctctgttacaaacaattcactttatctttggtttcttggttcctaaaattctatagtttatgactgtatgactataaatcaacaacttggctttttatttttactgttacttccaaacactagtatttcaagctaaaatgtgagtttttcttatttcaactaggcatatcatgctgatccartgacagttaaatatattccaggagagatatttagacacgcagagagtccaggatatggagttattttattaactgaaagggccataaatgaatattaataacactgctggaaagagaactcgaagtgatgtcaagttcttgtttttaatctgtgtaataacctgatttcacatatttaaattagtttagtggactaaacaaaagatagactgtaacccctctgtagaatacacatttgtaaat

SEQ ID NO: 206776 - DNA, 634 bp, Homo sapiens
gattcttcattgttcacctttaatagtgacacatgaagaaggagaatgagtctgtgttatcattagtgaaaggctcatctcgaggtgattcttcactgttcacatttaatagtgacatgtgaagaaggagaatgagtctgtgttatcattagtgaaaggctcatctagaggttttgcttcagggagtcgatggggtttccacatgttagtaagtgatgcgtttggtctcaatggtttcctttctctggagaaaaccttctcctctcctctctggaaggcagctgcttgcttgttggttgttggtgttctactcactggttacccgaggggtggggtgcaggcatcggtgagggaggataatgagggttgactgtcaatgtacagattttaatcgaccctcctgttttctgacgcctgcctcacttctccgcccctcacccccaggaaggtgcacagatgatgctccttctcgcggatgcgaggccaccaaatcaatttttgtctttgctgttctctctccatgatggataaccatcatggtttcttgggagggaaaggaaacaactgggtcagtatttcwtctaccatctttaacttggaagcttcttcttccagctaaagctagaatagcaaa

SEQ ID NO: 206777 - DNA, 578 bp, Homo sapiens
gagaaaaacagaaataaagtagcttctttgcaagaaaaccattagttaataatcagaagccattttccaatggatggaattggattttgtgtatcctttgtacatatattcaagaaaacctcacaatatgaccccatctggatatgcagaatcccaatcagctttttaattgctccctttcttgtgaatacaaaaagctaaggaacactagactttttttttttctgagacggagtctcactctctcgcccaggctggagtgcaagtggtgtgatcttggmtcactgcagcctccacctcccgggtgcaagcaattctcccacctcagcctcccaagtagctgggattacaggctcccaccatcacgcccggctgattttttaaatatttttagtagggatggggttttaccaagttggccatgctgctcttgacctcaggtgatccacctgccttggcctctgaaattgctgggattgcaggcatgagccaccgcgcccagctgacgactagactctttaaggaaagctcaaacatgaaagaaacacaaccacaaaagtagaaaaacaaaggaattc

SEQ ID NO: 206778 - DNA, 578 bp, Homo sapiens
gagaaaaacagaaataaagtagcttctttgcaagaaaaccattagttaataatcagaagccattttccaatggatggaattggattttgtgtatcctttgtacatatattcaagaaaacctcacaatatgaccccatctggatatgcagaatcccaatcagctttttaattgctccctttcttgtgaatacaaaaagctaaggaacactagactttttttttttctgagacggagtctcactctctcgcccaggctggagtgcaagtggtgtgatcttggctcactgcagcctccacctcccgggtgcaagcaattctcccacctcagcctcccaagtagctgggattacaggctcccaccatcacgcccggctgattttttaaatatttttagtagggatggggttttaccaagttggccatgctgctcttgacctcaggtgatccaccygccttggcctctgaaattgctgggattgcaggcatgagccaccgcgcccagctgacgactagactctttaaggaaagctcaaacatgaaagaaacacaaccacaaaagtagaaaaacaaaggaattc

SEQ ID NO: 206779 - DNA, 578 bp, Homo sapiens
gagaaaaacagaaataaagtagcttctttgcaagaaaaccattagttaataatcagaagccattttccaatggatggaattggattttgtgtatcctttgtacatatattcaagaaaacctcacaatatgaccccatctggatatgcagaatcccaatcagctttttaattgctccctttcttgtgaatacaaaaagctaaggaacactagactttttttttttctgagacggagtctcactctctcgcccaggctggagtgcaagtggtgtgatcttggctcactgcagcctccacctcccgggtgcaagcaattctcccacctcagcctcccaagtagctgggattacaggctcccaccatcacgcccggctgattttttaaatatttttagtagggatggggttttaccaagttggccatgctgctcttgacctcaggtgatccacctgccttggcctctgaaattgctgggattgcaggcatgagccaccgcgcccagctgaygactagactctttaaggaaagctcaaacatgaaagaaacacaaccacaaaagtagaaaaacaaaggaattc

SEQ ID NO: 206780 - DNA, 572 bp, Homo sapiens
agagctagtgtgggaacctcaaaattatcattttttttttttttagatggagtctcgcactgtcatctgggctggagtgcagtggcgagatctcagctcacttcaatctctgtttccgkttttttttcaaacgattttcctgcctaagcctcccaagtagctgggattacaggtgcccaccaccacacccagctaaatttttgtatttttagtagagatggggtttcactatgttggccaggctggtgtcaaactcctgacctcacgatccgcctgcctcggcctcccaaagtgctgggattacaggcgtgagccactgcccccagccaattatcataatgttaaggtaatgataaacatcaattttattttaatatatctacaataattgtattctgtgatgtgaaaatcacatatgtgatttttactggtgacaagcttataggtagtactaatactattgtagtttgttgcctatatacataatcaaaggaaacattaaatttcagtttgagtctggtgaaataaagttgtaaataaagatgtgtagcttggacctctgtcctgaattc

SEQ ID NO: 206781 - DNA, 494 bp, Homo sapiens
gcaatctccattaatctgatctccccagcaaccctttctccattttttactctactgccttgtttcaggctctaatcagacctttaagccctcccaagcccattttaatttgtgcatagctgtcyaactattggtttttttggaaaatgaaggcttgtgtttcctgctccaccatattgctgacatcacctggactggccttttcttgataagtttttttccctaaagaatgagtttatttttctgttcatattttgagtaatttgagagcaaatcctggacattgtgccatggagactctgggttctgctgtattttatatatatatatataaatattatatctgcaactgcaaacttgttcttacctgcaatggatagtgactcacatatctgtttactcccttagccctgagcctgtcctgcccacacgttgcatgttagccagagactggcagagtttacaacagaacaaatgaacaaatgctcacctct

SEQ ID NO: 206782 - DNA, 581 bp, Homo sapiens
tctgtctttgacatcactactttgcaaatttgttaccactatggtcaaatttttatattcactcttasattttaactcattctgctcattatattcaatgcaacatctgcactaaaagatactcaggcattaatttatgcttttctgtttacaaatgagaattcataagcaaattgaggtagcaattagatattttttaaaatcgaagacaaaacagaagacacatacacacacatcagtggaacacaacagagagcccagaaacagactgaaatacagccgactaatctctgacaaaggagcaaaagcaattcaatggagaaaggagagtctttttaacaaatggtgccggaacaagtgggcatccatatgcaaaaaagaaaaaaaaaaagaatctaaaaacagaccttatacttcttacaaaaattaatgcaaagtagatattagaccaatatataaaatgtaaaattttcaaacttctagaagataacataaggaaaaaaatctagttaactttggatttggtgactttttaaagatacaacaccaaaagcatgatccacgaagacaaaaattggtaa

SEQ ID NO: 206783 - DNA, 598 bp, Homo sapiens
aacatgctctgagttcttaaaaaactgcttaatgttttacaaaatttttctaattttcatttgcacattttatccatatcatagacttgtatagcagttattattttaagtaagatgagaatattcaaccacacagaggtttgcaatcagcacatatagcttatcttagagtcagaaactccatcttcttttttttcacttgaaacatttatattcttaccattctgccactgaatttttcagcttggctcttcagggctgttctcttaaagaaacttttgctaatttttctttaagagtctcatttgcatgcaatcaaagcactatgctaagaaagcaagaaaaacaaaagcatctacctctgttggcatcagggctgtggctttcagttcaagaattactgcagtgttgaaaatgagctcatggatgaacagctctgcatggattcaaatgtggctgtttcctggcacctgcttcccaagtcattgcaggctgtaattcgtagttactaagcaccatgtgggcattaccagcatttccgatrtgcagtgccacctgctttcctgttagtagttactagtattttgggacactctga

SEQ ID NO: 206784 - DNA, 467 bp, Homo sapiens
aacctgaacctcccgcctcgacctctcaaattgctgggattacaggtgtgagccaccacacccggcctaaatttcttatgtgccatgggactgcaaaacatcattattaggggcagctggatggaaggtataggaggayactatagtgccttttcaatatttctgtctaaaatctaaaatcatttcaacaggaaacatttatttcaaaacatgaaggtggttatccttccatgagtttgaagtacaaaggcaggctcacggtgtcgtcagaattcagaacgatggtcgtggggctgggggtgctgggaggggctgggcatggttggctttgtgatctggggtctggtgtgttccatctctgaatctctctcgagctgcactctttcttaatacattttcataagtttaaccaaaaataaaacgaggatgcgaagcttgcttgggttgttaagcctagggaaattatc

SEQ ID NO: 206785 - DNA, 467 bp, Homo sapiens
aacctgaacctcccgcctcgacctctcaaattgctgggattacaggtgtgagccaccacacccggcctaaatttcttatgtgccatgggactgcaaaacatcattattaggggcagctggatggaaggtataggaggatactatagtgccttttcaatatttctgtctaaaatctaaaakcatttcaacaggaaacatttatttcaaaacatgaaggtggttatccttccatgagtttgaagtacaaaggcaggctcacggtgtcgtcagaattcagaacgatggtcgtggggctgggggtgctgggaggggctgggcatggttggctttgtgatctggggtctggtgtgttccatctctgaatctctctcgagctgcactctttcttaatacattttcataagtttaaccaaaaataaaacgaggatgcgaagcttgcttgggttgttaagcctagggaaattatc

SEQ ID NO: 206786 - DNA, 467 bp, Homo sapiens
aacctgaacctcccgcctcgacctctcaaattgctgggattacaggtgtgagccaccacacccggcctaaatttcttatgtgccatgggactgcaaaacatcattattaggggcagctggatggaaggtataggaggatactatagtgccttttcaatatttctgtctaaaatctaaaatcatttcaacaggaaacatttatttcaaaacrtgaaggtggttatccttccatgagtttgaagtacaaaggcaggctcacggtgtcgtcagaattcagaacgatggtcgtggggctgggggtgctgggaggggctgggcatggttggctttgtgatctggggtctggtgtgttccatctctgaatctctctcgagctgcactctttcttaatacattttcataagtttaaccaaaaataaaacgaggatgcgaagcttgcttgggttgttaagcctagggaaattatc

SEQ ID NO: 206787 - DNA, 467 bp, Homo sapiens
aacctgaacctcccgcctcgacctctcaaattgctgggattacaggtgtgagccaccacacccggcctaaatttcttatgtgccatgggactgcaaaacatcattattaggggcagctggatggaaggtataggaggatactatagtgccttttcaatatttctgtctaaaatctaaaatcatttcaacaggaaacatttatttcaaaacatgaaggtrgttatccttccatgagtttgaagtacaaaggcaggctcacggtgtcgtcagaattcagaacgatggtcgtggggctgggggtgctgggaggggctgggcatggttggctttgtgatctggggtctggtgtgttccatctctgaatctctctcgagctgcactctttcttaatacattttcataagtttaaccaaaaataaaacgaggatgcgaagcttgcttgggttgttaagcctagggaaattatc

SEQ ID NO: 206788 - DNA, 461 bp, Homo sapiens
ctgaacctcccgcctcgacctctcaaattgctgggattacaggtgtgagccaccacacccggcctaaatttcttatgtgccatgggactgcaaaacatcattattaggggcagctggatggaaggtataggaggatactatagtgccttttcaatatttctgtctaaaatctaaaatcatttcaacaggaaacatttatttcaaaacatgaaggtggttatccttccatgagtttgaagtacaaaggcaggctcacggtgtcgtcagaattcagaacgatggtcgtggggctgggggtgytgggaggggctgggcatggttggctttgtgatctggggtctggtgtgttccatctctgaatctctctcgagctgcactctttcttaatacattttcataagtttaaccaaaaataaaacgaggatgcgaagcttgcttgggttgttaagcctagggaaatt

SEQ ID NO: 206789 - DNA, 465 bp, Homo sapiens
cctgaacctcccgcctcgacctctcaaattgctgggattacaggtgtgagccaccacacccggcctaaatttcttatgtgccatgggactgcaaaacatcattattaggggcagctggatggaaggtataggaggatactatagtgccttttcaatatttctgtctaaaatctaaaatcatttcaacaggaaacatttatttcaaaacatgaaggtggttatccttccatgagtttgaagtacaaaggcaggctcacggtgtcgtcagaattcagaacgatggtcgtggggctgggggtgctgggaggggctgggcatggttggctttgtgatctggggtctggtgtgttccatctctgaatctctctcgagctgcactctttcttaatayattttcataagtttaaccaaaaataaaacgaggatgcgaagcttgcttgggttgttaagcctagggaaattatc

SEQ ID NO: 206790 - DNA, 630 bp, Homo sapiens
agctgttcacttaccctgcagggagtgcctctcactggccagcagctgcaccagtgcccagaatgcatcctcctcaggaaratagaggaggaacaaggcggcgatgtggctcaggtccctgcagtagcccacctcctgcaagagccagagtcaccatggaaggacatcacctgggagggctgaggtcacctgggaggactcatgtcattggagagggcagaggtgactggagaggcttcctctgaaggagaggcttcctctgaaaaagaggcttcctcaggatgcacattcatttcatgacaagagccaagtccatcaggcacttcagcaccttgtccaaaatgtctgctgatagcaccatcctgtgtgcgatgctgccaagctcctgggctttggggcagccccaggaggagggcgtcatttcttgttctgagaagtggtggtcaggcccaggtgacaccaggagtccaggccctgactcctttgtgtctcagcttgaccccttgagaccacccccttccttggaggtttatgccagcggtgagctgacatcctacctcctatatcctggtgggtcacaaatactaactttaaaagaagcaacgacacccccaccagacacccactcct

SEQ ID NO: 206791 - DNA, 395 bp, Homo sapiens
aagatattctagtaaattttttcccagtactcacaaaatttcatttttttctaaattccacaatgttctagccacataggagtatttcttattctctgaacatgcctacctgccacctcttccctttgcacctgctaccctaggttacgtcactttctctgtctggaatttttagttgatcattttctgcaaaggtcaaatgcctaattattctgcaaagccctagaagctctttgtatgccttactcaattcctgagacaagaataatttctcattatttrcccataatactccattcagccttattattatgtaatatatattttaattttcatacatttattgacttgtcttcctacttgaggaggaaaccccctattttatttatccttga

SEQ ID NO: 206792 - DNA, 395 bp, Homo sapiens
aagatattctagtaaattttttcccagtactcacaaaatttcatttttttctaaattccacaatgttctagccacataggagtatttcttattctctgaacatgcctacctgccacctcttccctttgcacctgctaccctaggttacgtcactttctctgtctggaatttttagttgatcattttctgcaaaggtcaaatgcctaattattctgcaaagccctagaagctctttgtatgccttactcaattcctgagacaagaataatttctcattatttacccataatactccattcagccttattattatgtaayatatattttaattttcatacatttattgacttgtcttcctacttgaggaggaaaccccctattttatttatccttga

SEQ ID NO: 206793 - DNA, 565 bp, Homo sapiens
aagcttgcgaacttggcttgagccctaagcagccgagtatgtgccgggcctctgcttctctctttcagtaagagggagaaccaagaaagaggctgaagcatggtctgcagagaaggcacttgtgcaaacaccaggagaatgaggggcctgagttgtcttcatttctcctaaaaacacgcatttcctcccaggccaccctagtgagggcatgaagcacagcgtgtgtgtgtgtgtgtgtgtgtgtgtgtstgtgtgtgtttgcaggaatatgcatgtgtatgtgtgtgcatgtgtgtgtgtgcaggtatatacatgtgaatgtatttatgtatgtgcatctgtgtgcatgtgtgtgtgcatgtgtgtgtgcaagtatatgcatgtgcatgtatgtgcatgtgtgcgtgtgtgtgtgtgcgcctgtatgtgtgtgttgcagggctttacagcggacaggatgtgggagggcagctgcagctccaagctgcaagtctttctgatagaatggttaagattccctggaccacagaaagaatgttttcatttgcacctatttttattagca

SEQ ID NO: 206794 - DNA, 565 bp, Homo sapiens
aagcttgcgaacttggcttgagccctaagcagccgagtatgtgccgggcctctgcttctctctttcagtaagagggagaaccaagaaagaggctgaagcatggtctgcagagaaggcacttgtgcaaacaccaggagaatgaggggcctgagttgtcttcatttctcctaaaaacacgcatttcctcccaggccaccctagtgagggcatgaagcacagcgtgtgtgtgtgtgtgtgtgtgtgtgtgtgtgtgtgtgtttgcaggaatatgcatgtgtatgtgtgtgcatgtgtgtgtgtgcaggtatatacatgtgaatgtatttatgtwtgtgcatctgtgtgcatgtgtgtgtgcatgtgtgtgtgcaagtatatgcatgtgcatgtatgtgcatgtgtgcgtgtgtgtgtgtgcgcctgtatgtgtgtgttgcagggctttacagcggacaggatgtgggagggcagctgcagctccaagctgcaagtctttctgatagaatggttaagattccctggaccacagaaagaatgttttcatttgcacctatttttattagca

SEQ ID NO: 206795 - DNA, 565 bp, Homo sapiens
aagcttgcgaacttggcttgagccctaagcagccgagtatgtgccgggcctctgcttctctctttcagtaagagggagaaccaagaaagaggctgaagcatggtctgcagagaaggcacttgtgcaaacaccaggagaatgaggggcctgagttgtcttcatttctcctaaaaacacgcatttcctcccaggccaccctagtgagggcatgaagcacagcgtgtgtgtgtgtgtgtgtgtgtgtgtgtgtgtgtgtgtttgcaggaatatgcatgtgtatgtgtgtgcatgtgtgtgtgtgcaggtatatacatgtgaatgtatttatgtatgtgcatctgtgtgcatgtgtgtgtgcatgtgtgtgtgcaagtatatgcatgtgyatgtatgtgcatgtgtgcgtgtgtgtgtgtgcgcctgtatgtgtgtgttgcagggctttacagcggacaggatgtgggagggcagctgcagctccaagctgcaagtctttctgatagaatggttaagattccctggaccacagaaagaatgttttcatttgcacctatttttattagca

SEQ ID NO: 206796 - DNA, 406 bp, Homo sapiens
caccattttaaagtgtacaattcagtgcttttaatatattcacaaggttgtgcaaccatcacttctgtctaattctgggacattttcattgccccaaaaagaaaccctatgaccgtgagcagctgctcctgtttctcctccycagtccccaacagataagatggtaatcactcatctatttgctattctatggatttgcctttggacatttcatatctgcatatggacatttcatataaatggaaccatgcaatatgtggtctctttggtggacttactttaacttagcataatgtctccaagctcttccatgttatagaatgtattactacttaatttctttttatggcccaatatcccattgaatccattgcatagagatactacagttatccatttatcagtt

SEQ ID NO: 206797 - DNA, 422 bp, Homo sapiens
gaattcacaattgcaaagatatgaaaccawcctaagtgcccatcgactaacaagtggataaagaaaatatggtttatatatgctatattggaatactacccagccataaaaaggaatgaaataatgtcttttgcagcaactcggatggagctggaggccatattctaagtgaagtaactcaagaatggaaaaccagatatcacatgttctcatttataagtaggagctaagctatgaggatgcaaaggcgtaagaatgacgtaacgaacactggggactcaaggggaaaagggtgtgaggagggtgagggataaaagactatatatagggtacagcatatactgcttgagtgatgggtgtactaaaatttcagaaattaccactaaagaacttatctatgtaaccaaaaacacctgtaactg

SEQ ID NO: 206798 - DNA, 422 bp, Homo sapiens
gaattcacaattgcaaagatatgaaaccaacctaagtgcccatcgactaacaagtggataaagaaaatatggtttatatatgctatattggaatactacccagccataaaaaggaatgaaataatgtcttttgcagcaactcggatggagctggaggccatattctaagtgaagtaactcaagaatggaaaaccagatatcacatgttctcatttataagtaggagctaagctatgaggatgcaaaggcgtaagaatgacrtaacgaacactggggactcaaggggaaaagggtgtgaggagggtgagggataaaagactatatatagggtacagcatatactgcttgagtgatgggtgtactaaaatttcagaaattaccactaaagaacttatctatgtaaccaaaaacacctgtaactg

SEQ ID NO: 206799 - DNA, 348 bp, Homo sapiens
ttgtaatcctagagagaggacagcacatacgaaggtctgaagcaataggatacatttagggaaatgctaaaattggtccaaaaaggatggcaggaagagatgatattgaagaggaaggcggcaggcaggtggcccaggtgagcccacgctgtgccgaggagtgcggggttcatcccrgggcagcaggttttctttgtcctcactggcagctcctctcagtttctgaggctgcctcctcgttttctgcccacatcagagtgtgggaatttctaatctaatccctcgggaggccatcaactttactcagggctgaagaatgtcttattcactcaataaatatttacaagc

SEQ ID NO: 206800 - DNA, 622 bp, Homo sapiens
tctatttaaatataaattctctctaagaaaataagtgacaaataagaatgcttataaataggatttctttttctttctactttttcccctttctcacttgcayttaaggtgctgaaagtggagttcattgtactcttcactgatattagtggtcttcataaggcctgtctctcttattttctcttcatccttgtaatgtgtttaatgaatcctctaggatatagtcatatccttaagagatgtgagaaattgctttctcaccgtatttgtcattgggtagacaccactcttttcattaaggaatgctggattgagctccaaaatgtttcaattggtctgcattctcaccagacatgcctgaggattcccctttccttttgtaattgccgaattttactataatttagctttctacatttgtataatcttaggagtcaaaaagggtatttaactgctctggctactggtgatggtattcaccattttgtacacttgctagccactcaagtttcccctttggtactatctatgtaaagactcaactggtttttctatttgatttcccctttttctcagtgatatatttcccagctatccattataaatatatcctcctttattc

SEQ ID NO: 206801 - DNA, 553 bp, Homo sapiens
gaattcagataaaataaatataagttttaagcttaagagcagaagggtcaatttctatattcatccgaaagaaaaaaaactattctatgggactattggatgggtatcacttgcctatcacttaaaccttaagttcttccatcctccctcttagtccccgaactccaggtattctggccttcttttctgctgctgaacacaccaagcttgttcataatattcagattctgtactcactgtgccttctgttagaaatgtttgattttcagatcttctcttagctgcctcttcttagcattcagattccaattctcgccttctctaaccattgtaggtaaagtggttacygatcctgccttctcatttttcatcttctttcttcacataaaccagaggcagctggacactttaaaatgttttttcccaagcttttatggcctgctcctctgttagaatttgtctgtaaatgataacaccagctttttttcttcctcctgtttctggatttgacgtgatttttaaattctttcttggctttgtaagttaagctcct

SEQ ID NO: 206802 - DNA, 508 bp, Homo sapiens
ttccacttatcccactctaagcaccaccatgtagccccacaattaggaagcaagatttgacaaagccttaggtgtcctctaacaaccttcttactaaatgcaagaaatttctgtcacttcctggtaagtagatattccggcttcttcatgaataactctgataacatggagtccactatttcactagacaggtcatgtcaactacataaamctctaagactccttagagacttctttcttaaatttatcttaaaacgtttcctggaaacctctacagaatagttcaaattttacattctagatgacacaaaataattctttaccatgtgctagctacatgacctggttaagaatggtcacaatctaggcatggatttgaggagctatgggataaacctagctatcaaaaccaaaaaactatggcaagatcactgacatcacagtgtggcaatcaagtaatcttgaagccatatgcttctttcttcaccatgcctactaataccattta

SEQ ID NO: 206803 - DNA, 558 bp, Homo sapiens
ttttaaaaatcctttgtatggtatctcagaatcacaaagtttaattttaaaagggatcatcatgatgagcttattcaacactttcatttcataggcaacagaatggargtctagaaggattaattgacttacttaaggtcagttttatagaaacgaaaaaaaaatcttgaacaaattctctagcttttagattgggggaataagactatttactcattcacttcccaacaaatcactcacccactgtcccgaagcccagggcctgctctcttccatggatacccactttcccttgattcagaacttgacagtaagtggagtggggaggaaagcctattaaaggctatgctctttaaacagagtgcttacattttagacacagtaggaataacagtagagaaagcaattagcagggggaatgtcaggaagtcagtctgttctatgaagaaaatcaactacctttaaacagtcaaaggaagcttgggtatataacagacttttgccaatggagacacaattaaaataaactttgaggcgggcatggtggaggggaaaggt

SEQ ID NO: 206804 - DNA, 550 bp, Homo sapiens
gggtgccagcccttccttgaaggccttaaggaagtaccacatgctgctttgcttatacayaaccagtggccaagaggttgtcaaatagccacatctattacatggaggctggaaaatgcagtcttctagatggatatggattgcccagactaaggacagggtttggtggtagtggggaaacagaggagcctagtgtaggcgtatggcgtttctgtcattcctgctaaacatgtttaaggttcctgatgcacattgcggtgttactaatttgaaacgagacacctgacataagggctgtcactcactgggtggatctattgtaggcaccagacatattgttcagtccttaggaaggatccacccattctagttgtctgctcagatgaagatcatgaaagaattcactgaaaatgactgaacctagtttgagaatggtggacatctggctgtgtgtttaacttatatacaaggctgtgtatcattatattcgggtgaatggataggtaggtatgtatataggtaacatattgtataattaggttgatagaaa

SEQ ID NO: 206805 - DNA, 639 bp, Homo sapiens
gaacttccatttcagtgttccagaagggagaactgttcttagcactggggcctgcacagtctgccacataggcccacttctcagaattagagggtgaagactgatatacaggggtgtccattctcaagtacatcatagttcagctgtgaaaacaaaagagctgggtttttaaccctgactttgaccctcgttagttagacttcagacacctggcattgaagaccttctttatcaaatcagaggattaaaaccarttactcctaaggtctcctctaattctaaactttatatttccataaaattaattctaggctttggctgctagaaaggacttcagtaataattccgcagtccactcatctagtccaacactttcttctaaattggtccaatggattgagttttgaacattggaaatgggagatgtaacctgtagtcacaagcatagaagtaatgacttataatcatcagattaagctctcaaaaggtatgattaagagaaacaagccaacagagtaggcagtgatttcaaaacaaccaccattgtcaaattaacagcagcccatcctggatagaataatttttcagttgtaatttcaattttttcaatagataaatattcctgcagattgtccctat

SEQ ID NO: 206806 - DNA, 516 bp, Homo sapiens
gtcctgcagctggggaaagcccgcagcacagcgggctggcgccctcccctgtccccacctcacctggtccccgttagctttgtttttttctgtacaaatgttatgaagcattcaactatatcttgggcttttggagccttaggctggttttttttttttttttcaagttttcaggaacagaraaatctgtgtgtttatcccctatccccacaattctcaatcaataggaacagatttctgtttatgttaatgtatttctgtttataccaactggaaacattacagagtttatttatttttctcttggtttaagagaaaaattatagcccaaggcaggacaaaggacgtggaatagtgggagaattaactgggaaagaacttgttctgtaaggatttacgaagaaggaggcagattgccaagaagcagttcctatttttcagtgacatgagaggttttatttccatcagtgttttttcaaaatttaaggacctttccttccgcagccagagggtgga

SEQ ID NO: 206807 - DNA, 644 bp, Homo sapiens
attagataccatgatattctccctcaaaactctctcaaaatatctaagtatacactctttactatgcatactcattaaacacaaaacaaagcaatggccatctggagattgttgcaaaccaaagcaaaacaaggagccatcacacctgctgggcattgtcagcgttcagatatgtggatttcacacttttggatagagttgactacttctttgaaatactcactatgaacacaaaaatatcctcatggtaatttttttgtaggaacagttcgtgttataggaaatgtttgttaaaagaataaatgtaagctaaataccttacgttacagagtgctttgtgattcgaaaaacactttcattccttttttaaaaaatttcctgtcacagcaagcctagtaaaaaaagagtatctagtagttttatgatcatcattttacagatgagaaagccgagctctggagggctggcagcccgctccsagtcactggagccatctgttgtcagacattgatcattctacagtagattgattgggtataactacttgacattgcataacataatgctgggattaaaatatctttccctgtaaaataaattttcctgtatgtattagttaggattccctggttataagtaacagg

SEQ ID NO: 206808 - DNA, 577 bp, Homo sapiens
tcaccactaccatcccaactcttccaactcgattgtcaactatggcttctagcaaatgtcttcacataaccccacagttctctccattcacttacayactaatcatcaggtcagaaaaggaaccaaaaagcccatttcagctttcaaactttattttcccctacaagaaaagaccacctactttttacttttcttccttcaaagtgttgtcacaacggttgtaatagttagaaactaaatgctcattagtagggaatatagttaaatcaattataattgaaatacaatctatagctgtagctatctataatatactctgaggctgaaattgtttttttaagaatgaagtggttctttatctcctcatagagatatatggttatgtgaaaatccaagtgaaaaaaacagcagtgtacctcatctttatgtaagtggaaagaaaacttatttatatttcattgtacatacaaataaaaaaatagtttccattatatcattccagaggtaagtgactacttcccatcccaggggggaaaatgggaggctgaggaagatacattttcagtttatatagttt

SEQ ID NO: 206809 - DNA, 577 bp, Homo sapiens
tcaccactaccatcccaactcttccaactcgattgtcaactatggcttctagcaaatgtcttcacataaccccacagttctctccattcacttacatactaatcatcaggtcagaaaaggaaccaaaaagcccatttcagctttcaaactttattttcccctacaagaaaagaccacctactttttacttttcttccttcaaagtgttgtcacaacggttgtaatagttagaaactaaatgctcattagtagggaatatagttaaatcaattataattgaaatacaatctatagctgtagctatctataatatactctgaggctgaaattgtttttttaagaatgaagtggttctttatctcctcatagagatatatggttatgtgaaaatccaagtgaaaaaaacagcagtgtacctcatctttatgtaagtggaaagaaaayttatttatatttcattgtacatacaaataaaaaaatagtttccattatatcattccagaggtaagtgactacttcccatcccaggggggaaaatgggaggctgaggaagatacattttcagtttatatagttt

SEQ ID NO: 206810 - DNA, 602 bp, Homo sapiens
aagcttggaatgtttccgtgtaggggagaagtttatggtggggttggaatgtctctgctcagaggggaggttatctcggggctgacatctttccggcaggacgggggttatcttggggctgacatctctccagccggaggggaggtaatctcggggctggcatgtctctggtcggggacaggtttatcttatgtttggaatgtttctggtgataaatgtcatttgtgctttatgatcatgctgaccttagccattaggctgacgccctttggatttgggcagcttttgatcaagctgaactttaaaatggtggtgctcatccaagatggcgatgctcctgttctgtcaataacattatgagacaagggagaaaataaaaatattttaccggcaaaacatgttttttgtcacattttgaaatagctctgcaagccatcctttgtgggggaaaattcgtatctgtaaagaatccctattaacacarctagacattttccttccaggcccctccaattctaaatagattaactgagagtctagcactctttaaagggtctgaataggaaacatttgtcatctattgtttctaaggggagccgcca

SEQ ID NO: 206811 - DNA, 574 bp, Homo sapiens
attccctctctttttaaggatctaacagaagaaaaatcattgaatgaagtcaaatcccttctcactcaggactgctaaaccctgcatattgtttagattacatttttatgtgacttgactccttgatttaatcacagcacctcaaattcttgaagacgtgtccattttgatgtcacaatttttaaagaatcatctataaattattgttaaatttacaggaaagtgtttacaaactctaatgtasacaaaaatttcctggggacatggggcctgaatttctgcacttctaataagctctcaggtgaggtacatggcttctgatccactagcaacattggacttaagaaatagcatctcagggataagaatttcatactctcaattcaaatagcccttttgagtcactgcaatcctcttgcagtgactcaaaagaaaagtggggttaaagaggggaatagggtgaaagatgcccataatagaaggaagatggcaagtgaagaactctgcctattgattcataaacaataagtacttagtatggatattattgactaaactgatttagattgaattc

SEQ ID NO: 206812 - DNA, 588 bp, Homo sapiens
tcaccaaaagtcatttctcccttcctccccattattgcctttgcactttgcrtttatcttgtgattcttatgaccctgtgtcattggaatatatgttttatttccctacatgtaaactttgcaaagttaaaggccaagtcacactccattctttatctcacataagcagtggctgtcaaattttattgtgcaccaaaatcacccaaagagcttgttaaaaaacagattactgggctgtatcaccagagtttctgattcagtagtctagggtagggcctagaatttacttttctaataaattcccatgcgatgctggtgttgctggtccagggactgcactttgaaaaacatttcagtactgtatagagcttaccagtctcttaccaaagtagctaaatagtgttttttgatttataaaactataacacatacattatcttctttgctataatatgtccaaatacagatataatatatgtatgccatagaatgcctcatattatatggtaataataaattggttggttcatctttcccaccttttattcattcactcatttcttcaacaaatatttcttaagtattgac

SEQ ID NO: 206813 - DNA, 595 bp, Homo sapiens
atgttcatatgctgtatgaatagatagatgggaaagaaaattagaattctgcagaatccttggggatccatgtacattcatgttgtccagaagcaaaattttctttctggatatatgcaatagtttaatcaagttactactatagtgtcagtgaatatcaggcctaaagaatatagggtataatgagaatacatgacagaaagcctgttctagggagtttatttcccaaaggaggaagaacattcaactgagacagaaggattagtaggcattttcaggcatgggagtttgaggacagggaagtggaagagatggagaacgtgcaagaacctgagagaggagaaagcatgacaaggaccctaaaaaaattattagagactggccgcggtgactcacgcctgtaatcccagcactttggtaggcagaggcgggaggatcacttaaggtcaagagctcaagaccatcctggccaacaagacgaaacctcatctctactaaaaatacaaaaattagctgrgtgtggtggtgcatgcctgtgatcccagctgctcagcaggctaaggtaggagacttgcttgaacctgggaggcagaga

SEQ ID NO: 206814 - DNA, 404 bp, Homo sapiens
ggtgggtccctggtggaaaccccaccttcaagccaaatgtagcctgaaacctgcagcccaaagtgagaacttctattcctgtttgcctgctctcttgattggktctttctgattaatgtctttttaccaatcaaatgttgccttttccaaaactaccaatagcttgctgcacccaccatcctgtgcctataaagatcctagactcagccagtagagagaagtagctggacatcagagagaggcaacttgacttcggaggagagaggcagagagataacttgacttcagggaagagtgacctgccattcccattccctttccagctcccctgtctgctgaaagcttctctcattgctcaataaaattctccccattcaccatcctttgatttgaccacattacct

SEQ ID NO: 206815 - DNA, 549 bp, Homo sapiens
tgattttctacaaacacaagttcataatttaagcctgctaaaacatgtgtgtattttcagaatgagaggaggtgtttgatgttataagtccattgtgactgaataaaaaattacagaccagttcagttttttaatggcattatgggtgcttactaattttttgctaatggttactgataaaacaaaatttaaaacataaacgtttgctgaatcctgtgaaaatctctttttctcaaatactttcatttaatttatttaacaattatatatgaagaacacattctgtgtgctgaaggaattcagaatatgccacctcaaaatattccactttgacctaaggattattttsagctgaaagcaattgagaaaaagtagacaaagagcaaactctctgccctcaccttttctacaaggaagggcaagatgatttttaattataggagacgattctagactcttaacccaaagatgttccagaagaatctacataacaaaatcttactaaaacaacccttatcttccattagtttcctcatatatttacagttt

SEQ ID NO: 206816 - DNA, 549 bp, Homo sapiens
tgattttctacaaacacaagttcataatttaagcctgctaaaacatgtgtgtattttcagaatgagaggaggtgtttgatgttataagtccattgtgactgaataaaaaattacagaccagttcagttttttaatggcattatgggtgcttactaattttttgctaatggttactgataaaacaaaatttaaaacataaacgtttgctgaatcctgtgaaaatctctttttctcaaatactttcatttaatttatttaacaattatatatgaagaacacattctgtgtgctgaaggaattcagaatatgccacctcaaaatattccactttgacctaaggattattttgagctgaaagcaattgagaaaaagyagacaaagagcaaactctctgccctcaccttttctacaaggaagggcaagatgatttttaattataggagacgattctagactcttaacccaaagatgttccagaagaatctacataacaaaatcttactaaaacaacccttatcttccattagtttcctcatatatttacagttt

SEQ ID NO: 206817 - DNA, 402 bp, Homo sapiens
ctgaaataaaacaaaaatagcatctatgaaaggaagattgctgggtcatcctggtgataatcaatcagctgaggctattaccagaactcctgaaggtagaaaaataagctaagctataaataaatgctttaaataaaattatttaagttataaataaagattaccagtttgtaatctaaaatcaagaaaaaatttttaataaagaaaaagaaaaagtcttgtaagtattcctgtcataggcttaatggataatagtttttggtttgttgttcccttaacaatacacaatggttatttytacagtcactcatcagatatacaactattaaaaataaataggaaaagatctggatggtaaagatctctctgaatacctcaagggaacactaacatggcaaagaa

SEQ ID NO: 206818 - DNA, 402 bp, Homo sapiens
ctgaaataaaacaaaaatagcatctatgaaaggaagattgctgggtcatcctggtgataatcaatcagctgaggctattaccagaactcctgaaggtagaaaaataagctaagctataaataaatgctttaaataaaattatttaagttataaataaagattaccagtttgtaatctaaaatcaagaaaaaatttttaataaagaaaaagaaaaagtcttgtaagtattcctgtcataggcttaatggataatagtttttggtttgttgttcccttaacaatacacaatggttatttctacagtcactcatcagatatacaactattaaaaataaataggaaaagatstggatggtaaagatctctctgaatacctcaagggaacactaacatggcaaagaa

SEQ ID NO: 206819 - DNA, 319 bp, Homo sapiens
gaattcttcacaaatacagcaaacctcaaaacctcttgtgtagcttttttctgtaggcagccgttttcaggtatgttagaaactactaaagatagagcaatgtttataaaaatctagatttcagcttttacttttctttaggaaatggggatgatgctccgaaagtttrataataccagtgtatcagtaatcagatgttcagatgattttagtctttcccgaatttttgatgaaaatcttaaaggcaaaataaggtgttaaattcaactcaacatatacattttgagttctaactctgtagtaagagctaaggatataa

SEQ ID NO: 206820 - DNA, 593 bp, Homo sapiens
tcatgccagtcagaatggcgattattaaagtcaagaaacaacagatgctggcttggttgtggagaaaaagggatactttacactgtgggtgggagtataaaattgttcaaccattgtggaagacagtgcagcaattcctcaaagatctagaagcataaatgccatttgacccagcaatcccattactgagtatatacccaaaggaatataaatcattctattatagagataacatgcacatgtatgttcactgcagcactattcacaatagcaaagacatggaaacagccgaaatactgctccatgatagactgaataaagaaaatgtggtgtgtatgtatatgtatttatatatatatatatatacatatayacacacacacacacacacatacatacataccagggaatactatgcagccataaaaagaaacaagatcatgtcctttgcagggacatgggtagagttggaatctgttatcctcagcaaactaacacaggaacagaaaaccaaataccacatgttctcacttataagtgggagctgaatgatgagaacacatggacacatgcaggggaacaacacacactgg

SEQ ID NO: 206821 - DNA, 478 bp, Homo sapiens
catgccttgctggacagaaccctgtacaatcaaatsatattcttcctggccagcgctgtggcgggtggattacctgaggttgggagttagagaccagcctggccaacatggtgaaaccccgtctctactagaaatacaaaaattagccgggcgtggtggcgcacacctgtaattccagccactcaggaggctgaaggacaagaattagaggtggaggcaggaggtggagattacagtgagctgagatcccaccactgcactccagcctgggggacagagcaagacttcgtctcaaaaaaaaaaaaaaaaaaatgctcttctgcctgacccaagctgaatcctccccatttgcagccgtacaccgagttgccagccccatgggatatggccagggcctcaaggcaaaggctaccaacatgtgtgggtctcctcagggcacactccttattttgtctgactgtgggtgtgcatttacagt

SEQ ID NO: 206822 - DNA, 528 bp, Homo sapiens
gcactccagcctgggcaacagagcaagaccctgtctcaaaacaaaacatcagtgacggagaaaagtatcgggacttttgcaacaggaataacaccaaagtatgcagggctgcatacacagagaatgagtcaaatgaccacaacaggtttcttcatagcaagaaaggggctacctcagaggcaaactcaaggstgacagttccccttcagccccacagttcaagaaggagggacacctcccctagttcccaggctctcaactcttcatgtgctagatccaccactgtttcggcatttatgcagcctagacttcctctagcatggcccctcaccctcagggagatggcccaggagcaaggcagagcatggtcaaatgcacagagaagggtccactccgtgagggtcagggagtcaagaaaggctttcctgggagacgcactggcgttggcctccaaggacaggtgggattgcatggggagagactggcacaacaaaagttttttttttcatgccaactactttggtcaaa

SEQ ID NO: 206823 - DNA, 535 bp, Homo sapiens
catgggatgtggccaggctgcccatggtaagatccagcgtctgaagctgtgtggtcctcaccttctcattcctggggagtgatttgtgcttctggctgccttctcttcccttggttcccacctgatttctgagcttcatgcttcaaatttacggcaattctgtgagctacccacacccccaaatactttctagattactttttctgcttaaatctgctgaaacgaagactctgacggaagctcacattaactgagaaagtgtacgagaaagcactttgtaaagtacccggaaaatgttcgttgtcaatatccaagatctccctytaggcagaaaatcctcacagacacctgccctctccacctgtacctggtagctccacagaagctctcctccaccttctgggtctgcagggccaggccccacagatctgtccaccctgctctattaataaatgcaatgtgattgctactaggggcatggcttgcagtaagctctgcaagggattaacatactgtctcaggaagggtgagtgac

SEQ ID NO: 206824 - DNA, 387 bp, Homo sapiens
ccagctctaggtttcatacgaagtcactatgaaatccaaaagtcactactctgttcaaacacatccacaaacagtaagaaagttactgactcttaacttctctctgtgccagaactttttgtaaaacaatttttcttttttatttatttatttttttgagacggagtctcacagtgcagtggcacaatctcagctcactgcaagctccacctcccaggttcacgccattctcctgcctcagcctcccgagtagctgrgactacaggcacccaccaccactctcggctaattttttgtatttttagtagagatggggtttcaccgtgttagccaggatggtcttgatctcctgacctaatgatccgccctcctcagcctcccaaagtg

SEQ ID NO: 206825 - DNA, 455 bp, Homo sapiens
ttcatacgaagtcactatgaaatccaaaagtcactactctgttcaaacacatccacaaacagtaagaaagttactgactcttaacttctctctgtgccagaactttttgtaaaacaatttttcttttttatttatttatttttttgagacggagtctcacagtgcagtggcacaatctcagctcactgcaagctccacctcccaggttcacgccattctcctgcctcagcctcccgagtagctgagactacaggcacccaccaccactctcggctaattttttgtatttttagtagagatggggtttcaccgtgttagccaggatggtcttgatctcctgacctaatgatccgccctcctcagcctcccaaagtgctgggattacaggcgtgacgaccgcgcctggccaaaacgatttttctaccratcaacgaagtgccaaatatcagaataag

SEQ ID NO: 206826 - DNA, 548 bp, Homo sapiens
tgccaatccattctctaaaggatttttctcttctgcttttcagttaagccaagtctgaaatgactttttaattartatattgaattcttgtctagtatcaaaaacttggccaattgatggcagatagggaaaaaagaaacacttgaatcacttcaactaagagctgttttggtataatctaaacacaactatcctagaggaaaacgtatgacttcacatgattacatggagaattttatttaaataggaaaaaaaaactttcccaaaaagtacactgtaaaggaattataacatctattagaatgacccggttctatggtcttagcaggtaccacagccatcctatcatgtcagtcccttataagttataaaaatagaactcctgccatcctaacaacctttgaaagccacttgttctgcaattctgctcctgtgtttcacctgcatccctgatcgtctccagcagccctgattcctacacaggaagaggctccacagaacttcaaggtgagtgttatatataaatacatgaacagcaagagagagag

SEQ ID NO: 206827 - DNA, 545 bp, Homo sapiens
ccaatccattctctaaaggatttttctcttctgcttttcagttaagccaagtctgaaatgactttttaattaatatattgaattcttgtctagtatcaaaaacttggccaattgatggcagatagggaaaaaagaaacacttgaatcacttcaactaagagctgttttggtataatctaaacacaactatcctagaggaaaacgtatgacttcacatgattacatggagaattttatttaaataggaaaaaaaaactttcccaaaaagtacactgtaaaggaattataacatctattagaatgacccggttctatggtcttagcaggtaccacagccatcctatcatgtcagtcccttataakttataaaaatagaactcctgccatcctaacaacctttgaaagccacttgttctgcaattctgctcctgtgtttcacctgcatccctgatcgtctccagcagccctgattcctacacaggaagaggctccacagaacttcaaggtgagtgttatatataaatacatgaacagcaagagagaga

SEQ ID NO: 206828 - DNA, 435 bp, Homo sapiens
cagtgtgggacttccccactccaccctacaatgtctacggatgccagaactgtggcagggagctctgggtcctttaatccagccagaaaggccacctctcagtcctaagacctcaggagagccaggcctctgcctgcctacctccacaacacaggcaggtggacgcactcaaagtgcttactcttgatctgtgaggattaatgagctaatttctacagagccctttaagctgattggcccaaacgcaactaaataarccccatcattaaccacgggcaagatcaaatcctcaggatccagtgaggcaaatttttagacgtcaggcaatgttcctcctccacaaggtgaggaaggagtatttatccccaaaactcagaacttcatccagaaaacatttattaaatatctattatgacatgcagggtagggagatga

SEQ ID NO: 206829 - DNA, 370 bp, Homo sapiens
ctccccaaaattttcataggtatttttgctcatcgatgaactttaagattgttttatgtatttttaaaattaaattttggttcaatgtcactaattacctagattagactttggaaaattggcatatttatagtgctaggtttttccccagttttcacatgatttttttttctttttgagacaaggtctcattctgtcacccaggcttgagtacagtggcatatycacagatcactgcagcctcgacctcccaggctcaagtgatcctcccaccacagcctcccaagtagttcagactacaggcatctgccactacacatggctaatttttgttttgtattgttttgttttgtgttttatagaaatggga

SEQ ID NO: 206830 - DNA, 486 bp, Homo sapiens
cttgctttttcagtttctctmttttcttatttaatttttgtccactcgatatataaaaacagatggaggtatgtttaaatattcccactaatggttttgtcagtttcatattttaaagttatatcatttagcttatagaaattaatactgtatttctgttgtgtattctacccttaatataaaatgattctttgttccatttaatgatctttttctcaatttctagtttgataataataatggcacttttcctttgttttactctcacacataactttatttttacctttttattaacaagttatacttggacatgattttttgactcaatatgaagatctttattatttaacttcaagttacttgtatttattaaggaatggatatacatggtttcccttctttttttatatattttatgctttcttgctgtttttttaaaaattatttactatgttgtgttaggatccttgcttttttcccctt

SEQ ID NO: 206831 - DNA, 610 bp, Homo sapiens
tataaacttttgaggaattggggtgtgtaaatcaataagagtacacagtgtaataagtgctacaaaagacatattttcaacatactgtagttattgcataaaagtttcaacaactccacttggtcagaaaaaaaaaaaaggcaaataacgaatggcaatcttaatcttgtgagtacttagagactccctgggcactgtgytatgagtttgaagtgcccacagcacattctctcttcccatcctcacagcgatcctatgaagtgggtattttaaggcccactgtacagacaagaaagctaagccatgcagatgttgataaagtagagctaggaatcccacccacaggtatgtaactctaggaggatgtggcatctgaaccaagcacaaaaagagggatagaaaggggacagaggaagggcaagaactctccaatgacaaaagcaaaggcagaaaatattcctggtttcttttattattgtgcaggaaattcaatgtttacttatcaaattagtcatgaattcatatgttgaaattgcatcctatctaaaaagtaattcaacaatgttgcttttttccattcttacattgcatagatttttccccccgcaaa

SEQ ID NO: 206832 - DNA, 531 bp, Homo sapiens
ccagctgacttgaacgcacatcgaagaagagaagcactactctagattactgtcctcctagcaggcactatggcgtgattcagtgggactggaagatctcaatgcacagccaactccacaggttcctctttcacctctcagatgaakagaaccatggcagtcgaggaagcgtagcaggaaaaaagtagttaagtgtgcatgttcatgtatcttatgacacagttagtccaagggcaattctaaaaacataaatcatatcccacacagaattgtctaacccagcgattctcaactatgtctcatatgtgcagtagaataaattcatatacatggcacacctctcttgggaatacacagatttttatgaaatctttgtcaagtgcatgaaaataatttataatcgcaatacttactaacagtttatcagtaacagttgctcactgcaggtgtgatggtactgggagagaggctataggtaaacatgattctttgcacagatttatgtggcactactcctttctctctcatttg

SEQ ID NO: 206833 - DNA, 531 bp, Homo sapiens
ccagctgacttgaacgcacatcgaagaagagaagcactactctagattactgtcctcctagcaggcactatggcgtgattcagtgggactggaagatctcaatgcacagccaactccacaggttcctctttcacctctcagatgaagagaaccatggcagtcgaggaagmgtagcaggaaaaaagtagttaagtgtgcatgttcatgtatcttatgacacagttagtccaagggcaattctaaaaacataaatcatatcccacacagaattgtctaacccagcgattctcaactatgtctcatatgtgcagtagaataaattcatatacatggcacacctctcttgggaatacacagatttttatgaaatctttgtcaagtgcatgaaaataatttataatcgcaatacttactaacagtttatcagtaacagttgctcactgcaggtgtgatggtactgggagagaggctataggtaaacatgattctttgcacagatttatgtggcactactcctttctctctcatttg

SEQ ID NO: 206834 - DNA, 531 bp, Homo sapiens
ccagctgacttgaacgcacatcgaagaagagaagcactactctagattactgtcctcctagcaggcactatggcgtgattcagtgggactggaagatctcaatgcacagccaactccacaggttcctctttcacctctcagatgaagagaaccatggcagtcgaggaagcgtagcaggaaaaaagtagttaagtgtgcatgttcatgtatcttatgacacagttagtccaagggcaattctaaaaacrtaaatcatatcccacacagaattgtctaacccagcgattctcaactatgtctcatatgtgcagtagaataaattcatatacatggcacacctctcttgggaatacacagatttttatgaaatctttgtcaagtgcatgaaaataatttataatcgcaatacttactaacagtttatcagtaacagttgctcactgcaggtgtgatggtactgggagagaggctataggtaaacatgattctttgcacagatttatgtggcactactcctttctctctcatttg

SEQ ID NO: 206835 - DNA, 589 bp, Homo sapiens
aatcccatagatgtgagttgacagtttctagagtcagactgtccaaacccaaagcatggctacaccgcttattctacgtgtgacctgggcaactgacttccccactgtaatttagtttctcctatgtaaaatggatgcaatagtaccttcctcatggagttgtgctgaggactgaatgagactcaaagcattcagaatccaaaacctagcctgacacacaggaagcactcaagacacattagttcctgattttatacccacgttcaatagaaatgtacattcttcccagagaatttggactgtgttcaacagaaccaggctcattatcctatccaccacacttctagctgcataataaagtgagggtttctcatggtctaaatcaggccctttaatcttctgttttctgataaaaagttctgaaaaagggaatttatacatatrtaaaagtgagtgtttcccctaaaaaaaaacaaaaatcattatgttttctattaggatagcaaaaatgccctttcttaaaaacagtgcacacaataatattctcaaggtgggcaatgtatattacactcaaagaaataaatgcaaa

SEQ ID NO: 206836 - DNA, 589 bp, Homo sapiens
aatcccatagatgtgagttgacagtttctagagtcagactgtccaaacccaaagcatggctacaccgcttattctacgtgtgacctgggcaactgacttccccactgtaatttagtttctcctatgtaaaatggatgcaatagtaccttcctcatggagttgtgctgaggactgaatgagactcaaagcattcagaatccaaaacctagcctgacacacaggaagcactcaagacacattagttcctgattttatacccacgttcaatagaaatgtacattcttcccagagaatttggactgtgttcaacagaaccaggctcattatcctatccaccacacttctagctgcataataaagtgagggtttctcatggtctaaatcaggccctttaatcttctgttttctgataaaaagttctgaaaaagggaatttatacatatgtaaaagtgagtgtttcccctaaaaaaaamcaaaaatcattatgttttctattaggatagcaaaaatgccctttcttaaaaacagtgcacacaataatattctcaaggtgggcaatgtatattacactcaaagaaataaatgcaaa

SEQ ID NO: 206837 - DNA, 539 bp, Homo sapiens
caaaacgaaggtgtaaatacttgcagcacagcatacaaatttttaagtcaacagatgttaragtcacaaattccagcaccaacatttactatgtgtgtgaccttgggcaagttgctaaactcccttgaaatttggtgtaatttctgaaaaacagggatggtgacacaggccattcagggacactgtgaagattaaatgggataaggtcagtaaattgccttggacaggatctagccacagagtaagtgttcaaaaaaggcaacggttatcattatcattccctctctgatagtgatgttagaagattaaaagaaataaaatacaggatgtgaaagcaccttgtaaattaaattgtcaatggcttgcatcactgcagggatctgaagctagagagaggaagtgactttcccttcccaaatgcaacaataggatgacaatagtgccatttctgatcaacactgcaagtgaatatgtagcacacatttctccccatgtcaactgaaaccacatttagtgagcacctactgggcgccaagttc

SEQ ID NO: 206838 - DNA, 539 bp, Homo sapiens
caaaacgaaggtgtaaatacttgcagcacagcatacaaatttttaagtcaacagatgttaaagtcacaaattccagcaccaacatttactatgtgtgtgaccttgggcaagttgctaaactcccttgaaatttggtgtaatttctgaaaaacagggatggtgacacaggccattcagggacactgtgaagattaaatgggataaggtcagtaaattgccttggacaggatctagccacagagtaagtgttcaaaaaaggcaacggttatcattatcattccctctctgatagtgatgttagaagattaaaagaaataaaatacaggatgtgaaagcaccttgtaaattaaattgtcaatggcttgcatcactgcagggatctgaagctagagagaggaagtgactttcccttcccaaatgcaacaatargatgacaatagtgccatttctgatcaacactgcaagtgaatatgtagcacacatttctccccatgtcaactgaaaccacatttagtgagcacctactgggcgccaagttc

SEQ ID NO: 206839 - DNA, 561 bp, Homo sapiens
aaataaaaacacttttcagaaagtctttctccagcatgcacttcttttagcagcattatgaaaggtaacctaatcaatattcacaaataaccgaatactgttaagtagcaggtttaaccaaaaacaaatttcagtgatttcaaacrtcaaccaaggcatggaagaacaggattaacaaggtcttagaagagcaatgtatttttctggactgtcattttcaatcatgaaaatgtcattgtgaatttttttatttatatttatatttatttattcattttgagatggagttttgctccttgttgcccaggctagaatgcaatggtgaaatctcggctcactgcaacccctgcctcctgggttcaagcgattctcctgcctcagcctcctgagtagctggaattacaggtgtgtgccacctaatttttgtagttttagtagagatagggtttcaccattttggccaggctggtcttgaactcctgacctcaggtgatccacctgcctcagcctcccaaagtgctgggattacaggcgtgagccaccgcacccagtcatgaattc

SEQ ID NO: 206840 - DNA, 485 bp, Homo sapiens
gaattcagacagggcacagcagggacagcttttctctgaagtctggggtctctactagagagcttgaaggctggaygctggaagcatctgaagaccagcctattcttgtgtctggaggtcaaggctggctgtcagcttgaggccttagtttttctccatatgggtgaatctgggcttctcacagtgtggtagctgacttccccagagcaattgtctaaccccagctcttgaaaaaagtgagtcagctagaagctgtatcataacctagcttagaaagttacaaaccatggcctctgttgtccttgtttggttggagcagtcgtaagtcccacccagtctcatagaatggaacataggccccacctcttggtgagaggactgcaaaagtcacattgtaagaaaagcatgtaggggtgacatccatgaacagggaagaataaggaacatcaaaagtccctccaaaaaagcaataaataaactggcaa

SEQ ID NO: 206841 - DNA, 485 bp, Homo sapiens
ttttctctgaagtctggggtctctactagagagcttgaaggctggacgctggaagcatctgaagaccagcctattcttgtgtctggaggtcaaggctggctgtcagcttgaggccttagtttttctccatatgggtgaatctgggcttctcacagtgtggtagctgacttccccagagyaattgtctaaccccagctcttgaaaaaagtgagtcagctagaagctgtatcataacctagcttagaaagttacaaaccatggcctctgttgtccttgtttggttggagcagtcgtaagtcccacccagtctcatagaatggaacataggccccacctcttggtgagaggactgcaaaagtcacattgtaagaaaagcatgtaggggtgacatccatgaacagggaagaataaggaacatcaaaagtccctccaaaaaagcaataaataaactggcaaaaactgccagaatcaacttttttagaatt

SEQ ID NO: 206842 - DNA, 605 bp, Homo sapiens
gtttgtgaactttgttttctatcatttgggtctttattaaagaaaagtaagatactgctctttataagtttgtttgtattccgatctttagaccatagtgctattagagtatgagagggtaagggaaaattagataaatgagggaaagagggacaaattttggggggtaaagcatagaagagttgtcctacattttcacatgatggaagtcttcccgtttttccttattctgcatttcttctcattttgaacagtgacatttttaaaaatcttggccaggtgtggtggctcacayctgtaatcccagcactttgggaagccgagacgggcagatcataaggtcaggagatcaagaccatcctggctaacatggtgaaaccccgtctctactaaaaatacaaaaaaaaaacaacaaaattagccgggcatagtggtgggcgcctgtagtcacagctacttgggaggctgaggcaggagaatggtgtgaaccggggaggcagagtttgcagtgagccgagatcgcaccactgcactctagcctgggggacagagcgagactccgtcaaaaaaaataataataataaactttatttcttttctgaatt

SEQ ID NO: 206843 - DNA, 616 bp, Homo sapiens
cagcacatgtactcctgaaccttaaaggaaagttaaaagagaaaaaaaaaagatgactatctttcagcagacttcacatggtcaaggagagagtctggggtaataaggtttgacaatagaaaagcccctcagcatttggatgctgaggtccatgtctgtttctttgggctaccttacagacatgcaagacaacagttattctcttcaggaagcagcatcaaagaggattctgaactcttagaaaccacaagcccaacacagcagagagacatgcgatggagcctcatgtgttcaacagcatagaaggaaaccaataaaatttggaaaatggttgagtttatttgttatctgtactgcgtaataaaagctgctagaaaaggcacaaaaacatgtrttattggggggttttatctatctttttagatttttttgttttagaaaaagactttgttcttcatttgtcttagttctttctccaggaaggcaatactgaacatgtcacaaaatacagatgagcaaaaaagagacttcttttctgaagactgtcagtaggcctctcttgatgtcttcctgacaggtgatacagactttcgtcatcatcctccaagaggaaact

SEQ ID NO: 206844 - DNA, 536 bp, Homo sapiens
ttgtctctgttaaaatgtaaagagcaactctaggtaatatacgttgatttattctgtgcttaagtcaaggtagcagctgtttccaattcaggaggcaaatgaacaacaaagaccttgtgggctcatccactctttagtctttggctccctgcagaataattgaattgagtttggcacagaagcatctgcaacatatttgccacaagaaagaagtttggaacatcaactgtatcaatgtaaaagtatattttgtggtggctttccaatcagtttgaaatttttacagaaacaaatgggggttagggggaagctcacataattgtagacataagcttacttctgctttcccacagtgtcagctggcactttagggaaatttctttgatagtggctcacagagggaactgasagctggtcctcttcccatttccccagactttcttggtattagttaggaacaaagtacaacagagattccacttgaactgaaattgtagttgggaggacacaaaagcttaatttagaaggaaatatta

SEQ ID NO: 206845 - DNA, 476 bp, Homo sapiens
tgatgagaacacatggacacatgggcagggaacagcacatactgggtacttgtaggggtgggtaggggaagggagaacattaggaagaatcactaatggatgctagacttaatagctggatgatggaatgatstgttcactaaacaccatggcacatgtttacctatgtaacaaacctggacatcctacacattacccccaatcttaaaataaaagttgggggaaaaaagtaaaaaaaaaaaaaagagacattagaaatttgcaaacagtaaatcaatttccctcttctccctaatttattttatttggaaaataatttgtttacttaatattaacatgtaattagcttaccatgttatttaaataaaataataatttttaacttctcagtttccatttcaaatacagtaaacagtgaaagaggtacataagcaaaagctctttggcatcctcattaatgtttaaaagtataaagc

SEQ ID NO: 206846 - DNA, 581 bp, Homo sapiens
caccacacctggctaatttaaaaaaaaawtctatatatatatatatatatatattctgagtagagatggggtctccttgtgtttcctggactggtctcaaaccctgaggctcaagtgatcctcccacctcagcctcctaaagtgttggaattacaggcatgagccactgcacctagccatgcacttatttactaatggcattaaataataggatttagcagtgggtccaattaatgcaatttcaaaattgtgcttagcataaacaatattttgagatgactttaataattataatatgatataaacgtggtatgggttatggtttgctgcccatataattgaaggaaattaactgtagttagaagttagtggaagtaaaactgtaacttttgccatctaaattcatgagccctttgaattctgtccatacaccccagacaagaactgctaatgcagagcatcatgagccattcaaaaattttaagtagggagtgaaattatccaatttaagtagagccctctgtctacatatgaagctgcatgaaattgttttttatatttactgtaaggaaagagagaat

SEQ ID NO: 206847 - DNA, 581 bp, Homo sapiens
caccacacctggctaatttaaaaaaaaattytatatatatatatatatatatattctgagtagagatggggtctccttgtgtttcctggactggtctcaaaccctgaggctcaagtgatcctcccacctcagcctcctaaagtgttggaattacaggcatgagccactgcacctagccatgcacttatttactaatggcattaaataataggatttagcagtgggtccaattaatgcaatttcaaaattgtgcttagcataaacaatattttgagatgactttaataattataatatgatataaacgtggtatgggttatggtttgctgcccatataattgaaggaaattaactgtagttagaagttagtggaagtaaaactgtaacttttgccatctaaattcatgagccctttgaattctgtccatacaccccagacaagaactgctaatgcagagcatcatgagccattcaaaaattttaagtagggagtgaaattatccaatttaagtagagccctctgtctacatatgaagctgcatgaaattgttttttatatttactgtaaggaaagagagaat

SEQ ID NO: 206848 - DNA, 468 bp, Homo sapiens
tctttaaaaatccgtggacaacttgtatccagatttgctttctgtagagcagcactgcatttactccaaacagcagtaggctcttcctaactcagtgactttcaacagtgccttcttctcttggatatgcagctgtcacagtggtggtcttgtgctgtttaatacaagtacaaaatccccttattccatttctttatttggtgagagttaagaaggatatcttttctagctgtaatggctcatttgtagttctctttgaagaccgataatgggcttaccgcctcttctcgcccaggctgctttaatttgtgtagctaataaccccgggcttcttcctctcgtttctctcacttggtttttgatttgcatcagactscctgagcccatgtcctatttggaggaaagctgagggaaatgcataaataatgtctaaaataaacttgtaaagtcaagtatcagttacattga

SEQ ID NO: 206849 - DNA, 545 bp, Homo sapiens
gaattcttccctttggagggaacatttgctctgaattaagaagaaatgttgttatttacatctgacctattttctctagacctyagtggtttccaggacaacacactgaggttttgaaggaggggtgcaaggggaagtgctgactcatcttttttgccactcccttccctggttgtcttataagaagaacacctattcactgcttgctttgtgacttgaggccaattttgggtcagtgtcacaacgaccagatagcattaaaacccagcttgagcctaggatggatgaaatctgtaatccacttgaaaatgtgcactgtcagaatacgattaggcaagattgatgaatattctacttacttacttggaaaccaattctctacctttgtagaagagactgcatggacaaggtgggaccagagcagctggggaggtaagaagtttccttcagcttagttaacagagtcataggatggccctggaactctctggtacgcacatagttggcagctgaccagaccctcagaaataacaaatccctgttac

SEQ ID NO: 206850 - DNA, 447 bp, Homo sapiens
tgaaagtaaacttcccaccagagtttccatctgtaaatatataaaataaagctgccttgatagaaacaggcatgagggagccagagctccacatttccccaacccccagggcaaatggggttcctgaggtacctctttggcatctctgggttttctgggaagaaaatgggtcttgtgcaacttcttcctttcacccaatcctaaagccaggagcccctgtacgtcctgacagctcagctcttcttgggtaatctcaaacagtcacagggtgctgcaaatctagggaggtctggaatggcaacttagtgaaactatcatttatgacawctttgtccattgtcaatcatttaataactatctgatacaaagtcttacaaccaaaaagtagaatggagcgacccaaaattgtgtgtgtgcgtgtgggtgtgtgtgtgatggaggtgaaga

SEQ ID NO: 206851 - DNA, 447 bp, Homo sapiens
tgaaagtaaacttcccaccagagtttccatctgtaaatatataaaataaagctgccttgatagaaacaggcatgagggagccagagctccacatttccccaacccccagggcaaatggggttcctgaggtacctctttggcatctctgggttttctgggaagaaaatgggtcttgtgcaacttcttcctttcacccaatcctaaagccaggagcccctgtacgtcctgacagctcagctcttcttgggtaatctcaaacagtcacagggtgctgcaaatctagggaggtctggaatggcaacttagtgaaactatcatttatgacatctttgtccattgtcaatcatttaataactatctgatacaaastcttacaaccaaaaagtagaatggagcgacccaaaattgtgtgtgtgcgtgtgggtgtgtgtgtgatggaggtgaaga

SEQ ID NO: 206852 - DNA, 546 bp, Homo sapiens
gaaaacatactcactctgctgtcacaattaagcatgtcaatcaaacaacatcataagtattttaaaaaactgcttggtgcttccaatctccaacagcaaccaaagaccataatgaacgcacgcttctaaagagctaattcatataaaagttggataatgttggaagaaccagattgaacttgcccttccagctattctctctttttacttgcctggaagtctttcagcatctacctgctcatttcttaattacttccaaatgatgctatgcatataatctttttttaattggagaatatgaatatttttgcccttttagaacccttgggtatttcatataactctgtactaatgtatcaatgatcactttttgctgaaatcttcatttaaatatgctgtagcttatgacaattcagcttaaatatttttttctttctatttcctgaaatatgcctatgcttcttctgtgtctcccgttattctgtctttgagatttttactttacttttccccaaacctggtgrtgttttcctgttcagatataat

SEQ ID NO: 206853 - DNA, 603 bp, Homo sapiens
catacaatctgaggcctcctctctcagtttttatatagatggcgagaacctaagtttcagttgattttacaattgaaatgactaaaaaacaaagaagacaacattaaaacaatattgtttctaattgctgaggtttagctgtcagttctttttgccctttgggaattcggcatggtttcattttactgcactagccaagagactttacttttaagaagtattaaaattctaaaattctattaatctctcattaatagtatttaatataaagattcttaaaattactgacgttatgaattggtttgatgcttttctcatgtacctcaatccttattttaaaataagatcaataacactattttcctaaatgttgtccttacctgccctacacatattcagaattgctatggcagattaagacatgtcaatggaagaggtcagaggagtaatattattggmaacagctgtaataggtgccataaaaagcaaacaaacaaaagtattttggttctttgcgaccacagctgtccccaaatatacagatgattcagcacttattttaaaatgaatctgggtattgctaatacccccaaattagcagtt

SEQ ID NO: 206854 - DNA, 589 bp, Homo sapiens
tgcacttgcactgactcagatcttgtcctgtctggtaagctgtgaccctcagccagcctgggtagctgcccttgaaccagaggttggggtctggcagtttctataggcgtcctyaggctcggtctgcaaggggcttgcctctttcttctggggtcttctcgcccccatgccttctcagttgtggtgattataccagaaggaacgtgggagaagtataatggagaatgcttagtcactggacaatgatttcgaaagttcggctggctgaggaaacaagagttttgtgtaatgtctgtgacttactcaatggttctaggaggcacgagactgagtttctttgggctctgctcgcctactcttaaggggctctaccttcttagggtgaactcggcacccacctagaacctccagtgtgtgaaagggcctacctacctcattgggccccaacctccagcctcttgtgagagtgacgaccagccccaaaatggctgcacacaaacaagaccctaaggtacagagtcctactatgcaaatagacgtttattttcccctgttagaacaacacaggaccagctatgtaatttgcagg

SEQ ID NO: 206855 - DNA, 580 bp, Homo sapiens
aagcttcatatttctccctaagaactgctttagcttcatcccatattttttgagattttgtatcatcatttttgtttagttcwaaataatctctaaatttccttgtaatttcttcttgatccacttgttatttagaaatgatatttattgctttctatcagattggtgagtaaacaaataaatgttatttaaatatagaaacatttgagaagtttccaaaattccttctgttgttcagtttcaacttaattctgtttgaattggacaatatacttcagatggtttcaattattattaatttatttagacttgttggatcctgtttttattttaaatcaaatctgacagcctctgtgttttgattccacttgcatttaatgaacatattgatatggtaggacttaaatttgctatttaactatatcttttctatatgtcatctttcttcgttcttttattcctattcccttcttttgagctgaatatatattttccagtgtactatgtacattcatttccacaatatatttagcttcattttagagattgttgtaatgtttacaatatgcatcttaaaaca

SEQ ID NO: 206856 - DNA, 606 bp, Homo sapiens
agaactgctttagcttcatcccatattttttgagattttgtatcatcatttttgtttagttctaaataatctctaaatttccttgtaatttcttcttgatccacttgttatttagaaatgatatttattgctttctatcagattggtgagtaaacaaataaatgttatttaaatatagaaacatttgagaagtttccaaaattccttctgttgttcagtttcaacttaattctgtttgaattggacaatatacttcagatggtttcaattattattaatttatttagacttgttggatcctgtttttattttaaatcaaatctgacagcctctgtgttttgattccacttgcatttaatgaacatattgatatggtaggacttaaatttgctatttaactatwtcttttctatatgtcatctttcttcgttcttttattcctattcccttcttttgagctgaatatatattttccagtgtactatgtacattcatttccacaatatatttagcttcattttagagattgttgtaatgtttacaatatgcatcttaaaacaatctacctcaaattaataacttaattcatgttatatatagaagctt

SEQ ID NO: 206857 - DNA, 609 bp, Homo sapiens
aggattttattcttctttaaggctaaataatattccattttatatatttaccatacctttatcaatttatctgtcaatgaacatttagattgtttctacatcttagctgttgtgaatagcaccgcaatgaacatgggattgtttctacatcttagctgttgtgaatagcaccacaatgaacatgggagtgttaatatttatttgagatacatatttcaattactttgaatcaacacccagaagtgaaattgctaggccatttggtagttccatttttaaattatttttaggaacctccataccattttccatagcaggtgcaccattttgcattcccaccaacagtgtacaagagttcccttttctccatataatcgctagcatttgttttttcactctaatatccattctaataggtgtgacatgatgtctcattgtggttttcagtttcatttctctgttggttaaaacacctaaatatataaaacaaacaaagacagaactgaagggaaaaataataatataatgccaggggttcaataagctactattaataatagatagattcaccygacaaataatcaataaagaaacactggacttgaaaat

SEQ ID NO: 206858 - DNA, 622 bp, Homo sapiens
cttattctgcatccagttagggtaatatttagatagaaagatggaaatatgtttggaagttaaccattctcattttcttgggtgccatggtttgactcaagacattatctgcctatgaaggagtgagttaatgcagggatctgtcccacagaccctgacccaacgatggatggataatgtacactgacacagataatttgtcttttggtttggctgtgggtctgggccactcacagacaccaagacgggtgctgtacaggtgtcgcagctgtgaccccaatcagccagcgactcgctttgtattcagtatagattatgtaacaatggtcttgagtattcaccaccagagggtacttgccatagccgacctcccgagtagagatctattatctgcccgcagtaatcagtggtctggtcttaggacgcatgagtaaacaagctatttagataaactcccttacatccctttatacctaatttatctactcaaggtaaagatcaggctgcattcagccagatctattactggagcttatgcaamccccctggccttccaagaaggtttgtgcctatttcatataactatctttaaaatttttcccaccagcctgactgaactccc

SEQ ID NO: 206859 - DNA, 399 bp, Homo sapiens
ttaaaaatgaacagaaattagatatattatagcctctcactcctgatatcaataaattacatgtataaaataaactaccttccatacacagaaaatagccaccaaatatgttttagaattacttataagttgtgtgcagaaaggacatccttcatgttttcctttctcatccttttaaatagcaacttgaaacacagttggtgaggaccagggctcagtttggcttctgacagaaatttggatacacaaattgagtatagtcattaatggctatgcttacgtggaagggtgtgttcagacytaagacaggctgaaaaatgttttcacaatttctataacctaaaacttgcgggaaggctgtgacaggcaacaaatctttgctaataattggaaagaaaa

SEQ ID NO: 206860 - DNA, 447 bp, Homo sapiens
taaagatctacctgagactggataatttatgaagaaaagaggtttaattgaatcacagttccacaggcttaacacaaatcatgactggaagatgtcaggaaacttgcaattatagcagaaggtgaaggagaagcacacgtcttaccatggtggagtgcaagagagagagcaagggygcagttttaaaccatcagaactcatgagaactcactatgatgagatcaacaagaagaaatccacacccatgatccagtcacctcccatcagacccattccccaacatggggggattacaatttgacatgagattaaggtggggacacagaaccaaaccatgtcactagtagtgcttggtataagaatattcattaggctgttgagtgtaaagcccagaaatgaggcattagtggtgaatgttgaaagcgggtgctgatgcagtaaatttag

SEQ ID NO: 206861 - DNA, 556 bp, Homo sapiens
cacagttccacaggcttaacacaaatcatgactggaagatgtcaggaaacttgcaattatagcagaaggtgaaggagaagcacacgtcttaccatggtggagtgcaagagagagagcaagggcgcagttttaaaccatcagaactcatgagaactcactatgatgagatcaacaagaagaaatccacacccatgatccagtcacctcccatcagacccattccccaacatggggggattacaatttgacatgagattaaggtggggacacagaaccaaaccatgtcactagtagtgcttggtataagaatattcattaggctgttgagtgtaaagcccagaaatgaggcattagtggtgaatgttgaaagcgggwgctgatgcagtaaatttagcccactcttgctaaaattgtcttgttggagctatagatggaggcagcaaggtataaaacaaatattcatttgtctgcttgtttgtttgaagactagagactttttaaggaattgcttctcttgttattgttaaaccattttgttataaattttatgagatct

SEQ ID NO: 206862 - DNA, 557 bp, Homo sapiens
ccactttccatttacatttgttcccaycattcaattattctttttaaaaaggctagaggaagtgatggaaaaactgaagataataaagacacaaaatgctgaggatggatatttgtgaaaatacataatagcaaccaattgtggggcaggagggaagtcagagaacgctggggtctgtctctcctactctgccacagcatttttgaagcagcatttagtaatttctgcacagggggtgccatacttagacaactccttatgatttttcaatttctcattatcttcaagaagtgttccagaaaagaatctagaaggaacactatcaaagataatgggttacagttttccacaatgggtaaatagcctgagttttcagattaaagaatcacactgaatattgagtgatgatgtggtttggctgtgtacccacccaaatctcatcttgaatccccgtgtgttgtgggaggttcctggtgggaagtaattaagttgtgggggcaggtctttccgatgctgttctcatgatagtgaataagtctcacaagatatgatggttt

SEQ ID NO: 206863 - DNA, 557 bp, Homo sapiens
ccactttccatttacatttgttcccaccattcmattattctttttaaaaaggctagaggaagtgatggaaaaactgaagataataaagacacaaaatgctgaggatggatatttgtgaaaatacataatagcaaccaattgtggggcaggagggaagtcagagaacgctggggtctgtctctcctactctgccacagcatttttgaagcagcatttagtaatttctgcacagggggtgccatacttagacaactccttatgatttttcaatttctcattatcttcaagaagtgttccagaaaagaatctagaaggaacactatcaaagataatgggttacagttttccacaatgggtaaatagcctgagttttcagattaaagaatcacactgaatattgagtgatgatgtggtttggctgtgtacccacccaaatctcatcttgaatccccgtgtgttgtgggaggttcctggtgggaagtaattaagttgtgggggcaggtctttccgatgctgttctcatgatagtgaataagtctcacaagatatgatggttt

SEQ ID NO: 206864 - DNA, 497 bp, Homo sapiens
  misc_feature (1)...(497): n = A,T,C or G
ttatttttagtttnctggggaaggaacactatattgcttgtttttcatagtggctrtactaatttacattcccaccaacagtgtgcaacagtgtgcgagagttaccctttctccacatcctcgttaccattcataatttttgtctatttgataacagctcttttaactgtgatgagatggtgtctcattgtggtttgattctaatttccctgatgattagtgatgttcaacattttttcatatgcctgttgaccatctttatgtcttcttttgagaaatgtctgttcgggtcctttgccaatttttaattggattattattgattttttttgctattgagttgtttgagttccttatatattctgattattaatgccttattgtttggataatttgcaaatattatcaaattctgttggctggctctttactttgttgatttgtttcctttgctctgcagaagctttttggcttgatttaatcccatttgtctatgt

SEQ ID NO: 206865 - DNA, 497 bp, Homo sapiens
  misc_feature (1)...(497): n = A,T,C or G
ttatttttagtttnctggggaaggaacactatattgcttgtttttcatagtggctgtactaatttacattcccaccaacagtgtgcaacagtgtgcgagagttaccctttctccacatcctcgttaccattcataatttttgtctatttgataacagctcttttaactgtgatgagatggtgtctcattgtggtttgattctaatttccctgatgattagtgatgttcaacrttttttcatatgcctgttgaccatctttatgtcttcttttgagaaatgtctgttcgggtcctttgccaatttttaattggattattattgattttttttgctattgagttgtttgagttccttatatattctgattattaatgccttattgtttggataatttgcaaatattatcaaattctgttggctggctctttactttgttgatttgtttcctttgctctgcagaagctttttggcttgatttaatcccatttgtctatgt

SEQ ID NO: 206866 - DNA, 497 bp, Homo sapiens
  misc_feature (1)...(497): n = A,T,C or G
ttatttttagtttnctggggaaggaacactatattgcttgtttttcatagtggctgtactaatttacattcccaccaacagtgtgcaacagtgtgcgagagttaccctttctccacatcctcgttaccattcataatttttgtctatttgataacagctcttttaactgtgatgagatggtgtctcattgtggtttgattctaatttccctgatgattagtgatgttcaacattttttcatatgcctgttgaccatctttatgtcttcttttgagaaaygtctgttcgggtcctttgccaatttttaattggattattattgattttttttgctattgagttgtttgagttccttatatattctgattattaatgccttattgtttggataatttgcaaatattatcaaattctgttggctggctctttactttgttgatttgtttcctttgctctgcagaagctttttggcttgatttaatcccatttgtctatgt

SEQ ID NO: 206867 - DNA, 497 bp, Homo sapiens
  misc_feature (1)...(497): n = A,T,C or G
ttatttttagtttnctggggaaggaacactatattgcttgtttttcatagtggctgtactaatttacattcccaccaacagtgtgcaacagtgtgcgagagttaccctttctccacatcctcgttaccattcataatttttgtctatttgataacagctcttttaactgtgatgagatggtgtctcattgtggtttgattctaatttccctgatgattagtgatgttcaacattttttcatatgcctgttgaccatctttatgtcttcttttgagaaatgtctrttcgggtcctttgccaatttttaattggattattattgattttttttgctattgagttgtttgagttccttatatattctgattattaatgccttattgtttggataatttgcaaatattatcaaattctgttggctggctctttactttgttgatttgtttcctttgctctgcagaagctttttggcttgatttaatcccatttgtctatgt

SEQ ID NO: 206868 - DNA, 456 bp, Homo sapiens
agatctcctcagccatgcagaactctgagtcaattaaacctctttcctttgtaaattacccagtctcaggcatttctttatggcagtgtgaaaatgggctattatagtcagtgagggtcaagcatgttttatctcaaccaacaasagattcttgggtaggatggcagtaatgcagtttgataccaaaaggtgatggataggatgatgatgataataaataatatgtaataagaacaaattttagaaggatatgtttcaaagagtacagaagtttgttagacctgactggtattggatagacataacattgtttaagttcgacagaaggagaagatccaccctgtgtggggaacaatgagaacaggtctgaggtatggtgaatgagattgttgatttatgggaacggtgaagttttggaaaatacacagaatgagatgtggcatacttgaaagattc

SEQ ID NO: 206869 - DNA, 456 bp, Homo sapiens
agatctcctcagccatgcagaactctgagtcaattaaacctctttcctttgtaaattacccagtctcaggcatttctttatggcagtgtgaaaatgggctattatagtcagtgagggtcaagcatgttttatctcaaccaacaacagattcttgggtaggatggcagtaatgcagtttgataccaaaaggtgatggataggatgatgatgataatamataatatgtaataagaacaaattttagaaggatatgtttcaaagagtacagaagtttgttagacctgactggtattggatagacataacattgtttaagttcgacagaaggagaagatccaccctgtgtggggaacaatgagaacaggtctgaggtatggtgaatgagattgttgatttatgggaacggtgaagttttggaaaatacacagaatgagatgtggcatacttgaaagattc

SEQ ID NO: 206870 - DNA, 459 bp, Homo sapiens
gagtcaattaaacctctttcctttgtaaattacccagtctcaggcatttctttatggcagtgtgaaaatgggctattatagtcagtgagggtcaagcatgttttatctcaaccaacaacagattcttgggtaggatggcagtaatgcagtttgataccaaaaggtgatggataggatgatgatgataataaataatatgtaataagaacaaattttagaaggatatgtttcaaagagtacagaagtttgttagacctgactggtattggatagacataacattgtttaagttcgacagaaggagaagatccaccctgtgtggggaacaatgagaacaggtctgaggtayggtgaatgagattgttgatttatgggaacggtgaagttttggaaaatacacagaatgagatgtggcatacttgaaagattctattccagggaaaacatacacacactgga

SEQ ID NO: 206871 - DNA, 459 bp, Homo sapiens
gagtcaattaaacctctttcctttgtaaattacccagtctcaggcatttctttatggcagtgtgaaaatgggctattatagtcagtgagggtcaagcatgttttatctcaaccaacaacagattcttgggtaggatggcagtaatgcagtttgataccaaaaggtgatggataggatgatgatgataataaataatatgtaataagaacaaattttagaaggatatgtttcaaagagtacagaagtttgttagacctgactggtattggatagacataacattgtttaagttcgacagaaggagaagatccaccctgtgtggggaacaatgagaacaggtctgaggtatrgtgaatgagattgttgatttatgggaacggtgaagttttggaaaatacacagaatgagatgtggcatacttgaaagattctattccagggaaaacatacacacactgga

SEQ ID NO: 206872 - DNA, 387 bp, Homo sapiens
ggcattttaaacttgagttgtccttttattattcggagacaaatatagtaaaatctagaggagtggttttaccccaaaagcccaagaattattcatcagcagaacaaaggcataaattgaggcctcttgaatcccaatccttttgtactctttaatacaggtactcttggatttatggtgagtttatgtcccaattagcccatcataagttgagaatatcatamgtcaaaaatgcgttaaatactcccaacctaccaaacattatagcttagtctagcctgtcttcagtgtgctcagagtacttacattagactgtagttgggcaaaatcacctaacacaaagcctattttataataaggtgttgaatatctcatgactgcatgtca

SEQ ID NO: 206873 - DNA, 373 bp, Homo sapiens
aatacatacagcaataaataaattctygacctttcttcaaaacttgctcctcccaggccttccacatcttagtaggtaatacattctcctttttagctggccagaccaaaaacaatgacaatcaaaaaatgagtcatccttgaatcctctgtttctcttgcacacatcacatccaatctatcaagaaatgctctcaactctacctttgaaatgatttacattctgactacctctcttcacactactgactttcagctggatttctgaagttgatttcttacataaaccttagctctgtaagatatatttagcttaacctcaaagccaactcacacatattggggaagacaattgaagaattcccattagggca

SEQ ID NO: 206874 - DNA, 540 bp, Homo sapiens
agatctttctggcaagtgctagatacttggcctatttacgtattcctcacatagcctggaaattcaatgggaaatatatgagtaggatgtgtaaccttggcctcattatcaacagttatatctaaatgtaacctgtgagctttttctttattctcaagtgatatctcaacaggttttcttwgtacataagtcacttgaaggagttcgagctcagcttatttggaagcatcatttaattcttggaggtcatcatagaagtgcttaatgcattattggtcaaggggaaggagggagtctagacggccctgacatgtgtaggttatagtgaggcgatgccattcattatgcttggtctcaaaaaatatgtctgagaatatcattgcagtcttggatgggtgcccctgttcatggttagcttaacaacggccttaccccaagtctgctcatatctttgaaatctacatttttatagcatcttcattctagcaatgtcaccttgaaatttgaaaacccatcttatttaaaattattcattctatc

SEQ ID NO: 206875 - DNA, 603 bp, Homo sapiens
ctccaaaggtggggagcggaggaggggaacaaagcctgaaaaacttccttttgggtactacgttcactatctgggtaactgggatcaatgaagtccaaatctcagtatcatacactataccttgtaacaaatccacacatatacccccaaatctaaaataaagattaaaattttaaaaatcaaataaaaagtaaaaacacataggaggctattgaaataatgacatacctagttcctgattcacagaccagagacttgtaaatgaaatttggaatgtaaatcatkgttatcaaggctgacttttcttttcagagttatatatgacaaagtatcttcctatcaagagtagataatttcctactaaaactaaacaaatgcttaaaaagcataccatgaagcatatttacttctctccaaatgaccaaaaatgttttatttattgctatgttgtttgtaaaattgtgcttttaccaaagtttagattaaatttcatctgtattaaaactgtttgaaatcaataaaatggaaatatctactataaaaaatcatactgtggcaatcttacatactaactacgatattcaaacttttgtttggaattta

SEQ ID NO: 206876 - DNA, 461 bp, Homo sapiens
tgtctgcatgcctaatattttctggtcgtgtgacaagaacccggttttttctacaacaatagtatttttcatgtttgttgtatctttacttatttagtctgttctttctctatcaattaagaaaagggtgttgaaatcacaattatatttgttgaaatrtccatttctgttttttcaattttgtcagattttacttcatatattgtaaagctctagtgttaagtacctttataattgttatcttttccttccgtgttgacctttttttaattaaaagatccctctttataactagtaatataccttagtttaaaatatgtttttgtctgattttaatatagcctctctaactctcttatggttatgtttgtatggtacagatttttaaatcaagttacttataacctatttttatatttcaatctaaagttagtctcatctcttatagacagcacatagtc

SEQ ID NO: 206877 - DNA, 544 bp, Homo sapiens
ttttgctaatattttgttaagaatttttttgtatcaatattcatcaaggatggcctgaagttctctttttcggtcgtgtctctgctagattttggtatcaaaatggtgctggcctcatagaatgcaytggggaggagtacctcctcctcaattttttgtaatagtttcagtaggaatggtatcagctcttctttatacatctggtagaattcaactgtgaattcgcctggtccagggctcttttttggtttgtagactttttattactgattccattttggaactcattgttggtctattcagggattctattctgattcagtcttgggaggttgtatatttccagaaatttatccatttattctggattttctagtttgtgggcatagaggtgttcatggtagtttctgaggatgttttctatttctgtgggtcagtggtaatgtcctttttgtcatttctaattgtgtttatccagatgttctctctttttgtctttgttagtctagccactcgaccctcaatcttattaatttttttcaca

SEQ ID NO: 206878 - DNA, 544 bp, Homo sapiens
ttttgctaatattttgttaagaatttttttgtatcaatattcatcaaggatggcctgaagttctctttttcggtcgtgtctctgctagattttggtatcaaaatggtgctggcctcatagaatgcattggggaggagtacctcctcctcaattttttgtaatagtttcagtaggaatggtatcagctcttctttatacatctggtagaattcaactgtgaattcgcctggtccagggctcttttwtggtttgtagactttttattactgattccattttggaactcattgttggtctattcagggattctattctgattcagtcttgggaggttgtatatttccagaaatttatccatttattctggattttctagtttgtgggcatagaggtgttcatggtagtttctgaggatgttttctatttctgtgggtcagtggtaatgtcctttttgtcatttctaattgtgtttatccagatgttctctctttttgtctttgttagtctagccactcgaccctcaatcttattaatttttttcaca

SEQ ID NO: 206879 - DNA, 547 bp, Homo sapiens
tcttcagaggatgaaggctggaaggcactgcttctttactttttgtgcttttgaagtcctatattcattcactggcagaagatacagggccctggatgttcactggcatgtgcttttggtgaatttcatagtccttwagggtgaattaggtggtagagatgcctctgtttaactcaaagtctctttgtttctgtgaactacaccttgtaacacattaacattaaatattataatggttgcctatttgattaaaatgcagatttcagttatgttacagatttttaatgatatcaaataaaatcatagaacaggatttcagtttgggtcagagattattttaaaataaacttcacagtcacgaattgctccatgaatatttgaagcaagaaagaaatgccttattcttcttctgctcacaaacactgggccaagctaagtatagaacaaatcaagtatctagtaatctgctggtgggttattggggacagtctgatcaatccataaatacttattgaacatctgtgaactccgaaaattaccacaaatt

SEQ ID NO: 206880 - DNA, 553 bp, Homo sapiens
ggaaaacacatttagatatcaacagtatcttttgtgcagggacagtggaaattgtagtttcattgtcatgaacttgctgttcttgttctagctatgtcagtgattttcaacaatggctacacattaacctgggaagcttctaccacactgatgctcagtccctacaaactctccactcaccaaagactatgatttgattgttccagatacacccaagtatcaatatttttgtaaagcyccccagtataactctaatatacaataagaatgatgaaccactgttaaagatcatacagagttcagaaaatctccagtcttctgggaacaatttaggtcttttataaggtgtttccaggaagcttcccatattattttaaactcctaggagaccactgaaaaataaccaaccatttcaatgaacttggtaaatgttacctagtttctgtcactatatttgtcattttaaaatccttatgaaaatagaaactagttagcagacactgcatttccacatgtcctccccacactttaaatgaagaaaagtctcattagt

SEQ ID NO: 206881 - DNA, 431 bp, Homo sapiens
aaaatagaaaagggaaaagtcaattccaataaaagatgttttaataagttagtgaaagtgtaaaacagtttccaaatctcttatttagtgaagcgataacatttactatgatataaactctctcccctttcctgatccctcaaccctgtcggaatgccttgcagaargcaatatggaggccaggcgtggtggctcacccctgtaatcccagcactttgggagaccaaggcgggcagatcacctgaggccaagagatcgagatcagcctggtcaacatggggaaaccccatctatattaaaaatacaaaaaaaaaaaaaaataggtggttgtggtagcaggtgcctgtagtcccagctacttgggaggctgaggcaggagaatcgcttgaaccctggaggcagaggtttcaataagcagagagaacaccact

SEQ ID NO: 206882 - DNA, 431 bp, Homo sapiens
aaaatagaaaagggaaaagtcaattccaataaaagatgttttaataagttagtgaaagtgtaaaacagtttccaaatctcttatttagtgaagcgataacatttactatgatataaactctctcccctttcctgatccctcaaccctgtcggaatgccttgcagaaagcaatatggaggccaggcgtggtggctcacccctgtaatcccagcactttgggagaccaaggcgggcagatcacctgaggccaagagatcgagatcagcctggtcaacatrgggaaaccccatctatattaaaaatacaaaaaaaaaaaaaaataggtggttgtggtagcaggtgcctgtagtcccagctacttgggaggctgaggcaggagaatcgcttgaaccctggaggcagaggtttcaataagcagagagaacaccact

SEQ ID NO: 206883 - DNA, 431 bp, Homo sapiens
aaaatagaaaagggaaaagtcaattccaataaaagatgttttaataagttagtgaaagtgtaaaacagtttccaaatctcttatttagtgaagcgataacatttactatgatataaactctctcccctttcctgatccctcaaccctgtcggaatgccttgcagaaagcaatatggaggccaggcgtggtggctcacccctgtaatcccagcactttgggagaccaaggcgggcagatcacctgaggccaagagatcgagatcagcctggtcaacatggggaaaccccatctataytaaaaatacaaaaaaaaaaaaaaataggtggttgtggtagcaggtgcctgtagtcccagctacttgggaggctgaggcaggagaatcgcttgaaccctggaggcagaggtttcaataagcagagagaacaccact

SEQ ID NO: 206884 - DNA, 415 bp, Homo sapiens
tcttacaaaatctatgctagaaatttcttcagtgtaaagtgatagcaaagaggacagggtgtttaattctcccagagggaaaacagtttgtcccctttcccaaaatgtgactcctttcttaagggtgttgagaaatgacaagaggtagaaagctcagccatgtcatctggcactaattttcacaagtttgtgtctaaaacttataacctctaaaaccagcacacccaaccccacaaaatccccatccccaagtgtaaattcctgccagcatctactctttaccacattgaaaatgtacaaaattcagggaattgtgggatgatttccaggaaaactcytggggagcattatttgatgcccaggctcctgctgtgtctttgtctatctggacaggagggagcaagaaagtcactaa

SEQ ID NO: 206885 - DNA, 605 bp, Homo sapiens
tctttctctctaaatcaccttaaaggactctctcagcaggagcctgctctggtttattccctcctaggataataccattagagataatcacattttgtagataccatctccaaagaacaattgcctaaagagtccctattgaagtatttttcatttataacaagatcttatgatagttaaaaataaatacagcactgaaaactaattctctgaatatctaatgctgtgaactgtcatgtagatcaacacacacagtatgttttgggaaattttccagcagatctaacatttcttaattctatttcttagttttctattttttcagaagaaaaaagtgtattattctactaattaatggacttgtacatcttaaaacttaatctttatttgtaataatagtaatacacagaatttttamaagtctgtaagaaataataacaacctgaatctaaaataaaataaatttttaaaaaggaaataatagcaagagacatatcggaagagagcattttcattcgactgctcttcgtcaccctcctcacctacctagttaaccacgtttatctcttatggtatttattgccataaataatcgtaatatgctc

SEQ ID NO: 206886 - DNA, 300 bp, Homo sapiens
actaaatcatataaaaacaatttatgtttagatggatgtttccttaaggaaaataaagtgcttgcttaattctgtaatcctttgccttcctcagctcaggaagctgaasaggaaagaaaaatctctctcttctatggcaaaattactagtagagtttctatttaatagataatctactcacagataatcagtaggcaatttgatacattatttagcacttcaggagatctgagtataagctcttaaacaaaatctaatatgtgcccaattaaaagacaaagcttaaatagtataatttta

SEQ ID NO: 206887 - DNA, 300 bp, Homo sapiens
actaaatcatataaaaacaatttatgtttagatggatgtttccttaaggaaaataaagtgcttgcttaattctgtaatcctttgccttcctcagctcaggaagctgaagaggaaagaaaaatctctctcttctatggcaaaattactagtagagtttctatttaatagayaatctactcacagataatcagtaggcaatttgatacattatttagcacttcaggagatctgagtataagctcttaaacaaaatctaatatgtgcccaattaaaagacaaagcttaaatagtataatttta

SEQ ID NO: 206888 - DNA, 556 bp, Homo sapiens
gtacaattcagtataaaatagatcatttgagtagtcccataactattaagaaaattgcatttataattaaaaactcccaaaaaagaaaatgggcaagttcaattgtttcaagggagaattcttccaaatgtttaaaaaattaattatgaacttctacacaayctcttgcagaaaataaaaaggaggaaatacttttcaattaattttatgaagctagtgttaccctgataccaaaattagacagtaaaaaaaacctctacactaatatgtcataaatatcaacataaaattcaacaaaacaaaagcaaatagaatttagcaatatataaaaagaatcaaactggttaagtggggtttagtgcactgatgcaaggctggtttaatattcaaaaatgaatataattcactgcattaactagctgaagaagaaagatcatgagcatatcaatcaatgaagaaaacaaatgagaaaatttggcatcccttcttgatttaggctttcaaaaaaaaaaaacaggaatagagaggaatgcccccaattaataaagactacacc

SEQ ID NO: 206889 - DNA, 428 bp, Homo sapiens
aaataccccaaacaactctacatataaaaattggaccacttaggtgcaatgaaacaagtatctagaaaaacacaaaccagtacaattcagtataaaatagatcatttgagtagtcccataactattaagaaaattgcatttataattaaaaactcccaaaaaagaaaatgggcaagttcaattgtttcaagggagaattcttccaaatgtttaaaaaattaattatgaacttctacacaacctcttgcagaaaataaaaaggaggaaatacttttcaattaattktatgaagctagtgttaccctgataccaaaattagacagtaaaaaaaacctctacactaatatgtcataaatatcaacataaaattcaacaaaacaaaagcaaatagaatttagcaatatataaaaagaatcaaactggttaag

SEQ ID NO: 206890 - DNA, 556 bp, Homo sapiens
gtacaattcagtataaaatagatcatttgagtagtcccataactattaagaaaattgcatttataattaaaaactcccaaaaaagaaaatgggcaagttcaattgtttcaagggagaattcttccaaatgtttaaaaaattaattatgaacttctacacaacctcttgcagaaaataaaaaggaggaaatacttttcaattaattttatgaagctagtgttaccctgataccaaaattagacagtaaaaaaaacctctacactaatatgtcataaatatcaacataaaattcaacaaaacaaaagcaaatagaatttagcaatatataaaaagaatcaaactggttaagtggggtttagtgcactgatgcaaggctggtttaatattcaaaaatgaatataattcactgcattaactagctgaagaagaaagatcatgagcatatcaatcaatgaagaaaamaaatgagaaaatttggcatcccttcttgatttaggctttcaaaaaaaaaaaacaggaatagagaggaatgcccccaattaataaagactacacc

SEQ ID NO: 206891 - DNA, 518 bp, Homo sapiens
gcccattttctaattgttcagtaactaatttctctaaagcatccagtttccctttgcttagcagccattattctatccaaattggcttatctgttaaccattttaaagrtataggttctggaggcttaactatggccaccatcaaaaatggtatcctaatctttggcaggaactttgtctttccgtttgaagcagttctttcaaaccttgcaatttttttttctactcctataccagggacatgccccatttcgtgcatcatatgttgactatgagggctgtataattgttatggaattagaacttgtgctccccattgtcataataaatctctcccccataaatttataggtacagaagttgcaattggttgaacagtcccaggttgtccattgggcccttcacaatgcaaagtatagctactctgatacacttctggagctttagcagtttccgctgtgttaaattgagtgggctgaattggccacatggacggccagtgctgtagagaaataatt

SEQ ID NO: 206892 - DNA, 518 bp, Homo sapiens
gcccattttctaattgttcagtaactaatttctctaaagcatccagtttccctttgcttagcagccattattctatccaaattggcttatctgttaaccattttaaagatataggttctggaggcttaactatggccaccatcaaaaatggtatmctaatctttggcaggaactttgtctttccgtttgaagcagttctttcaaaccttgcaatttttttttctactcctataccagggacatgccccatttcgtgcatcatatgttgactatgagggctgtataattgttatggaattagaacttgtgctccccattgtcataataaatctctcccccataaatttataggtacagaagttgcaattggttgaacagtcccaggttgtccattgggcccttcacaatgcaaagtatagctactctgatacacttctggagctttagcagtttccgctgtgttaaattgagtgggctgaattggccacatggacggccagtgctgtagagaaataatt

SEQ ID NO: 206893 - DNA, 518 bp, Homo sapiens
gcccattttctaattgttcagtaactaatttctctaaagcatccagtttccctttgcttagcagccattattctatccaaattggcttatctgttaaccattttaaagatataggttctggaggcttaactatggccaccatcaaaaatggtatcctaatctttggcaggaactttgtctttccgtttgaagcagttctttcaaaccttgcaatttttttttctactcctataccagggacatgccccatttcgtgcatcatatgttgactwtgagggctgtataattgttatggaattagaacttgtgctccccattgtcataataaatctctcccccataaatttataggtacagaagttgcaattggttgaacagtcccaggttgtccattgggcccttcacaatgcaaagtatagctactctgatacacttctggagctttagcagtttccgctgtgttaaattgagtgggctgaattggccacatggacggccagtgctgtagagaaataatt

SEQ ID NO: 206894 - DNA, 518 bp, Homo sapiens
gcccattttctaattgttcagtaactaatttctctaaagcatccagtttccctttgcttagcagccattattctatccaaattggcttatctgttaaccattttaaagatataggttctggaggcttaactatggccaccatcaaaaatggtatcctaatctttggcaggaactttgtctttccgtttgaagcagttctttcaaaccttgcaatttttttttctactcctataccagggacatgccccatttcgtgcatcatatgttgactatgagggctgtatamttgttatggaattagaacttgtgctccccattgtcataataaatctctcccccataaatttataggtacagaagttgcaattggttgaacagtcccaggttgtccattgggcccttcacaatgcaaagtatagctactctgatacacttctggagctttagcagtttccgctgtgttaaattgagtgggctgaattggccacatggacggccagtgctgtagagaaataatt

SEQ ID NO: 206895 - DNA, 578 bp, Homo sapiens
gagcagtcgctcaaggcgctgctcgaacagtcaccagggcaactacttttcacccagtgtcctccagaaaagaaagatctggagggtcgttttcttcaaaatagtaatgagggtgtgcagaaggataaggatgaacctctccctccttttctgctttaggtttatggtgacaaataaacctggtctgtaacctctactgttactttgttatactctccttcctcctcatcatcagtgtgaaaaagttccaaggtagaacgaaccacagcccacacttgtcctattgctaccctgatgcttccgagctccccttcttactcaccacggggattgctttaagagtactcgggtgtcctccagctagttccacattctccaatcgttgctccagcgatcctttgacctgtatttgagcccccatkaatgggcaccacttgctgagaccaggtcggttggagagaccctaacccagcagcactagaggaattaaagactcacacacagaaatatagaggtgtgaagtgggaaatcgggggggggggtttacagcctccagagcagagcctgaacagagattt

SEQ ID NO: 206896 - DNA, 288 bp, Homo sapiens
cagggttgaaaaactacttcttgggtcctatgctcacaamctgtgtgataggtttaattgtactgcaaacctcggtatccctcaatatgcctttggaagaaacttacagaggtaccacgttaatttggaatacaaactagaaaaaaaaaaaagaaaagtttcctataagtagagaacagaaatttctttttaagataaaatttattgaagtaaaaaatggattaaacttttataaagggcagagttttctaagaatttcaaagcaatgcattcattgcaaaagacggc

SEQ ID NO: 206897 - DNA, 431 bp, Homo sapiens
acttcttgggtcctatgctcacaacctgtgtgatrggtttaattgtactgcaaacctcggtatccctcaatatgcctttggaagaaacttacagaggtaccacgttaatttggaatacaaactagaaaaaaaaaaaagaaaagtttcctataagtagagaacagaaatttctttttaagataaaatttattgaagtaaaaaatggattaaacttttataaagggcagagttttctaagaatttcaaagcaatgcattcattgcaaaagacggctttaattacttaatcttttttttttttttttttttttttttttgtgagacagggtctcatctgtcaccaggctggagtgcagtggtgcagtcttggctcactgcaacctccacctcctggcttcaagcaattctcctgccttagtatcccaagtagct

SEQ ID NO: 206898 - DNA, 288 bp, Homo sapiens
cagggttgaaaaactacttcttgggtcctatgctcacaacctgtgtgataggtttaattgtactgcaaacctcggtatccctcaatatgcctttggaagaaacttacagaggtaccacgttaatttrgaatacaaactagaaaaaaaaaaaagaaaagtttcctataagtagagaacagaaatttctttttaagataaaatttattgaagtaaaaaatggattaaacttttataaagggcagagttttctaagaatttcaaagcaatgcattcattgcaaaagacggc

SEQ ID NO: 206899 - DNA, 431 bp, Homo sapiens
acttcttgggtcctatgctcacaacctgtgtgataggtttaattgtactgcaaacctcggtatccctcaatatgcctttggaagaaacttacagaggtaccacgttaatttggaatacaaactagaaaaaaaaaaaagaaaagtttcctataagtagagaacagaaatttctttttaagataaaatttattgaagtaaaaaatggattaaacttttataaagggcagagttttctaagaatttcaaagcaatgcattcattgcaaaagayggctttaattacttaatcttttttttttttttttttttttttttttgtgagacagggtctcatctgtcaccaggctggagtgcagtggtgcagtcttggctcactgcaacctccacctcctggcttcaagcaattctcctgccttagtatcccaagtagct

SEQ ID NO: 206900 - DNA, 269 bp, Homo sapiens
ggtttcagtagagattgaaggccaacagacctaagactcattcagaaatacttagctgagcaataacccttcataagcagtcacttgacaggtgacattttaaatctcctgtmatttactgtgtcattggcttacacttgttctcaggaaaagttccaaatttttcaccatgaaataaaaacacccatgtcaatgtgattcttgtcaagttactcagccttgtttctcaccgcttactgcactctgccctttgctctagcaccaaactg

SEQ ID NO: 206901 - DNA, 269 bp, Homo sapiens
ggtttcagtagagattgaaggccaacagacctaagactcattcagaaatacttagctgagcaataacccttcataagcagtcacttgacaggtgacattttaaatctcctgtcatttactgtgtcattggcttacacttgttctcaggaaaagttccaaatttttcaccatgaaataaaaacacccatgtcaatgtrattcttgtcaagttactcagccttgtttctcaccgcttactgcactctgccctttgctctagcaccaaactg

SEQ ID NO: 206902 - DNA, 269 bp, Homo sapiens
ggtttcagtagagattgaaggccaacagacctaagactcattcagaaatacttagctgagcaataacccttcataagcagtcacttgacaggtgacattttaaatctcctgtcatttactgtgtcattggcttacacttgttctcaggaaaagttccaaatttttcaccatgaaataaaaacacccatgtcaatgtgattcttgycaagttactcagccttgtttctcaccgcttactgcactctgccctttgctctagcaccaaactg

SEQ ID NO: 206903 - DNA, 269 bp, Homo sapiens
ggtttcagtagagattgaaggccaacagacctaagactcattcagaaatacttagctgagcaataacccttcataagcagtcacttgacaggtgacattttaaatctcctgtcatttactgtgtcattggcttacacttgttctcaggaaaagttccaaatttttcaccatgaaataaaaacacccatgtcaatgtgattcttgtcaagttactcagccttgtttctcaccrcttactgcactctgccctttgctctagcaccaaactg

SEQ ID NO: 206904 - DNA, 351 bp, Homo sapiens
aagcccatgatattgacataaaagtggrtagatgtcccttctctgtgttccagtagtgccctgctctatacctgtcatggtatctatgactctatatggacattgcctgcctgtctgttttttaggttagagcttatgactgttgggaggtggaccatgccatcttcatcttgtaattccagtgctggttctagtaccttagcatgtggctgttgattacatgaatgaagactgaaaaagctctgatatttaaacacaattagaattaatgccatgtgtaaattattaaatagtaattctgtattgtaaatgtacatacatatctcattcttattaactctgataaagttc

SEQ ID NO: 206905 - DNA, 351 bp, Homo sapiens
aagcccatgatattgacataaaagtggatagatgtcccttctctgtgttccagtagtgccctgctctatacctgtcatggtatctatgactctatatggacattgcctgcctgtctgttttttaggttakagcttatgactgttgggaggtggaccatgccatcttcatcttgtaattccagtgctggttctagtaccttagcatgtggctgttgattacatgaatgaagactgaaaaagctctgatatttaaacacaattagaattaatgccatgtgtaaattattaaatagtaattctgtattgtaaatgtacatacatatctcattcttattaactctgataaagttc

SEQ ID NO: 206906 - DNA, 351 bp, Homo sapiens
aagcccatgatattgacataaaagtggatagatgtcccttctctgtgttccagtagtgccctgctctatacctgtcatggtatctatgactctatatggacattgcctgcctgtctgttttttaggttagagcttatgactgttgrgaggtggaccatgccatcttcatcttgtaattccagtgctggttctagtaccttagcatgtggctgttgattacatgaatgaagactgaaaaagctctgatatttaaacacaattagaattaatgccatgtgtaaattattaaatagtaattctgtattgtaaatgtacatacatatctcattcttattaactctgataaagttc

SEQ ID NO: 206907 - DNA, 632 bp, Homo sapiens
gggctatttacacattttaattgtttctcataaaatatataacattccaatatttactgaagtaggatatttttgtatcacatgtatgattataatttatagggtattttaaatgatgttttttggcctccttaagttttaagtggatcttgcaaatgaaaaccagtattattgagtttgacatactcaaattgcccaaatgtcagctgtttaaacaatcaagtcatcattgatactttagtaaaggttagtaaaggtcatcgaaggtttatttgcattttacagtttttattacttaggagagttaaggagtacctgccaggtttgtccatgctaatgttacaattttctttatgtagttcaaccgtattttgtatggagatactttgaggctctgtaaatatctggttactcctcagaacccactagatttagcatttcatggatgacttgtgtttgaacaattattactatgatggttaccagatgattattttcttattytcttctttgttctacatggagaaataaaaccaataaataagggagaaggaaagctcatgattctgatgctccaattccccaagattaggccagtagtagacattctaagctgactttatgtctctttg

SEQ ID NO: 206908 - DNA, 567 bp, Homo sapiens
acaaatgacctgtgttccacctagagagggtgccagccctctcagcattatgaagtgcccctcctctgtctgcatccccaggacamccatgggtggggagggcagagattggggagcacctatagaggctctaatgctctaaggtgacagtgatgaggacctgggtgcacccatgagtggagaagctaggcctgtccagagaagcaagacaaacacacacacacacacacacacacacacacacacaggcacacatgcatactcaaatacattgcatacacacatgtcagttcaggggatagaggacactgactctgggccctgttgacccaagcagactcccatggtggtgggttgtgtcaccccacaatgtcactgttgctgagttcccatcgcctctgtgttgtggagcagttagagacacacagcagtgtctgtgagtagctctgcatgaaggaccattttctagatgagaggcacatctcaacacagctcactgatcagattcaggtgagtgggacctgctcttttctcttcctcctggcttgggaaaagtcactatcaggt

SEQ ID NO: 206909 - DNA, 276 bp, Homo sapiens
cacacacacacacacacacacacacacacacaggcacacatgcatacwcaaatacattgcatacacacatgtcagttcaggggatagaggacactgactctgggccctgttgacccaagcagactcccatggtggtgggttgtgtcaccccacaatgtcactgttgctgagttcccatcgcctctgtgttgtggagcagttagagacacacagcagtgtctgtgagtagctctgcatgaaggaccattttctagatgagaggcacatctcaacaca

SEQ ID NO: 206910 - DNA, 276 bp, Homo sapiens
cacacacacacacacacacacacacacacacaggcacacatgcatactcaaatacattgcatacacacatgtcagttcaggggatagaggacactgactctgggccctgttgacccaagcagactcccatggtggtgggttgtgtcaccccacaatgtcactgttgctgagtycccatcgcctctgtgttgtggagcagttagagacacacagcagtgtctgtgagtagctctgcatgaaggaccattttctagatgagaggcacatctcaacaca

SEQ ID NO: 206911 - DNA, 567 bp, Homo sapiens
acaaatgacctgtgttccacctagagagggtgccagccctctcagcattatgaagtgcccctcctctgtctgcatccccaggacacccatgggtggggagggcagagattggggagcacctatagaggctctaatgctctaaggtgacagtgatgaggacctgggtgcacccatgagtggagaagctaggcctgtccagagaagcaagacaaacacacacacacacacacacacacacacacacacaggcacacatgcatactcaaatacattgcatacacacatgtcagttcaggggatagaggacactgactctgggccctgttgacccaagcagactcccatggtggtgggttgtgtcaccccacaatgtcactgttgctgagttcccatcgcctctgtgttgtggagcagttagagacacacagcagtgtctgtgagtagctctgcrtgaaggaccattttctagatgagaggcacatctcaacacagctcactgatcagattcaggtgagtgggacctgctcttttctcttcctcctggcttgggaaaagtcactatcaggt

SEQ ID NO: 206912 - DNA, 567 bp, Homo sapiens
acaaatgacctgtgttccacctagagagggtgccagccctctcagcattatgaagtgcccctcctctgtctgcatccccaggacacccatgggtggggagggcagagattggggagcacctatagaggctctaatgctctaaggtgacagtgatgaggacctgggtgcacccatgagtggagaagctaggcctgtccagagaagcaagacaaacacacacacacacacacacacacacacacacacaggcacacatgcatactcaaatacattgcatacacacatgtcagttcaggggatagaggacactgactctgggccctgttgacccaagcagactcccatggtggtgggttgtgtcaccccacaatgtcactgttgctgagttcccatcgcctctgtgttgtggagcagttagagacacacagcagtgtctgtgagtagctctgcatgaaggacyattttctagatgagaggcacatctcaacacagctcactgatcagattcaggtgagtgggacctgctcttttctcttcctcctggcttgggaaaagtcactatcaggt

SEQ ID NO: 206913 - DNA, 626 bp, Homo sapiens
caagcttctgggtgccactgcattccctgatacccacagtggaagctgtttgcagtcggcctggtccagctgcagcctcacagggagctggcatctgtgcctggagctgcccaccccactgcagctggcatgcttggctgtgtgcagtggccagatcccatgctcgcttgctcacacacccctcactgctctgtacccagctcgcccttggcaggtgtgggatccagaccactagcatgagctgagtggacagaactaacccagtgggcccaagcaaaacacaggtaaaggctccacmagccagaggtttcaggcagaaaagtgacacctcaggattctgtaacacttgtgtcctttgatctctcggagcagctgggatcatgataaattttctctcggatttcagagctccatggatttgtgttttgagctttgagtttctttgagcaaatttctgttccaaactgctatccagccatgactggctggatgttttagaagttatgacagaaaagggaccgggtccaggatcagatttgatccagtagttaactggcttgaatccagttccagttagaggcctcctacatctgactgggtcagaaggaaagtggtagtaaatgata

SEQ ID NO: 206914 - DNA, 626 bp, Homo sapiens
caagcttctgggtgccactgcattccctgatacccacagtggaagctgtttgcagtcggcctggtccagctgcagcctcacagggagctggcatctgtgcctggagctgcccaccccactgcagctggcatgcttggctgtgtgcagtggccagatcccatgctcgcttgctcacacacccctcactgctctgtacccagctcgcccttggcaggtgtgggatccagaccactagcatgagctgagtggacagaactaacccagtgggcccaagcaaaacacaggtaaaggctccacaagccagaggtttcaggcagaaaagtgacrcctcaggattctgtaacacttgtgtcctttgatctctcggagcagctgggatcatgataaattttctctcggatttcagagctccatggatttgtgttttgagctttgagtttctttgagcaaatttctgttccaaactgctatccagccatgactggctggatgttttagaagttatgacagaaaagggaccgggtccaggatcagatttgatccagtagttaactggcttgaatccagttccagttagaggcctcctacatctgactgggtcagaaggaaagtggtagtaaatgata

SEQ ID NO: 206915 - DNA, 626 bp, Homo sapiens
caagcttctgggtgccactgcattccctgatacccacagtggaagctgtttgcagtcggcctggtccagctgcagcctcacagggagctggcatctgtgcctggagctgcccaccccactgcagctggcatgcttggctgtgtgcagtggccagatcccatgctcgcttgctcacacacccctcactgctctgtacccagctcgcccttggcaggtgtgggatccagaccactagcatgagctgagtggacagaactaacccagtgggcccaagcaaaacacaggtaaaggctccacaagccagaggtttcaggcagaaaagtgacacctcaggattctgtaacacttgtgtcctttgatctctcggagcagctgggatcatgataaattttctctcggatttcagagctccatggatttgtgttttgagctytgagtttctttgagcaaatttctgttccaaactgctatccagccatgactggctggatgttttagaagttatgacagaaaagggaccgggtccaggatcagatttgatccagtagttaactggcttgaatccagttccagttagaggcctcctacatctgactgggtcagaaggaaagtggtagtaaatgata

SEQ ID NO: 206916 - DNA, 547 bp, Homo sapiens
gatcgtttgtgaagataagtcttccctctatcaatgagtaaagatttttgccctttaaaactttcttaagtcatgattttaagtaaatgaatgacttacagtgacctggaattctatttcataacatcaagtgtttaaacttttaatatatttaataggcttcccaaaatcaaatttcaacttcaaaattgtcttttctgacctctaactttgggatactacagaggcccttgaagcacccaaaagagaggtaaacaggactatttaacatgttaagtcacatgggtagcactgtcaaaataaaacataatgttgaaccttcttcaggttatatttagtttatgtcatcaacccgttctaaaattgtataggatttctaaaattcttttttttttcccccgagatggagtcttgctctgtcaccmaggctggagtacagtggcacaatctcggctcactgcaacctccgcctcctgggttcatgccattctcctgcttcagcctcccgagtagctgggactacaggcatccaccaccatgccaagct

SEQ ID NO: 206917 - DNA, 476 bp, Homo sapiens
ttacctgtttagtttgttttgagacagagtttcactcttgtcacctaggctggagtgcaatggtgtgatctaggctcactgaagcctccacctcctgggttcaagcatttctcctgcctcagcctcccaagtagctgggattacagacaactgccaccacatccggctaatttttttatttttagtagagacagggttttaccatgttggccaggctggtctcaaactcctgacctcaggtgatccacctaacttggcctctcaagagctgrgattacaggaatgagccaccacatccaccctaattatggttattaagttattgtagaccacagaaataaccaaatttccttatcaattgtctttaactataactatttaaagtcatttccacagttaattgcttaatggtgatgcagtttctaaaagcttcacaagcatgcaaaattctagaatagaagattcatgaaagaatg

SEQ ID NO: 206918 - DNA, 476 bp, Homo sapiens
ttacctgtttagtttgttttgagacagagtttcactcttgtcacctaggctggagtgcaatggtgtgatctaggctcactgaagcctccacctcctgggttcaagcatttctcctgcctcagcctcccaagtagctgggattacagacaactgccaccacatccggctaatttttttatttttagtagagacagggttttaccatgttggccaggctggtctcaaactcctgacctcaggtgatccacctaacttggcctctcaagagctgggattacaggaatgagccaccacatccaccctaattatggttattaagttattgtagaccacagaaataascaaatttccttatcaattgtctttaactataactatttaaagtcatttccacagttaattgcttaatggtgatgcagtttctaaaagcttcacaagcatgcaaaattctagaatagaagattcatgaaagaatg

SEQ ID NO: 206919 - DNA, 430 bp, Homo sapiens
tgagggccatttcaatctcttggccctgcagcagccatttcaaaataagtcaaaaaatatatttgggggtaaaatattttgatttccttcacgcttcttctctctgtgatgctgcaccagaatcagattagaaaggaagccacattataagtgttaataaaacccatctgatgagatttgatagtttgaagggtgtgtttcccagaccctttagatagaaattggggccaaagraaacaaggtcttattcctctatataaatctgtcagtgttttaagcagtgaaagaaagatttttcatttaattttacagacttgatactaatgaaaaggatagcttgtaaaatataaatctctttttctataaaaaggacatgttgttgattctcttagaccttgaaccccggccaggagttttaaaccaagcagta

SEQ ID NO: 206920 - DNA, 430 bp, Homo sapiens
tgagggccatttcaatctcttggccctgcagcagccatttcaaaataagtcaaaaaatatatttgggggtaaaatattttgatttccttcacgcttcttctctctgtgatgctgcaccagaatcagattagaaaggaagccacattataagtgttaataaaacccatctgatgagatttgatagtttgaagggtgtgtttcccagaccctttagatagaaattggggccaaaggaaacaaggtcttattcctctatataaatctgtcagtgytttaagcagtgaaagaaagatttttcatttaattttacagacttgatactaatgaaaaggatagcttgtaaaatataaatctctttttctataaaaaggacatgttgttgattctcttagaccttgaaccccggccaggagttttaaaccaagcagta

SEQ ID NO: 206921 - DNA, 487 bp, Homo sapiens
ggtcttattcctctatataaatctgtcagtgttttaagcagtgaaagaaagatttttcatttaattttacagacttgatactaatgaaaaggatagcttgtaaaatataaatctctttttctataaaaaggacatgttgttgattctcttagaccttgaacccyggccaggagttttaaaccaagcagtacctatctccagatctctagtaccaaattaatttggggtggggataacaggtttattgagaaataatgaacacgccatgcaattcactcatttaaagtatacaattcattaactttagtattttcagagagttatgccgtcatcattacaattaattgtaaaacattttcatcaccctaaaaacaaaccccacaacatttagccatcttcactagttttcccttcctccctcagccgtagggaaccacccaccttctttgtatagatttgcctataagcctctgaaataaaaagcaag

SEQ ID NO: 206922 - DNA, 447 bp, Homo sapiens
aatgagggccatttcaatctcttggccctgcagcagccatttcaaaataagtcaaaaaatatatttgggggtaaaatattttgatttccttcacgcttcttctctctgtgatgctgcaccagaatcagattagaaaggaagccacattataagtgttaataaaacccatctgatgagatttgatagtttgaagggtgtgtttcccagaccctttagatagaaattggggccaaaggaaacaaggtcttattcctctatataaatctgtcagtgttttaagcagtgaaagaaagatttttcatttaattttacagacttgatactaatgaaaaggatagcttgtaaaatataaatctctttttctataaaaaggacatgttgttgattctcttagaccttgaaccccggccaggarttttaaaccaagcagtacctatctccagatct

SEQ ID NO: 206923 - DNA, 487 bp, Homo sapiens
ggtcttattcctctatataaatctgtcagtgttttaagcagtgaaagaaagatttttcatttaattttacagacttgatactaatgaaaaggatagcttgtaaaatataaatctctttttctataaaaaggacatgttgttgattctcttagaccttgaaccccggccaggagttttaaaccaagcagtacctatctccagatctctagtaccaaattaatttggggtggggataacaggtttattgagaaataatgaacacrccatgcaattcactcatttaaagtatacaattcattaactttagtattttcagagagttatgccgtcatcattacaattaattgtaaaacattttcatcaccctaaaaacaaaccccacaacatttagccatcttcactagttttcccttcctccctcagccgtagggaaccacccaccttctttgtatagatttgcctataagcctctgaaataaaaagcaag

SEQ ID NO: 206924 - DNA, 449 bp, Homo sapiens
tcattacaattaattgtaaaacattttcatcaccctaaaaacaaaccccacaacatttagccatcttcactagttttcccttcctccctcagccstagggaaccacccaccttctttgtatagatttgcctataagcctctgaaataaaaagcaagtggtctgctgggactggcttatttcacttagcataatttttcatgctgcatctgtgctgtagcaggtattgatgccgggtttttgctccttagttcagctacatctgggttcttctctcatgaccaggaaaaatcaagcatgcagacacattgaggagggcagaatttatttgtgaaaggacagctctcagcaaagagagggatcctgcaaagaggtttccacctcacaattgaataccaggatcacatgagctgaagtggccaggctcctcctctgcataaggcgtgaattc

SEQ ID NO: 206925 - DNA, 449 bp, Homo sapiens
tcattacaattaattgtaaaacattttcatcaccctaaaaacaaaccccacaacatttagccatcttcactagttttcccttcctccctcagccgtagggaaccacccaccttctttgtatagatttgcctataagcctctgaaataaaaagcaagtggtctgctgggactggcttatttcacttagcataatttttcatgctgcatctgtgctgtagcaggtattgatgccgggtttttgctccttagttcagctacatctgggttcttctctcatgaccaggaaaaatcaagcatgcagacacattgaggagggcagaatttatttgtgaaaggacagctctcagcaaagagagggrtcctgcaaagaggtttccacctcacaattgaataccaggatcacatgagctgaagtggccaggctcctcctctgcataaggcgtgaattc

SEQ ID NO: 206926 - DNA, 446 bp, Homo sapiens
cattacaattaattgtaaaacattttcatcaccctaaaaacaaaccccacaacatttagccatcttcactagttttcccttcctccctcagccgtagggaaccacccaccttctttgtatagatttgcctataagcctctgaaataaaaagcaagtggtctgctgggactggcttatttcacttagcataatttttcatgctgcatctgtgctgtagcaggtattgatgccgggtttttgctccttagttcagctacatctgggttcttctctcatgaccaggaaaaatcaagcatgcagacacattgaggagggcagaatttatttgtgaaaggacagctctcagcaaagagagggatcctgcaaagaggtttccacctcacaattgaataccaggatcacatgagctgaagyggccaggctcctcctctgcataaggcgtgaat

SEQ ID NO: 206927 - DNA, 404 bp, Homo sapiens
agctgccagtttgttttccaaagtggctgcatcactttacattcccagcagcatcagatgaagggttttaatttctttacatttttcctaacactcttttttcttgaacaaagattttatcctgtggtgtgaagtgataccacatgtggttttgatttacattttcctaatgactaattacattaagcatctattaatgtgcttatccatctttatatcttctttgcagatatatctattcaaaatcyttgcccattttttaaaattggcttatcttgttatttattaattgcaatagttatttatatttcctatatatgtaagtcccttatcagatacacgcttttcaaatactttcttctacttggcgtcttaccttttcacttcttcatactgtcttctga

SEQ ID NO: 206928 - DNA, 593 bp, Homo sapiens
actcttttttcttgaacaaagattttatcctgtggtgtgaagtgataccacatgtggttttgatttacattttcctaatgactaattacattaagcatctattaatgtgcttatccatctttatatcttctttgcagatatatctattcaaaatctttgcccattttttaaaattggcttatcttgttatttattaattgcaakagttatttatatttcctatatatgtaagtcccttatcagatacacgcttttcaaatactttcttctacttggcgtcttaccttttcacttcttcatactgtcttctgaggcacagcagttttcaattttgaagtccattgaatccatttttcctttggagtcatagctaagaaaacactggcaaatgcagtcacaaagatttatgccagtgttttcttctgagggatttatagttttagcttttacagttaactattttattttgagttaattattaaataagatatttggtcgaactttatttattttttgcttatggatacccagttgtcccagcaccatttgttgaaaagactattcttttcccattttgttcttttgttaagctt

SEQ ID NO: 206929 - DNA, 593 bp, Homo sapiens
actcttttttcttgaacaaagattttatcctgtggtgtgaagtgataccacatgtggttttgatttacattttcctaatgactaattacattaagcatctattaatgtgcttatccatctttatatcttctttgcagatatatctattcaaaatctttgcccattttttaaaattggcttatcttgttatttattaattgcaatagttatttatatttcctatatatgtaagtcccttatcagatacacgcttttcaaatactttcttctacttggcgtcttaccttttcacttcttcatactgtcttctgaggcacagcagttttcaattttgaagtccattgaatccatttttcctttggagtcatagctaagaaaacactggcaaatgcagtcacaaagatttatgccagtgttttcttctgagggwtttatagttttagcttttacagttaactattttattttgagttaattattaaataagatatttggtcgaactttatttattttttgcttatggatacccagttgtcccagcaccatttgttgaaaagactattcttttcccattttgttcttttgttaagctt

SEQ ID NO: 206930 - DNA, 545 bp, Homo sapiens
atactgagcattttaaaatttatttattggytatttgtatttctttttctaaaaaaaagtatagttagatattttgcccaattttaaactcagatttttttttactgtgaagttgtttgagtttttttgtatattttgtatattagtcccttattagatgaatagcttgacaatattttctcctattctacaggttttctcttcactcagttgtttgctggacagaagctctttagcttaatgtagtgtcttttgtctatgatttgttgtttgcctatgcttctgatgtcttacccataaaaatctttgtgcagactaatgtcctcaagcattttccctatatttacttagagtagtttgataattttgggccttacatttcagtcttcaatcgattctgagtttatgttgttatatggtgttacataggaagctaatatcgttcttctccatatggatatttagttttcccagtgtcattcatttgaagaggctgtcctttccccagcgtatgttcttggcatgttcgtccaaaatcagttggc

SEQ ID NO: 206931 - DNA, 545 bp, Homo sapiens
atactgagcattttaaaatttatttattggctatttgtatttctttttctaaaaaaaagtatagttagatattttgcccaattttraactcagatttttttttactgtgaagttgtttgagtttttttgtatattttgtatattagtcccttattagatgaatagcttgacaatattttctcctattctacaggttttctcttcactcagttgtttgctggacagaagctctttagcttaatgtagtgtcttttgtctatgatttgttgtttgcctatgcttctgatgtcttacccataaaaatctttgtgcagactaatgtcctcaagcattttccctatatttacttagagtagtttgataattttgggccttacatttcagtcttcaatcgattctgagtttatgttgttatatggtgttacataggaagctaatatcgttcttctccatatggatatttagttttcccagtgtcattcatttgaagaggctgtcctttccccagcgtatgttcttggcatgttcgtccaaaatcagttggc

SEQ ID NO: 206932 - DNA, 545 bp, Homo sapiens
atactgagcattttaaaatttatttattggctatttgtatttctttttctaaaaaaaagtatagttagatattttgcccaattttaaactcagatttttttttactgtgaagttgtttgagtttttttgtatattttgtatattagtcccttattagatgaatagcttgacaatattttctcctattctacaggttttytcttcactcagttgtttgctggacagaagctctttagcttaatgtagtgtcttttgtctatgatttgttgtttgcctatgcttctgatgtcttacccataaaaatctttgtgcagactaatgtcctcaagcattttccctatatttacttagagtagtttgataattttgggccttacatttcagtcttcaatcgattctgagtttatgttgttatatggtgttacataggaagctaatatcgttcttctccatatggatatttagttttcccagtgtcattcatttgaagaggctgtcctttccccagcgtatgttcttggcatgttcgtccaaaatcagttggc

SEQ ID NO: 206933 - DNA, 545 bp, Homo sapiens
atactgagcattttaaaatttatttattggctatttgtatttctttttctaaaaaaaagtatagttagatattttgcccaattttaaactcagatttttttttactgtgaagttgtttgagtttttttgtatattttgtatattagtcccttattagatgaatagcttgacaatattttctcctattctacaggttttctcttcactcagttgtttgctggacagaagctctttagcttaatgtagtgtcttttgtctatgatttgttgtttgcctatgcttctgatgtcttacccataaaaatctttgtgcagactaatgtcctcaagcattttccctatatttacttagagtagtttgataattttgggccttacatttcagtcttcaatcgattctgagtttatgttgttatatggtgttacataggaagctaatatcrttcttctccatatggatatttagttttcccagtgtcattcatttgaagaggctgtcctttccccagcgtatgttcttggcatgttcgtccaaaatcagttggc

SEQ ID NO: 206934 - DNA, 381 bp, Homo sapiens
ccctgaactctgggtacaagccatccttttgcctcagtatcccaactagctgggtctacgagcatgagccaccatgcccgggtaattaaaaaacattttttttttgtagagatgggggtctcactatgttgctctggctgatctcaaattcctggcctcaagtgatctttctgccacagctttttaaagtgctaggattacaggaatgagccaccatgcctaatatagagtgtaatatcaytttcaaagtcttattcctagacccatttattgactttggcctaaataactcaatatgatatctctgaaactttttttgacatactgtggggaatgataatgaaggaagggggttagacactttttactaggagataactt

SEQ ID NO: 206935 - DNA, 557 bp, Homo sapiens
aaatcttaagacacatatggaaaacagtatggtagaacttagtaaactacaagaatataaatcagagctagatgaaagggcaatgctggcagtagaaaaattagaagaaatccatttacaggtgagttgtttaaatcaggtaagtttacttgtaatgtgctttcatttatttcactgcaaattatattttggakatatatatatatatatatatatatatacacatatatatatagtgtttcctctgcctctcttgtagcaatctgctttgtagagttctagaaaaaaatggtatctgttttttcttttaaatatttaaatttccattattattataacaaaatcaatctttcagagtaatgattctcattatggagtcatttgatgattaagaccagttggcacaggaaaaaattgtgatttagaaattatgtgataattatgaattggtcttaagctacagtgttcattgatcactttttaaaactatgaatggattctattactttttatatgaccagattacattaatactagcataattatgatttcaaatt

SEQ ID NO: 206936 - DNA, 506 bp, Homo sapiens
catacactcatagaaaatgaattaagctcattaatttgtttcaaaagcataatttttagtgagatggcttcaggagattagaaggaagtgaatgctaatttgacaatgtaattttgaaaaataaygttagtaaataattttacctttaaaatgttagtcaaagatagtttttgtctctcctctcatttttttttttgcttttgtatggctttttttcctgaaaagtctcatgtaattaacctgatctgttagtttttttcactaagtatttttgaagctttataattaatgaagtgatcttgttataaaattacttgtcagaatttccctaaatagaaatattaatgtgtttaatttacttttcagtggatcacaacctaaatgcaaagtggtactgctactctgggcacaattgtttttgattgtgatctttagtattatcaccagagggtgcctcaagaaagactatttgtgtaacatattcaagatgttacagaaaggcaccc

SEQ ID NO: 206937 - DNA, 506 bp, Homo sapiens
catacactcatagaaaatgaattaagctcattaatttgtttcaaaagcataatttttagtgagatggcttcaggagattagaaggaagtgaatgctaatttgacaatgtaattttgaaaaataatgtkagtaaataattttacctttaaaatgttagtcaaagatagtttttgtctctcctctcatttttttttttgcttttgtatggctttttttcctgaaaagtctcatgtaattaacctgatctgttagtttttttcactaagtatttttgaagctttataattaatgaagtgatcttgttataaaattacttgtcagaatttccctaaatagaaatattaatgtgtttaatttacttttcagtggatcacaacctaaatgcaaagtggtactgctactctgggcacaattgtttttgattgtgatctttagtattatcaccagagggtgcctcaagaaagactatttgtgtaacatattcaagatgttacagaaaggcaccc

SEQ ID NO: 206938 - DNA, 506 bp, Homo sapiens
catacactcatagaaaatgaattaagctcattaatttgtttcaaaagcataatttttagtgagatggcttcaggagattagaaggaagtgaatgctaatttgacaatgtaattttgaaaaataatgttagtaaataattttacctttaaaatgttagtcaaagatagtttttgtctctcctctcatttttttttttgcttttgtatggctttttttcctgaaaagtctcatrtaattaacctgatctgttagtttttttcactaagtatttttgaagctttataattaatgaagtgatcttgttataaaattacttgtcagaatttccctaaatagaaatattaatgtgtttaatttacttttcagtggatcacaacctaaatgcaaagtggtactgctactctgggcacaattgtttttgattgtgatctttagtattatcaccagagggtgcctcaagaaagactatttgtgtaacatattcaagatgttacagaaaggcaccc

SEQ ID NO: 206939 - DNA, 574 bp, Homo sapiens
aatgctaatttgacaatgtaattttgaaaaataatgttagtaaataattttacctttaaaatgttagtcaaagatagtttttgtctctcctctcatttttttttttgcttttgtatggctttttttcctgaaaagtctcatgtaattaacctgatctgttagtttttttcactaagtatttttgaagctttataattaatgaagtgatcttgttataaaattacttgtcagaatttccctaaatagaaatattaatgtgtttaatttacttttcagtggatcacaacctaaatgcaaagtggtactgctactctgggcacaattgtttttgattgtgatctttagtattatcaccagagggtgcctcaagaaagactatttgtgtaacatattcaagatgttacagaaaggcacccttgtgaaatagggaataattatcacaggaatttaaagaastgtaattcacaaagctgttaaaaaataacaccttgttcagcctgaagcggtgtgtggaaggcagaaagaacatgccccacctccagggccttggtcacagtgttgggggctaatagcc

SEQ ID NO: 206940 - DNA, 574 bp, Homo sapiens
aatgctaatttgacaatgtaattttgaaaaataatgttagtaaataattttacctttaaaatgttagtcaaagatagtttttgtctctcctctcatttttttttttgcttttgtatggctttttttcctgaaaagtctcatgtaattaacctgatctgttagtttttttcactaagtatttttgaagctttataattaatgaagtgatcttgttataaaattacttgtcagaatttccctaaatagaaatattaatgtgtttaatttacttttcagtggatcacaacctaaatgcaaagtggtactgctactctgggcacaattgtttttgattgtgatctttagtattatcaccagagggtgcctcaagaaagactatttgtgtaacatattcaagatgttacagaaaggcacccttgtgaaatagggaataattatcacaggaatttaaagaactgtaattcacaaagckgttaaaaaataacaccttgttcagcctgaagcggtgtgtggaaggcagaaagaacatgccccacctccagggccttggtcacagtgttgggggctaatagcc

SEQ ID NO: 206941 - DNA, 397 bp, Homo sapiens
cctagataatgggtgaaatgtacaaragtgaaatccaaaactggtttactaaacacaagtattcctagattttttttcattcattttagttttcttaacctacattaaggagtacaacatgatgttttgatataattatttctagtgaagtggttcttataatcaagcaaatcaacatattcattttcccacattattaccctttaaatacaagtatttctaatggaatcttcagaatcttacaagtagagccattttagaaggcaggaagttttacctgttgagccatacgtcactgatagccatttctcttccctgtctactttgtttgaactgcttgttcagtagaaatcaccttagaaacaatggtgcttctttagaacgattttaaaattat

SEQ ID NO: 206942 - DNA, 397 bp, Homo sapiens
cctagataatgggtgaaatgtacaagagtgaaatccaaaactggtttactaaacacaagtattcctagattttttttcattcattttagttttcttaacctacattaaggagtacaacatgatgttttgatataattatttctagtgaagtggttcttataatcaagcaaatcaacatattcattttcccacattattaccctttaaatacaagtatttctaatggaatcttcagaatcttacaagtagagccattttagaaggcaggaagttttacctgttgagccatacrtcactgatagccatttctcttccctgtctactttgtttgaactgcttgttcagtagaaatcaccttagaaacaatggtgcttctttagaacgattttaaaattat

SEQ ID NO: 206943 - DNA, 513 bp, Homo sapiens
cttgaattataaaatgcgggttattctttgccacatagtgagagaacatcaaaaatatagctagaagacttacagcaagatattccaaggtcactaacatagcacatgtatacatatgtaacaaacytgcacattgtgcacatgtaccagaacttaaagtataataatagtaaaaagaatgaggtaggcatgttacaagtagagttcctggctttggagaaagagaaagtccaacttcaaaaagacagaggttcacttgctgcttcttttttctctttatcaattatttgatttagtcaaattttctattcaagaaaatctcatgtgtacagttacagcggggttttctaaatgtgtaattatgtgtcaaagtagattagttctgctatctaaacaaaggttctggagaatgttctcataatgtttcttcattaatcaacctaagtctcactctcagtcttccaagtggcatatgagctgggaaactaattcagccatataccatgtgacctt

SEQ ID NO: 206944 - DNA, 590 bp, Homo sapiens
tatgggcgaagatatgaaaatttcattatgttctattgtatttgatatgtaaatgttctggcacaattatatacattttggattatatattgacagtaaattatttctcctttgttagcttcagcacaaaattaatattttcaacaacttgaatgcatacattgtgttctcactaatagtttagaatagygaaggggtctttgaagaatttcttatgaagtagaggcattgggtcagacagagccaaaacccattggcttagattaatcactatttatcctagggctgaagagggccaattgaagacacacatgtccaatccctctataaccttggagatctatgaaccagagaaatagagactggttcttaaggaggtaataagtgtgccttctatggtttataataatatgcattgtcttaacaatcgaatacttaaaagttaataacctcataatatgcaaaatttttaataagcacattggtccctgtgttcaagtagttggtaatcaaattagtgaagtatggtaagtcttttgaagagcattaaacagcagagaatgtaagaaatttgtctctataatagtgtg

SEQ ID NO: 206945 - DNA, 590 bp, Homo sapiens
tatgggcgaagatatgaaaatttcattatgttctattgtatttgatatgtaaatgttctggcacaattatatacattttggattatatattgacagtaaattatttctcctttgttagcttcagcacaaaattaatattttcaacaacttgaatgcatacattgtgttctcactaatagtttagaatagcgaaggggtctttgaagaatttcttatgaagtagaggcattgggtcagacagagccaaaacccattggcttagattaatcactatttatcctagggctgaagagggccaattgaagacacamatgtccaatccctctataaccttggagatctatgaaccagagaaatagagactggttcttaaggaggtaataagtgtgccttctatggtttataataatatgcattgtcttaacaatcgaatacttaaaagttaataacctcataatatgcaaaatttttaataagcacattggtccctgtgttcaagtagttggtaatcaaattagtgaagtatggtaagtcttttgaagagcattaaacagcagagaatgtaagaaatttgtctctataatagtgtg

SEQ ID NO: 206946 - DNA, 584 bp, Homo sapiens
ctgtattgtgtactgctatagcctacctttatcagtcagataacaatgtcaaagaggcaagcttggcaccattgctcttagtgaatctctgctgccagccttttatcctaagtgctctccaaagtcccatttaatggacctttctgaaattgtgctcaggatcaatatgaggctcattgatacagcagctttggaactcaccatttgcttatttattaaacctgggatakttgcccgacttctatcatctgaaatcctctccatgactttcaaaattaccaacattggttccaacatcattcctagaaaacatttcagtggagtatatttatctgacatttgactgtatttatagcagtaataatatatgatgattcctcctaaaataatcccacaattacccattttgggtcacctttgagggtcttatccttaatatcagagatctgttctatacatttgagtcttagaaataattactagcttctccctgaatttaactgaagttccttacttttattcagcctgttacccaaattacataatgtattgaaagctaaaaactgtccaaatttctgattacc

SEQ ID NO: 206947 - DNA, 584 bp, Homo sapiens
ctgtattgtgtactgctatagcctacctttatcagtcagataacaatgtcaaagaggcaagcttggcaccattgctcttagtgaatctctgctgccagccttttatcctaagtgctctccaaagtcccatttaatggacctttctgaaattgtgctcaggatcaatatgaggctcattgatacagcagctttggaactcaccatttgcttatttattaaacctgggatagttgcccgacttctatcatctgaaatcctctccatgactttcaaaattaccaacattggttccaacatcattcctagaaaacatttcagtggagtatatttatctgacatttgactgtatttatagcagtaakaatatatgatgattcctcctaaaataatcccacaattacccattttgggtcacctttgagggtcttatccttaatatcagagatctgttctatacatttgagtcttagaaataattactagcttctccctgaatttaactgaagttccttacttttattcagcctgttacccaaattacataatgtattgaaagctaaaaactgtccaaatttctgattacc

SEQ ID NO: 206948 - DNA, 584 bp, Homo sapiens
ctgtattgtgtactgctatagcctacctttatcagtcagataacaatgtcaaagaggcaagcttggcaccattgctcttagtgaatctctgctgccagccttttatcctaagtgctctccaaagtcccatttaatggacctttctgaaattgtgctcaggatcaatatgaggctcattgatacagcagctttggaactcaccatttgcttatttattaaacctgggatagttgcccgacttctatcatctgaaatcctctccatgactttcaaaattaccaacattggttccaacatcattcctagaaaacatttcagtggagtatatttatctgacatttgactgtatttatagcagtaataatatatgatgattcctcytaaaataatcccacaattacccattttgggtcacctttgagggtcttatccttaatatcagagatctgttctatacatttgagtcttagaaataattactagcttctccctgaatttaactgaagttccttacttttattcagcctgttacccaaattacataatgtattgaaagctaaaaactgtccaaatttctgattacc

SEQ ID NO: 206949 - DNA, 600 bp, Homo sapiens
agtatatttgtagaaggcattaaaacacaaattttataattatgaatgcatataataaggaacaagttttattctaaatagcaattaaatgagaactatgatatagggaataaaagtgaatattaaaccattgtaccgacaataacagagccctttttctgcygcgtgatggaatttagtgtctactaaggaagaaaaaaatgcaagatatcttaaattaggtactttccaacaaatttaagaaatgtgtacacacttgaggagacttaagaagtctctgactaaaacactagaaaagaaaagcagtgaaaagccaaataactattactcaacaataacaacatttgttactattatattaatattaaacacactattaagcaacaacatttcagttactcactgagcccaaagtcatttttcatgaaccattcacagcactgataagctattgaaaaatgattgaaaacaaaaaagcttattgctttccaagtccttttaaagccttctcatgtgtcatttcatataatccttataacgaatctatggagtatatactgactttatctctgtacagaaaagaaaactgagtcatattca

SEQ ID NO: 206950 - DNA, 600 bp, Homo sapiens
agtatatttgtagaaggcattaaaacacaaattttataattatgaatgcatataataaggaacaagttttattctaaatagcaattaaatgagaactatgatatagggaataaaagtgaatattaaaccattgtaccgacaataacagagccctttttctgccgcgtgatggaatttagtgtytactaaggaagaaaaaaatgcaagatatcttaaattaggtactttccaacaaatttaagaaatgtgtacacacttgaggagacttaagaagtctctgactaaaacactagaaaagaaaagcagtgaaaagccaaataactattactcaacaataacaacatttgttactattatattaatattaaacacactattaagcaacaacatttcagttactcactgagcccaaagtcatttttcatgaaccattcacagcactgataagctattgaaaaatgattgaaaacaaaaaagcttattgctttccaagtccttttaaagccttctcatgtgtcatttcatataatccttataacgaatctatggagtatatactgactttatctctgtacagaaaagaaaactgagtcatattca

SEQ ID NO: 206951 - DNA, 635 bp, Homo sapiens
tgaattccatctcctattatgttttaaagatgctacaaacttgagacagtactatgtagatgacattcccagcaaatccccaaacaacacttaatgagatttcaaataccaggatcatgcaacagtaaaagatataaggaaataaagaaaagcacagtatatttgtagaaggcattaaaacacaaattttataattatgaatgcatataataaggaacaagttttattctaaatagcaattaaatgagaactatgatatagggaataaaagtgaatattaaaccattgtaccgacaataacagagccctttttctgccgcgtgatggaatttagtgtctactaaggaagaaaaaaatgcaagatatcttaaattaggtactttccaacaaatttaagaaatgtgtacacacttgaggagacttaagaagtctctgactaaaacactagaaaagaaaagcagtgaaaagccaaataactattactcaacaataacaacatttgttactattatattaatattaaacacactattaagcaacaacatttcagttactcactgakcccaaagtcatttttcatgaaccattcacagcactgataagctattgaaaaatgattgaaaacaaaaaagctt

SEQ ID NO: 206952 - DNA, 325 bp, Homo sapiens
atttaagaaatgtgtacacacttgaggagacttaagaagtctctgactaaaacactagaaaagaaaagcagtgaaaagccaaataactattactcaacaataacaacatttgttactattatattaatattaaacacactattaagcaacaacatttcagttactcactgagcccaaagtcatttttcatgaaccattcacarcactgataagctattgaaaaatgattgaaaacaaaaaagcttattgctttccaagtccttttaaagccttctcatgtgtcatttcatataatccttataacgaatctatggagtatatactg

SEQ ID NO: 206953 - DNA, 366 bp, Homo sapiens
atttgcatcttaaccactgttaagtatacaattcggtgtcattaaatgtattcacaatgttgtgcaagcatcaccaccacccatctcmataattctttttgtcttgtaaaattgaaaccctgtacccattaaaagtgactccccattccccacccccccagggcaactacagctttactttctgtcttgatgaatcatacaatatcaaatgtaatttttaagatatttaaaatcttttgtctggaagcaaagtggaagttaatatcaatggctatgccttcagtgagttctcagaccacattacaacgtagttaactatttatcttttattacgttctagacctattatttctttctggcacaaaa

SEQ ID NO: 206954 - DNA, 322 bp, Homo sapiens
tgtcttgatgaatcatacaatatcaaatgtaatttttaagatatttaaaatcttttgtctggaagcaaagtggaagttaatatcaatggctatgccttcagtgagttctcagaccacattacaaygtagttaactatttatcttttattacgttctagacctattatttctttctggcacaaaaatatcttctttgtagattatggcatttacctctatctccacaccattttggtctctcatccacagatcatcagcctcttgcttagtcttccatttaatgacaatttctatttagtatacaacagtccttccccctgca

SEQ ID NO: 206955 - DNA, 413 bp, Homo sapiens
caactttagcctaaaacacagatcatagggctcaaactttgttattttatgggattatactaatcagttaataatcaaaatttaccatttcaaaagaagaaatattggtctgggaaaattgccattgcttatacagaagaatggaggaatctttttgagaacaacaattctagtgatcttcctcatcactggttccaaaaccaagcccatgaaaggcctgcatagggataatgtggagaacatgccagagaaatacacatcaccagctcctcaactcagagctccaagggaatggccaaggargctgtattgtcctaagaaatttgagactgttttgacttacaataaatcctgctcaatcatatgtatgtatacacacacacacacccacacacacagacggtgttgtcagt

SEQ ID NO: 206956 - DNA, 355 bp, Homo sapiens
actgtagagatataagtaagtatagatatacttaactgttgtgttacaattgcctacagtattcagtacagtaacatgctgtmcaggtttgtagcctaggaggaataggctataccacctaacctagatatgtaatcagctatagcatctaggtttgtgtaagtaaactctgtgatgttcatacaataataaaattgtccagcaatgcatttctcagacacacccctgtcattaagtgacacatgactgtattagttaacactatgggaacttcatgggaaatggacactctagctccaccataaatagaaactgtttatgtcaaaaaaacacataaaagcatagttgcaagatt

SEQ ID NO: 206957 - DNA, 466 bp, Homo sapiens
gtgatgttcatacaataataaaattgtccagcaatgcatttctcagacacamccctgtcattaagtgacacatgactgtattagttaacactatgggaacttcatgggaaatggacactctagctccaccataaatagaaactgtttatgtcaaaaaaacacataaaagcatagttgcaagattacatttccttccagatatttcatttagtatctccacagatcactaacttcctgaatagcattcttgtgtctccactgcctcacatttgatttcaggtcattccatcaattgtcaaagacgcatccaacattaactttccaactactggtttggattgtgtcaacattgtcattctgggccacaacaacacaaaaggctaactcagtgaggtaacatagacactgatcagtgagattttgctgatggatggtaccatttttttaccaagatcaagggtattca

SEQ ID NO: 206958 - DNA, 589 bp, Homo sapiens
ataccacctaacctagatatgtaatcagctatagcatctaggtttgtgtaagtaaactctgtgatgttcatacaataataaaattgtccagcaatgcatttctcagacacaccsctgtcattaagtgacacatgactgtattagttaacactatgggaacttcatgggaaatggacactctagctccaccataaatagaaactgtttatgtcaaaaaaacacataaaagcatagttgcaagattacatttccttccagatatttcatttagtatctccacagatcactaacttcctgaatagcattcttgtgtctccactgcctcacatttgatttcaggtcattccatcaattgtcaaagacgcatccaacattaactttccaactactggtttggattgtgtcaacattgtcattctgggccacaacaacacaaaaggctaactcagtgaggtaacatagacactgatcagtgagattttgctgatggatggtaccatttttttaccaagatcaagggtattcataccttcaggcatctagataacattgaaaagggtaggttcatagataaaaagggaaagaggaa

SEQ ID NO: 206959 - DNA, 620 bp, Homo sapiens
attttggtcaaggatagtgcacatgtatttcagtggtgcaataaaatcataagactgtacttttactgtacctcttgtatgtttagacatgtatagatacacttactgtagagatataagtaagtatagatatacttaactgttgtgttacaattgcctacagtattcagtacagtaacatgctgtccaggtttgtagcctaggaggaataggctataccacctaacctagatatgtaatcagctatagcatctaggtttgtgtaagtaaactctgtgatgttcatacaataataaaattgtccagcaatgcatttctcagacacacccctgtcattaagtgacacatgactgtattagttaacacyatgggaacttcatgggaaatggacactctagctccaccataaatagaaactgtttatgtcaaaaaaacacataaaagcatagttgcaagattacatttccttccagatatttcatttagtatctccacagatcactaacttcctgaatagcattcttgtgtctccactgcctcacatttgatttcaggtcattccatcaattgtcaaagacgcatccaacattaactttccaactactggtttggattgtgtc

SEQ ID NO: 206960 - DNA, 466 bp, Homo sapiens
gtgatgttcatacaataataaaattgtccagcaatgcatttctcagacacacccctgtcattaagtgacacatgactgtattagttaacactatgggaacttcatgggaaatggacactctagctccaccataaatagaaaytgtttatgtcaaaaaaacacataaaagcatagttgcaagattacatttccttccagatatttcatttagtatctccacagatcactaacttcctgaatagcattcttgtgtctccactgcctcacatttgatttcaggtcattccatcaattgtcaaagacgcatccaacattaactttccaactactggtttggattgtgtcaacattgtcattctgggccacaacaacacaaaaggctaactcagtgaggtaacatagacactgatcagtgagattttgctgatggatggtaccatttttttaccaagatcaagggtattca

SEQ ID NO: 206961 - DNA, 466 bp, Homo sapiens
gtgatgttcatacaataataaaattgtccagcaatgcatttctcagacacacccctgtcattaagtgacacatgactgtattagttaacactatgggaacttcatgggaaatggacactctagctccaccataaatagaaactgtttatgtcaaaaaaacacataaaagcakagttgcaagattacatttccttccagatatttcatttagtatctccacagatcactaacttcctgaatagcattcttgtgtctccactgcctcacatttgatttcaggtcattccatcaattgtcaaagacgcatccaacattaactttccaactactggtttggattgtgtcaacattgtcattctgggccacaacaacacaaaaggctaactcagtgaggtaacatagacactgatcagtgagattttgctgatggatggtaccatttttttaccaagatcaagggtattca

SEQ ID NO: 206962 - DNA, 466 bp, Homo sapiens
gtgatgttcatacaataataaaattgtccagcaatgcatttctcagacacacccctgtcattaagtgacacatgactgtattagttaacactatgggaacttcatgggaaatggacactctagctccaccataaatagaaactgtttatgtcaaaaaaacacataaaagcatagttgcaagattacawttccttccagatatttcatttagtatctccacagatcactaacttcctgaatagcattcttgtgtctccactgcctcacatttgatttcaggtcattccatcaattgtcaaagacgcatccaacattaactttccaactactggtttggattgtgtcaacattgtcattctgggccacaacaacacaaaaggctaactcagtgaggtaacatagacactgatcagtgagattttgctgatggatggtaccatttttttaccaagatcaagggtattca

SEQ ID NO: 206963 - DNA, 589 bp, Homo sapiens
ataccacctaacctagatatgtaatcagctatagcatctaggtttgtgtaagtaaactctgtgatgttcatacaataataaaattgtccagcaatgcatttctcagacacacccctgtcattaagtgacacatgactgtattagttaacactatgggaacttcatgggaaatggacactctagctccaccataaatagaaactgtttatgtcaaaaaaacacataaaagcatagttgcaagattacatttccttccagatatttcatttagtatctccacagatcactaacttcctgaatagcattcttgtgtctccactgcctcacatttgatttcaggtcattccatcaattrtcaaagacgcatccaacattaactttccaactactggtttggattgtgtcaacattgtcattctgggccacaacaacacaaaaggctaactcagtgaggtaacatagacactgatcagtgagattttgctgatggatggtaccatttttttaccaagatcaagggtattcataccttcaggcatctagataacattgaaaagggtaggttcatagataaaaagggaaagaggaa

SEQ ID NO: 206964 - DNA, 589 bp, Homo sapiens
ataccacctaacctagatatgtaatcagctatagcatctaggtttgtgtaagtaaactctgtgatgttcatacaataataaaattgtccagcaatgcatttctcagacacacccctgtcattaagtgacacatgactgtattagttaacactatgggaacttcatgggaaatggacactctagctccaccataaatagaaactgtttatgtcaaaaaaacacataaaagcatagttgcaagattacatttccttccagatatttcatttagtatctccacagatcactaacttcctgaatagcattcttgtgtctccactgcctcacatttgatttcaggtcattccatcaattgtcaaagacgcatccaacattaactttccaactactggtttggattgtgtcaacattgtcattctggrccacaacaacacaaaaggctaactcagtgaggtaacatagacactgatcagtgagattttgctgatggatggtaccatttttttaccaagatcaagggtattcataccttcaggcatctagataacattgaaaagggtaggttcatagataaaaagggaaagaggaa

SEQ ID NO: 206965 - DNA, 565 bp, Homo sapiens
gaaagcttttgtataaacttgcttgatgagcaactgttgtccactggtaccttcactgtacaatccacacacaacaaaacttcacaactggacacctaaatttgcactttgtttggtaaagttgaatgaaaaatgttgtcttttaagcttatgctctcttatgaaagctgttattagattaattttactccaagatatgccarttaggaaataacttccaatttaatttcaccagctccctgtgggtggactaattactcacacatcacacttactctggtggtgaaatgcctcaaaagaaggtctccagagtgttgctctacctagaaggacaagaatgaagagacataaaaatcattcattaagaaggaagaagattttccttgcctagattttcacttgtaggatccaattaattttatcacttaatattttgtcctggtgggcattcactttacaaatttgtaaggtcagtagaaatggaaacttttggaaatcaaactgtaaatgttctgtagacgttgacagaaatagctatttggagctgtgcttttgccaactagac

SEQ ID NO: 206966 - DNA, 434 bp, Homo sapiens
aattcttgccattttattaaccacaaagtccttatgccctgacttcattgrtacccctttgagattaaacagaacacttaatttaaaattctgataaataaattaattacaccatttacttgaggtactctttcacctttcaagaaatattttgagaattcattagctaaatattactataatgcaggctagtaataaatggaaataatgatttcattgtaaagtttaaactaatgatggtatgatctggaatttttgttaacctagaagacataattagctctagaggtgaaatgaaagacaaaatcacttcacatattagtaaaaaacaaataatataactttataagctactgctgttcttttgctattaagaaccaatgacatctgtaattacggaagattatggaaaggttaaaggtgagaatacatgc

SEQ ID NO: 206967 - DNA, 434 bp, Homo sapiens
aattcttgccattttattaaccacaaagtccttatgccctgacttcattgatacccctttgagattaaacagaacacttaatttaaaattctgataaataaattaattacaccatttacttgaggtactctttcacctttcaagaaatattttgagaattcattagctaaatattrctataatgcaggctagtaataaatggaaataatgatttcattgtaaagtttaaactaatgatggtatgatctggaatttttgttaacctagaagacataattagctctagaggtgaaatgaaagacaaaatcacttcacatattagtaaaaaacaaataatataactttataagctactgctgttcttttgctattaagaaccaatgacatctgtaattacggaagattatggaaaggttaaaggtgagaatacatgc

SEQ ID NO: 206968 - DNA, 595 bp, Homo sapiens
aaatcctcttcaaatcaataaatttccactcctttaggaaactctgatcttctggtcatgccaaggtttaattaactggtttaattgtttttctgttttcttggtttctttttccttcttcctgggggtttctagtaattttagtttgatgtctcactttctccattttttatttcttagttttcttctgtgattattttcactgcagctgcagggcctaatcctgggttggcagataactagcacttactctgccctaattggaatccgggagagataggaggtgccctagtgtgaaaatgtgtttgttcctctctgcttctggtagtctctctgtaggagtactttacgtattctgaatgttcacttcttatgagatacatgatgtgcaactataggttgaatgtctctgatccaaaaatctgaaatcccaaatgcgccaaagtctgaaactttttgagtgccaacatgacactcaaaggaaatgcttattggagcatcgcagactcaggtgtttgaattcgagatgctcaaccastaagaataatgcaaatattacaaaatctaaaacacatcccaagcatttcaaataagg

SEQ ID NO: 206969 - DNA, 419 bp, Homo sapiens
gaccattctaacaggcttgaggcaatatctctttgtggttttgatttgcatttccctgatgrttagtgatgctgagcatttttttcatgtacctgttggtaatttggatattttctttggagaaatatctattgctgattaaaaaaaaaaaaaaaactctcagcaagctagaaaaagaaattttctcgaagtggtggaaagcatccacaacaaaacatataaacaatattatatttaattgtgaaagcgtaaatgtttaaaccacatagattaggacaagaaaaggatgtgtgtgttcatcatctctattcaacattttactggtgatcctagattgagtataaatatttaggagataactattgtcactgaagcccaaatcttggtcatcctcaggaaaaaaaaaaaaaaagttgatt

SEQ ID NO: 206970 - DNA, 279 bp, Homo sapiens
tgggtttaaataccctcgggcgcatagcagcggaaagggcggattcacccctcctttccgtcagtcacccccaactttcccaggctacacctcgtaggaaactgttctcctgctttgatttcatgcgccacctttkggacaatctaacaacttccaagttttcttggccagatatattaggaattgtatgcactgaaacactgaaaaccaactagtggttctgtggttcccacgttgtggttttgacaccagcagcatccttgccacaatcaaaccccg

SEQ ID NO: 206971 - DNA, 279 bp, Homo sapiens
tgggtttaaataccctcgggcgcatagcagcggaaagggcggattcacccctcctttccgtcagtcacccccaactttcccaggctacacctcgtaggaaactgttctcctgctttgatttcatgcgccaccttttggacaatctaasaacttccaagttttcttggccagatatattaggaattgtatgcactgaaacactgaaaaccaactagtggttctgtggttcccacgttgtggttttgacaccagcagcatccttgccacaatcaaaccccg

SEQ ID NO: 206972 - DNA, 600 bp, Homo sapiens
catatggtcattttattttattttttttgaggagccagttcatatttccaccaacagtgttcaagggtttcagtttcacctgcrcttgttactttctgttgggtttgaactgatgtcccattgtggtttctttttgcatttctctaatgactagtgatgttacacatcttctcatatatctcatgtatctgttggatatttgtatatcatctttgcatctttggataaatgttgtttgtccattttttaatcattttattttgttgttgggttgtagcagggtttttgtcatgatcattcatttatctcacagttcattctcattacttgggccagggtcatgatggttcattatctctcagttcatcttcattacgttgggcaaacagtcatgctgcagggtatagattatgttattctgttactttcaggtagaattggggtctaggttataattgtttctaagtttagattctgaatgagaatcagcagaggtagaccaccactgctggggcctggggattgctgggaaaaaggcaggaaacaaatacagacctgaccatggagggtttgtgtttcatggctcccatctgggtaccc

SEQ ID NO: 206973 - DNA, 600 bp, Homo sapiens
catatggtcattttattttattttttttgaggagccagttcatatttccaccaacagtgttcaagggtttcagtttcacctgcgcttgttactttctgttgggtttgaactgatgtcccattgtggtttctttttgcatttctctaatgactagtgatgttacacatcttctcatatatctcatgtatctgttggatatttgtatatcatctttgcatctttggataaatgttgtttgtccattttttaatcattttattttgttgttgggttgtagcagggtttttgtcatgatcattcatttatctcacagttcattctcattacttgggccagggtcatgatggttcattatctctcagttcatcytcattacgttgggcaaacagtcatgctgcagggtatagattatgttattctgttactttcaggtagaattggggtctaggttataattgtttctaagtttagattctgaatgagaatcagcagaggtagaccaccactgctggggcctggggattgctgggaaaaaggcaggaaacaaatacagacctgaccatggagggtttgtgtttcatggctcccatctgggtaccc

SEQ ID NO: 206974 - DNA, 487 bp, Homo sapiens
ccaactaacgcattccttaaatttagtgtacgtataaattctacatggtaagtgaagctgtctttatgaattgctgctatagaatatactagattgtgtaggttttagtacaatccaggtaattatcragcctttgtaatattttcaggaaagtgatcctttcacttcagtttatggaacttgaaaattttttagttgccaccgactagttagatcataaacttaattctatgtatctgaatttatttttctatttataaatttatctgggtgctttctcaaaggtttctcagattaaaaacctatggctttgtaaaattaaaacagaagtaataggaattgtgttaaaaaacagaatcaggccaagctggtggcttatgcctctaatgccaacacttagggaggccaaggcgggaggataatttgaggtcaggagttcaagaccagcctggacaacatggcaaaaccccacatgtattaaaaaaat

SEQ ID NO: 206975 - DNA, 487 bp, Homo sapiens
ccaactaacgcattccttaaatttagtgtacgtataaattctacatggtaagtgaagctgtctttatgaattgctgctatagaatatactagattgtgtaggttttagtacaatccaggtaattatcgagcctttgtaatattttcaggaaagtgatcctttcacttyagtttatggaacttgaaaattttttagttgccaccgactagttagatcataaacttaattctatgtatctgaatttatttttctatttataaatttatctgggtgctttctcaaaggtttctcagattaaaaacctatggctttgtaaaattaaaacagaagtaataggaattgtgttaaaaaacagaatcaggccaagctggtggcttatgcctctaatgccaacacttagggaggccaaggcgggaggataatttgaggtcaggagttcaagaccagcctggacaacatggcaaaaccccacatgtattaaaaaaat

SEQ ID NO: 206976 - DNA, 487 bp, Homo sapiens
ccaactaacgcattccttaaatttagtgtacgtataaattctacatggtaagtgaagctgtctttatgaattgctgctatagaatatactagattgtgtaggttttagtacaatccaggtaattatcgagcctttgtaatattttcaggaaagtgatcctttcacttcagtttatggaacttgaaaattttttagttgccaccgactagttagatcataaacttaattctatgtatctgaatttatttttctatttataaatttatctgggtgctttctcaaargtttctcagattaaaaacctatggctttgtaaaattaaaacagaagtaataggaattgtgttaaaaaacagaatcaggccaagctggtggcttatgcctctaatgccaacacttagggaggccaaggcgggaggataatttgaggtcaggagttcaagaccagcctggacaacatggcaaaaccccacatgtattaaaaaaat

SEQ ID NO: 206977 - DNA, 596 bp, Homo sapiens
ggatattgcacttctttcctctctctgtcttgcttctactcctgccatatgaaacatttcattgctgcttggccttctggtataattgggaggcttcctgagtccccctacaagcagaaaccactatgctttctttacagccygaagaactgtgagtcaattagacctcttttctttatgtagatacagaaaattaatgctgtgaagtgaagttatgaaatgacttcgaggaatttcccccattctcttggctattagcactgagcttttttcagtgcaaatattggaggccatcttgatgtttccgcctgataatggacttttcttcttttaccacattgccaggctgcagcaaagatagctgacagtgtagacgcaggttccaaattgggtagtggccagaggttagagagtttggagagcttggaagaagacaggaagatgagggaaagtttggaccattgcagagacttattaaatagttgtgagtaaaaagctgacagaaggatggacagtgaagaccagccttgtaaggtctcagatgaaaatgaggaacttactgggaaaaggagccaaggtttttttgttttgactta

SEQ ID NO: 206978 - DNA, 576 bp, Homo sapiens
actccatctcaaaaaaaaaaaaagttactcattaacagcatagaccaattgktttctattggaatttctccattattttcacaatgtcccaggctgtgaaaccaggatttaataacgaaccagaatgccacatctgtgtcacgtgggtagggaccagtcctgatccattaagtccgggtctccaggtaactggactcactgctgggcaaaacagaatgtccggcgtgcgttcctaacgggggacgcagagcctcataggaaatgtagtgtcaccttccaatgatgttaccatcaaggaccttgggaaccagcttttctctctgcgcatcgcgccccgcccacttcgccattttcctccggaagtgcggatcccagcggcggtcgtgtagctgagcagggcgggggtgtggtgctatgtccctgtggtatggtgcgagggggaagaggaacctgtgggcctcgggggaacccgggggccagaccagtgttccccatatgtgggggcagacgcgtgggccatcgcgggcaggaggagcctgacgtgcatttgcgggccgtggaaactggcgggggctg

SEQ ID NO: 206979 - DNA, 576 bp, Homo sapiens
actccatctcaaaaaaaaaaaaagttactcattaacagcatagaccaattggtttctattggaatttctccattattttcacaatgtcccaggctgtgaaaccaggatttaataacgaaccagaatgccacatctgtgtcacgtgggtagggaccagtcctgatccattaagtccgggtctccrggtaactggactcactgctgggcaaaacagaatgtccggcgtgcgttcctaacgggggacgcagagcctcataggaaatgtagtgtcaccttccaatgatgttaccatcaaggaccttgggaaccagcttttctctctgcgcatcgcgccccgcccacttcgccattttcctccggaagtgcggatcccagcggcggtcgtgtagctgagcagggcgggggtgtggtgctatgtccctgtggtatggtgcgagggggaagaggaacctgtgggcctcgggggaacccgggggccagaccagtgttccccatatgtgggggcagacgcgtgggccatcgcgggcaggaggagcctgacgtgcatttgcgggccgtggaaactggcgggggctg

SEQ ID NO: 206980 - DNA, 596 bp, Homo sapiens
ggatattgcacttctttcctctctctgtcttgcttctactcctgccatatgaaacatttcattgctgcttggccttctggtataattgggaggcttcctgagtccccctacaagcagaaaccactatgctttctttacagcccgaagaactgtgagtcaattagacctcttttctttatgtagatacagaaaattaatgctgtgaagtgaagttatgaaatgacttcgaggaatttcccccattctcttggctattagcrctgagcttttttcagtgcaaatattggaggccatcttgatgtttccgcctgataatggacttttcttcttttaccacattgccaggctgcagcaaagatagctgacagtgtagacgcaggttccaaattgggtagtggccagaggttagagagtttggagagcttggaagaagacaggaagatgagggaaagtttggaccattgcagagacttattaaatagttgtgagtaaaaagctgacagaaggatggacagtgaagaccagccttgtaaggtctcagatgaaaatgaggaacttactgggaaaaggagccaaggtttttttgttttgactta

SEQ ID NO: 206981 - DNA, 411 bp, Homo sapiens
tgtaatactcatttgacttgcagatacctcaccccgaacccacctactataatgtaaaagccaagaatgcaaaccctttcctcaccccgtgaaggtaaagtmctcagagccaaggagagaaggctcagggatggtacctgggtgtttccaacactaaccatgcattgtagttttagtgttcaagtttaagcttcttatgttaaagttaccccagctttaattatattgtaacaagatttatttttgtaattccatttttggattcttgatttcttggtaaagaaatacagttatttttgtatacaaatcttatatactgttacattccaaaatttgttcatgagtcctaacactttttagtaaatttcttatgattttctaaatgcaagatcatgtcatctgtacataaag

SEQ ID NO: 206982 - DNA, 411 bp, Homo sapiens
tgtaatactcatttgacttgcagatacctcaccccgaacccacctactataatgtaaaagccaagaatgcaaaccctttcctcaccccgtgaaggtaaagtactcagagccaaggagagaaggctcagggatggtacctgggtgtttccaacactaaccatgcattgtagttttagtgttcaagtttaagcttcttatgttaaagttaccccagctttaattatattgtaacaagatttatttttgtaattccatttttggattcttgatttcttggtaaagaaatacagttatttttgtatacaaatcttatatastgttacattccaaaatttgttcatgagtcctaacactttttagtaaatttcttatgattttctaaatgcaagatcatgtcatctgtacataaag

SEQ ID NO: 206983 - DNA, 596 bp, Homo sapiens
ggatattgcacttctttcctctctctgtcttgcttctactcctgccatatgaaacatttcattgctgcttggccttctggtataattgggaggcttcctgagtccccctacaagcagaaaccactatgctttctttacagcccgaagaactgtgagtcaattagacctcttttctttatgtagatacagaaaattaatgctgtgaagtgaagttatgaaatgacttcgaggaatttcccccattctcttggctattagcactgagcttytttcagtgcaaatattggaggccatcttgatgtttccgcctgataatggacttttcttcttttaccacattgccaggctgcagcaaagatagctgacagtgtagacgcaggttccaaattgggtagtggccagaggttagagagtttggagagcttggaagaagacaggaagatgagggaaagtttggaccattgcagagacttattaaatagttgtgagtaaaaagctgacagaaggatggacagtgaagaccagccttgtaaggtctcagatgaaaatgaggaacttactgggaaaaggagccaaggtttttttgttttgactta

SEQ ID NO: 206984 - DNA, 596 bp, Homo sapiens
ggatattgcacttctttcctctctctgtcttgcttctactcctgccatatgaaacatttcattgctgcttggccttctggtataattgggaggcttcctgagtccccctacaagcagaaaccactatgctttctttacagcccgaagaactgtgagtcaattagacctcttttctttatgtagatacagaaaattaatgctgtgaagtgaagttatgaaatgacttcgaggaatttcccccattctcttggctattagcactgagcttttttcartgcaaatattggaggccatcttgatgtttccgcctgataatggacttttcttcttttaccacattgccaggctgcagcaaagatagctgacagtgtagacgcaggttccaaattgggtagtggccagaggttagagagtttggagagcttggaagaagacaggaagatgagggaaagtttggaccattgcagagacttattaaatagttgtgagtaaaaagctgacagaaggatggacagtgaagaccagccttgtaaggtctcagatgaaaatgaggaacttactgggaaaaggagccaaggtttttttgttttgactta

SEQ ID NO: 206985 - DNA, 231 bp, Homo sapiens
gatctgaaaccctataaagaatcccaaagaagctgkctggataaagcctgctatggatgtctttatactcaaagactgatgaggcaattcgaatatgtgtccccaccaaatctcttgttgaattatgcttcctaatgttggaggtggatcctggtataaggtgattgaatcatgaaggcaaatttctcatgagtggttcagcaccatccccttggtactgtcctcacaatc

SEQ ID NO: 206986 - DNA, 568 bp, Homo sapiens
gcaaatgaggactggagcattgctataaagatacctgaaaatgtggaagcaacttyggaactgggtaatgggtagaggttggaagagtttggagggctccaaagaagacagacagatgagaacatttttggatcatcttagagactggttaaatggctgtgacaagaatgctgacaaaaacatggacagtgaaggccaggctgagggggtctcagataaaaataagaagctttctggaaaatgtctctcttttggatatggaaagcttacacaatgcctgtaccatcattgtaccttagacgcagtgaacttgctttttatttcagagactcgtaggcaaaagagaatgtagccttgacccagatgagactttgcactttgtaactttgagttaatgctgaaatgagttaagactttgggagactgctggcaaggcatgactgtatcttgcaatgtgagaagggcatgagatttgtggggtcagggacagaataatacggtttttctctatgccccttccaaaactcatgtgaaagtacactccctaatgttagagtcggggcctagg

SEQ ID NO: 206987 - DNA, 291 bp, Homo sapiens
actgtatcttgcaatgtgagaagggcatgagatttgtggggtcagggacagaataatacggtttttctctatgccccttccaaaactcatgtgaaagtacactccctaatgttagagtcggggcctaggtggaaaaagctttaatcataaaggggtgggagtggatccttcacaaatggcaaarcaccaagcccttaatgccatcctcctgatagtgagtgagttctcatgacatctagtagtttaaaaggctgtggaacctctttcctctctctgtcttgttccaacttt

SEQ ID NO: 206988 - DNA, 525 bp, Homo sapiens
ctcctgaatgaagcactaaatatggaaagaaaagaccatcaccagccactacaaaaatgcaccgaagtactcagaccagtaatgytaaaaaccaaccacatacacaagtctgcaaaataactagctgacagcatgacgacaggatctaatccacacataccattactaaccttaaatggaaatgggctaaatgctccgattgaaagacacagggggcaagctggataaagaaccaagacccatttgagtatgccgtctccaagaaacccatctcacatgcagtgccatacctaggctcaaaatgaaggaatggtgaaaaatctttcaagccaatggaaaacagaagaaatcaggtgttacactcccagtttcgacaaaacgtatataccaataaagataaaaaaagacagagaaggacattacaaaggtggtcctgacctttgataaatctcattattgattgataccaacctgggctatctttattgcccaaaccaacaggataatttgctgaggttgtggagc

SEQ ID NO: 206989 - DNA, 497 bp, Homo sapiens
cagccactacaaaaatgcaccgaagtactcagaccagtaatgttaaaaaccaaccacatacacaagtctgcaaaataactagctgacagcatgacgacaggatctaatccacacataccattactaaccttaaatggaaatgggcyaaatgctccgattgaaagacacagggggcaagctggataaagaaccaagacccatttgagtatgccgtctccaagaaacccatctcacatgcagtgccatacctaggctcaaaatgaaggaatggtgaaaaatctttcaagccaatggaaaacagaagaaatcaggtgttacactcccagtttcgacaaaacgtatataccaataaagataaaaaaagacagagaaggacattacaaaggtggtcctgacctttgataaatctcattattgattgataccaacctgggctatctttattgcccaaaccaacaggataatttgctgaggttgtggagcttctcccctgcaaa

SEQ ID NO: 206990 - DNA, 514 bp, Homo sapiens
atcaccagccactacaaaaatgcaccgaagtactcagaccagtaatgttaaaaaccaaccacatacacaagtctgcaaaataactagctgacagcatgacgacaggatctaatccacacataccattactaaccttaaatggaaatgggctaaatgctccgattgaaagacacagggggcaagctggataaagaaccaagacccatttgagtatgcygtctccaagaaacccatctcacatgcagtgccatacctaggctcaaaatgaaggaatggtgaaaaatctttcaagccaatggaaaacagaagaaatcaggtgttacactcccagtttcgacaaaacgtatataccaataaagataaaaaaagacagagaaggacattacaaaggtggtcctgacctttgataaatctcattattgattgataccaacctgggctatctttattgcccaaaccaacaggataatttgctgaggttgtggagcttctcccctgcaaagagtccctgatc

SEQ ID NO: 206991 - DNA, 497 bp, Homo sapiens
cagccactacaaaaatgcaccgaagtactcagaccagtaatgttaaaaaccaaccacatacacaagtctgcaaaataactagctgacagcatgacgacaggatctaatccacacataccattactaaccttaaatggaaatgggctaaatgctccgattgaaagacacagggggcaagctggataaagaaccaagacccatttgagtatgccgtctccaagaaacccatctcacmtgcagtgccatacctaggctcaaaatgaaggaatggtgaaaaatctttcaagccaatggaaaacagaagaaatcaggtgttacactcccagtttcgacaaaacgtatataccaataaagataaaaaaagacagagaaggacattacaaaggtggtcctgacctttgataaatctcattattgattgataccaacctgggctatctttattgcccaaaccaacaggataatttgctgaggttgtggagcttctcccctgcaaa

SEQ ID NO: 206992 - DNA, 525 bp, Homo sapiens
ctcctgaatgaagcactaaatatggaaagaaaagaccatcaccagccactacaaaaatgcaccgaagtactcagaccagtaatgttaaaaaccaaccacatacacaagtctgcaaaataactagctgacagcatgacgacaggatctaatccacacataccattactaaccttaaatggaaatgggctaaatgctccgattgaaagacacagggggcaagctggataaagaaccaagacccatttgagtatgccgtctccaagaaacccatctcacatkcagtgccatacctaggctcaaaatgaaggaatggtgaaaaatctttcaagccaatggaaaacagaagaaatcaggtgttacactcccagtttcgacaaaacgtatataccaataaagataaaaaaagacagagaaggacattacaaaggtggtcctgacctttgataaatctcattattgattgataccaacctgggctatctttattgcccaaaccaacaggataatttgctgaggttgtggagc

SEQ ID NO: 206993 - DNA, 497 bp, Homo sapiens
cagccactacaaaaatgcaccgaagtactcagaccagtaatgttaaaaaccaaccacatacacaagtctgcaaaataactagctgacagcatgacgacaggatctaatccacacataccattactaaccttaaatggaaatgggctaaatgctccgattgaaagacacagggggcaagctggataaagaaccaagacccatttgagtatgccgtctccaagaaacccatctcacatgcagtgccatacmtaggctcaaaatgaaggaatggtgaaaaatctttcaagccaatggaaaacagaagaaatcaggtgttacactcccagtttcgacaaaacgtatataccaataaagataaaaaaagacagagaaggacattacaaaggtggtcctgacctttgataaatctcattattgattgataccaacctgggctatctttattgcccaaaccaacaggataatttgctgaggttgtggagcttctcccctgcaaa

SEQ ID NO: 206994 - DNA, 525 bp, Homo sapiens
ctcctgaatgaagcactaaatatggaaagaaaagaccatcaccagccactacaaaaatgcaccgaagtactcagaccagtaatgttaaaaaccaaccacatacacaagtctgcaaaataactagctgacagcatgacgacaggatctaatccacacataccattactaaccttaaatggaaatgggctaaatgctccgattgaaagacacagggggcaagctggataaagaaccaagacccatttgagtatgccgtctccaagaaacccatctcacatgcagtgccatacctaggctcaaaatgaaggaatggtgaaaartctttcaagccaatggaaaacagaagaaatcaggtgttacactcccagtttcgacaaaacgtatataccaataaagataaaaaaagacagagaaggacattacaaaggtggtcctgacctttgataaatctcattattgattgataccaacctgggctatctttattgcccaaaccaacaggataatttgctgaggttgtggagc

SEQ ID NO: 206995 - DNA, 514 bp, Homo sapiens
atcaccagccactacaaaaatgcaccgaagtactcagaccagtaatgttaaaaaccaaccacatacacaagtctgcaaaataactagctgacagcatgacgacaggatctaatccacacataccattactaaccttaaatggaaatgggctaaatgctccgattgaaagacacagggggcaagctggataaagaaccaagacccatttgagtatgccgtctccaagaaacccatctcacatgcagtgccatacctaggctcaaaatgaaggaatggtgaaaaatctttcaagcmaatggaaaacagaagaaatcaggtgttacactcccagtttcgacaaaacgtatataccaataaagataaaaaaagacagagaaggacattacaaaggtggtcctgacctttgataaatctcattattgattgataccaacctgggctatctttattgcccaaaccaacaggataatttgctgaggttgtggagcttctcccctgcaaagagtccctgatc

SEQ ID NO: 206996 - DNA, 497 bp, Homo sapiens
cagccactacaaaaatgcaccgaagtactcagaccagtaatgttaaaaaccaaccacatacacaagtctgcaaaataactagctgacagcatgacgacaggatctaatccacacataccattactaaccttaaatggaaatgggctaaatgctccgattgaaagacacagggggcaagctggataaagaaccaagacccatttgagtatgccgtctccaagaaacccatctcacatgcagtgccatacctaggctcaaaatgaaggaatggtgaaaaatctttcaagccaatggaaaacagaagaaatcaggtgttacactcccagtttcgacaaaacgtatataccaataaagataaaaaaagacagagaaggacattacaaaggtggtcctgacctttgataaatctcattattgattgmtaccaacctgggctatctttattgcccaaaccaacaggataatttgctgaggttgtggagcttctcccctgcaaa

SEQ ID NO: 206997 - DNA, 390 bp, Homo sapiens
catgaataacttctttactggttatttgtgagatttgggtgcaccyatcacccgaacagtgtacactgcaccttatttgttatcttttatccctcaccccccaccctattaaataatagacaaaaaaataatagggtttagaataaatgagttcaaatgaattgtcaaacgtatgtgagaaaagtggaatcagtttgtgagaaaaagcaaaaaactcaacagaaatgctgataaagcatcatcccttcatggctagagctgccaggacactagaacaccaaaatcagctagggaaattttgtagaagtcccagatgtactaaatgttctgtgaatacacagagatataattataactgttacctgcatgtagagtaaagatgagaaggca

SEQ ID NO: 206998 - DNA, 390 bp, Homo sapiens
catgaataacttctttactggttatttgtgagatttgggtgcacctatcacccgaacagtgtacactgcaccttatttgttatcttttatccctyaccccccaccctattaaataatagacaaaaaaataatagggtttagaataaatgagttcaaatgaattgtcaaacgtatgtgagaaaagtggaatcagtttgtgagaaaaagcaaaaaactcaacagaaatgctgataaagcatcatcccttcatggctagagctgccaggacactagaacaccaaaatcagctagggaaattttgtagaagtcccagatgtactaaatgttctgtgaatacacagagatataattataactgttacctgcatgtagagtaaagatgagaaggca

SEQ ID NO: 206999 - DNA, 390 bp, Homo sapiens
catgaataacttctttactggttatttgtgagatttgggtgcacctatcacccgaacagtgtacactgcaccttatttgttatcttttatccctcrccccccaccctattaaataatagacaaaaaaataatagggtttagaataaatgagttcaaatgaattgtcaaacgtatgtgagaaaagtggaatcagtttgtgagaaaaagcaaaaaactcaacagaaatgctgataaagcatcatcccttcatggctagagctgccaggacactagaacaccaaaatcagctagggaaattttgtagaagtcccagatgtactaaatgttctgtgaatacacagagatataattataactgttacctgcatgtagagtaaagatgagaaggca

SEQ ID NO: 207000 - DNA, 516 bp, Homo sapiens
atgagttcaaatgaattgtcaaacgtatgtgagaaaagtggaatcagtttgtgagaaaaagcaaaaaactcaacagaaatgctgataaagcatcatcccttcatggctagagctgccaggacactagaacaccaaaatcagctagggaaattttgtagaagtcccagatgtactaratgttctgtgaatacacagagatataattataactgttacctgcatgtagagtaaagatgagaaggcattggtcatggtggcagctacctcaggagttacaaagcagacgtggttccaggacagtatatgtcagggcaaagctgtcctcggaggctattaggagttggttacggcacagacattgtaagtcagatggtctcattactttcaatgacaaaaccaaaattacttttgcatcagcctaatacaacggcctggcaagagcacagaaaaagtccctgtggctgttaggtggggacctctgatgcagcacaattccttcattcccttctccaaaac

SEQ ID NO: 207001 - DNA, 516 bp, Homo sapiens
atgagttcaaatgaattgtcaaacgtatgtgagaaaagtggaatcagtttgtgagaaaaagcaaaaaactcaacagaaatgctgataaagcatcatcccttcatggctagagctgccaggacactagaacaccaaaatcagctagggaaattttgtagaagtcccagatgtactaaatgttctgtgaatacacagagatataattataactgttacctgcatgtagagtaaagatgagaaggcattggtcatggtggcagctacctcaggagttacaaagcagacgtggttccaggacagtrtatgtcagggcaaagctgtcctcggaggctattaggagttggttacggcacagacattgtaagtcagatggtctcattactttcaatgacaaaaccaaaattacttttgcatcagcctaatacaacggcctggcaagagcacagaaaaagtccctgtggctgttaggtggggacctctgatgcagcacaattccttcattcccttctccaaaac

SEQ ID NO: 207002 - DNA, 619 bp, Homo sapiens
ttcttgtagatcctgctagagttaaacttcatttaagtaatcattaaaagctgcatttattccctcacttgaacttttgatttcacactattaggactaatcctctaagtctttgctaagttatgttcctccttttcttgtggcttgactctgatgctctctatatgcaacatcaattgatgtaaagtacattcagggcaatagagtttctttaaatattactttgttattcaaaataatcacaaaagcactcatcgtaggaaaacttggaggactcaaatatagggaaatactttttctttctaaggcacaattctctaaagaagttcaccttaacttgaatatacatgggaaaatatccttgttcactaatagtctatattcactctgttttcttccctcatagaccagccggttcactattattctccaaatgatgtgtgcctctmtagagtccaggctatctgcatatctaatttttcccacaaattactgttttgaattgcactgaattgaattcaaggggatgtcatttataaacagtgcaaatatatactgcacgagggatcttagaaatcatacacatggtttgatccataagctcatatgagcatgcaat

SEQ ID NO: 207003 - DNA, 619 bp, Homo sapiens
ttcttgtagatcctgctagagttaaacttcatttaagtaatcattaaaagctgcatttattccctcacttgaacttttgatttcacactattaggactaatcctctaagtctttgctaagttatgttcctccttttcttgtggcttgactctgatgctctctatatgcaacatcaattgatgtaaagtacattcagggcaatagagtttctttaaatattactttgttattcaaaataatcacaaaagcactcatcgtaggaaaacttggaggactcaaatatagggaaatactttttctttctaaggcacaattctctaaagaagttcaccttaacttgaatatacatgggaaaatatccttgttcactaatagtctatattcactctgttttcttccctcatagaccagccggttcactattattctccaaatgatgtgtgcctctatagagtccaggctatctgcatatctaatttttcccacaaattactgttttgaattgcactgaattsaattcaaggggatgtcatttataaacagtgcaaatatatactgcacgagggatcttagaaatcatacacatggtttgatccataagctcatatgagcatgcaat

SEQ ID NO: 207004 - DNA, 296 bp, Homo sapiens
ataatcaaattagaattctactttttatatmagatgaaatactatataaaatgtccagaatatctagtgttaatgaggctgtgcagcctggacatttgatgtctcatgtgtgggaatgtgaactaacccaaccattctgaataattattggctctgtgtgttaacagtctagagtcctgaaacaaggatcttaattctaaaataaaatcctattctaagaatataccaatggttgataatcaaggaagtttcaaagttatacagaagaaccttcatcctagcattatatatgtaat

SEQ ID NO: 207005 - DNA, 296 bp, Homo sapiens
ataatcaaattagaattctactttttatatcagatgaaatactatataaaatgtccagaatatctagtgttaatgaggctgtgcagcctggacatttgatgtctcatstgtgggaatgtgaactaacccaaccattctgaataattattggctctgtgtgttaacagtctagagtcctgaaacaaggatcttaattctaaaataaaatcctattctaagaatataccaatggttgataatcaaggaagtttcaaagttatacagaagaaccttcatcctagcattatatatgtaat

SEQ ID NO: 207006 - DNA, 296 bp, Homo sapiens
ataatcaaattagaattctactttttatatcagatgaaatactatataaaatgtccagaatatctagtgttaatgaggctgtgcagcctggacatttgatgtctcatgtgtgggaatgtgaactaacccaaccattctgaataattattggctctgtgtgttaacagtctagagtcctgaaacaaggatcttaattctaaaataaaatcctattctaagaatataccaakggttgataatcaaggaagtttcaaagttatacagaagaaccttcatcctagcattatatatgtaat

SEQ ID NO: 207007 - DNA, 282 bp, Homo sapiens
aataataagtgacgacattttggaactttaaggaaaaactttaaggattggaaaacagggatgycatatgtccagtaacatgggatagccgttcctaattaaggattgctgtatgtcctgaatgactttctaatgtaatgaaggtgaataacctgctctgtttaattatacaatcccaaatgtaactgcctaagtgccaagtacttttgcatggttttaatatgccatgaattttgcaagaatgaaactactatgtatatgagaaaagatggtagatttttt

SEQ ID NO: 207008 - DNA, 282 bp, Homo sapiens
aataataagtgacgacattttggaactttaaggaaaaactttaaggattggaaaacagggatgccatatgtccagtaacatgggatagccrttcctaattaaggattgctgtatgtcctgaatgactttctaatgtaatgaaggtgaataacctgctctgtttaattatacaatcccaaatgtaactgcctaagtgccaagtacttttgcatggttttaatatgccatgaattttgcaagaatgaaactactatgtatatgagaaaagatggtagatttttt

SEQ ID NO: 207009 - DNA, 282 bp, Homo sapiens
aataataagtgacgacattttggaactttaaggaaaaactttaaggattggaaaacagggatgccatatgtccagtaacatgggatagccgttcctaattaaggattgctgtatgtcctgaatgactttctaatgtaatgaaggtgaataacctgctctgtttaattatacaatcccaaatgtaactgcctaagtgccaagtacttttgcatggttttaatatgccatgaattttgcaagaatgaaactmctatgtatatgagaaaagatggtagatttttt

SEQ ID NO: 207010 - DNA, 463 bp, Homo sapiens
tgtgacactcaacttttaggagtgggagagcaagaytgatggcttcaagtgcttcaccaagaagatggacaacagggcactcagctcaacttcacagccaatgagtggtggcaggctttgagaaagagcatcagaagcctgacagttcttcttcagcctcagccaggccttggagctggaccaggccatccacttcagtatagatgccttccactctgtcagtgagctcttttccagtcagtccaggaaggacctggacccagccatggacctgttagtgctgtctcagggacaccagaccaacatcctggacatcatccacatacacaaggaagctcttaccaaagtcatggagagcaggcaacatgtggccgaagggaagacagaggtgcagaggctgatgacgtcagaatcacaggaacaggatttctttggccactttggctgaaattcaccacttcca

SEQ ID NO: 207011 - DNA, 463 bp, Homo sapiens
tgtgacactcaacttttaggagtgggagagcaagactgayggcttcaagtgcttcaccaagaagatggacaacagggcactcagctcaacttcacagccaatgagtggtggcaggctttgagaaagagcatcagaagcctgacagttcttcttcagcctcagccaggccttggagctggaccaggccatccacttcagtatagatgccttccactctgtcagtgagctcttttccagtcagtccaggaaggacctggacccagccatggacctgttagtgctgtctcagggacaccagaccaacatcctggacatcatccacatacacaaggaagctcttaccaaagtcatggagagcaggcaacatgtggccgaagggaagacagaggtgcagaggctgatgacgtcagaatcacaggaacaggatttctttggccactttggctgaaattcaccacttcca

SEQ ID NO: 207012 - DNA, 463 bp, Homo sapiens
tgtgacactcaacttttaggagtgggagagcaagactgatggcttcaagtgcttcaccaagaagatggacaacagggcactcagctcaacttcacagccaatgagtggtggcaggctttgagaaagagcatcagaagcctgacagttcttcttcagcctcagccaggccttggagctggaccaggccatccacttcagtatagatgcctyccactctgtcagtgagctcttttccagtcagtccaggaaggacctggacccagccatggacctgttagtgctgtctcagggacaccagaccaacatcctggacatcatccacatacacaaggaagctcttaccaaagtcatggagagcaggcaacatgtggccgaagggaagacagaggtgcagaggctgatgacgtcagaatcacaggaacaggatttctttggccactttggctgaaattcaccacttcca

SEQ ID NO: 207013 - DNA, 580 bp, Homo sapiens
tatgtgtccccacggaatctcatgttgaattatatttcctaatgtggaaggtggatcctggtataakgtgattgaattatgaaggcaaatttctcatgaatggttcagcaccatccccttgtaccatcctcacaataatgagtgacttctcatgagatgtagtcactgaaatctctatatcacctccccactctccgtgttttccccttgccatgtgagacaattgattctttctttgccttccatgattattgaaagatttctgaggcctagaagcagaagcactgtgcttagaaccatgagccaattaaacctctttttcaaaataaatcatacagaaaatggcaaatgaggactggagcgttgctataaagatacctggaaatgtggaagcagctttggaaccaggtaatggacggaggttggaagagtttggagggctcaaaagaagacagatgagaaaacttttggaccatcttagagtctggttcaatggttgtgacaaaaatcctgacagaaacatggacagtgaaggccaggctgaggaggtctcagagagaaataagaagctttctggaaa

SEQ ID NO: 207014 - DNA, 580 bp, Homo sapiens
tatgtgtccccacggaatctcatgttgaattatatttcctaatgtggaaggtggatcctggtataaggtgattgaattatgaaggcaaatttctcatgaatggttcagcaccatccccttgtaccatcctcacaataatgagtracttctcatgagatgtagtcactgaaatctctatatcacctccccactctccgtgttttccccttgccatgtgagacaattgattctttctttgccttccatgattattgaaagatttctgaggcctagaagcagaagcactgtgcttagaaccatgagccaattaaacctctttttcaaaataaatcatacagaaaatggcaaatgaggactggagcgttgctataaagatacctggaaatgtggaagcagctttggaaccaggtaatggacggaggttggaagagtttggagggctcaaaagaagacagatgagaaaacttttggaccatcttagagtctggttcaatggttgtgacaaaaatcctgacagaaacatggacagtgaaggccaggctgaggaggtctcagagagaaataagaagctttctggaaa

SEQ ID NO: 207015 - DNA, 580 bp, Homo sapiens
tatgtgtccccacggaatctcatgttgaattatatttcctaatgtggaaggtggatcctggtataaggtgattgaattatgaaggcaaatttctcatgaatggttcagcaccatccccttgtaccatcctcacaataatgagtgacttctcatgagatgtagtcactgaaatctctatatcacctccccactctccgtgttttccccttgccatgtgagacaattgattctttctttgccttccatgattattgaaagatttctgaggcctagaagcagaagcactgtgcttagaaccatgagccaattaaacctctttttcaaaataaatcatacrgaaaatggcaaatgaggactggagcgttgctataaagatacctggaaatgtggaagcagctttggaaccaggtaatggacggaggttggaagagtttggagggctcaaaagaagacagatgagaaaacttttggaccatcttagagtctggttcaatggttgtgacaaaaatcctgacagaaacatggacagtgaaggccaggctgaggaggtctcagagagaaataagaagctttctggaaa

SEQ ID NO: 207016 - DNA, 580 bp, Homo sapiens
tatgtgtccccacggaatctcatgttgaattatatttcctaatgtggaaggtggatcctggtataaggtgattgaattatgaaggcaaatttctcatgaatggttcagcaccatccccttgtaccatcctcacaataatgagtgacttctcatgagatgtagtcactgaaatctctatatcacctccccactctccgtgttttccccttgccatgtgagacaattgattctttctttgccttccatgattattgaaagatttctgaggcctagaagcagaagcactgtgcttagaaccatgagccaattaaacctctttttcaaaataaatcatacagraaatggcaaatgaggactggagcgttgctataaagatacctggaaatgtggaagcagctttggaaccaggtaatggacggaggttggaagagtttggagggctcaaaagaagacagatgagaaaacttttggaccatcttagagtctggttcaatggttgtgacaaaaatcctgacagaaacatggacagtgaaggccaggctgaggaggtctcagagagaaataagaagctttctggaaa

SEQ ID NO: 207017 - DNA, 390 bp, Homo sapiens
gagggtggtgggtagtaggaaggggtagtagcctgctgcagaggcagagtctcatggaaaatccctactagggaagcgcacctgtggctttgcaggtttgagccccaatggctgctctcatggactggactagtgttgagtgcctgtagcttttccacatgcagggtgcaagctgttggtgggtctatgtatctggggtctggagggtggtggccccctgcatgggggctccaagtccatattttccttctgcactgccctartagaggtttcccaagaacgcttcatctgcagcaggcttctgcctggaaacagtgggaggtgggggtgggagacagatccttcaccaatggttaggcaacatcttcttgatgctgtcttcatgatagt

SEQ ID NO: 207018 - DNA, 390 bp, Homo sapiens
gagggtggtgggtagtaggaaggggtagtagcctgctgcagaggcagagtctcatggaaaatccctactagggaagcgcacctgtggctttgcaggtttgagccccaatggctgctctcatggactggactagtgttgagtgcctgtagcttttccacatgcagggtgcaagctgttggtgggtctatgtatctggggtctggagggtggtggccccctgcatgggggctccaagtccatattttccttctgcactgccctaatagaggtttcccaagaaygcttcatctgcagcaggcttctgcctggaaacagtgggaggtgggggtgggagacagatccttcaccaatggttaggcaacatcttcttgatgctgtcttcatgatagt

SEQ ID NO: 207019 - DNA, 390 bp, Homo sapiens
gagggtggtgggtagtaggaaggggtagtagcctgctgcagaggcagagtctcatggaaaatccctactagggaagcgcacctgtggctttgcaggtttgagccccaatggctgctctcatggactggactagtgttgagtgcctgtagcttttccacatgcagggtgcaagctgttggtgggtctatgtatctggggtctggagggtggtggccccctgcatgggggctccaagtccatattttccttctgcactgccctaatagaggtttcccaagaacgcttcatctgcagcaggcttctgcctggaaacagtgggaggtgggggtgggagacagatccttcaccaatggttaggcaacrtcttcttgatgctgtcttcatgatagt

SEQ ID NO: 207020 - DNA, 612 bp, Homo sapiens
aacagggggtggcacctctttcctctctcagtctttcttctacccctgccatttgaaacatctcattgccccttggccttctggtatgattggaagkcttcctgatctgatcctcccagaagcagaagccacatgtgcttcctttacagcctgctggaccgtgagccaattaaacctcttttctttatgatcatgcagaaaattagtactatgaagtggagccatgaaatgccttcaaggccctttcccctttgtcttggcaaccagcactcagcttcttttcatgcaaatatctgaatccttcatgaactttccccctgaaaatggacttttctgttttaccacattgccaggctgtgataaagatagctgacaatgtagaaccaggttcagaagtgggtaaaagacagaggtcagaagagttggaaaaacttagaagacagcaagatgaggaaaatattggaccactatagagaattgttaaatacttgtgataggaaggctgacaaaagtgtaaacactgaagtccagacctaaaagttctcagatgaaaatgaggaatttcctatgaacaagagacaagattacatttgattggccttagcaaagaag

SEQ ID NO: 207021 - DNA, 612 bp, Homo sapiens
aacagggggtggcacctctttcctctctcagtctttcttctacccctgccatttgaaacatctcattgccccttggccttctggtatgattggaaggcttcctgatctgatcctcccagaagcagaagccacatgtgcttcctttacagcctgctggaccgtgagccaattaaacctcttttctttatgatcatgcagaaaattagtactatgaagtggagccatgaaatgccttcaaggccctttcccctttgtcttggcaaccagcactcarcttcttttcatgcaaatatctgaatccttcatgaactttccccctgaaaatggacttttctgttttaccacattgccaggctgtgataaagatagctgacaatgtagaaccaggttcagaagtgggtaaaagacagaggtcagaagagttggaaaaacttagaagacagcaagatgaggaaaatattggaccactatagagaattgttaaatacttgtgataggaaggctgacaaaagtgtaaacactgaagtccagacctaaaagttctcagatgaaaatgaggaatttcctatgaacaagagacaagattacatttgattggccttagcaaagaag

SEQ ID NO: 207022 - DNA, 612 bp, Homo sapiens
aacagggggtggcacctctttcctctctcagtctttcttctacccctgccatttgaaacatctcattgccccttggccttctggtatgattggaaggcttcctgatctgatcctcccagaagcagaagccacatgtgcttcctttacagcctgctggaccgtgagccaattaaacctcttttctttatgatcatgcagaaaattagtactatgaagtggagccatgaaatgccttcaaggccctttcccctttgtcttggcaaccagcactcagcttcttttcatgcaaatatctgaatccttcatgaactttccccctgaaaatggacttttctgttttaccacattgccaggctgtgataaagatagctgacaatgtagaaccaggttcagaagtgggtaaaagacagaggtcagaagagttggraaaacttagaagacagcaagatgaggaaaatattggaccactatagagaattgttaaatacttgtgataggaaggctgacaaaagtgtaaacactgaagtccagacctaaaagttctcagatgaaaatgaggaatttcctatgaacaagagacaagattacatttgattggccttagcaaagaag

SEQ ID NO: 207023 - DNA, 612 bp, Homo sapiens
aacagggggtggcacctctttcctctctcagtctttcttctacccctgccatttgaaacatctcattgccccttggccttctggtatgattggaaggcttcctgatctgatcctcccagaagcagaagccacatgtgcttcctttacagcctgctggaccgtgagccaattaaacctcttttctttatgatcatgcagaaaattagtactatgaagtggagccatgaaatgccttcaaggccctttcccctttgtcttggcaaccagcactcagcttcttttcatgcaaatatctgaatccttcatgaactttccccctgaaaatggacttttctgttttaccacattgccaggctgtgataaagatagctgacaatgtagaaccaggttcagaagtgggtaaaagacagaggtcagaagagttggaaaarcttagaagacagcaagatgaggaaaatattggaccactatagagaattgttaaatacttgtgataggaaggctgacaaaagtgtaaacactgaagtccagacctaaaagttctcagatgaaaatgaggaatttcctatgaacaagagacaagattacatttgattggccttagcaaagaag

SEQ ID NO: 207024 - DNA, 517 bp, Homo sapiens
tttgaattacaaaatatggtagtagctcaggtctaactcaaatgcagggaaaaaaaactattaactctaaaaaaattaaatacacatttgatggtaatgagaaacagaaaacaggcagaaatagtagaatattcaaccactgatgaagtatttgaccactgaatamagaaaattgcaatgatttaaatttgcatcaatgtaacttcacacctgatgacacttcccagtctgtgcaaaattagatgtctaagagtaaagccgtgagttttactagcttgaggaataagagtacagagttccaggctgacagaaaagaagaactgggaaatttgaatgacatgggagaaatctcacacaactgaaagtcacagaggagaatgtcacagagtaaaaatctaaaatcagcacttaaacttcattcagatatatgatggctgctacatttcacattcataaaagagactccatagaatccagcagaaaacaacagctaaattgctagtacagagcagagatt

SEQ ID NO: 207025 - DNA, 368 bp, Homo sapiens
agttctgtgagaaagaaagaaaacgcaaattataaatatcagggattaatragattgtacagttgtagacacaagagacattaacaagataatggaatattgtgaaacattttatactaattttcattacttggatgaaagggtgaattccttgaaaaaaacttataaaaaaattcacaagattaaatggaatatatgaagtaattgacatttattaaagtaattaaattgtcaaatacctgcacataaagacataaaactaaagaaataaaaaaataagcaaactccacatccaaagagttttgctggtgaattcttttaaacgttttaaaaaaataaaatttttaaattatttcagaagaagggga

SEQ ID NO: 207026 - DNA, 368 bp, Homo sapiens
agttctgtgagaaagaaagaaaacgcaaattataaatatcagggattaatgagattgtacagttgtagacacaagagacattaacaagataatggaatattgtgaaacattttatactaattttcattacttggatgaaagggtgaattccttgaaaaaaacttataaaaaaattcacaagattaaatggaatatatgaagtaattgacatttattaaagtaattaaattgtcaaatacctgcacataaaracataaaactaaagaaataaaaaaataagcaaactccacatccaaagagttttgctggtgaattcttttaaacgttttaaaaaaataaaatttttaaattatttcagaagaagggga

SEQ ID NO: 207027 - DNA, 368 bp, Homo sapiens
agttctgtgagaaagaaagaaaacgcaaattataaatatcagggattaatgagattgtacagttgtagacacaagagacattaacaagataatggaatattgtgaaacattttatactaattttcattacttggatgaaagggtgaattccttgaaaaaaacttataaaaaaattcacaagattaaatggaatatatgaagtaattgacatttattaaagtaattaaattgtcaaatacctgcacataaagacataaaactaaagaaatwaaaaaataagcaaactccacatccaaagagttttgctggtgaattcttttaaacgttttaaaaaaataaaatttttaaattatttcagaagaagggga

SEQ ID NO: 207028 - DNA, 368 bp, Homo sapiens
agttctgtgagaaagaaagaaaacgcaaattataaatatcagggattaatgagattgtacagttgtagacacaagagacattaacaagataatggaatattgtgaaacattttatactaattttcattacttggatgaaagggtgaattccttgaaaaaaacttataaaaaaattcacaagattaaatggaatatatgaagtaattgacatttattaaagtaattaaattgtcaaatacctgcacataaagacataaaactaaagaaataaaaaaataagcaaactccacatccaaagagttttrctggtgaattcttttaaacgttttaaaaaaataaaatttttaaattatttcagaagaagggga

SEQ ID NO: 207029 - DNA, 387 bp, Homo sapiens
aatacctgcacataaagacataaaactaaagaaataaaaaaataagcaaactccacatccaaagagttttgctggtgaattctttyaaacgttttaaaaaaataaaatttttaaattatttcagaagaaggggaaaattccaaacttgttttatgagtcagaatcctgatagcaaaactacaaaacccaggaatgcaaaattgatttcaacttaaggggccatcaccattctaatctgtgattctaatgaatttggctatcttagatactttatacaagtggaatcatacagtttgtccttctgtgactgatttactttacttagcattaatgtcctctaggttcatccatgttgcatattgccggattttcttgttttaaagctga

SEQ ID NO: 207030 - DNA, 616 bp, Homo sapiens
gtaggttttcaattattttgcccagatccatcaaaggaatcactttctagagaagctatagctttatgaaatatattttttaagtgataagacttgaaagttgaaattactctttgatccaagggcaccagaatgaatgttgggttagtaggcatgaaaacaatattcagctctttatacatctckgtaaaagcccttgagtaccagcggcattgtcagtgagtggtaatactttgaaaggaatcttatttcttgagcagtagttatcgacagtgggcttaagatattcagtaaaccatatttgtaaaccgatagtctgtcatccaggctttgttcccatttgtagagtacaggcagagctgtgttttatcataattcttcagggcccttggattttcagaatagtaaatcatcattggtttcaagttaacatcaccaattgcattaggccttaacaaaagagtcagcatgtcctttgaagccttaaagccaggcatcaactcctctctagctgggaacatcctggatggcatctccttctcgtagaaggctgttttgtctccattgcaaatctgtttagtgtagccatcttaattatcttctagatagctttctg

SEQ ID NO: 207031 - DNA, 230 bp, Homo sapiens
agagctgtgttttatcataattcttcagggcccttggattttcagaatagtaaatcatcattggtttcaagttaacatcaccaaytgcattaggccttaacaaaagagtcagcatgtcctttgaagccttaaagccaggcatcaactcctctctagctgggaacatcctggatggcatctccttctcgtagaaggctgttttgtctccattgcaaatctgtttagtgtag

SEQ ID NO: 207032 - DNA, 514 bp, Homo sapiens
aatatattttttaagtgataagacttgaaagttgaaattactctttgatccaagggcaccagaatgaatgttgggttagtaggcatgaaaacaatattcagctctttatacatctcggtaaaagcccttgagtaccagcggcattgtcagtgagtggtaatactttgaaaggaatcttatttcttgagcagtagttatcgacagtgggcttaagatattcagtaaaccatatttgtaaaccgatagtctgtcatccaggctttgttcccatttgtagagtacaggcagagctgtgttttatcataattcttcagggcccttggattttcagaatagtaaatcatcattggtttcaagttaacatcaccaattgcattagsccttaacaaaagagtcagcatgtcctttgaagccttaaagccaggcatcaactcctctctagctgggaacatcctggatggcatctccttctcgtagaaggctgttttgtctccattgcaaatctgtttagtgt

SEQ ID NO: 207033 - DNA, 230 bp, Homo sapiens
agagctgtgttttatcataattcttcagggcccttggattttcagaatagtaaatcatcattggtttcaagttaacatcaccaattgcattaggccttaacaaaagaktcagcatgtcctttgaagccttaaagccaggcatcaactcctctctagctgggaacatcctggatggcatctccttctcgtagaaggctgttttgtctccattgcaaatctgtttagtgtag

SEQ ID NO: 207034 - DNA, 230 bp, Homo sapiens
agagctgtgttttatcataattcttcagggcccttggattttcagaatagtaaatcatcattggtttcaagttaacatcaccaattgcattaggccttaacaaaagagtcagcatgtcctttgaagccttaaakccaggcatcaactcctctctagctgggaacatcctggatggcatctccttctcgtagaaggctgttttgtctccattgcaaatctgtttagtgtag

SEQ ID NO: 207035 - DNA, 230 bp, Homo sapiens
agagctgtgttttatcataattcttcagggcccttggattttcagaatagtaaatcatcattggtttcaagttaacatcaccaattgcattaggccttaacaaaagagtcagcatgtcctttgaagccttaaagccagrcatcaactcctctctagctgggaacatcctggatggcatctccttctcgtagaaggctgttttgtctccattgcaaatctgtttagtgtag

SEQ ID NO: 207036 - DNA, 654 bp, Homo sapiens
ttactgttttctattcattctcctcagtctccattcttttgtctaccactctttttctgccttttgcagttttcattgatgattttagatgactacattttccctgtctttcttagcatgtacttctctttttaaaactttttttttaactagttgccacaraatatgcaatatacatttacaaccaattcaagtccactttcaaataacactatcccactatcccacgaataagactacctgcttaacaaacaaaacacctaattcctcagtaacatttacaacaaattcaagtccactttcaaataacactatcccactatcccacaaataagactacctgcttaacaaagaacacacctaattcctcaatatacatttacaaccaattcaagtctactttcagataacactatcccacttcatgggtgactacctgcttaacaaagaaaacacctgattcctccctcccatccttccattccattccttgtattattgttctttatttcacttgtgtataagcacacataatctatctgtgtgtatttattattatctacaaacttattggtcagatcaattatgaataaatacatgtttttattgtaccacaattcctccctcccatccttccattccattccttgtatt

SEQ ID NO: 207037 - DNA, 654 bp, Homo sapiens
ttactgttttctattcattctcctcagtctccattcttttgtctaccactctttttctgccttttgcagttttcattgatgattttagatgactacattttccctgtctttcttagcatgtacttctctttttaaaactttttttttaactagttgccacagaatatgcaawatacatttacaaccaattcaagtccactttcaaataacactatcccactatcccacgaataagactacctgcttaacaaacaaaacacctaattcctcagtaacatttacaacaaattcaagtccactttcaaataacactatcccactatcccacaaataagactacctgcttaacaaagaacacacctaattcctcaatatacatttacaaccaattcaagtctactttcagataacactatcccacttcatgggtgactacctgcttaacaaagaaaacacctgattcctccctcccatccttccattccattccttgtattattgttctttatttcacttgtgtataagcacacataatctatctgtgtgtatttattattatctacaaacttattggtcagatcaattatgaataaatacatgtttttattgtaccacaattcctccctcccatccttccattccattccttgtatt

SEQ ID NO: 207038 - DNA, 654 bp, Homo sapiens
ttactgttttctattcattctcctcagtctccattcttttgtctaccactctttttctgccttttgcagttttcattgatgattttagatgactacattttccctgtctttcttagcatgtacttctctttttaaaactttttttttaactagttgccacagaatatgcaatatacatttacaaccaattcargtccactttcaaataacactatcccactatcccacgaataagactacctgcttaacaaacaaaacacctaattcctcagtaacatttacaacaaattcaagtccactttcaaataacactatcccactatcccacaaataagactacctgcttaacaaagaacacacctaattcctcaatatacatttacaaccaattcaagtctactttcagataacactatcccacttcatgggtgactacctgcttaacaaagaaaacacctgattcctccctcccatccttccattccattccttgtattattgttctttatttcacttgtgtataagcacacataatctatctgtgtgtatttattattatctacaaacttattggtcagatcaattatgaataaatacatgtttttattgtaccacaattcctccctcccatccttccattccattccttgtatt

SEQ ID NO: 207039 - DNA, 674 bp, Homo sapiens
ttcagacatctaaattttcaaaacttgtatctctcattttttccaaagaaactactggaggttgtgttccaacaaaataaaagaataaactaagaaaatattgacaggggagccaggaaataagatgccaacacaagataaaagcaaaatgaatccctaagatgttagtgaaagaagtactagaaaaacggtgctttggcatgtgagacagccagaacagatgggagcagcagctatgttaaggaaatctaagaaaaaatggaagatattgaccttatttagagaggttttatggktctgtcagaaagcctggagagaattaactataagtattgagcaagctaggcaaataaaatcaaggccgttattgactccaggaggaactaaacattgtacaggaaagcaaatgcaatcatagtatactacctgactcagatttggaaatgttgtaattcagatctattagaagaccagggagaggggaaatgtttgtgtgtagcaatgtaagagtgctccctttttcatcttccatagtagtaagtcagtaaatgatgtaaatttgattaatcaagaaagcagaatataaacaaattatttagatatatacagttaaatactagaaaaactgctaaagaaattgcaagagcctcagggaagcagggggagtgggccag

SEQ ID NO: 207040 - DNA, 674 bp, Homo sapiens
ttcagacatctaaattttcaaaacttgtatctctcattttttccaaagaaactactggaggttgtgttccaacaaaataaaagaataaactaagaaaatattgacaggggagccaggaaataagatgccaacacaagataaaagcaaaatgaatccctaagatgttagtgaaagaagtactagaaaaacggtgctttggcatgtgagacagccagaacagatgggagcagcagctatgttaaggaaatctaagaaaaaatggaagatattgaccttatttagagaggttttatggttctgtcagaaagcctggagagaattaactataagtattgagcaagctaggcaaataaaatcaaggccgttattgactccaggaggaactaaacattgtacaggaaagcaaatgcaatcatagtatactacctgactcagatttggaaatgttgtaattcaratctattagaagaccagggagaggggaaatgtttgtgtgtagcaatgtaagagtgctccctttttcatcttccatagtagtaagtcagtaaatgatgtaaatttgattaatcaagaaagcagaatataaacaaattatttagatatatacagttaaatactagaaaaactgctaaagaaattgcaagagcctcagggaagcagggggagtgggccag

SEQ ID NO: 207041 - DNA, 596 bp, Homo sapiens
gtggcttcttgagcatgggaatgatgggttacaagtgaggtatcgagaagtaactcggggctagagtgtgtcctgcttcctcgcctgacacccaagggccagaagacttggaccagggacattatccctgtccatgaaggcagctgtgcagatgctggctcccactgaggaccaaactcgaggccacagcatggttctgcagtgggaggcctgtggagatgctcaagggtttcagggaaaccaggacttgaagtggctgtgtcaccctgtgcttcaaaccttggatggctcctcttggacctggataaagctgagaatctgcgcagaggtctgtaggtgctgcrtggcagttccatctgcaggtccatggcagatggatgcaagtcaagcaggagcttgtgtcctgctgtgtttccatcactgtggggtcttctcagagggtttgaccacctctccaccacttccataccgcctactccttcccacccttgggggctgtgctgagggcttccccagggaggcctttgatgctcactgcagatgaggctggtgctgcctctgtgtcacacttagggagttctggctgctgggcagac

SEQ ID NO: 207042 - DNA, 500 bp, Homo sapiens
tgtaatattacattgcaataaaaaagaacaaactattgatacctacaacaatatgcatgaatctcaaaaacgttatgctaagtgaaggaaataaaacataaacgatgacatttatgtgattctattcagatgaaattctaaaaaagggaaaattatagtgacaggaagtagatcagtggttccctggggctggggcagctacggaagagggttaacaccagggacaaagcgagatgtttagggtgatggaaatgctttctatcctgattgtggtagtggtttcatgactgcatagaattgccaaacttctcaaactgtacactgaaagtgagtgaattttagtgcatayatattttatcacaatatagctgatttttttaaatgaaggaaaaagtattaaaataataggaaggacgttaaacaaaaaaattttcagctcctctgcaagattcaagatgggaggaggtcaacagaacctcagaggctattgtgcccctaga

SEQ ID NO: 207043 - DNA, 510 bp, Homo sapiens
agtgcttgctggttgtttggctggtggaaaggaaggagggaaaagtttgaattttcatttctaaggagctaagtaagacatgaacacacaggaaaaagagaaaaagtaaatattttttaaggaaaatgaagtacttgtttacaacaccccactgtcaaattccactttatttttatgcgattggagcatcatacacatttggtgtgcttcctactgaaagggagcatagttacagagcattagaatggaatctgtttacctggagttggaaatattcttgagttttcagcaggaacttactgtgcatgtatggtgtgaggatccaagaatttctgagaatgatttcctgcatctccatgtagagtgtacaacagcaataaaattcatwgcagctgaagagggcatttaacagtattaataatatctataaaagtattttatgcatcaggaagccaactaaatcatgatgtcatagagtcctgacagagggcatctatagtagaaatatgg

SEQ ID NO: 207044 - DNA, 500 bp, Homo sapiens
catctttgaaggaaagagtctattcacaatatttacccacttttatttttatttatttattttaagttgcatagaaatggggtctggctcttccacccaggctgtagtgcaatggggtggtcactgtagctcactgtggcctcaaactcctgcactcaagtgattctcatacctcactgtctcgagtagctgagactacacgtgcatgctaccataccccgctaataaaaaaaaaatgtgggtacagggtctcactatgttgcatagactgggctcaaattcctggcctcaattgattcttccatctcagcctcccaaagctctgggattacagatgtgagccaccrcactcagcctcacccacttttaattaggatatgtcacttttaattttttagttgtgagatgttctatgtattttgaacaatacactgctatcagttgtatgatttgcaaacatttctcccatttttttaggtggttttgaaggtggactttga

SEQ ID NO: 207045 - DNA, 504 bp, Homo sapiens
ccctgggtctgcaggaattgaacagttttaaattctggatatattaataaaacaaaatattcaccattaacaacattttaagcaaaaatgccataagtcttgtcttttcctaagagtgacaggactgagatgggtggatcacgaggtcaggagatcgagaccatcctggccaacatggtaaaaccccgtctctactaaaatacaaaaaaatagctgggcgtggtggtgcrcacctgtagtcccagctactcgggaggctgaggaaggggaattgcttgaacctgggaggcagagattgcagcgagccaagatcatgccactgcactccagcctgggcagcagagtgagactccgtctgaaaaaaaaagaatgagtgacaggaaaggaagcctatagatagataaacatttaaattatttaatattaagtcacagaataaattatatatgttagatgctggcaggattctgtgtcttctttagaggagctacatgtatcctggag

SEQ ID NO: 207046 - DNA, 391 bp, Homo sapiens
accaaatggacacactgtgactaggacatgagctaaaacatcattgaccacctgacctccattagcgccaattctatctggaagggaacattgatgtttcaggtcacctggaatcaatgtccattcacagcaagtgtccagacatccctaaatgatgtgattatttcctttttgtcagtaaacaattgccttaataaaaagtggtaagtctttttaggaaagtrtgggaggaagattaatgtatagttttggtagtgtacctctgtctttattggaggatctctgcctccccttcaaggaaagcttctgagactgtaaattggctcaagtctaggaattgactgtgggtctataattctttttttttcttttttatcatttgagttagagt

SEQ ID NO: 207047 - DNA, 612 bp, Homo sapiens
tgctttgcctttgctctccattaccataacaatgcccccttgcttttgatagttgaggaccactgcttggttcctgccacccctggatccacttattctcattgcatttaaacttttcattggactgattttggttctcagtgtaagatctgtcctacagagaaaagcatccacagagctcttcagggatgctggggatcccatcacraatctatttctcacagtattggtaaatgataggtcttctggacccttccaatgtgaatgaataggttttaataacaaattcactctaacattaatctgtctctaagcctttgcataccttcctctgtggtaaaccaagatagatggcacaacttgctcatggtcggccatttttttatccttacttcagctgatcagctaaaaaaactattagaacctttcgtgactccccaaacgggaacattaatgggccatgttaattaattcaacttgatccaacgctattttccttccactatcccacaaccttgctgccatttaagatccatttccacagactttctgaaggttttagttgatacatatttttttaaaaaaaattcaagtaggtttttttttaaatgt

SEQ ID NO: 207048 - DNA, 399 bp, Homo sapiens
gataaacatttaaattatttaatattaagtcacagaataaattatatatgttagatgctggcaggattctgtgtcttctttagaggagctacatgtatcctggagtcaattctttgtaccttaacaccagaaagattagttaatagcacctgataagaactttttcagggtgttggaggtggtgatacacttcacagtgattaaagttttttacctttgataagccccagaaataagtcagagacttaatttaggattcaatttgagagatgtctgtgaaagatgtgagaaagcttaaaatacttgatcaaaactaaaccacaggtccttgtraaacaatagttattcatttaaccaaagtgatttaaaggcaatagaaaaagttacaagggtgtaaaa

SEQ ID NO: 207049 - DNA, 577 bp, Homo sapiens
agtaaaggaaggtagaagatagtgatattgatggtccctaccatatgtaggcctaagctattctgaggttttagcaaaatgttggaaatttaaaattaagagaatttaaagtagaaaaaaactcatcaaatatgaatataaagaaatttttttacatctgtacaatgtgttattacaaaacagtcaaaatgttaaaaaaccaagttttaaagttaaacagctacactaagatacatttttataactgaatatagggaaatatttttataattttattttagtctcagtatacactgtttatgaagtctacattcatgtacagtaatatcctagccttcacattcactcaccacttcctcaytgactcacccagtgaaacttccagtcctgcaagctccgttcatgataagtgccctagacaggtgaccaattttttatcttttataccacattttcactgtatcttttctgtgttgaggtgtgtttagaataacaggtacgattgtgttacaattgtgtgcagtatttagtataataatatgttatacagatttgtagcttaagggcaataggctat

SEQ ID NO: 207050 - DNA, 495 bp, Homo sapiens
caaataattcacagtaatagctattttcagtgattarggaagatggtgaagctcaggagatgcactatgggccatcaaacatattgctcatgttgttttataaggtcaacagtgactttaaagataaagaaaccttataaatttaagaatagttttaggtttacagaacagttgtagtacatagaatttccacatatcctacgaagtttccatttttatgaaattcttacattaatgtaggacatttgtcacaagcaatcagttttataacactataactactcttcatactttattcatttttttttagttttgacttaatgtcctgtttctattccaggatttcatccaggatacctcatcacaggtacatgtcatgtctccttagaattctctgactgtcacagtttctcagagtttccttatttttgatgccattaatattactaatgtgggatttgtctgatgtttctctaatgataagactggatttgt

SEQ ID NO: 207051 - DNA, 518 bp, Homo sapiens
tgagagacagaaacaggctgtgtttgtttctgcatgtgtactggctgcccactaattctccacacagcttcctattaagaggccattgcacccttcttagtagcagcagagttgttttcaggaaccatgcctaaaaggcctacaaagccatggaactacatatatggaactacgtatgtcaactcccattgacttccataaatcttgaatagcatgatgtcacaggcacagatgacatagtgctgagcactgagtccctagacaaactttcactgcatggaagatatgattttrcacagtatcctaaatcaactgttgtatagaggctggtctggacacaagtctacaacagatgctattgcaaacaaactacatttttagaccacatcatgaggcaaacccaatgctctgtctccacactctaacctgataagaagattgagttcaaggaaggaatgtctcatatatgtaatgacatgactttgtgtttacttaattcaaccttcctggagtctaaa

SEQ ID NO: 207052 - DNA, 432 bp, Homo sapiens
gttcaccacttactgcttccttcccagcttgtttcataaataaccttttcaaacccgtaatttgaataaacttttatataactttggaattagacaaaataattctttttctcaataaggacacctcttctttggcacatttgatagaaacctaggaaaaaagaaatcctgaactatcagatattagtattgtatagatgagaaccatttcacaatttttagaayagttttctctatataataaccctttcttaattggaaatgacctagacatctagtaagcatccaaaatgattttaagattttaaattatacaaaaatttcacttagaaacattgatctcatttatgtgtactcagcttttccattttaccagtttacctagagtacttttgaaaactgggatattacatcaaagtagtaattatttat

SEQ ID NO: 207053 - DNA, 432 bp, Homo sapiens
gttcaccacttactgcttccttcccagcttgtttcataaataaccttttcaaacccgtaatttgaataaacttttatataactttggaattagacaaaataattctttttctcaataaggacacctcttctttggcacatttgatagaaacctaggaaaaaagaaatcctgaactatcagatattagtattgtatagatgagaaccatttcacaatttttagaacagttttctctatataataaccctttcttaattggaaatgacctagacatctagtaagcatccaaaatgattttaagattttaaattatayaaaaatttcacttagaaacattgatctcatttatgtgtactcagcttttccattttaccagtttacctagagtacttttgaaaactgggatattacatcaaagtagtaattatttat

SEQ ID NO: 207054 - DNA, 586 bp, Homo sapiens
accattgctaaatttcagatctgttgggcacatctgaagaattgacagcatgggctatctgaagttgactggatgtggaagaccagggaggtttcctaaaggaaaaaggagctagccttatccgtggaagggggaggtgtacatgtactaataagcatgcctctgtggttggtttgatgtgggagagcagacagtggggagcaagggagtgtggtaccctagccaagctcccagcctccctgcaggccctgggtagttcaagacctcacatggcctggtggcagtcttcgggaggaaagggtggctcagcggcgctaacagcratgaccaattagagctgtgtctgggcccagcagatgacaggggaggagaaggaaagcagagcaacacttcagctgcctgggctagctgggggatctgtgtgaaacacccgaaaacatctcccaggaacttccagggatctgaggtccaaaaatagcaagtaaagacaagaactagtgagaggtaggccatatattatttttaaagtatttttgctattattaacatatgccttattttcatataaaaattaagtgatgccata

SEQ ID NO: 207055 - DNA, 563 bp, Homo sapiens
gtgtggtcgttcagtaagaagagaacacatgttttgtgtgctcactccaatgggtgtctggcttataaagtaggtgtggtccaattcctgtctgctgccaccattgtgccctgctctggccaacagctcagagaggtttgctctctccactggccctgaagrcctcccatgttcccccagttcaaacttcacctctctcatgaggctttccctcactgcatcctctacctctctcatgaggctttccctcactgcatcctctactctctcatgaggctttccctcactgcatcctctacctctctcatgaggctttccctcactgcatcctgtaccctcacagcccttaacacaccactcaacaaatacgcatttgcatctaaccaaatgtgaccctgtgtccatatttatgtttctgtatattaatgcattcttgtttcccctgccaggctccattagtctggttagcttttgcccaggtatcaggaaatgaggggatggggagaggctcagaatccaaacttgacagagtagctgtccaccactaggtgatggtggggtca

SEQ ID NO: 207056 - DNA, 563 bp, Homo sapiens
gtgtggtcgttcagtaagaagagaacacatgttttgtgtgctcactccaatgggtgtctggcttataaagtaggtgtggtccaattcctgtctgctgccaccattgtgccctgctctggccaacagctcagagaggtttgctctctccactggccctgaagacctcccatgttcccccagttcaaacttcacctctctcatgaggctttccctcactgcatcctctacctctctcatgaggctttccctcactgcatcctctactctctcatgaggctttccctcactgcatcctctacctctctcatgaggctttccctcactgcatcctgtaccctcacagcccttaacacaccactcaacaaatacgcatttgcatctaaccaaatgtgaccctgtgtccatatttatgtttctrtatattaatgcattcttgtttcccctgccaggctccattagtctggttagcttttgcccaggtatcaggaaatgaggggatggggagaggctcagaatccaaacttgacagagtagctgtccaccactaggtgatggtggggtca

SEQ ID NO: 207057 - DNA, 571 bp, Homo sapiens
ctttaatccagacatgaatttgtttgtttctgtgaaagttaggggcactactaayctgggtctcttttagcccctggcttaatcagaattcttgggtttagctcttttacttgccttaatcaacagtctgagcttatcacctttaacttgagttttgttcaggcttatctcctaagggtgatggccctgtaagtagttctgccctgtttttcccccttatttgttgtctgctgagtgatccttactctgatttctatcaagggattttgtttaattggttatttttttatggaggatatggcccccttggtatttacttacttttcatagtcctatgatttactttaactaagtattttataaacaagctagttgggagtctccttttgttatttctgtttcaccatgctgccagatgccaatgtcagttttttaattttaccatgtatcattaccatctactgtctatcattacctcttacctagaaagaagagcacatcctaacttatcccccttaatttcactctctccaatttcagtttgccctctatgattgccaaattgatgttt

SEQ ID NO: 207058 - DNA, 588 bp, Homo sapiens
aaaggcaccttctaaacttttctcaaatcatatctctttcagctttcggtctcagtttagccaataacaatataaagtgtccatgttagttcaaatcaccttcatccagtagcctttctactgataggctaatcctaaaccatgakgatttttacacataaaagatgaaaatctaaaataagggaagtatagaagtggttttactgtcctttttatttgcaaaagcaaacagtcattattcagaatgctgcattgttactcttcatacataactttattgatagcccaaggtctgctttaaagaagctcaaaatattgagagcattaaagcctcagagttctatttaagctcatgaatctactatatacatttaaggttccatgtagaaattgcctaaaaggatttatttttttaatagattcattcttactatctaaatttcatctagccagaggtctatagcctatagattgaaaaatgttacctcttttgaaattaaaagcttgtagattaaacaggattattcctatttatacatgattttctacccttgagatatctcttgctaaaagactaaaaataataac

SEQ ID NO: 207059 - DNA, 588 bp, Homo sapiens
aaaggcaccttctaaacttttctcaaatcatatctctttcagctttcggtctcagtttagccaataacaatataaagtgtccatgttagttcaaatcaccttcatccagtagcctttctactgataggctaatcctaaaccatgatgatttttacacataaaagatgaaaatctaaaataagggaagtatagaagtggttttactgtcctttttatttgcaaaagcaaacagtcattattcagaatgctgcattgttactcttcatacataactttattgatagcccaaggtctgctttaaagaagctcaaaatattgagagcattaaagcctcagagttctatttaagctcatgaatctactatatacatttaargttccatgtagaaattgcctaaaaggatttatttttttaatagattcattcttactatctaaatttcatctagccagaggtctatagcctatagattgaaaaatgttacctcttttgaaattaaaagcttgtagattaaacaggattattcctatttatacatgattttctacccttgagatatctcttgctaaaagactaaaaataataac

SEQ ID NO: 207060 - DNA, 557 bp, Homo sapiens
  misc_feature (1)...(557): n = A,T,C or G
nnnnnnnnnnnnnnnntgatcacaccaggaatcccagcactttggacgcagagttaggcagaatccttgagccaggagtctgagaccagcctgggcaacatgggaaaccctatctctacaaaaaatttaaaaattagccaagtgtgatggggtgagcctatagtcccagctactcgggaggctaaggtgggacgaytgattgagcctgagaggttgaggctgcagtgagtcatgaacaggccactgcactccagagtgggcaacagagaccctgtctcaaaaaatatatagagtattaaatttaattttacttaaaaaagaaaagcgaaattttataggaattattaaccttcaaatacgtatttcctgaccatattttattttctataagatccctctaaagttaggagattaggaagaatatatttttttaactacttaatgacttttaaacagtattctggactctttgttttgaaagtgataactctgatattttctccatttctctttcctccaaattccactttttatcatatagttgtatttttacatta

SEQ ID NO: 207061 - DNA, 577 bp, Homo sapiens
tattcaacagttacgaaatatgtactcttctcgtcagcacgtggaatattctccaggattgaccatatgtgttaggccacaaaacaactctcaacaaattttaaaaaaatcgtatcaagtatcttctcagaccacaaaggaagaaaagtagaagtcaataccaagaggaactatggaaaatgtacaaatacagggaaattaaacaatatgttcctcaatgacccctgaatcaaataagaaattaagaaggaaataaaaaaatgaaacaaatgaaaatggaaatacaacatactaaaaccaataggatacagccaaagcagtgctaagaagtacttttttgtacatcagaaaagtaagaagatttcaaataaactacctaacaatgcacctgaaggaactagaaaagcaacaaacaaaacccaaaattagtagaaaaagagaaataataaagatcaggrcagaactaaacaagatagagactaataaataacacaagaaaattggttcactgaaaagatgaaaatctatacatttctagctagactaacaagaaaaaaggagaaaagctgaaataaga

SEQ ID NO: 207062 - DNA, 480 bp, Homo sapiens
gcacgtgaaccggagcaactccatcttaaataggaactgggtaaaaatgaggctgaaacctactgggctgcaacccagcaagttaaggcattytaagtcacaggatgagataggagattagcacaaaatacaggtcataaagaccttgctgataaaacaggttgcagtaaaggagtcagacaaaacctgccaaaaccaaaatggcaacgagagcgacctctggtcatcctcattgctacactcccaccagcgccatgacagtttacaaatgccatgacaacatcaggaagttaccctatatggtctaaaaagaggaggcatgaataatccaccccttgtttagcatttcatcaagaaataaccataaaaatgggcaaccagcagcactcaaggctgctctatagagtagccattcttttattcctttacttttttaaataaacttgcttttactttgcactgcagactcaccctgaattc

SEQ ID NO: 207063 - DNA, 356 bp, Homo sapiens
cgaattcaaagctaaggtttggtttggtttgtactgtttggaggaaaaatgattcttagaaatgttttaatagatacttctttttcacacatatataaagctgctagtctgactctcctaagaaatgttattttataaagtacaatttttttttttagatggagtcttgccttgtcgcccaggctggagtgcagtgatgtgatcgcggttcaytgccacctccatctcctgggttcaagcgattcttctgcctcagcctcccgagtagctgggaccactggcatgtgccaccacacccagctaatttttgttgtttttagtagagatgggatttcaccatgttggccaggctggtc

SEQ ID NO: 207064 - DNA, 661 bp, Homo sapiens
aaggatacatttgaataagtaggtgattgcttataggcaactgcttagggcatgtttttaatgagatatttcatattttaaaataaagcttattataaaatacattttcaaataaagcagttccattttaaatttctaaatgttttgataataaatattagaaagctactattctatgctttttcctcatygtttttgtcacttaatcccaagttctgcctaattcaaaaggatgaagcatagatcaacagcacatcagtgataaatacttccaatacaatttgcttccacattagatattagaatctcttttacagacacttaatttggtacaatcctcaggcaagtctgggctcacagcaatgacagaggttccgatttgttttcctgagtcatctacccttccatctctgtatattttaggacatagggcttatagctgagaggaagtaatctaaatcttttgaaatactcctcttatctgtcaacattcagggtatacacacaaatgaaaaaccacaaataatcacatatatcacaaagtaatgcataaaatgacagttttgtaaaaattggtatttaagcaaccttcaaatgaggatcatgatgatttcattatatccctagatcagtatacactcttgatctccatgagtaggtg

SEQ ID NO: 207065 - DNA, 619 bp, Homo sapiens
tcaaaccatatatttgtgaatgaataaaactgaatgtttttaggagcacctaagtcacctcttgaaggttttgctgcttagaatttttttctgccagacaccctaaatcatctctcccaagttcaaatttccacagatctctagggcaggggcaaaatactgccagtctctttgctaagccatagcaagaatcacctatactccagtttccaataacttccttatttgcaagaccacctcagcctgaacttcactgtccatatcaccgtcagcattttggtcaaagccattcaacaagtttctaggaagttccaaacttcccagatcttcctatcttsctgtcttcttctgagctccccagattgtttcaatctctgcctgttacccagttccaaagttgctttcacatttgcggggtgtctttacagctgttcttcactacctggtaccaagtatctgtattagtctgttctcatgctgctaataaaaacatactcaagactggctaatttataacgaaaaagaggtctgatggacctacagttgcacatggctggggaggcctcacaatcatggtagaaggcaaatgaggagcaaaggcagttcttacataacagca

SEQ ID NO: 207066 - DNA, 619 bp, Homo sapiens
tcaaaccatatatttgtgaatgaataaaactgaatgtttttaggagcacctaagtcacctcttgaaggttttgctgcttagaatttttttctgccagacaccctaaatcatctctcccaagttcaaatttccacagatctctagggcaggggcaaaatactgccagtctctttgctaagccatagcaagaatcacctatactccagtttccaataacttccttatttgcaagaccacctcagcctgaacttcactgtccatatcaccgtcagcattttggtcaaagccattcaacaagtttctaggaagttccaaacttcccagatcttcctatcttgctgtcttcttctgagctccccarattgtttcaatctctgcctgttacccagttccaaagttgctttcacatttgcggggtgtctttacagctgttcttcactacctggtaccaagtatctgtattagtctgttctcatgctgctaataaaaacatactcaagactggctaatttataacgaaaaagaggtctgatggacctacagttgcacatggctggggaggcctcacaatcatggtagaaggcaaatgaggagcaaaggcagttcttacataacagca

SEQ ID NO: 207067 - DNA, 414 bp, Homo sapiens
tttctgataagaaatttgttgttaatcttactgtgcatcttttgtatattgtaagttgcctctctcactactttcaagattttttgtccttggcttttgaacattatattacaatgtatsttggtgcaggtctccttttgtttatcctcctgggtttcactgaactcttgaatttgtggatttgtgtgttttattaaatttggaagcttttgattattattgatttaaacattctctcttctttttttttctttggggattcttactggtacattgataatattacacaggtctcaggctctgttaattttttcttccttcttttttttctctgttcctctgactggatcattttaactggtatatcttcaagtttactgattctttcttctacctgcttaaaaatactattaa

SEQ ID NO: 207068 - DNA, 414 bp, Homo sapiens
tttctgataagaaatttgttgttaatcttactgtgcatcttttgtatattgtaagttgcctctctcactactttcaagattttttgtccttggcttttgaacattatattacaatgtatgttggtgcaggtctccttttgtttatcctcctgggtttcactgaactcttgaatttgtggatttgtgtgttttattaaatttggaagcttttgattattattgatttaaacattctctcttctttttttttctttggggattcttactggtacattgataatattacacaggtctcaggctctgttaatttyttcttccttcttttttttctctgttcctctgactggatcattttaactggtatatcttcaagtttactgattctttcttctacctgcttaaaaatactattaa

SEQ ID NO: 207069 - DNA, 613 bp, Homo sapiens
caaactatagctgatagtgtgaactctgtttacatacatcaataaatatttaaattgagatatatataacctttggtgttttgaattgaaataccactaattctaacaatgatttaaagtaagtttaaattttttcttatgaggataatcttttaatgtagtgtttatggaaaagtttcaattatgtgaggagtgcagtatgttacagtaggaccattagtatattaatttgcaccataaacagataatttgttttcaaatgcaaatcttttcaatgcttttataagtcataaaggcctaactaaatatgcatccatcctttggagacagcctacgtgagaatgcatgaactatctttgtcaattgacctccctacctctcttcccgctcttcttgaggacagaatgtcatgggttgtgttttttaaactgaaaagcaataatgataaaagtaactatctaatgatcactaagtttggaaatatataaccctttttaaaaattatttatttatttatttatttatttatttatttwtttttttttgagacagagtctcactcccgtggcccaggctggagagcagtggtgtgatcatggcccactgcagcctc

SEQ ID NO: 207070 - DNA, 521 bp, Homo sapiens
tttctaaaacttttgcagatgttcatctttctggcagcagtttcttcctgcacaaattgaaaatgctatttaattttaaaaggcaatataaacagactccaaaaaatatgttctcttaatcatatagaagggaaagctggtagtgtttttatcaagtctcattttactccttggttactaaatgtagctaagatgacaaattgatttctatactgtaaaaacaaaatattaacacacttttttccccataaggtggattagttctaggtattaaaatttcaagacatcaagttcaggatacttaagtatcatttgagataaatagacatctttggaaaatagacaaatcaaatttataattttctctgagtttcaagaaaaatttaattttggtaatctcagactaaataaattaatattgctacaagaattgaagaattgggtcaaatttaacttacagttcygttgatcattgactaataattcttaaagtatccttaaccatgtgggaggctaaataa

SEQ ID NO: 207071 - DNA, 617 bp, Homo sapiens
aggcaaaaaataactcacatgcttccctactcaaataattttgcagttcttcagctttacctattattaatgaaccgtgtttcagctgtaaatataaagtcagaatctattcttagttgtacctgacagggcttcgagacaaaaagccagtaggaaaattcagcgcctaatcactgaaaaacattaagctagtcatgtgtttcaatttcttcctcctgtccattcctggatatcttacaaggcatggatgactttttatgttctaattccacctatatttccaaaattaatgtctactatcttcctataagcactgtagctttcaatcatttaaactatctaacattctcttaaaaaactgtgctcttttactaggcactttatccttaagtccttaaacggtccttactatggtcataagccaaggagaagagtccagtggagagagatttttgaatatgtaacagagagagaaattattaatgaggaataatcctcaraaatataaggtgcttttgcattaataatatcctgaaagatttagtttcatgaacactttagatggtgatctcctagaaggcggggtttgtcttatttatctcatattgcaagagctt

SEQ ID NO: 207072 - DNA, 583 bp, Homo sapiens
gtataaaattaaatgatagttccaaatgacaaaacaagaagctgagccatgtaagtaaacaaattaattttcttggatattattttacaggtgtcacatttgaaatatgttattattgagtgtatttggctccattctcttctacatgctttttcagttatcacaaggagacgcactttctgggcttctctacttatatgttcttctggagtaccattggttgtgtaaatggggtgaatggaatggatttttatctgtatcttttcgtaaagttcatttttcttaagaaaacaatatggatttagagttagtttcatgacctaatagctctgcaatcttgatcaggagaatatctatctgaaactgttttcttttcatctcaattaaacaactaacatgcttgttgtgaaaattaaataaacaatggtaagagataatgtctggcacataacagtctctcaataaaagttagtcaatagtttcttctcttttytcctttccttttcttgattcctctgagagaataatttgtacattttgttgttgttgatccccaagaatgctgaaagtgtagtagaatgta

SEQ ID NO: 207073 - DNA, 334 bp, Homo sapiens
tttttgcaatatgttttattgagatgtaatttacatacaacaaaatgcacagatattaggtatactgttcaacgagttttgataaatgcataaaatgcaacttacatctatataaaaaaatagcatatttccacaatcccagaaaggtcccaaastatcctgtttttatttttatgatcagatgttttcatttttatgattaccaattggtttttttctgttatagagcttcttatagaaatacagtatgaataaaatatgtattttatgtctggcttcatttactcaacataatgcttttgaggttcagcaatgtaattaggatactagaaat

SEQ ID NO: 207074 - DNA, 334 bp, Homo sapiens
tttttgcaatatgttttattgagatgtaatttacatacaacaaaatgcacagatattaggtatactgttcaacgagttttgataaatgcataaaatgcaacttacatctatataaaaaaatagcatatttccacaatcccagaaaggtcccaaactatcctgtttttatttttatgatcagatgttttyatttttatgattaccaattggtttttttctgttatagagcttcttatagaaatacagtatgaataaaatatgtattttatgtctggcttcatttactcaacataatgcttttgaggttcagcaatgtaattaggatactagaaat

SEQ ID NO: 207075 - DNA, 556 bp, Homo sapiens
tttggtgataactgtttaacaactggatttcaagcaaacaaacaaaaactgagtgttagtgtttgtctattcccatgatgtaaatactctgagggtagccaatttcatgctactaacatgtcctccatcattttgaaaaattactgagaactgaacagctacttcttgtgacccagcatgagctggctccaacacactacaggtcatctcccattgtatgagtatagtacaacttgttttcaataatacaacttttatattattatgactaaagytcttacaaatattcttttgcaagtttttgggtaaaaatacatttccattactcctagataaatacatagaagtagaattggttagtcatagggtacgtataagtttaactttataagaaaaaattgccaaacacttcaaagatattgcaacattttgtactttcaacaaagtctagcagttccagttgctccatatatttgatattatcactctttttaatttcagcaatttttattcaaatcatgtctcactgtgttctttttttccttttacgactaat

SEQ ID NO: 207076 - DNA, 538 bp, Homo sapiens
tagtaatactgtctacctcgatggatttttgtgaggaatatgtgtgtaaagagtgaagtgtagtgtctggaacatggtgatcaatgaatgtcagctgttatcagtgctaatcactagaaataataatgccattatcatcgaaggwgatcaaagctactaaagatatcctgttgtatttcataaaaactgcctagaggtaaacttgatagctatggcaaaaatgaaaaaaatgccttttctctactatgccttaaataatcttctaatttgtaagtcaaatctgtgattatatataatgtaattcatcttctatggatgtccatggaaagagctgaaaaattacagtcaccaagaacatattgactgctagatattacttatttgattaataaattaaaaacttctgcggctcactctcttgaattttcttgcataggagaagagtcatcagcaatttcctggccctagaaagcagttttcacagggagcatctccagagaggtacaaggtgcaactgagattttagtccagaaagccc

SEQ ID NO: 207077 - DNA, 575 bp, Homo sapiens
cacgggctctcacttacattagagagcagtctgtctgccatagtcagaagcaggagtttgagtttctagtcctctggcatgacccctgggatcaccggccatgcagcctggtccccaggttctctgcattccccttgggcacagagctcattgccactttgtgggctcaaggaaccatcatgatttcaagggaggctgggattaaggagttccagctgtattccctaggacagttcccgggcatcctgttgtcttactaaagtgctttagtggccacagaagagttgagatgtggagggagggaagaggactgaggcttaggcttggaggcttctatcagcgctctccatttggcattctttcacytgacaaaagtttaccgaacccctccaggggccaggtactgtgctggatgctggtgggatacaggtgacacaatcaacaaggactctacttcttggacaagagccaggaggatggggttgtggagtgcacgtcagtggcgggggagctggtaggggtaagagcaaataagacaattttagtgagtgataagtgctataaacattaattaa

SEQ ID NO: 207078 - DNA, 595 bp, Homo sapiens
cacttaagagtgtgtcagagagaaggcaggaggcaggtcacacgggccttacagaatttggatttcatgctaatatactgggtttcaggtaaagtttcaaatgaaaaaaaggagttgtcatacaatgagtagaatctggagatagaaaccataaactaggttgaaaagaagtttaatagaagtacttatgaattctgttggatgagtaactgcaaaatcacagaaggactgtgttctgggcctgtgctggaccaggctttacctgatgggccaggctttatgtggtgcttggaggggctcaggaaacatttgtctgtctatctacactgccaagctctcccgccagcactgtaaatttttcctgcaatctttcttcagcaccttttacrgagaaaggttaaaggttgtgctcactttaaaggagaaatatttaaaaggattctgttatcagagagcatgtgttgaagggtgtatttggagctgagaggtaataaattagtaacaaaacagagattcagtggctaaaagtaaataagaaccctacttgatgtcaggtttacttggtaatgttcctgccctgaccttggccttcatt

SEQ ID NO: 207079 - DNA, 514 bp, Homo sapiens
gaggtgaaaatactggaatttcagcacaagaagaagctctgtctccatgttagtaatgcaaaaatgaagcagaacataaccatagatcatggaatctttaggaccctcagagacctgaggaccaccttaccatgactcatcaggttgggagactgggggacagtgcattgtcagagagcccacattcagaggtgggatgcttaattcatccttcgatgcattcatcacatagttttaagtatctactacataccaagctgtgtgttatatataatgtatgaagtattgaacraaacagattcagacttgccctacaggagtctacacttcaatggaaaggaaaaagcaagactcgaactcttctgcttactcccactggatgctccctcctgaagacctcagcatgaatcaggactggaggctgttctgctttcttctcttggtcggtgcctctaggcttacatctcccagagaagctcaaagagacgtttgacttttctaggtaagattccta

SEQ ID NO: 207080 - DNA, 592 bp, Homo sapiens
agagtaatgaaaatgaaataaaaagtggttggggagatgagaaaggacagtttgctctgttttatgtatctttgataatttcatgtcagaagttcaccgtggaaacatgaatctacacaactatgactttggggraacaatggacactatcactatagttcagcacaatgacactggagactagaggagagaacttgaaagagaaatttagacgagatggaaagaataatgttcaaagatgtctattcaagcaccaaaggataacttcagttcccaaagacaactaacctagcatttcatcatctaggatattccaatcagttaatttcaaacgaagcttgagttaaaattgcattgtcatcttgccttgctcgaattaaaggtttatttttattagttggataggttttctttcagttttacggaaaaaattgaaaaatggacagagtccattaggagatatatgggatttagtgaatttttacccaatgaacaaaacctggctttgaaattggttgtataaccttcttatttcaggatcaggctgatcagagatgccacacataccttctgccattggttgctatgcaga

SEQ ID NO: 207081 - DNA, 458 bp, Homo sapiens
gagtttgataatttattgatttgtctcctggaacagtggcataaggagtttgaagtgaccaactggtatagttacttcttggtggaagtcttcctcaactaggacccagaatcyctaatccagcagagcctaagatttcactggtgaaaaacacaacttctttaattgtatcgctgggagtgatggggagagagacaaactttactcctgtacttcatatccttggcttccctattgtagatattatggatacagaaaaatatgcaagtgattggaatgtgtatactacatcctggaacaaagctccccaatctcacacagtactgtcaccaagctgacccttttgctgaactgttaacacataatgttactgttgtattaggtttgctgtttctggataatgaggtaggatatatagaagtccttagataatggttctgtcagagcactgtgataag

SEQ ID NO: 207082 - DNA, 458 bp, Homo sapiens
gagtttgataatttattgatttgtctcctggaacagtggcataaggagtttgaagtgaccaactggtatagttacttcttggtggaagtcttcctcaactaggacccagaatctctaatccagcagagcctaagatttcactggtgaaaaacacaacttctttaattgtatcgctgggagtgatggggagagagacaaactttactcctgtacttcatatccttggcttccctattgtagatattatggatacagaaaaatatgcaagtgattggaatgtgtatactacatcctggaacaaagctccccaatctcacacagyactgtcaccaagctgacccttttgctgaactgttaacacataatgttactgttgtattaggtttgctgtttctggataatgaggtaggatatatagaagtccttagataatggttctgtcagagcactgtgataag

SEQ ID NO: 207083 - DNA, 416 bp, Homo sapiens
atacacattcctttttaagaatctctgtaccagatgacctcacagccgacttcttcctrattataaagttctttcaacattgtctccaagttgtcagggtgtaagtgattctccttagaagaggaaaaacatgatacaagccaacacactactctgtattataattacctccaaatttcataatttctgttgtacatttaaacttttacaatcagataattgttttgccaaacaggcatacttaacttacctaatgcttagtttaacttttatgttagttaaaataattatacattatttattattagatacagtgtctaaaccctgtatagcacacaggtcttaatatgttgagggtcccttgaaaagaaataagttgatcatcagattatctctactgccatcatttcctactg

SEQ ID NO: 207084 - DNA, 519 bp, Homo sapiens
ttagttaaaataattatacattatttattattagatacagtgtctaaaccctgtatagcacacaggtcttaatatgttgagggtcccttgaaaagaaataagttgatcatcagattatctctactgccatcatttcctactgtatacgtttgtcattaagcacagaactcagttctagacataccctctcattttaatggatattttgttaggattaccctgaaacgtagtactccgttcaatagtctgaaagaaaatctaaatgttatctcctctacctagaatcataktacttaaactaccaatataacacactaatattaaggaaaaacaaaataatttattattcaaatatttttctttatatatgtagatgcttgggcatttgtcaacataatgaaatcaccagatttttgcagataatgaaagaatcactgtgaatgtgacaattgcaaatgcagatagatgcaggtgctttagattgactaatcaaatgccacaagcgatattgctattggt

SEQ ID NO: 207085 - DNA, 457 bp, Homo sapiens
tatgtcctatttttgcaatatcttaggattttaaaatatcactctgttttgaaatgtaaattagcacatattggtaagagaggaatggattttgagttatatatgggccaaaacgctaatattcaaaccatatggttctaataatccaaattggaatattcrtgttttagtggaaataactggatttacttagaatcatagagacatatcaatttagggctcccagggaacttagataatatcataatctagatgatgaaatagattaggtcatttgcctatgttaaatacttaatgaaagacatagctgtcccatagtttattacaaaataaaaatgaaaccactacccccaccctccaaaaattatgtgttgtaatacaggtatcaattccagaggtcatgcacagaatcaataattagaggaaaacaaaagctatgcatcaaagatgagctatt

SEQ ID NO: 207086 - DNA, 457 bp, Homo sapiens
tatgtcctatttttgcaatatcttaggattttaaaatatcactctgttttgaaatgtaaattagcacatattggtaagagaggaatggattttgagttatatatgggccaaaacgctaatattcaaaccatatggttctaataatccaaattggaatattcgtgttttagtggaaataactggatttacttagaatcatagagacatatcaatttagggctcccagggaacttagataatatcataatctagatgatgaaatagattaggtcatttgcctatgttaaatacttaatgaaagacatagctgtcmcatagtttattacaaaataaaaatgaaaccactacccccaccctccaaaaattatgtgttgtaatacaggtatcaattccagaggtcatgcacagaatcaataattagaggaaaacaaaagctatgcatcaaagatgagctatt

SEQ ID NO: 207087 - DNA, 495 bp, Homo sapiens
tcacactaaagggcaaaccaaactacggtttggaatgatggaatggatgtgtgtgctgtcacctcctttagcataaaatggaagcagggatatcaggaatgaatttcaccgagaatgatattttcagaagcatcatgagagtgcagcaggggaagagagaggaaccctgcattgggaagaagcttacaactgacactgtatacagctctggaaaagtaaagtaaaaagtgtgtgtcctgagaaaacttccagctattccggaacatgtccttggccccttctctacacgaacgtcctgcaaacagcctgtcaaggaagaatttattaaaagatgaattatgaaaaaagaaatgaacacaggatctgcagaataataatcagaaaktagctggcacaatataaaaagaccttgctagggaaaatcggagcaagactaagggacaatagtaaaagagggacatgtactaggaaaacattgccataaagaagaacaaa

SEQ ID NO: 207088 - DNA, 371 bp, Homo sapiens
gagaaagaaagaagtgctcttcagggcaatatctataaggragtgagaaaaacagaattggtcaaaggcagaagttatagatgagtcacaaaaataacaggtttcactagatcccacaagaaacaatggcactgagaaagcccgccctttagattgtcctaatgtgatataaggggactgagctgggtctttatagcccccacattaaatgcaggctgctctcagggggaaatggaactttgagtaaggtggctctcatcaactcagggcaagtccatgagataaactcagctgagagttttcagctgtcaattcccgcagcagctgtggagatggatgtctcagtcctgcaaggggaagaggatgggtgg

SEQ ID NO: 207089 - DNA, 371 bp, Homo sapiens
gagaaagaaagaagtgctcttcagggcaatatctataagggagtgagaaaaacagaaytggtcaaaggcagaagttatagatgagtcacaaaaataacaggtttcactagatcccacaagaaacaatggcactgagaaagcccgccctttagattgtcctaatgtgatataaggggactgagctgggtctttatagcccccacattaaatgcaggctgctctcagggggaaatggaactttgagtaaggtggctctcatcaactcagggcaagtccatgagataaactcagctgagagttttcagctgtcaattcccgcagcagctgtggagatggatgtctcagtcctgcaaggggaagaggatgggtgg

SEQ ID NO: 207090 - DNA, 610 bp, Homo sapiens
tacactttaactaaatagatgctttttggtagcaatggctcaattaatagtcttcatgtttctttctgtgtttgctttagcccttggagtttagcacctttggtgcgaaacaaatgtataatcatggcagtaagtccaaaattttcctttacctgcagaaccagcttaacattctatattattgaaattatatagtagtataaacatgaatagaaagctacttaaactggaaccacagaatagttctttaaacaagctcaaagcacatcaccattattcttttccaatcattatttayaaagtttttgttattatacttgccacactaaggatatataatgacctacacatttcagtacagtaaagaataaacattagttgccttaagacctttttagaaatagtttttttcaacaaacccgtttggaaaaaaacatgtatcttaaaatacaaacttcagagttccatttctacttttggcagactctgtttcaattacctataagcctaagtaattcatataaatttcttcttcttcattaacattgagcacctgagaaaaatcatataaggctttcagaatccagattttcactagataaatggcaaa

SEQ ID NO: 207091 - DNA, 610 bp, Homo sapiens
tacactttaactaaatagatgctttttggtagcaatggctcaattaatagtcttcatgtttctttctgtgtttgctttagcccttggagtttagcacctttggtgcgaaacaaatgtataatcatggcagtaagtccaaaattttcctttacctgcagaaccagcttaacattctatattattgaaattatatagtagtataaacatgaatagaaagctacttaaactggaaccacagaatagttctttaaacaagctcaaagcacatcaccattattcttttccaatcattatttacaaagtttttgttattatacttgccacactaaggatatataatgacctacacatttcagtacagtaaagaataaacattagttgccttaagacctttttagaaatagtttttttcaacaaacccgtttggaaaaaaacatgtatcttaaaatacaaacttcagagttccatttctacttttggcagactctgtttcaattacctataagcctaagtaattcatataaatttcttcttcttcattaayattgagcacctgagaaaaatcatataaggctttcagaatccagattttcactagataaatggcaaa

SEQ ID NO: 207092 - DNA, 413 bp, Homo sapiens
ttcactatgcacataaatgagatcataaaatcaagactttaaaggtagaatagggaattatacaagtattgattcaagtcctggctctatcatccaaaaattgtgtgaccttatttgaaagcattctactgattcctggcctggcctagaagttcaaagaacaccagagtaggtaagggaaattctgcttttaacaattttcttamgtggttctgaccatctgaaataacaaagcataaatagaacactggtgaaacatatagaggaaataggactatactactttttttctagtagttatatgtcttcagtctacaaccaccagaatttttatgatcctctctgtcatctagctattatctatgtattatctaactctatctaattagcagtaagaacattttcccagataa

SEQ ID NO: 207093 - DNA, 413 bp, Homo sapiens
ttcactatgcacataaatgagatcataaaatcaagactttaaaggtagaatagggaattatacaagtattgattcaagtcctggctctatcatccaaaaattgtgtgaccttatttgaaagcattctactgattcctggcctggcctagaagttcaaagaacaccagagtaggtaagggaaattctgcttttaacaattttcttacgtggttctgaccatctgaaataacaaagcataaatagaacactggtgaaacatatagaggaaataggactatactactttttttctagtagttatatgtcttcagtctacaaccaccagaatttttatgatcctctctgtcatctagctattatctatgtattatctawctctatctaattagcagtaagaacattttcccagataa

SEQ ID NO: 207094 - DNA, 519 bp, Homo sapiens
tctggtgctgtgatgtgatgataatttgtaggtgttttctttggttaggaagcaaatgtactgtgtgcacagaaagagcaatgaaattttgtaataaaatgtgtggagcattgtaaattaaatttgtttttccctagctagagcaatcagggaagactaaaaaataaaggrcatctaaattgggaaaaaagaggtcaaactatctctttttgctgatgatatgatcttatacctagaaaactctaaagactcctccaaaagacttctagatctaaaaatgaactcagtaaagtctcaggttataaaaccaatgtacacaaatcagtagcattgctatatgtcaacaatggccaagttgagaatcaaatcaagaactcaaccgcttttataatggctacaaaaatatctaaaaatatgcttaaccaaagagatgaaagatctctacaaggaaaactacaaaacactgctgaaataaatcgtggacgacacaaaaaactggaaatatatcccatactcatg

SEQ ID NO: 207095 - DNA, 519 bp, Homo sapiens
tctggtgctgtgatgtgatgataatttgtaggtgttttctttggttaggaagcaaatgtactgtgtgcacagaaagagcaatgaaattttgtaataaaatgtgtggagcattgtaaattaaatttgtttttccctagctagagcaatcagggaagactaaaaaataaagggcatctaaattgggaaaaaagaggtcaaactatctctttttgctgatgatatgatcttatacctagaaaactctaaagactcctccaaaagacttctagatctaaaaatgaactcastaaagtctcaggttataaaaccaatgtacacaaatcagtagcattgctatatgtcaacaatggccaagttgagaatcaaatcaagaactcaaccgcttttataatggctacaaaaatatctaaaaatatgcttaaccaaagagatgaaagatctctacaaggaaaactacaaaacactgctgaaataaatcgtggacgacacaaaaaactggaaatatatcccatactcatg

SEQ ID NO: 207096 - DNA, 519 bp, Homo sapiens
tctggtgctgtgatgtgatgataatttgtaggtgttttctttggttaggaagcaaatgtactgtgtgcacagaaagagcaatgaaattttgtaataaaatgtgtggagcattgtaaattaaatttgtttttccctagctagagcaatcagggaagactaaaaaataaagggcatctaaattgggaaaaaagaggtcaaactatctctttttgctgatgatatgatcttatacctagaaaactctaaagactcctccaaaagacttctagatctaaaaatgaactcagtaaagtctcaggttataaaaccaatgtacacaaatcagtagcattgctatatgtcaacaatggccaagttgagaatcaaatcaagwactcaaccgcttttataatggctacaaaaatatctaaaaatatgcttaaccaaagagatgaaagatctctacaaggaaaactacaaaacactgctgaaataaatcgtggacgacacaaaaaactggaaatatatcccatactcatg

SEQ ID NO: 207097 - DNA, 634 bp, Homo sapiens
gcttctttgtcagatttgttgcaatgttgaatttaataaaatgttatcttaaaaattctggaaaatatagaataaacagatgctgttcaataatgtatgcttatggcaaatccttyacagattaccctcctgtaacccatattgttcatcatttactagttaaaacatatcagaaactctggtttgaaatgggtttcagacattctgtcttggatttgatggcttcagtgctgtagaattggcttatgttcatgtttcattttaagctaagatatagctcgaggacacatagtgaaaagttaggtcggaatggagtttgtaccttacgtgatatatcttacccactaatgactgctgggtttcatgtggcatgctcagtttccatgatgcttaaaactctgcattttcaaagaacacatacatgctgacaaaaataaaatcagtgtggaattttaaaataagtctgggatcaacatgcctatgagagaggttgccttaattccagtccactatcattccccaccaccttgatggcaatgaatccataaatggaatgctttcattatacctcctaggagctataagtctagcatattcttgagttgttggatttttcctctgatgttgctgttaa

SEQ ID NO: 207098 - DNA, 552 bp, Homo sapiens
ctctgcattttcaaagaacacatacatgctgacaaaaataaaatcagtgtkgaattttaaaataagtctgggatcaacatgcctatgagagaggttgccttaattccagtccactatcattccccaccaccttgatggcaatgaatccataaatggaatgctttcattatacctcctaggagctataagtctagcatattcttgagttgttggatttttcctctgatgttgctgttaattagactgttttattccattattatttatgtaaaagtattaaccttttttggagctcatttccccatcctgaaatttgaggaaagttttttttcaaatgaaagtaactcgtgagttcctagttaatatttaaaaagagagctttaataaaataatacataatcctttcaagaatgtacaattttgagcctaaactattcctatcattaagaatttacattctctgaaaaagaacaattttgaaaataagcatacttagcaaagaagaaacaaggtgtgtatgtctgctagtgatattttacaagttaaatatct

SEQ ID NO: 207099 - DNA, 670 bp, Homo sapiens
ccaggagaagaatgaaagggattgctaaatgctctagggaaggaagtcttcagacacatctgaggtgggtaaacttctgactgtaataatttccaacgtaggcatagcttgttctcctgtttacaaaaaagaagtgaaaacactagaaaataggtgttgagggggtggggggcaaagtgagggagagcattaggacaaatacctaatgcatatggggcttaaaacctggatgatgggttgatgagtgcagcaaaccaccatggcacatgtatacctatgtaacaaacctgcacgttctgcacatgtatcccagaatttaaagtttaataaatacattttaaaaaaagaaaataagtgttgaatagcacagctcaatctgtatctggtagtaaaaataatccactcaagggtgtcatgggtactgagttgtatatcataattaaagtgcttagaccaatgcctggtacakttagtgctcaacacatactggatttaatttatttatacatacagacacagctagtgaaagatagagatatatattacatgtatatgccatttatgaagggaaaataaataaatcacagaaatctacaaaagaaatttacacaactttgcataaggctagaaatgtttatattttctgttttcttttttaatttataattaa

SEQ ID NO: 207100 - DNA, 474 bp, Homo sapiens
ggttgttttgaacattaaaacagtataaaatgggtatacaattttcagcacacagaaaattttttaaaatggtagctaattctattttacctttttggtgagaaaattatcaggcaatcaaacattaacattcttaagtcagatgmaataaagattttttaaaatgcttatcatttgggtccttctccggcctagcttttaacgcaaaattgtaaacattccatggcaaagcttggcctagtctcattctgcgattgcttctgcattcagtatcaagtaatttgttgtttatcccttcctattactgcattagctccatatcttgcctcaagcctggttttgcctttttatattatgtaccttaaggaatctctcagttccaatgttagacactgacagtagagttggcaaaagctgcagcaggggcatagagatcagatgagtttcgaattgaaaggggctagaaggttagag

SEQ ID NO: 207101 - DNA, 592 bp, Homo sapiens
tcagttcttagatttaagtctttgatccatcttgagttgatctttgtataaggtgagagatgaggatccagtttcattcttccaaatgtagcttgccaaatatcccagcaccatttgttgaatagcgtgtcatctccttatcttatgtttttgtttgctttgttgaagatcagttggctgttaagtatttggctttatttctaggttctccattttgttccattggtctatgcacctatttttataccagtaccatgctgttttggtgactatggcattgtagtatagtttgaagttgggtaatgtgatccyctgatttgttcttcttgcttagtctttctttggctatgcaggttcttctttgtttctatatgaattttaggattgttttttctagttctgtgaagaatgatggtggtattttgatgggaattgcattgaatttgtagattgcttttggcagtatggtcattttcacaatatttattctaccaatgcatgagcgtgggatgtgtttccatttgtttgtgttatctatgaataaattactttttaattttacttaatttaaatttaagtagccacatgtaga

SEQ ID NO: 207102 - DNA, 592 bp, Homo sapiens
tcagttcttagatttaagtctttgatccatcttgagttgatctttgtataaggtgagagatgaggatccagtttcattcttccaaatgtagcttgccaaatatcccagcaccatttgttgaatagcgtgtcatctccttatcttatgtttttgtttgctttgttgaagatcagttggctgttaagtatttggctttatttctaggttctccattttgttccattggtctatgcacctatttttataccagtaccatgctgttttggtgactatggcattgtagtatagtttgaagttgggtaatgtgatcctctgatttgttcttcttgcttagtcttkctttggctatgcaggttcttctttgtttctatatgaattttaggattgttttttctagttctgtgaagaatgatggtggtattttgatgggaattgcattgaatttgtagattgcttttggcagtatggtcattttcacaatatttattctaccaatgcatgagcgtgggatgtgtttccatttgtttgtgttatctatgaataaattactttttaattttacttaatttaaatttaagtagccacatgtaga

SEQ ID NO: 207103 - DNA, 448 bp, Homo sapiens
aatccaaactcgttagcatagcgaattctcctgaccctgaccctacctagattctagacttgatgttcagctcaggtgtaacttttgaagccttccttaactcttctagcaaaagtgatagagccacctctttcgtgttgtcatggttttgtttgcactgttacagtaatcccttcttatgtgtagttttgctttccactgtttcggttacctgcagtcagctgcagtccaaaaacaggggagtctagtacaataaggtattctgagagagtgagagagaccacatttacrtaacttttattacagtatattgttataattattgttgttaatctcttaccatgcctaatttacaagttaaactttatcatcggtatgtatgtgtaggaaaaaaaaacatagtacagggtcccacatccacaacccaaatcgatgggttcagtcaact

SEQ ID NO: 207104 - DNA, 406 bp, Homo sapiens
gaattctatggagttctgaaaaaatgacgttagcacagaaatattaggatgcataragaatcagaaaaaaaaaaatctaatccatgttccacctgtaacctgatgaggaaaccatcattcgctactgttgtcctgtggtgcttcagaagaaactaatgccacccatgctgcatctgcaaagtcatttgtactgagaacttcagtgatcaaatagggtgaagtcttccccccactgctattgcagttgaagcccagacacctctgccaccacccacacatggattgcaggtaaggaggaacttccacacagagcccattacctcatgttgctgatatctgattccaagttttgtacaggcacattttagactaagccacctgcctgaatgctaaggagactgcattt

SEQ ID NO: 207105 - DNA, 406 bp, Homo sapiens
gaattctatggagttctgaaaaaatgacgttagcacagaaatattaggatgcatagagaatcagaaaaaaaaaaatctaatccatgttccacctgtaacctgatgaggaaaccatcattcgctactgttgtcctgtggtgcttcaraagaaactaatgccacccatgctgcatctgcaaagtcatttgtactgagaacttcagtgatcaaatagggtgaagtcttccccccactgctattgcagttgaagcccagacacctctgccaccacccacacatggattgcaggtaaggaggaacttccacacagagcccattacctcatgttgctgatatctgattccaagttttgtacaggcacattttagactaagccacctgcctgaatgctaaggagactgcattt

SEQ ID NO: 207106 - DNA, 398 bp, Homo sapiens
ttagcacagaaatattaggatgcatagagaatcagaaaaaaaaaaatctaatccatgttccacctgtaacctgatgaggaaaccatcattcgctactgttgtcctgtggtgcttcagaagaaactaatgccacccatgctgcatctgcaaagtcatttgtactgagaacttcagtgatcaaatagggtgaagtcttccccccactgctattgcagttgaagcccagacacctctgccaccacccacacatggattgcaggtaaggaggaacttccacacagagcccattacctcatgttgctgatatctgattccaagttttgtacaggcacattttagactaagccacctgcctgwatgctaaggagactgcattttgtgttctgacttttatgctg

SEQ ID NO: 207107 - DNA, 515 bp, Homo sapiens
caataagcaagctctttattttaaaaggagacattacctcattcttaaagattgtttgctgcaaatgtaaccctgaaaaatggcctgggtagagagctgtcagtatattgcatggttggcataaccagtaagaatttgcagagatcccaagtcccatttcagrttgcctttctcaacaaaatcatgagggcaaatatttttctgtgtgtcaaaagcgttgaattgaaatttttctgcttggaaattctgtggttactgtagaccttttgtgtctccagctcatcttgtgtgtggttggtataaacaataactaaattttatgcatacatattgacttgtctgtcccatttgtctgctgtttggatggaaactttaggaggtctggaggataaggtatcttgccttggtgaaaggaaagattccggcacatatgtgtgtccccttacggacaatgtgaatgaatattggcaactagtactcatcttatttcacagctttatttatacactgaattc

SEQ ID NO: 207108 - DNA, 514 bp, Homo sapiens
gaattcaccacttgtataacaaacaataagcaagctctttattttaaaaggagacattacctcattcttaaagattgtttgctgcaaatgtaaccctgaaaaatggcctgggtagagagctgtcagtatattgcatggttggcataaccagtaagaatttgcagagatcccaagtcccatttcagattgcctttctcaacaaaatcatgagggcaaatatttttctgtgtgtcaaaagcgttgaattgaaatttytctgcttggaaattctgtggttactgtagaccttttgtgtctccagctcatcttgtgtgtggttggtataaacaataactaaattttatgcatacatattgacttgtctgtcccatttgtctgctgtttggatggaaactttaggaggtctggaggataaggtatcttgccttggtgaaaggaaagattccggcacatatgtgtgtccccttacggacaatgtgaatgaatattggcaactagtactcatcttatttca

SEQ ID NO: 207109 - DNA, 391 bp, Homo sapiens
ggcttctcaagccacacttacttacagttctttgtatatctttccagaactattccattcactstgaactatgtgtgaatcgcttttgaaagagtcagacacaaatgcaagcataccatatgctctactgcactttatgcactggacaatatctatttgaaatcactttccattcataggaatctgcttcattcctttttaaaattattatttaaatacattcaattgtgtatatttaaggtatacaacatgatgttataagttacatacaggcagtaaaatgataactatagagaaacaaattaacatatccatcatctcacatagttatccatttttgtggtaagggcagctaaaatctaatcaatttgcaaaaatcccagatacaatt

SEQ ID NO: 207110 - DNA, 403 bp, Homo sapiens
tattaagaaattggcttctcaagccacacttacttacagttctttgtatatctttccagaactattccattcactgtgaactatgtgtgaatcgcttttgaaagagtcagacacaaatgcaagcataccatatgctctactgcactttatgcactggacaatatctatttgaaatcactttccattcataggaatctgcttcattcctttttaaaattattatttaaatacattcaattgtgtatatttaaggtatacaacatgatgttataagttacatacaggcagtaaaatgataactatagagaaacaaattaacatatccatcatctcacatagttayccatttttgtggtaagggcagctaaaatctaatcaatttgcaaaaatcccagatacaatt

SEQ ID NO: 207111 - DNA, 404 bp, Homo sapiens
ttacgtatttctagaggcatacatgattaatatatgtgtgttaaaagtataaattaaacaacgaattgaaaggtagcttacaagaactgtgaggggtctgagattttactctgctgcaagctaacaagtcagcttgccacaatgtcagggatgctgacagaagatagaagacctcctgagttagagtcaaaaacgattactcacagcaaaagcagtagccggagtgcaaacttggttgcattggtttctggagcaccagttctgcagggcagcttaggtggtcctagacctatgcttgcacaaacatgggttgtgtcatgggagacgaatgtgsaacctagaaaatgtaccactgacagcagctgtggtctgaaaggagagcttacagcatctctcaacattgc

SEQ ID NO: 207112 - DNA, 408 bp, Homo sapiens
aactgttttgacaaagttgtaaaagtccaacagcgataatctttccaacaaatggcactacagcaactggacatggaaagtatgaaacttgacccaaatctcacaccctagacaataatcaaaaarggacactgaactgaagtgtaaaactgtaaaacttctaaaagaaaataggaggaaatctttgagacttcaggctggccaaggacctcctagatatacaaaaagcatgatccataaaagaaaaaaattgacaaattggaccttatgttttttaagtaaaaacccttgttctgctggcaatgctaccactactattagccccttttctgccagaacaaacccctggagcacattttaaggaatataatgaatcacatacccaacttgtatccagaatacataaag

SEQ ID NO: 207113 - DNA, 408 bp, Homo sapiens
aactgttttgacaaagttgtaaaagtccaacagcgataatctttccaacaaatggcactacagcaactggacatggaaagtatgaaacttgacccaaatctcacaccctagacaataatcaaaaagggacactgaactgaagtgtaaaactgtaaaacttctaaaagaaaataggrggaaatctttgagacttcaggctggccaaggacctcctagatatacaaaaagcatgatccataaaagaaaaaaattgacaaattggaccttatgttttttaagtaaaaacccttgttctgctggcaatgctaccactactattagccccttttctgccagaacaaacccctggagcacattttaaggaatataatgaatcacatacccaacttgtatccagaatacataaag

SEQ ID NO: 207114 - DNA, 516 bp, Homo sapiens
acttggtccagctctgtaggacagtggtgatcgaggtcgaaaacgtctacttccaggacaagtcgcttagaccttggggcaatttatattttagagatgcccagacagtagctctgatttaggatttacctgctccagctgctactgactccttgctagtccaggttgagtgtagggaacagaaaccatgccaggtactttaagcaggaagggatttaatacaggcacttaaagatttacaaaatcatctgaagaggctgatggctcaattccagtctgggtctccaggaatgactaccagaataccaaggaacaggaaattaactccaggaacacgttgtcatagctgtgacccagggaatcgggaagatgggattagggagctgccagtgcccgtggcgctaaatcctcagtcgtagagacagctgccttttgacacagaaagctgatggctggccatggggatgctgaatccagccactgctgcractggagcaggaggctggacactggtct

SEQ ID NO: 207115 - DNA, 547 bp, Homo sapiens
gaattctttaactgtgatgataatgcctgacagaatgaatggaaattacgtgccagaaacttcacatacttgtttctgttccttacaacaatcccatgaattagtttctgtcattctcattttatagaggaagtaacagatatttagaaagtttagggaatgtggccaaagttacattagctattgagtgcttcaatggggtttacacccaagacagactgaaatcaaaccgaaccctctcctccctaccctgagccatgctgagacaagcagtggagcactgaggggttcgagcagaccctgaggacctgctctgtggactgcccagctgggccasgcagaggccagaagataagctgggagacacttgtccacagccacgtccgcttctctgcactggctggtccaaaggcccctgcctatgaaaagccagctaggccaagggttcgtctgaggatgccaatgcaggcctttccattggcctattttcttcaagacttaatgaagccttcagaggtttctgcacaccctacggcttagagcaggc

SEQ ID NO: 207116 - DNA, 547 bp, Homo sapiens
gaattctttaactgtgatgataatgcctgacagaatgaatggaaattacgtgccagaaacttcacatacttgtttctgttccttacaacaatcccatgaattagtttctgtcattctcattttatagaggaagtaacagatatttagaaagtttagggaatgtggccaaagttacattagctattgagtgcttcaatggggtttacacccaagacagactgaaatcaaaccgaaccctctcctccctaccctgagccatgctgagacaagcagtggagcactgaggggttcgagcagaccctgaggacctgctctgtggactgcccagctgggccacscagaggccagaagataagctgggagacacttgtccacagccacgtccgcttctctgcactggctggtccaaaggcccctgcctatgaaaagccagctaggccaagggttcgtctgaggatgccaatgcaggcctttccattggcctattttcttcaagacttaatgaagccttcagaggtttctgcacaccctacggcttagagcaggc

SEQ ID NO: 207117 - DNA, 525 bp, Homo sapiens
tatcccacaaggactttaaagcagccatcatgaaaatgcttcagtgagcaattctgaacacactgaaaacaaatgaaaacataggaagtcttagcaaaaaaaatagtgatataaagaagagccaaatggtaattttagaagttaaaaataactgaaagactcattgaatggattcaacagtagaatggaaaggacagagaaaacaatcaggaaacttgaagataaagcaacagatatcacccaatctragcaagagagagaaagagactgaaaaaaagaacagaagcttgaggcctgtagggcacaacaaaagacctaacattcatgtcatgagagtctcagaaggacaggactaagaatgtggggctgaaaaaatattcaaagaagcagtggttgaaattctcccaaatttggcaaaaagacataaacctgcatattcaagaagctgagttaactcctaagaggagaaactcattcataccaagacacatcatgagcaaactcttgaaaactaaaggcaaataa

SEQ ID NO: 207118 - DNA, 623 bp, Homo sapiens
ttgttcactgtgacccaacatgtagaatagcacctgacatgtcctagatgtgcaatactctcttcttaagtgagtaagcaagggaaattcaatttgaaagtagttcacctgacaagggcaatgcttaacrcacaccccagtgtgagcatacagacacgcatgcccaccaacagccagcattcatggaacacttatattgccccaaacagcactatgatgtaggcaccgctgccatcaccctttcactgaggaggaacctgagacttcccacgtgaacgctgtgccctgtatccaggggaattacagaaagtctagacctgcactgttccagacggtggccactgaccaggtgcagccaacagtggctagttcacatggagataagctcaaagtgtaaaatatgcactgcatttcaaagacggtataaatacaagtaaaggaccacattaataagtgtttatgttaaacgcacgtctacatgatcatttttggatatgttctgttgaataatcagtttctttttccttttaaaaatatggctcctagaaaatttaaaatgacatcgattgctggcgccctacgtctcagatagcgctggtttaaagtgagtcactgatcactgg

SEQ ID NO: 207119 - DNA, 623 bp, Homo sapiens
ttgttcactgtgacccaacatgtagaatagcacctgacatgtcctagatgtgcaatactctcttcttaagtgagtaagcaagggaaattcaatttgaaagtagttcacctgacaagggcaatgcttaacgcacaccccagtgtgagcatacagacacgcatgcccaccaacagccagcattcatggaacacttatattgccccaaacagcactatgatgtaggcaccgctgccatcaccctttcactgaggaggaacctgagacttcccacgtgaacgctgtgccctgtatccaggggaattacagaaagtctagacctgcactgttccagacggtggccactgaccaggtgcagccaacagtggctagttcacatggagataagytcaaagtgtaaaatatgcactgcatttcaaagacggtataaatacaagtaaaggaccacattaataagtgtttatgttaaacgcacgtctacatgatcatttttggatatgttctgttgaataatcagtttctttttccttttaaaaatatggctcctagaaaatttaaaatgacatcgattgctggcgccctacgtctcagatagcgctggtttaaagtgagtcactgatcactgg

SEQ ID NO: 207120 - DNA, 604 bp, Homo sapiens
agatggaaagagagactgagagtgagggaggggtctcccatcagcaaataagggttccagcccgaagtgacacacccgactcccacagacagctcagtggcagaatggtttgtatggaccagcccaaccactaacagcttcagtgacacagagtcattgtaagcgaaggtctgaagccagggtgcttgagggacctagctagagaaaactggaagcttctgaaattgtgtctgtcaatatgaaactctcacctcccgcagcagcaggcagttgtgcaccccactcctacctggccrtggcttcctggggcctggggagggttccctggggtcatcccacagcagatctctctctcaggctgaggaagggatgctgagacatggatcctgggaaaactatttttcctatacagggcccagtgatttcactacaagaggtaggtctgagacaactgaaaatagacatccaccagaaccagacatccatagcagcactattcataatagtcaaaaggtggaaatgatcgaaatgtccaccaacagacaaatggagaagtaaaatgtgttttatccatacaatgttcagccataaaaaggaaccaaca

SEQ ID NO: 207121 - DNA, 608 bp, Homo sapiens
atgcaaaatatctgcatcagatactcctaatctaccacttataagaagcaagcagcagggtgactgtttataaaatacttttgaacattcttggaaaactaatgagtaagtaagtttaactggttgctgctaatgctgctgaacaaagtggtttaaaaaacaaaacaaaaccagatgagctcagagctcaggaattcaaattccaactcaagcactgcataaataagctgagagcttctacttatgccctcaaagagacccttatatcctgtagccacacgattgagattgctgaaaatcaaaccacggatatcatcctgaaactgtctcaattacaacataagttgaattctcagccttgcagaatatcaactgtaaaakttaggcatttttacagttgggcaactataaaagagggcattgatttggaataaattggaatcggcatgttagaattgagacatgtgggaagatcctgatgaaatttgggtcattaagcccttaaactctgatgagacttctttgccagtgcttcctccccgtgaggggtagcagcctctccacaaccttctccttctaagtggattaaccctgcattgcccaaggaa

SEQ ID NO: 207122 - DNA, 562 bp, Homo sapiens
attcttccattaaagaaatgttttacatttgtgctgtccaatgtggtagccactggccacatgtggctgctgaacacttaaatttggctagtgtgattgagggactgaatttatactgttcgttaattttaatgaattctaatataaataaaaatagccacaccaggctagtggctaccacattaaacagcacagattacagaatgtttatgatgttgatgtgggatgataatagatgtccaaagggccctgctgtccactgacatgtttgaatgtttgtgcttargcagatttgaccaattaaaactgccttaggagtacatattacttaaggttttccagagaaacaatacccaaaggatatgtgtcctattatatatataatatattattttatatatatatatatacacatgcacatgtgtgtatgtgtgtgtggtgtgttttaggaaaactacaactactctattcaaactagttcagtgttttcttggttaagaaaacactgtgggttttgttactgaaagttactgaaaggttttgttactgaaagtgggttctt

SEQ ID NO: 207123 - DNA, 417 bp, Homo sapiens
gcttagcacagtggggtgttgtgacaactcactgagtattaactatttggtaggaacgatatattgggatattaatttcattttgtgctttctgtattttttcttttatcacattctccttccaatgatgtatycctgtacatggtgttttatcactacagagaaattttgcatggcagagcaaaatctttatgcagaggacttcccagcatggctttgaaggcttaagagtctatcagttttctaagagagaagagaggaaagtgtgctttgagggaacaagacccagggagggttccctcaatcataggacaaagatgtaaatccacaagttgcttgaatagtagtggccaatactactctcttgcagtgctccaaggaccttggtgtaagaggaatttgttgaacctattaaag

SEQ ID NO: 207124 - DNA, 588 bp, Homo sapiens
aagtctagactgaggtggtttcagataaagatgaggaacttattaggaactggtgactcttgctatgccttagcaaagagactggtggcattttacccctgctctagagatctgtggaactttgaacttgacagagatgatttagggtagctgatggaagaatttctaagcagcatagcattcaatatgaggcctggctgcatctaaaagcctatgttcatttttataagcaaataaatgacctgaaactaaaacttatatttaaaagggaagcagagcataaaaatttggaaaatttgcagcccaattatgtggtagaaaagaaaaactcattttctggggaggaattcaagactacagaaattggcataagtaatgaagarccaaacgttaatagccaagaaaatggggaaaatgcctttagggcatttcagagacctccgtggcagcccctcccatcacagggccagaggcctaggagggaaaaatgctttgtgggactgaaagtctcactgccctctgcagcctggggacatggtgccatgtgtcccagctgatccaattccagctgtggctaaaaggggccaa

SEQ ID NO: 207125 - DNA, 522 bp, Homo sapiens
aaatagtcatttagatgaaacttgttttgtggctgacattgggaaattaaatatcctttatagtgcataatcattttgttccccatattattttgggtaactataattaaaccattgttaagtatccgaaacacccaaggaaagaggcactgataatgtggttggggaatggcataagacagatgaataatgaagcttagcagataagaagtaataatgtcaccttcattttttattgctatttttgcatggatagaaaattcacttcacctctcatattatatccctgtggcrttaacagtgatgatcaaaatcctgattgataaaagaggcacataaactttgctccttagatttctattaaaataatgaaaccttaggcatttcatttctaagctggtttgattgctaaaatactgtctataaatttggatgtggaaagtttaacatgaataacacttggaaaatgactatctcttcatatgtgggaataatgaaaataattcctcttggaataaaaag

SEQ ID NO: 207126 - DNA, 537 bp, Homo sapiens
gaattctttgcttttgttcattttctgtgggtgtcatgagtgcctattatattttctagattttttttcttcagggtttagaaagtgagcatttgggcttacttgggggataaagggactacttaagtgaaaacattaatagaaaggtggaaaaatattttaattattttctttcaagcattatttgtcatatttaagaccccaggtgtgagctttgctctgctccccattgtgcaactgattaggggttatgcaaagttaagagtggagactgcaggagttattcttatgattttccagttgaaaatgctgtttagcactatatatttctaataaaacatgcaaaaggagagaaccacttgcttycaaaaagtcaagagccacttgcatccaaaaagtcaaaacatgaggtatgaaaaggtaagtcaagatggtatctaaacaattctgatcagccagatatctggaatcttttataatattgagagaatttgtatttggtattgttacggctgcaaatccatacaggcctgcggc

SEQ ID NO: 207127 - DNA, 458 bp, Homo sapiens
ctgttagtgaaaaatctgctaggttctgaatcattggtgataataattattatagacttttaatttcttttcaagtttagtgtcattgttaatttaggaaagacaataatttatgtacttttgttttattatttatttgagtgaaaacakgtatcttctgtcacagattgcggtataattgaatgtgggtgtctcaacatcaacaataattaattagaaatgtaaatttcaaaaggactcaatcctaattagaaagtgatttccccctgcagtctgtctgtatgtcatataaagaaataatatctcatcaaataaacttgcacatataaatgtgtactgtgtacatatacactgcatagttgcataggtttatttaattaatactcaagcttagatcattggatttgctattctaaatatatttctgtaaatatttctaaatcaatgtacatggaagt

SEQ ID NO: 207128 - DNA, 347 bp, Homo sapiens
taggagttattactagcatcattttacrgttgagagtaatatatactagttgaaattcctatgcttttttgttttgttttgatttaattttggtttctcagtaatcttttctgaggctcaagttttgaaaacttcatgtaacaatgagacaacagttgtcaatgcttgaattaccagactggtcaggactaatgtggtcctagtgacctatgatatgttagttgtagtatgaaggcattatggaggaacattatggaaagaaatgaagagttaaaaaggattcttttctagaaaagttatattagaaatgtgtttttcttttactactactatattttgcatacata

SEQ ID NO: 207129 - DNA, 511 bp, Homo sapiens
catattaagcatgccagttttgcctttcttcacaaccttcagaattatctttcccctccttccactcacctcccaaaatatattaaattagagctctgtcttcttcagtctggaaatatttaagagaaagtaaacgtaaaaacatgagctttggccaggcacgaaggctcacacctgtaatcccagcactttgggaggccgaggcgggtggatcagttgaggtcaggagttcgagaccagcctggccagcatggtgaaatcccgtctgtactaaaaatacaaaaattagytgggcttggtggcatgcacgtgattgtgatcccagctaattgagaggctgaggcaggagaatcgcttgaacccaggaggcagaggttgcagtgagctgagatcatgccattgcactccagcctgggcaacagagtgagattctgtctcaaacacacaaagaaagaaaacgtgagctttctagacaccatgaacacaaatctcaagggaaaaaattccatgt

SEQ ID NO: 207130 - DNA, 535 bp, Homo sapiens
caggactcattggctagatttctaatttgtcaatattttgataattacagtgactacaggttaatatcagcaaagttayatttcacccccctcacccctgctgcttctcctcccccaataactgtctgttttcactcgtttagatgaatcttgagtttgttttgttaaatttcaaaccatttccagctggggattacattgattctaggaattaatttgagagcaataagtattccttcctttaattatcaaattcctttaattaacaaatatcaatggaattcctactatgtgctaggcaccgctctgtaagccagctctccagcaatgaacacggcacacacaaacctcagtaaccacagagctcaccctcttgttgagagattctgaaaataaaccagtaagtaaatcaaatatatagttagaagatagtgagtgttatatcagccagaaataatgaaaaaaattacttctatgttctaatgtttgtatttctttctaggcttcttgtctcatgtcatctatattctggctt

SEQ ID NO: 207131 - DNA, 535 bp, Homo sapiens
caggactcattggctagatttctaatttgtcaatattttgataattacagtgactacaggttaatatcagcaaagttacatttcacccccctcacccctgctgcttctcctcccccaataactgtctgttttcactcgtttagatgaatcttgagtttgttttgttaaatttcaaaccatttccagctggggattacattgattctaggaattaatttgagagcaataagtattccttcctttaattatcaaattcctttaattaacaaatatcaatggaattcctactatgtgctaggcaccgctctgtaagmcagctctccagcaatgaacacggcacacacaaacctcagtaaccacagagctcaccctcttgttgagagattctgaaaataaaccagtaagtaaatcaaatatatagttagaagatagtgagtgttatatcagccagaaataatgaaaaaaattacttctatgttctaatgtttgtatttctttctaggcttcttgtctcatgtcatctatattctggctt

SEQ ID NO: 207132 - DNA, 455 bp, Homo sapiens
gatatagttagattaatatctaccatgtttgtaagtgttttcattgcccttgttctttttgtttgtttttcactctttttctgtcttctctggttttaattgaggatttcatataattctattcatctcttctcttagcatataaattatacgtctttaatattgtttcaagttgttgagctaatgtttgcaatttacaaccaatttaagcttactttcaaataaccatgtacttcttcatgagtagtgcagttaccttataatggaagygttctcaatttctccctttttttcatataacatttttgttgttcatttcactcattcttaagctataattacccaataccctgttgctattactacttttgaaactgcgccccacagagttaaagaactcagtgactaacagaaattcttgagtttacaggatggccgataagaaaagaaacaac

SEQ ID NO: 207133 - DNA, 604 bp, Homo sapiens
atgctctatagattgatgatgataatgatgacttaaaaaaggtagtgccacagatttggacacttgaaaaatttgcagtagttttttttattttttttgagacggagtctcgctctgtctcccaggttggagtgcagtggcgccatctcggctcactgcaagctccgcctcctgggttcacaccattctcctgcctcagcctccygagtagctgggactacaggcgcctgccaccatgcccagctatttttttgtatttttagtagagacagggtttcactgtgttagccaggatggtctcaatctcctgacctcgtgatccacctgtctcagcctcccaaagtgctgggaatattaggtgtgagccacctcgcctgacctgcagcagtttttcaataggcaaaagtgttaagaaagttcatcatcctcaagtaagatccttcgatggaacaaagcctccatgtcacccatggaataacatgccaacaaacagtgcaagatttttttgatgactcaaaaaaaagaaaaaaagaaaaactagcttcctacacttctcactaagcacctgcaaatataaacacagagccttccatggttaaggatc

SEQ ID NO: 207134 - DNA, 586 bp, Homo sapiens
atgataatgatgacttaaaaaaggtagtgccacagatttggacacttgaaaaatttgcagtagttttttttattttttttgagacggagtctcgctctgtctcccaggttggagtgcagtggcgccatctcggctcactgcaagctccgcctcctgggttcacaccattctcctgcctcagcctcccgagtagctgggactacaggcgcctgccaccatgcccagctatttttttgtatttttagtagagacagggtttcactgtgttagccaggatggtctcaatctcctgacctcgtgatccacctgtctcagcctcccaaagtgctgggaatattaggtgtgagccacctcgcctgacctgcagcagtttttcaataggcaaaastgttaagaaagttcatcatcctcaagtaagatccttcgatggaacaaagcctccatgtcacccatggaataacatgccaacaaacagtgcaagatttttttgatgactcaaaaaaaagaaaaaaagaaaaactagcttcctacacttctcactaagcacctgcaaatataaacacagagccttccatggttaaggatc

SEQ ID NO: 207135 - DNA, 549 bp, Homo sapiens
tttttgtagacacgggatgtcgctatcttgctcaggctggtctcacactcctgggctcaagtgatcctcccatgtcagcctcccaaagtgctgggattacaggcatgagccaccgtgcctggctggggatttgcttgactgtttatttccgatctgtgcccayggatctatatttagttccacccttctctaagggcccagtgaactttggacctctgagcatgtattcctggtttggccaaagaccagcagctgtgctcgccttgttctcttgctttcctcatttgctctggaggtaaatccaccttgagaatgggcaggggacccccttgtgtactcacacaggggaaaacttggggtccacccatggcaggggttctcatcggaggcccgctccatccgccaagatgatttcagaaagctccccgtctgctgtttgtatcatccaaacggctggcttggggtttccaaatgtcctaaggatgttctaataatattcagttttctaagcctacacacgcacacatgaactccagaggtcccggctca

SEQ ID NO: 207136 - DNA, 549 bp, Homo sapiens
tttttgtagacacgggatgtcgctatcttgctcaggctggtctcacactcctgggctcaagtgatcctcccatgtcagcctcccaaagtgctgggattacaggcatgagccaccgtgcctggctggggatttgcttgactgtttatttccgatctgtgcccacggatctatatttagttccacccttctctaagggcccagtgaactttggacctctgagcatgtattcctggtttggccaaagaccagcagctgtgctcgccttgttctcttgctttcctcatttgctctggaggtaaatccaccttgagaatgggcaggggacccccttgtgtactcacacaggggaaaacttggggtccrcccatggcaggggttctcatcggaggcccgctccatccgccaagatgatttcagaaagctccccgtctgctgtttgtatcatccaaacggctggcttggggtttccaaatgtcctaaggatgttctaataatattcagttttctaagcctacacacgcacacatgaactccagaggtcccggctca

SEQ ID NO: 207137 - DNA, 415 bp, Homo sapiens
tagcagtttatagtttacaaataagccttatgcattttatctctgctcatacaaaaactccctggtatagacagtaggagaggggactcagtggcgacgcctggtctcctcaccatctctgcacagcctggctccagacctctctagagacagtaaagtcactttctccacagccaaagtcccaagaggaggcacttgccgttttgatccaagaagggaaatgcccttcaaatcctggcgtgaccttgcctggaatcttcacagccactcttggaggtagatattcttttgcccatttggcagagttggaagcttattgaggtttagtgaccagcccaaagccacacsgtgaggagtggcagagcaaggattcaagcccaagtctgcctttcttcagctacccatttccaaagaa

SEQ ID NO: 207138 - DNA, 512 bp, Homo sapiens
ctgccagtgagcaccggcgggatgggcccaggcatgccctatatggatagtaagagtaacactactgggtgataacttgtctattgctgtgtcagatctctttcaggcacaagaagatagggtgtacttaggtggggagaaccactgaatgttgtttccactagttccactgggaactaagttaaataaaccaactaaccaactgctatctaagtaaggacaagttgccattatttgtcatgcaacattctcaaaaatcagaatatttcaaagattttcttgtagagaggaactttggaaactgtaccaatatgtggaaattaaacagcatacttctgaataaccattgggccaaaaaagaaattaaggaggaaattaaaaaatttcttaaaacaaacgaaaatcaaaacacagcataccaaaatctatgggatacaacaaaagcagtgctaagaggaamgtttatagcagtaaacacctgcgtcaaaaaagtagaaagatttcaactaaac

SEQ ID NO: 207139 - DNA, 565 bp, Homo sapiens
gcaggtctgagccagtcccagtgtgaagaatttccctaaagatttgttttccatgtggcacatgtgagatttgtgtttagttcccaagagtccttggaagtcttaggttaaaacaattctaagccctctctgggccggtggggtcttgttcagagtaggctggggagagatcggcctcactctgaatcttccctggtctgataaagcactttgaactccttggaattaaaagcaccaccagaagtgtgaccctgggtggtgttaccattatttattgagtgctgccccctagaggattgaaaaatggtctggccgcttgagtccccagggatggaaacstgagactcactctctgtccaactgcaggaaatgaggccttcactcaaggggagtgggaagtcttgcagccctggtacagaggactcccaggaagtaagtgagcgtcccctgtaggacaccgctgaaaaatgaaaagttacagtgtaggcaaccaggccaggaacaaaactgattcttacttttctctactctggaagcagcctgatggggaccttcatccctgaga

SEQ ID NO: 207140 - DNA, 403 bp, Homo sapiens
ggggtggaaccaggtctcagcccccaagctcctggcacccagtgccaattcaggctgggcattcmcaacggatgcttggtaagtctttctgaaaccaagtcagtgggaaaccagacctggcctggcacatctttcaattgctaagtacctcactttccttatcgtggaaatcgggcaattgtgtgcatgtgtgtgagatacctggtaatatccagaagccatggttttcagatgagtggtaccccgttactatggtgattttgattttttaaaaatctactccttttcccgtttcccaagtgagactgccaacatcacagttcagaattttctgggtctgaggtttccagctgcaccagtcagagcaagctgcctcggggcagtgacaggggctgaggagatt

SEQ ID NO: 207141 - DNA, 548 bp, Homo sapiens
ctcttttcatttgccttcctttatcctctcaaaatacacatattttcatcttgggcaatttactcacctctccaggtctcagctttctcttttgtgaaatgagaaggctgaattctctgagcatccttctagctttatgtaatagagcatgctggagtgatttcgcatgcaggtgtcagcagctgggggcatgtagtagtctgctagggctgccataacaaaataccacagactggatggcttaaacaacagaaatttattttctcactgttctggaagctgtcagtccaaactcaaggtattgccaaggttggtgtttttgtgaggcctctctccttggcttgcagacagccaccttcttgcggtgtcctcacactgtcatcctttagtctaccaggatstgtgtcctaatctcttctttttataaggataccagtcagagcagatgagggcccaccctaatgtcctcatttgactttacttgcctctgtaaagactctatctccaaattcagccacagtatggagcactggaagttagggcttcaa

SEQ ID NO: 207142 - DNA, 546 bp, Homo sapiens
agcgtaagatgcaaaaccatgttattgaaacccctgtttgtagttcagccacttgagcmgtctttgaaggggatgggaaagttctgtcaaattttctttccctcaagcttaaaaataatcagtgggtatgttgttttgggctttttaaagaaacactgtaaaaaaaattaatttctcacactgttctacttgaaaattatcagtggtcttcccagaaacttttagagggaaggaaaattttgcctccaggctgagagcaggcagaagaaggaaaacacttgagaagctaaggaagaaagagaaaagtagaatatctgtttaaaatgaagtaaaaatatcatcttttagggctaccagacctcactcactagcttgaacttgacactccctcttcctcatgttgcaggcacctaggaatatttgcagagcattttctaattgcaaagtgcttcacggttgtttttgttagttacttgatgccatcccacccatgagcggacaagatgatgaggggcaccctctacctacaatggccctgtgtcaatc

SEQ ID NO: 207143 - DNA, 525 bp, Homo sapiens
  misc_feature (1)...(525): n = A,T,C or G
tgaccagctattcaatttctagggatgtttacaaggaagtgaaagaatatatgtcaaaatttagctacaaggacagtcatccctgtgattgctgaaataagaaaattatagtaactaaaatgtccaaacaataagaaattggttgaagaagtatattcataggaggcaattgtctgcaatccttttttaagctcatcaaattgtttttgttgttgttgtttttatttattcatcctagagtctacttccagatcaaactttttaatcaaacatttattttgagacatttatagatgcatgagcagttgtaagaaataatacagacagagctcatgtactctttacccagtttccctcaatggtaatatcttggaaaactatagaacaatatcccaagattcagaaagtttccaacaccatcaggrtgttttataaaaggtgttgcctttttataaccatacccacttgcctcttactttctctctttccttaacnnnnnnnnnnnnnnnnnnnnnnnnnnnnnnn

SEQ ID NO: 207144 - DNA, 602 bp, Homo sapiens
gggtctggaattcccagtcctaaagcctacaacacagtattaagacagtctggcacagctctgatgtgcccagactatccacccaagtcttgttcttccactgagattgtcttccaacctaagctttgagtgcacgctcaaccacccttgggtctggtgtccttctgggctgtgcagagagcgtgacgtcttccatacgtgctgtctcctcagactcctcactcccactcttagtactatttctctaatccccccatttctgataagtcaaagctaccagatctccttgcsctagcctaggaaatcttactcagtggaagatgctcctttgcatccctttgagcagaggtgcaaaatatttccaggtagctcagaggcaatataaattcttctttcatcaaatgtctccacttaggacaatccaatctattcttgaggaaaagaaaattcaacagcattccaaaccagatggtatgccatggaaagaaaaaactttttagccactgcaagctatgtttcaattcatcattcttcttcattggtaaggactcactctgtgaaattgatagcagcaaggttttacttctaaacaatctacatgg

SEQ ID NO: 207145 - DNA, 503 bp, Homo sapiens
gttgcttccctttgcacgtatgtgtgcaggtaccaataattaagattaatttctgctaggtagaatggccttcgttgtgcacagtgccagaaaatgcttctttaatagctgctaattggatatatttgctttgatggtgaaatcctgattagtcttgttaccctgaaaactcccctccttgctccttctccccacccccacctactgtttaggggaagaatagattgacagtcttcttcccctaaagcagagtcagagctttggaggtgatgagctcttttgcactcttctatgtaaagccatgttgtgcagtccattttccagcaaatcagtcatagctgcttctacttactgagagccgactacrtgctcgctgctttattttcatgttcattctgaacaacaccactgtggggtggaaatcaccactctgtttgttcaaatgaagatattgagtttcagcaatgttaaggcagttgttcaaggccacaagctgggaaatg

SEQ ID NO: 207146 - DNA, 549 bp, Homo sapiens
cacttcgttgtttcctttgctgtgcagaaacatttttgcaggatgtgatcccatttgtctatctttgcttttgctgtcttgtttccattcatttttgcagctcctgtgtccacagtggtgccaggcttccaccagattttgtgcaatgctgactagtgtttgctattgggtgtgtgtttgtgtgcatccatctgtctttctaggcattccctcagaaggggyggcaacacgtggtagggagtcaggctctatctgccctggagggctttgctctctcccttatacccaacctctgctcctgatctggcaagccggccttcatcacaccagcctctgctcctttctcaaccctggaccctgctaatttccatcctgtcgtctcccagaacctccccatcccccaggtgaagtctaaagttgcttatggatagtgaggaagttgactgtcaggagtagctgatgtctggaaggagaaaaaatcttcatggtagaggagcatgaaactgcatggtggagtgacagtggctgggaggggcttttccaacctcc

SEQ ID NO: 207147 - DNA, 271 bp, Homo sapiens
ttttatccccatccccttaaggctcaccatgtacagttgtgcaggttgtacacaaacatacrtgatagtcctccatatgacagtgatgtgaaggaagggaagccatcaggagataggacttgcttgtttctgaaacctcttgtgacccttgtgtcccttactctgcccaacatataaaaaacactccatcaatatgtattatttctatacacacatatactacgtaaaatgggagtctttcccataccttttgtagcaagattattaaagt

SEQ ID NO: 207148 - DNA, 271 bp, Homo sapiens
ttttatccccatccccttaaggctcaccatgtacagttgtgcaggttgtacacaaacatacatgatagtcctccatatgacagtgatgtgaaggaagggaagccatcaggagataggacttgcttgtttctgaaacctcttgtgacccttgtgtcccttactctgcccaacatataaaaaacactccatcaatatgtattatttmtatacacacatatactacgtaaaatgggagtctttcccataccttttgtagcaagattattaaagt

SEQ ID NO: 207149 - DNA, 271 bp, Homo sapiens
ttttatccccatccccttaaggctcaccatgtacagttgtgcaggttgtacacaaacatacatgatagtcctccatatgacagtgatgtgaaggaagggaagccatcaggagataggacttgcttgtttctgaaacctcttgtgacccttgtgtcccttactctgcccaacatataaaaaacactccatcaatatgtattatttctatacacacatatactacgtaaaatgggagyctttcccataccttttgtagcaagattattaaagt

SEQ ID NO: 207150 - DNA, 567 bp, Homo sapiens
gtcttttttttaactcattttgttcaggtatcatttacataaagtgcagactttaactacatttgttttaacaaatgtacrtatccttgtaaataatgcccattcaacatgttaaacattttatttacccccaaaatttcccttgtgccctttcccttcatttctttccaaaaaaggatataatcactgttttggtttctatcaccatatgttggttttgcctattcttgaactttatataaatgaaatcatactgtaagatactcttgtatttggctttttttcattcaacatggttttctaaattagtaatttataataaagagtactgcatattttattattgtttataaattgtgttctaaaaacattctatgttagtaaaatttatagtaaacttctataatgtacatacttttctttctggagagccatttattaaacatttattagcataccactcacagaggagatgtaaccccagaattggcctttttcttctgaagtcaactggctttgaattagaatgtaacattagttattattcctcattccccactcattctc

SEQ ID NO: 207151 - DNA, 559 bp, Homo sapiens
catgaatgttcatagtagctttattcataacggcaaaaaactggaaacaaccaaaatgttccctaataggtaaatgttaaacaaatcgtggtacatccataccgtggaatactactcagcaataaaaaggaatggactattgatacacacacaacttagagggatcttaagataattawgctaagtgaaaaatgtgaatctattttatggttctagttgtataacattcttgaaatgaccaaattatagagatggaaagcagattagttgtttctagatatcaggaatggtggaagggaggggactgggtgtgactatcaagatgtagcaagaaggagggctttgcagtgatggaatagttatttatcttgattgtggtagtagctatatccgtctacaagtgataacatacaactacacatattcatggtatcaatataattccctggttttgatgttgtattttaattaaggacagtataatcattgggtgaaactgggtgaagggtacgtgggacctctttctactatcttttcaatttcatatgaatctgtgatt

SEQ ID NO: 207152 - DNA, 559 bp, Homo sapiens
catgaatgttcatagtagctttattcataacggcaaaaaactggaaacaaccaaaatgttccctaataggtaaatgttaaacaaatcgtggtacatccataccgtggaatactactcagcaataaaaaggaatggactattgatacacacacaacttagagggatcttaagataattatrctaagtgaaaaatgtgaatctattttatggttctagttgtataacattcttgaaatgaccaaattatagagatggaaagcagattagttgtttctagatatcaggaatggtggaagggaggggactgggtgtgactatcaagatgtagcaagaaggagggctttgcagtgatggaatagttatttatcttgattgtggtagtagctatatccgtctacaagtgataacatacaactacacatattcatggtatcaatataattccctggttttgatgttgtattttaattaaggacagtataatcattgggtgaaactgggtgaagggtacgtgggacctctttctactatcttttcaatttcatatgaatctgtgatt

SEQ ID NO: 207153 - DNA, 584 bp, Homo sapiens
gtgagaatatttatgggagcttcctaattgacctttctaaacattctgcattgcttctcatttccttctttaaatttccttctaccttgacttccttaagaccactcaatgttggccccatgctttcattttttcttttatttttttctttcttttttttctttttttcttttttcttttttttttttgagacgaagtttccctcttttcacccaggctggagtgcaacagtgtgatctcagctcactgyaacctccgcctcccaggttcaagagactctcctgcctcagcctcccgagtagctgcgattacaagcatgtgccaccatgcccagctaattttgtatttttagtagaggtggggtttcttcatgttggtcaggctggtctcacctcaggtgatccgcccgcctcggcctcccaaagtgctgggattataggcatgagccacaatgcccagcccatgctttctttttaataactccttgctgcctagttttttcacgtccactgtgtaagtactagtcttaatgggtatttcttttcttactattctgcaccaatgtttccctgattgacaatagt

SEQ ID NO: 207154 - DNA, 584 bp, Homo sapiens
gtgagaatatttatgggagcttcctaattgacctttctaaacattctgcattgcttctcatttccttctttaaatttccttctaccttgacttccttaagaccactcaatgttggccccatgctttcattttttcttttatttttttctttcttttttttctttttttcttttttcttttttttttttgagacgaagtttccctcttttcacccaggctggagtgcaacagtgtgatctcagctcactgcaacctccgcctcccaggttcaagagactctcctgcctcagcctcccgagtagctgcgattacaagcatgtgccaccatgcccagctaattttgtatttttagtagaggtggggtttcttcatgttggtcaggctggtctcacctcaggtgatccgccmgcctcggcctcccaaagtgctgggattataggcatgagccacaatgcccagcccatgctttctttttaataactccttgctgcctagttttttcacgtccactgtgtaagtactagtcttaatgggtatttcttttcttactattctgcaccaatgtttccctgattgacaatagt

SEQ ID NO: 207155 - DNA, 584 bp, Homo sapiens
gtgagaatatttatgggagcttcctaattgacctttctaaacattctgcattgcttctcatttccttctttaaatttccttctaccttgacttccttaagaccactcaatgttggccccatgctttcattttttcttttatttttttctttcttttttttctttttttcttttttcttttttttttttgagacgaagtttccctcttttcacccaggctggagtgcaacagtgtgatctcagctcactgcaacctccgcctcccaggttcaagagactctcctgcctcagcctcccgagtagctgcgattacaagcatgtgccaccatgcccagctaattttgtatttttagtagaggtggggtttcttcatgttggtcaggctggtctcacctcaggtgatccgcccgcctcggcctcccaaagtgctgggattayaggcatgagccacaatgcccagcccatgctttctttttaataactccttgctgcctagttttttcacgtccactgtgtaagtactagtcttaatgggtatttcttttcttactattctgcaccaatgtttccctgattgacaatagt

SEQ ID NO: 207156 - DNA, 487 bp, Homo sapiens
ttaatacagcacctttataaaagttgtgaatctcagaaatgaacaagcttacctccctagttatttattaaaagttacaagtcacttttttttaacttcctaataatcttagaggggtatattttgtgtttttgtttgctatatcttttataaagaagatccctaatgatttgaaagttagaaccaattttctgaaggattgagccaagctccttgaacttgtgtgtttgtgggtggcacactatgtcttttgcagacccagtacctaccccttggtctagaacatattttcctccacctgccttttaagtttttatttcagcaggggtgggtggtttgtggttgaccgaaaatagaacgggctacaaaagcccttcctgtttgatattgaatctgctatttgagtcmcccttacattatgaactgactgttaattaacacatttggtaagagaatatcctgatctgctttgcatgtgaggctctcc

SEQ ID NO: 207157 - DNA, 427 bp, Homo sapiens
tatttcctttttcaccgtacacctcaaagcgctccaagtttccatttatagattctacaaaaagagtgttgcaaaactgctctatgaaaaggaatgttcaactcagtgagttgaatgaaagcatcacaaagaagtttcggagaatgcttctgtgtagtttttatgtgaagatattcccgtttccaaggaaagcrtcaatctatccaaatatcaacttgcagattctataaaaagagtgtttcaaaactgctgtatcaaaagaaaggttcaactctgtgagttggagtacgcacatcacaaaaggtttctgagaatgcttctgtctagttttgctgtgaagatatttcctttttcaccataggcctcaaagtgctccaaatgtccaatttcaaatactccaaaaagagtgtttccaattgctctataa

SEQ ID NO: 207158 - DNA, 578 bp, Homo sapiens
tactattctttgttcactacagtgtatacataactgactttttatttggatcttcattttgtaatgaaggctctggtcacatgtaagacttgtattaaataaatttgcctgctgttctgttaatctgtgttatgctaatttaattcttgagcccagctgggtcctggagaggatagagtgaaattttgtggcagctacgtaagtcaatgaaattggaaacagaaaaacaatctttaaaaatcaataaaatcataaacttattctttgagaagatcaatatagtttataaacctttcaactgactcacccacagggaaaaagaagaaaacaaaaatcaggagrgagggaatgttattacaaattttgcggatattaaaaggattataagggaacattacaaacaactccttgtccataaattgatcaatttacatgacatggaatattacttgaaaggcacaaactaccaaagctcactcaggaagaatggataacctagatacttgcgtgtatgtatgtgtgtgcatacatacaatttttacacacacacacacacacacacatatatatatatatat

SEQ ID NO: 207159 - DNA, 480 bp, Homo sapiens
tacacacaatataattaagaaagataataagaaacatatataatttcaagattttcaatttttttttactaagccagagaagataaatgagttaatcattcatgtcagtaagtaaatacaggatcaaaaaacatacctaatggaaggaaattaataacagaaaagtaaaaattataatctagaaaatgaaaratataaatcgattcataaatggataagacttttaagactttttttgaagaaatcatttcaaactagaataagcaagaggaatagatcaaaacaaaaaggaaaacagtgaaggtgatatacacatcctcttactgaaagttaattttaaagaactgctttgtaaacactaaaactcagagtcctcaatgtgtctggatatggattcatttttatttcttctgctcagcacttgttttatactttaaattagagtcctcaagtctttcctctgcaatggaaattttatgg

SEQ ID NO: 207160 - DNA, 480 bp, Homo sapiens
tacacacaatataattaagaaagataataagaaacatatataatttcaagattttcaatttttttttactaagccagagaagataaatgagttaatcattcatgtcagtaagtaaatacaggatcaaaaaacatacctaatggaaggaaattaataacagaaaagtaaaaattataatctagaaaatgaaaaatataaatcgattcataaatggataagacttttaagactttttttgaagaaatcatttcaaactagaataagcaagaggaatagatcaaaacaaaaaggaaaacagtgaaggtgatatacacatcctcttactgaaarttaattttaaagaactgctttgtaaacactaaaactcagagtcctcaatgtgtctggatatggattcatttttatttcttctgctcagcacttgttttatactttaaattagagtcctcaagtctttcctctgcaatggaaattttatgg

SEQ ID NO: 207161 - DNA, 592 bp, Homo sapiens
tgaaaaatataaatcgattcataaatggataagacttttaagactttttttgaagaaatcatttcaaactagaataagcaagaggaatagatcaaaacaaaaaggaaaacagtgaaggtgatatacacatcctcttactgaaagttaattttaaagaactgctttgtaaacactaaaactcagagtcmtcaatgtgtctggatatggattcatttttatttcttctgctcagcacttgttttatactttaaattagagtcctcaagtctttcctctgcaatggaaattttatggcatcatgtaaagtatacaaatagtgaaggcattgccagtgttttcttgtgtataagtattctctaccattagaatggaaacgtcatcaaagtgggcccttagtgagagtttgctgagtggatgaatactgtccttaaatatgacttctccattctctttggactccttttgaaactcctatcatacatgtgttggggactttcttgactggtctttctgacttttaaatccttttatctggataaattcatcattatctcccaattgactaattctttgtgtttattgcatttacact

SEQ ID NO: 207162 - DNA, 578 bp, Homo sapiens
tgaaaaatataaatcgattcataaatggataagacttttaagactttttttgaagaaatcatttcaaactagaataagcaagaggaatagatcaaaacaaaaaggaaaacagtgaaggtgatatacacatcctcttactgaaagttaattttaaagaactgctttgtaaacactaaaactcagagtcctcaatgtgtctggatayggattcatttttatttcttctgctcagcacttgttttatactttaaattagagtcctcaagtctttcctctgcaatggaaattttatggcatcatgtaaagtatacaaatagtgaaggcattgccagtgttttcttgtgtataagtattctctaccattagaatggaaacgtcatcaaagtgggcccttagtgagagtttgctgagtggatgaatactgtccttaaatatgacttctccattctctttggactccttttgaaactcctatcatacatgtgttggggactttcttgactggtctttctgacttttaaatccttttatctggataaattcatcattatctcccaattgactaattctttgtgttt

SEQ ID NO: 207163 - DNA, 543 bp, Homo sapiens
aatcgattcataaatggataagacttttaagactttttttgaagaaatcatttcaaactagaataagcaagaggaatagatcaaaacaaaaaggaaaacagtgaaggtgatatacacatcctcttactgaaagttaattttaaagaactgctttgtaaacactaaaactcagagtcctcaatgtgtctggatatggattcatttttatttcttctgcycagcacttgttttatactttaaattagagtcctcaagtctttcctctgcaatggaaattttatggcatcatgtaaagtatacaaatagtgaaggcattgccagtgttttcttgtgtataagtattctctaccattagaatggaaacgtcatcaaagtgggcccttagtgagagtttgctgagtggatgaatactgtccttaaatatgacttctccattctctttggactccttttgaaactcctatcatacatgtgttggggactttcttgactggtctttctgacttttaaatccttttatctggataaattcatcattatctc

SEQ ID NO: 207164 - DNA, 603 bp, Homo sapiens
tgaaaaatataaatcgattcataaatggataagacttttaagactttttttgaagaaatcatttcaaactagaataagcaagaggaatagatcaaaacaaaaaggaaaacagtgaaggtgatatacacatcctcttactgaaagttaattttaaagaactgctttgtaaacactaaaactcagagtcctcaatgtgtctggatatggattcatttttatttcttctgctcagcacttgttttatactttaaattagagtcctcaagtctttcctctgcaatggaaattttatggcatcatgtaaagtatacaaatagtgaaggcattgccagtgttttcttgtgtataagtattctctaccattagaatggaaacgtcatcaaagtgggcccttagtgagagtttgctgagtggatgaatactgtccttaaatatgrcttctccattctctttggactccttttgaaactcctatcatacatgtgttggggactttcttgactggtctttctgacttttaaatccttttatctggataaattcatcattatctcccaattgactaattctttgtgtttattgcatttacacttcttttttata

SEQ ID NO: 207165 - DNA, 543 bp, Homo sapiens
aatcgattcataaatggataagacttttaagactttttttgaagaaatcatttcaaactagaataagcaagaggaatagatcaaaacaaaaaggaaaacagtgaaggtgatatacacatcctcttactgaaagttaattttaaagaactgctttgtaaacactaaaactcagagtcctcaatgtgtctggatatggattcatttttatttcttctgctcagcacttgttttatactttaaattagagtcctcaagtctttcctctgcaatggaaattttatggcatcatgtaaagtatacaaatagtgaaggcattgccagtgttttcttgtgtataagtattctctaccattagaatggaaacgtcatcaaagtgggcccttagtgagagtttgctgagtggatgaatactgtccttaaatatgacttctccattctctttggactcyttttgaaactcctatcatacatgtgttggggactttcttgactggtctttctgacttttaaatccttttatctggataaattcatcattatctc

SEQ ID NO: 207166 - DNA, 390 bp, Homo sapiens
ccatgcctggccctggatgttttcttcttaaaaagccagttgagaattctaagtgtactcacttaaaaggaaaatttagtttgctataatatttctcatatttgctgtggtgaattcatctctaggaggtttctttgtataattatttcattatctctctaatagttaattctccacatgttttgtaatatttttgcacactcaccttgaatgagaagttctctacatgtcatagtcatataacaaacaraattcaccctccttcaccactaatcacacttctgtatattccataaaatgtgcatttcttcatggatactctttgaatcatctaaatggagactctttatagaaatattgaatcattaattcttccaactactgtactcc

SEQ ID NO: 207167 - DNA, 390 bp, Homo sapiens
ccatgcctggccctggatgttttcttcttaaaaagccagttgagaattctaagtgtactcacttaaaaggaaaatttagtttgctataatatttctcatatttgctgtggtgaattcatctctaggaggtttctttgtataattatttcattatctctctaatagttaattctccacatgttttgtaatatttttgcacactcaccttgaatgagaagttctctacatgtcatagtcatataacaaacaaaattcaccctccttcaccactaatcacacttctgtatattcmataaaatgtgcatttcttcatggatactctttgaatcatctaaatggagactctttatagaaatattgaatcattaattcttccaactactgtactcc

SEQ ID NO: 207168 - DNA, 533 bp, Homo sapiens
aataaacagacggcttacgatggtgttggctgggggyaaggaaatcagagtggataaggctctatcctgggaagtgacaggaggtgccattataatacctgggccttaagaggtaaggggagggagcagtccctggagcctggaactgagaggactgtgtggccagggccacccaaaccatgacctgttgtttagaagggcagctaatctgtgacaatcctgcagagagagaactgggggacaagatcctccaactcacacttcttcctctctccaaactttcctgttgagacttcccactggccaaagacaagcaaggccagaaggcaatggtggcctttcagggcagacagcagggtggaaaaggtggggagccaaaggcatgggacacatagcacctcaggactcttgttttttccctatctgccaaagtccacacagctctctcacacaaatgcctttctcatccctcaaactgacaactactctgatctgaggaatacatcaggaatgagaccagatgcccatatcaa

SEQ ID NO: 207169 - DNA, 597 bp, Homo sapiens
attgtgtggtttatatcttttactctgttaatatgatatattaaattgattgatttaaactctcattccaatatagccaaataggaagagctctggtctgcagctcccagtgtgatcaatgcaagatgggtgatttctgcatttccaactgagctacctgattcatctcattgggactgattggacagtgagttcatcccacggagggtgagctgaagcagggcagggcatcaactcacccaggaagtgcaaggkgttgggggattttcctttcctagccaaaggaaggcatgacagactgtacctggaaaaacaggacactcttgcccaaatggacataaatgacctgatggagctgaaaaaacacagctcgagaacttcatgaagcatacacaagtctcaatagccaaagtgaccaagcggaagaaaggatatcagagtttgaagaccaccttgctgaaataaagcatgcagacaagattagagaaaaaagaatgaaaaagaatgaacaaagcctccaagaaatatgggactatgtaaaaagaccgaacctactattgattggagtacctgaaggagatcgagcaaatggaaatg

SEQ ID NO: 207170 - DNA, 482 bp, Homo sapiens
tcttcaaaattggtctgcatatagttataaacgaaaagaacaaagaaaaatactattcttttgtaatgctatttgtcccaacattctttggagtttggggaggcttggactccatgagtctttcaattgtagtactgtcttacaaatggattcattttgctgttgaatgggaaaataggatggagctccatgtatgcaggcttttatgcttctgttctaaccctagtcgggcacagttagtatgtgacattcttctgtagtatgcttggcccccagtgttctttggagttttgggaggtttgtcctttakaattaaactaccattgctttacccaaaattttggtcacagccctcattggattatctattgaggtaaacaaagtttagccatgtgaacatgtttgtaaactgataaatttatgtttttatctcatggctagagtttcaaggtaaaagctattggatctttttgtgtgtgtgt

SEQ ID NO: 207171 - DNA, 490 bp, Homo sapiens
aataaaatataaatggggtaaatactgtgggtgaaatttttgtgtaatttaaaatcttgaaatcatttgaatggtcattaaatgtcttggtaatttctaattaagaagggattataaaatggggaaacatgtttttaaaaattatggaatgttcttatctaaaagatgctgatatctgatagatagttcaatatttcttgcttcctaggtttttcattaaaatgtaaggttgctaaagaataagaattctaattaatatataattckgtatataaaatgtgacaaagaaaatgtatccctactgagaaaaaaattctctaaattcaaaagttatctaaaggttgattcacattatggacttgaaaaggtgatttataaaataaagaagaaaggaaacagtaagcaggggagaggaatatgaaaaagttaagataccataggagagacaaccatactacatatgatctttctttgctttttggtaactggc

SEQ ID NO: 207172 - DNA, 434 bp, Homo sapiens
ctgcaaaaattcatctagtcatttcataatacactattaccttagccatatacaaccataacatatatacaaaatttgcatgtatatagtaaggagatgattataaatggacaaagacttttttcctgattggattccatctcctcagacctctttagggaacttgctccatcagtcagttttcctctaatatcaacctctccttcacccctaagatctctgcccttagactgtaaactagtgtaggtccatttcattgtgggggaaaaaattaagtacaatcctcagcactgtttctgttctcaaccaacrttttaaaaaggaaatctgtattctttatttctccttattttccagctcactatagcctttctactccctacactcccctgaacctgcttttgattctgaccccctaactgacaaatccaaag

SEQ ID NO: 207173 - DNA, 495 bp, Homo sapiens
tgtgcctctaactcactggaaagcccatttccatgcagactcacttttggataaaagcagtacagtgttacctagagtaatagtccgtattcacaacgctataacgatactacctgagactgggtaatttataaaggaaagaggtttaattgactcacagttcacatggctgggggtacgggrcactcaggaatttacaatcatggaggaagatgaagaagccagcaccttctttacaaggtggcaggagagagaacgaacacaggggaaattgccacttttaaaaacatcagatctcataagaattccctcactatcaggagaacacccccatgatccagtcacttcccaccaggtccctccctcaacacctggggattacaattccagatgagatttgggtgggtacacagagccaaaccatatcattctgccccaggcccctcctaaatctcatgtcctttatacatatcaaaaccaatcatgccttcccaa

SEQ ID NO: 207174 - DNA, 508 bp, Homo sapiens
atgactctatccatcatatctttaggctacatgaagaaaacagaatgaagtcttgtacaaagaaatttcttcttccctacagtgactcaaagctattcaaattatttgagtgccttgagaagttccatctaatctattactaaatcgtatcaatttgttttaaaaagtatcactgttatccattttatttcccattttcaaggatggcaccacagtccaagaacaaatcttargtctggacaactttaaaattttattttcttggacttaagcttctagccgattttccctaaaatccaactgtattatatcatcagattattcttgctaaaaaaaaatttaaaaatggatttcatgttcatccaattcatttttatccactaaagccaactcacttaatatatattgagaacatatctttgctaggtaattctcttagtacaactggtagaactgtgaacaatatcaagaagctccagctttcgcagactttatatgttagtataat

SEQ ID NO: 207175 - DNA, 521 bp, Homo sapiens
taaacacagccgcaagggaatttgttaccactagacacgacttacaagagatccttaagagagttctaaacatggaaatgaaagactgatacctgctaccacacacacttatgtacatagccaacagaccctataaaacaaaactatgaaacaatgagctaacaacttcccaatataatcaaaacctcatatatcaatattaacctggaatataaatggtcttaataccccacttaaaaggcacagagtagcaaggcagattaaaaaacaagasgcatctttcttctgttttcaaaagacccatctcaaaacaaaagacacccataggctcaacagaaagggttggaaaaagagctattaagcaaatggaaaacaagagcagaggtcactattcttatatcagaaaaaacaaacagactttaaaccaaaaacagtaaaaaaaggttaaagaagggcactacattacgataaaggtttcaattcaacaagaatacttaacagtcctaaatacatatgcaccc

SEQ ID NO: 207176 - DNA, 568 bp, Homo sapiens
gttcaggcctggcatggtggctcacacctgtaatcccagcactttgggaggctgaggcaggcggatcacttgaggtcaggagtttgagaccagcctgggcaacatggtgaaaccctgtctctactaaaaatacaaaaatcagctgggcttggtggcgtgcgcctgtactcccagctacgtgggaggctgaggcaggagaaytgcttgaatggaggaggcagaggttgcagtgagccaagatcatgccactgtactccagcctgggtgacagagtgagactctgtctcaaaaaaaaaaaagaaaaagaaagtgtaaagaaaagcctttgccccttgtctttgggtaagtcaagccctccagcccctctgacattcaagtgtgccccccaccagaggtagcaagcatggaactctgcctgcaaggaactcttcatggcaggagatcttgctgacactgaagtcagcaaagaggttatctatttcttcatatctgcagtaaatgcccaggtacacagggagaaggaaagagggcaaaagttagccatggccagtggctacctgtggcccca

SEQ ID NO: 207177 - DNA, 594 bp, Homo sapiens
ggcagcttaagtgctaattataagaagttctgaagtctaaattctctgtgttacagaaactgaatattcaggtacatgggaagaataattatgtcatatatctctgggatgtttttcagttttataacttgcttttatatgtcatgtcttatttacttctcataataatcttggaatataggtgatagcatcctcactttaaagatgtattcagggttatacarcctcaagctgatgtttcataaattctatatgtggtgggaaaatgtttctttattatattattatattactattatttattataataaagaaacttttttccctttccaggtagaaattcctcacttctttcaaccttagtattttctaattagtatctattactgaaccagtagaattcataaatgattttccaggtactgataaagaactagtaaccaaaataaaacaatgtactctgtatagcaacctatagttgacagaggacatttacttacagtatatcaatccttccaacagtcctgggaagcagggtggccaggtatctttgtccagaaagtgctggttaagtggcctagtaaaagtcacact

SEQ ID NO: 207178 - DNA, 573 bp, Homo sapiens
ttaagaaagactttcctttattctgagattgtgtcactcacatttttatttcttggtgttaaaatgccttttcttttactaagtgaagatagaaaatagtagagttgttgttgttgtttaatgcccttacttggcaaaatgaaaaataggaaatcctgtagtttcctcctctactatcccaggagccttcttccttttatcatcatcatcaccaccactttaaatctgacttgaccatgaatactgtrtgtgcagttgaacaaagacattttcaactaatcagtgagattgggcacctttgggctttttcatcactttttctgttaaccagcatgggtcagtgtattggattcagattttcagaaattatttcctgtcttttgaagaacacacaaaaaaaatgagttttaaaagtaattaacatatcaggagagctcatatgaggaggagacctttgcctatagctctctagaccttagcctgagcctgtaattcagggtcactgggggctctagggcacagaaattgtgtgaaacatttccaaacataaattataaaattattttgatgggc

SEQ ID NO: 207179 - DNA, 587 bp, Homo sapiens
cttttgaaaacattggctaaaggagtttttttttctaaagataggaaccaaataggctgaaactacttcggtgaggttcctcctccccaattcagactccagcgacccccaaaatacacacatccagatggaaaaatttaatattcttagtcaatcaatcactgacaagtatttgccactgagcacctgcttgctgctcagggaaaggaagcatgacgaattaggagttgagactactgctactgctatatttgtgaccttggagaagccactttctctctcaacctgctttcttacttgcaaactaaagccactttcagatgtaaaattctataataatatccccatggaaataaaacagccatctctgatatttctgcatgtgattctaaaggcaatgccrgttttgcagaatgagcaaaggatctactcagcaaagaagggattgagtcaggtaagcacaaaaccaacaacctgagatgcttactttgtgtcagacatgattcaagacactttacaagccttatatctccttttatcctctccaaaatacacccatgagagtgtaatcactatgagatggaccc

SEQ ID NO: 207180 - DNA, 419 bp, Homo sapiens
atatttaaagcttctgaaactgtttttcccatatgcttttggactagaatgaaaaacttaagttttccatttttatgaagccttgtaagaaataatctcattaagagattactattctcttaagaaaagataatgctaatataaacaacataaattcttactaaatatgaagaaaagaaaaaggtaagattttatagaatacatttcatctttatcatactgtactgttgaccattaaacttgattaataacaatgatacagcaataatcataatttttcaatgtgaaayttcaggtacattcccaaacactttacatatacttttgttaaattatatactcactactactatacaattatttttctttttttttttttgaaacagagtctcgctttgtcaccaggctggagtgcagtg

SEQ ID NO: 207181 - DNA, 624 bp, Homo sapiens
ttgcctaagatttcagagttgtaagcacctaacctagaatttgtgyccatatctgtctaacatgaagtgaaattactatgttattctgcctttaaattttatagttggtgttgttaaccagatatgataatggaaaccacaaaacatgtacattaatctagatgttacagactcaatgaaagagtgactattatttggatcataaatcccaatttatgggatgaaatgatgaagtcatatgatcagaggaactatcttctctgaattgaggggctgatacatcaatacaggatattttaaggacactgaggttttgagcactgaagaagatgcactttctgtgtcctgatagagtggggatcccagctgaaatgtaacgggttggggtacaaaaagggctggacatctttggtaaattgctggaagagtcctatctaaagttaattttaataaagtgcatcttacagagccatgaacaaaaaggtggacccagtttgaaagccagaatcagaggagaagaacaaatctgactgcaataagctgtttcttagattgatctccaagtacagccacttcctcagactagattctaagattctaaatcagtgttaatgagaatatgag

SEQ ID NO: 207182 - DNA, 624 bp, Homo sapiens
ttgcctaagatttcagagttgtaagcacctaacctagaatttgtgcccatatctgtctaacatgaagtgaaatyactatgttattctgcctttaaattttatagttggtgttgttaaccagatatgataatggaaaccacaaaacatgtacattaatctagatgttacagactcaatgaaagagtgactattatttggatcataaatcccaatttatgggatgaaatgatgaagtcatatgatcagaggaactatcttctctgaattgaggggctgatacatcaatacaggatattttaaggacactgaggttttgagcactgaagaagatgcactttctgtgtcctgatagagtggggatcccagctgaaatgtaacgggttggggtacaaaaagggctggacatctttggtaaattgctggaagagtcctatctaaagttaattttaataaagtgcatcttacagagccatgaacaaaaaggtggacccagtttgaaagccagaatcagaggagaagaacaaatctgactgcaataagctgtttcttagattgatctccaagtacagccacttcctcagactagattctaagattctaaatcagtgttaatgagaatatgag

SEQ ID NO: 207183 - DNA, 624 bp, Homo sapiens
ttgcctaagatttcagagttgtaagcacctaacctagaatttgtgcccatatctgtctaacatgaagtgaaattactatgttattctgcctttaaattttatagttggtgttgttaaccagatatgataatggaaaccacaaaacatgtacattaatctagatgttacagactcaatgaaagagtgactattatttggatcataaatcccaatttatgggatgaaatgatgaagtcatatgatcagaggaactatcttctctgaattgaggggctgatacatcaatacaggatattttaaggacactgaggttttgagcactgaagaagatgcactttctgtgtcctgatagagtggggatcccagctgaaatgtaacgggttggggtacaaaaagggctggacatctttggtaaattgctggaagagtcctatctaaagttaattttaataargtgcatcttacagagccatgaacaaaaaggtggacccagtttgaaagccagaatcagaggagaagaacaaatctgactgcaataagctgtttcttagattgatctccaagtacagccacttcctcagactagattctaagattctaaatcagtgttaatgagaatatgag

SEQ ID NO: 207184 - DNA, 557 bp, Homo sapiens
ctgtgctaaaaattttcctaatcactaaattttcctggtgatattatgaccaactgacatcaaattcccttccaagttgaatccctctttccctatacctcaacagcctctgtttccccattgcatatttcagtgagcaccactaaatatccaccyagtcctctgagaatcttttttcccaatcctcaatacctaaagaattgatttttacatgtagcattttaacatttatacagttttcctccattctattcatttctgtcctaacacttcctatcttcaggctttcatcacctcactcctcaatttttgcaagatactcaaaagatttcttcctatattggtccataccttgttcaatacattcttctcaatgattctggaatagttttcctaaaacaagaaatgtaattatgtcatgtccttacttaaaattctttaataagctctcatgtcactctcaggaaaataattcaaacacattaatgtaacatttcatatctgacccttgtctactccctgacttcatgcgtcaccaatcccctccattcaataaa

SEQ ID NO: 207185 - DNA, 537 bp, Homo sapiens
gtgtgaaaatgcttatttttataagggaaaggttaataacatttgtatatatctgttcatttaaccaacatgtactgaagtatgactaggtatgaagcactttgggagaaacaggaacaaaagttctcagcagtatgggtactacaatctattgtaatgtaatcacacacctttcatgtagtctactggttacaaacaagtcatgtcctgcacagactcaagagaaggggattataaaaggtcatgaacaccaggaagtagcaatcataggaaccaccctagagactatctgcctcagccctcttgggaaaggaacagcatgaaacacaggagatgattctggagtctgaatgagccaacataatgaatccaaccaggtcaaaacacagaagtccaaaatcaaacacagtaatggttttccaggttcaytgtgcagtgctcatatttctgcagataatcatgcttaatttagatgtaaacaatatgcagttttcatttcttagtgtgatgggtaaatcattatttaatcagtggatt

SEQ ID NO: 207186 - DNA, 627 bp, Homo sapiens
gttatttttttcacagatcctatcatcttattacaatcagctgtggtccatttcattccaatctcagatgtctcattcttttttgcctgttgtccctctgacaaagcaaaagggattccaagttactaattacaagttacaatttgcattatccactgttaacagaatatctttcacctggtgctgttttctattgttacagccagtcccaactggaaaggagtttggaaaatatatttctgtgagatacctctgcttcctgctgcccctatttcaaaagtcaatggattttacaagaccttgttcaaagttaaccagtggatgttccaatacatgctcagtatactcattgtggaggaaacaatttggaggaaaaaaagtgtgaagagaacttgaattatccagaataaatgcattcacaaaccctactgacttataaagaaaacattgcatattatatgtcayttccaaaagatgttggaccaaaagttatgaaacttttttgtgtgagtcttgttattgatcaattgaatttttcaagcaaaaagaattcttaccagtaattcctcaaaaccaactgccataggcactactgtgaccttactctcacttttgcagggaacactg

SEQ ID NO: 207187 - DNA, 601 bp, Homo sapiens
ctgctcaagctgttatccaaattggctaagagcagatacacttcaaggggtatgaacaattttaagctgaagaataaaactaagatctgttcatagaattggtctcaggcctagaagtagtgtttaaatcaagagatctggatcccagatgatcaagattagattgagaaaaagagcagggaggcaacaaggtgacaaagggatcattgtaacatttgagaccagcaaggatgctaagaactcattcttgttagatagttctataaggaaagcagttttgctaatttaaagaggcaatactggaataaacccttgcatttggatgtcrtattttagggaaatctgcccaaactttgtgctttctctaccttcctgatatggtttatgtgtgtgtctccaccaaaatctcatgtcaacttgtaattcccaaagttggaggtggggcctggtgggaggtgatttggtcatgggggcagatttccccctttggtgctgtttttgtgatagtgaatgagttatcacaagatctggttctttaaaagtgtatagcaccacccctcacttctctctcttcctcctgttccagccttgtaagacgtgc

SEQ ID NO: 207188 - DNA, 545 bp, Homo sapiens
tttatcagctctaataatttggtagttgctgccagagtactatattgagaatgattctgaggttatatctggtctcaggatggaagaatacaatgatcaattagtaatgtctggcataggaaaaagagggatggcaatgtaattgccacttacttcccatccctaccataagtcaaatttgtcattttagactgagaaaaaaaaaaaaaaaaaaaacaaaaacaggcttatccaaggtctcacagctattgaatgataatgtttagtctaaaaacccaccatgacttcgaaacaatattttttggggaatagacatttgtcactttccaacttaccatcatccacttcccaatatttttattagtcctttactgtgtgccaatgtggttggaagatgatttatagttcttgattccttttgctattcctttytcaaccacagcagctgggaccttcctctacctggctataccacagaacaggccaataagctaggctttgctgataaggtgtttgttctggaactctgaatcttaagtaatgca

SEQ ID NO: 207189 - DNA, 628 bp, Homo sapiens
tttaattaggcaagggaaaaaaaaaaaaagaagaccagttgggaggctcttccaggattctagacaagtaagatagtgtcttgaatagacatggtagagatacagagaagtagactgtttggggctatattttgaaaacacagaagtttttgacagattatatgtaggtatgatgtaaaggaaatgatacatatgatttgttttgcttggggcttgagtaactaagtattgccactcactaaaatagagaacactggaggagaaacaagcttaagtggagaggaaaatgaagagtttgttttgcccatccagtggagataacaagtaagtgttggaatatgcatgtttgtaagtaaataaggagaccagggcaggaaacttaaattgggaggtcagcggccyacagaatgctagttaaagccacaagggcagatgagatcacctgggaaaattgtgtcatcagggaaaagtagaagaaagaacccaacaggaacctaaagaagcagtagttagaggttgaatagaacaagaggagttcacaaaggaatcagagaaggtgccatctgtgagctggaagaaaatccagtagttgtggcatcatataaacaagagaaaacgtgtttgaatt

SEQ ID NO: 207190 - DNA, 628 bp, Homo sapiens
tttaattaggcaagggaaaaaaaaaaaaagaagaccagttgggaggctcttccaggattctagacaagtaagatagtgtcttgaatagacatggtagagatacagagaagtagactgtttggggctatattttgaaaacacagaagtttttgacagattatatgtaggtatgatgtaaaggaaatgatacatatgatttgttttgcttggggcttgagtaactaagtattgccactcactaaaatagagaacactggaggagaaacaagcttaagtggagaggaaaatgaagagtttgttttgcccatccagtggagataacaagtaagtgttggaatatgcatgtttgtaagtaaataaggagaccagggcaggaaacttaaattgggaggtcagcggcctacagaatgctagttaaagccacaagggcagatgagatcacctgggaaaattgtgtcatcagggaaaagtagaagaaagaacccaacaggaacctaaagaagcagtagttagaggttgaatrgaacaagaggagttcacaaaggaatcagagaaggtgccatctgtgagctggaagaaaatccagtagttgtggcatcatataaacaagagaaaacgtgtttgaatt

SEQ ID NO: 207191 - DNA, 583 bp, Homo sapiens
acacatgcacatgcactcacacccatatataaatatttatgagacttgagaactagaattccaattgatgtttatttttttaataaatattgtaggctaagatatcgtctgcatgcttattcacctttttcatcttctggaaaccaccctgtactttccatcccatgatagcagtatttctgccactcctttaaagacacctgtaacaatgttccatttatcacaatccatatttattctcctacttattccatttgtttttaccaaaataagtgattatcaagtctactatatcagtaagttgctcccacctaaaatattcatatctttgcggattttttaatttgcaactcacctctccaaataaaacaatagtatagtcagtcttcctcttagctctcacttcagatttatgtaaaaaccaaaattatatcaggcaaatgtctgtaatcacaaatgttgttatagagaaaagacatgctgaaccttgattattttattgtagcctgctctttttccaacatayatccaaagaaactcctcaaagtccacaagtacacttctgacgtggatatcacaaaga

SEQ ID NO: 207192 - DNA, 604 bp, Homo sapiens
atctgtctgaatcactttccatgcgccatgagctatgcttggcaatgatccgtcatgggcaagacatagagctccagtactcacacagcctagagaccaggctagcagatactaattgaataataacaaataatagtgtgagtaaataaaaaactacaaaggaaataggtacttagaagaaaaactgtacatagaaatgacaaagtcagaggatttatggtagatctccctgaggtaggttaaaatggattttgcatctttccactgaaatatgagatcacaatagcacagaatacagagacaagatctgcttcaaataactatttctttacctataattataaaactatctttgtgttatagaccaaattgtgtcccctcaaaattcatacattatgttgaagccgtagcccccagtgcaactgtatrtagagacagggcctttagagggataattaaggttgaacaaggtgataaggatgagactttaatctgacagaattagtattcctataagaaaaagaagacaccagagctctcttcgtctcccaacacccctgcctcccgtgtgtgcacagacaaaaggccaggtaggacacagcag

SEQ ID NO: 207193 - DNA, 582 bp, Homo sapiens
tgatgtgcatcctccaatgcacttttgttgcagttagaggatgtcatcattggaattcttgtgaggtacttgtgtaaactccactgttgcttataacttgttttgtcctgtgggaaaaatgtcagacattaagaatttaccaacaacattgaagtggctcattaataagcattcgcctggtagactgttgattatttcatatcttttccatttagaaaaagaaagatattgttggaatttgcctcgttgtggaggtaaacctgtttaggtgaagtgactagttaacttagataggggcagctaactttttctataagtattttagtcttcatgagccatacagtctttgtctcaaccactcaaccctaatattgtaggataaaagcaatgttagataatatgtaaackattgaaatgagctttgaaaaaaacttgtattcgcacaaactgccagcatttggcctgcaggctgttctttgctgacaactggcttacagagcataacaatcttttttaaactttttgctggtttggaaataagtggaattaaataaatgctggtaggccactcataaaatccag

SEQ ID NO: 207194 - DNA, 496 bp, Homo sapiens
ccttgctgttctcgtgctagtgagtgyattcttgaggacttgattgtttaactgtgtagcactcccccttcgctctctcttcctcaggctccagccatgtaaaatgtgcctgcttccccttctgccatgattgaaagttttctgaggcctccccagccatacttcctatacagcctgcagaaccatgggccaattgaacctcttttctttataaattacccagtctcaggaagttttacagcactatgagaacagactaatacagttggtaacaacattcctcttggtggctgcctttatttgagaaaatacctgccataaataatactgtagactgccacaaataattccataaatactaccatagactgctcaggttgccataaataacagtttggcctatcataaataataccatagactgggtggcttaaacaacaggtatttattttttcactgttctggaggcttggaagtctaagagtgccagtagggt

SEQ ID NO: 207195 - DNA, 575 bp, Homo sapiens
ttacagcactatgagaacagactaatacagttggtaacaacattcctcttggtggctgcctttatttgagaaaatacctgccataaataatactgtagactgccacaaataattccataaatactaccatagactgctcaggttgccataaataacagtttggcctatcataaataataccatagactgggtggcttaaacaacaggtatttattttttcactgttctggaggcttggaagtctaagagtgccagtagggttgagttctggtgagggctctttctggcttgaaggtagccgccttcccactgtgtcctcacayagcagaaaaagagcacacacaaattttctgttgtctcctcttataagtgtgttaatcccatgatgagagccccactcatgatctcatctagtcctaattatttcccaaaggccccatctccaaataccatcacactgaggatcagggcttcagcatttggatttgcagggacacaacttagttcacagtattaaggcaggtgggaggaagctgagactctgagggcactggtgagctgagacatcaaaatca

SEQ ID NO: 207196 - DNA, 620 bp, Homo sapiens
tcttttattgtcattctagtgagacttgggggatgaagcagaagaaaacatgtatgtttattctgccatgtttatctgaaacaatctcttttattttataaaataattcaatattctttattattttcataataatatttagagattttgtaaatatgaagcattttcttaagtaactatatagtgattgcaagtagaggcatccttagaygcccgtatttttaattttcaatatgtagtagttaaaagtgtaaaaactggaaattaacagacatagaattgaattatggtatagccacttactgtttgtgttatctgaggcaagttatttaacttctctagggttttgctccattttctataaattgggactaataatgacacctatcacatagtaaaaattaaatgagataattcatgtaaaccttccagaacatagtaagatgccagatgatcattttaaatatcctataacaacgttctgcttttacagggcaaagatactaactcttgcttctttttctttttctttttttctccaggtttattgaaaatgttacaacatttcagaaagattcaaacagctccatgtggtggatagtccaatctgcaggtcactc

SEQ ID NO: 207197 - DNA, 626 bp, Homo sapiens
gagatatagcaatgaaaaagtaggcaatgatgcctgcccttgtagagcttatattctggtaggaaagctatggaaaagagtgaagcagagaagggggataaggtgttatagcataagcatgagcggggattacaactttcaatagggtggtctgagaagaccttatctatacggtgaaatagtatgaaatgtttcacagatttgcatgtcacaataaatgttagttcttaatattattatcggtccaagaaaacataagtttctgacaagctatatactcaattgctttctctctactgatgctggggacatgtaacaggcaaggtttgagaatcactgcctggatactggggggtcattgcaaggatagaagataatatagggtaacctggagcaccacagacttctctctgttcagctgctctcagacccagcactttgaaggctgagatatagagcagctgtcacagagaactggaacactcttgggaatagggactctcagctcatgtaattcatttttttctgagtataattaggaagtaagtgttagctggattgctgacatccartatggactcccctgttagggagagctttgaaataagtcatttcagaggctgcag

SEQ ID NO: 207198 - DNA, 267 bp, Homo sapiens
gtctcaggaagatgggagatagaatgaatcctatgcagacataagaaagaaagatgacctgggagaagcactgtgcttcctaggaagtaccaaatgctactccacactggcccacatatgaggttcctatgttgacctayttagtgtttctgaattgctcaaaggtgactccttatgttgtcctccccatcttgtttcctgtcttcccttcaagggatctttatatattctatggattatctcctgacaataagattatctaattgc

SEQ ID NO: 207199 - DNA, 368 bp, Homo sapiens
tgcgtgactcagcctgctatcttgttgcagagcttcttgctggggataatgacagtcttcacccacttgcttgttcatgtggaaatcattaccggggtgcatgtaatacttttctatgatgacccaggctaccttcttcactgttttggtgtgaaggctgcccatcttggcaggtccttggtaaaagaggccaaactctttatasttaaaaatttactttgctcatcttacagccttttacatctaaatatagtttcatcaagtaacattcttacaattatattcattttttattaaccctcattttgaacagcaaattcactttactagcatactgaggcagtcaatgacataatttggattttgca

SEQ ID NO: 207200 - DNA, 368 bp, Homo sapiens
tgcgtgactcagcctgctatcttgttgcagagcttcttgctggggataatgacagtcttcacccacttgcttgttcatgtggaaatcattaccggggtgcatgtaatacttttctatgatgacccaggctaccttcttcactgttttggtgtgaaggctgcccatcttggcaggtccttggtaaaagaggccaaactctttatagttaaaaatttactttgctcatcttacagccttttacatctaaatatagtttcatcaagtaacattcttacaattatattcattttttattaaccctmattttgaacagcaaattcactttactagcatactgaggcagtcaatgacataatttggattttgca

SEQ ID NO: 207201 - DNA, 556 bp, Homo sapiens
tattttggaaactcttaataaaagaaacattagaagtccagtgtttagaaactcctacatattataagaatgtcaacagcactgaaacaaacactttccacaaggtcccccaaagtttctcttaaacggccttggcataattattrcatttgttttcttcccagttcttgttcagaatgattttcctaaggaaagtggcaacctactccctacagttcctgtttccccgttatcttttatgaagcgggtactttctaattccttttatataattgattttaattaatggtgataactacagtcctccttgtctccagcacaaagacctggttggggtaaaaatcacagctagtaattaatgagaatacatcattatggctcaaagttaacatttcagggaacaaactgagctatgaatttacaataaaatcccatttattctttttacccaatttcagcagcatttcaaaagcagtttatttcattggcaggtggtatgctgatttgtgcactatttaacgtttcttcgttagcttttaaagactttaggcaattc

SEQ ID NO: 207202 - DNA, 596 bp, Homo sapiens
ctgagagaagtaaccacagccccagactatggctggactgagaatccagccaggagtccctagagacacaagtagatatctacaccttatatgcttttctttctgatttcaagatctgctatattacacacttcccaccctacccctattcccaagacaattgactacacaacacagccatcctccaagactccagtcttcaccttgatgaaaccaacatgtacattaattatggttacttctgagttgtagaaccatggtaacttttgtaatatctctctctcttcattttctttttaaatttttacataaggaacatgtgytagttacttaattgaaaaaaaatttttaatgtattcttagcaggcatctaacatttttggcactctgctcaatggttattttctgaagactcaatacaataattatatttttaatctggctccccaaagtaacatttaatttacaaaagagtcaaacttaaaataggccaagctatatgtcttataagtaagaaataaaaaaaattacagaatcttagagctgaaaagctctccagcatcatgtagtccagtgatctttaaactgtgtgactt

SEQ ID NO: 207203 - DNA, 639 bp, Homo sapiens
tcatatcacttaaaaaagaataagaatcagaatgatggtttccagcttcatccatgtccctacaaaggacatgaactcatccttttttaaggctgcatagtattccatggtggatagcattaggagatatacctaatgtaaatgacaagttaatgggtgtagcacaccaacatggcacatgcatacatatgtaacaaacaaatgttgtgcacatgtaccctagaacttaaagtataataataaaaaaagaataagaatcatgctgacattagacttctcaatgacaacactggatgcaagataatggagttgtccagctaaaaaaaattatatttctgatatattcatgtaaactattataagtattaggatgtaataaagatattctcaggtatacatgacctcaggcttactacatgaagatcctctttgaaaacatgcttgtgggaagktctctgattcaaggagaaataaatacagaagaaaatgataaaatatgtgagataaaacggtaagtaacttagtaaagttcaatattatttcaaaagaatggaccaaagaatgtatatttatactaatctagaactaagttctagttgattaaaaacatagttgggggtgagacgtaaatgtattcat

SEQ ID NO: 207204 - DNA, 582 bp, Homo sapiens
tgatgtgcatcctccaatgcacttttgttgcagttagaggatgtcatcattggaattcttgtgaggtacttgtgtaaactccactgttgcttataacttgttttgtcctgtgggaaaaatgtcagacattaagaatttaccaacaacattgaagtggctcattaataagcattcgcctggtagactgttgattatttcatatcttttccatttagaaaaagaaagatattgttggaatttgcctcgttgtggaggtaaacctgtttaggtgaagtgactagttaacttagataggggcagctaactttttctataagtattttagtcttcatgagccatacartctttgtctcaaccactcaaccctaatattgtaggataaaagcaatgttagataatatgtaaacgattgaaatgagctttgaaaaaaacttgtattcgcacaaactgccagcatttggcctgcaggctgttctttgctgacaactggcttacagagcataacaatcttttttaaactttttgctggtttggaaataagtggaattaaataaatgctggtaggccactcataaaatccag

SEQ ID NO: 207205 - DNA, 579 bp, Homo sapiens
taatgactggaaatggccatttcactgtggccctccaatcaaccctttcccatgagctatgtaatattttaccaccttctaagattgaaactgcccactaataacttcagcctgaagctatttcataattaraaactgttaagtatttggtattggtgacagtgcctttatctttttccctcttccatattcctagtgcttttacacacctaagtgccaccaagatagaaatgatttgctcaacagtgctctggacataaaagaattcttcgatcacaaaaatggaacccccttttcatgcttctacagtccagccagccaatctgaagatgtcattcttataaaaaagtatgaccaaatggctatcttccactgtttattttggccttcactgactctgctaggtggtgccctgattgttggcatggtgagattaacacaacacctgtccttactgtgtgaaaaatatagcactgtagtcagagatgaggtaggtggaaaagtaccttatatagaacagcatcagttcaaactgtgcattatgaggaggagcaaaggaagagcagagaaatcttaaga

SEQ ID NO: 207206 - DNA, 579 bp, Homo sapiens
taatgactggaaatggccatttcactgtggccctccaatcaaccctttcccatgagctatgtaatattttaccaccttctaagattgaaactgcccactaataacttcagcctgaagctatttcataattaaaaactgttaagtatttggtattggtgacagtgcctttatctttttccctcttccatattcctagtgcttttacacacctaagtgccaccaagatagaaatgatttgctcaacagtgctctggacataaaagaattcttcgatcacaaaaatggaacccccttttcatgcttctacagtccagccagccaatctgaagatgtcattcttataaaaaagtatgaccaaatggctatcttccactgtttattttggccttcactgactctgctaggtggtgccctgattgttggcatggtgagattaacacaacacctgtccttactgtgtgaaaaatatagcactgtagtcagagatgaggtaggtggaaaagtaccttatatagaacagcatcagttcaaactgtgcaktatgaggaggagcaaaggaagagcagagaaatcttaaga

SEQ ID NO: 207207 - DNA, 540 bp, Homo sapiens
aatttcctcatggctcacacctgtcactttatgctaactagcaaggctggaatattaacatacctaaaatcaagcagaagaaatggcactgcactaataaaaaggaggtgcaaaaccttaagtggaataggtgcatgaagtttatttaaagactaacatcccaacttgggaaactcctaataaattctaaactcttccgaattttagaaccttgatatttctttacaccttttataaaagatgcctcttgactagggctwagcaagcagtgtgtacacaaacagaattgtgtgcaagtatacacacaccaaatgcactaataatgaagaagagagaacaaaatgaatttcaaatgccgaattcgggaacctcctcaaactattgcctttttcaaatggctggaccaacgattaaacttcagccaagtttttttcttaaggtcttccatatcattaaaaacaaggcatgccaactctgactttataaatctaaaattcagtgatctgcacagtttctgagcttgaagtattgaattgtgac

SEQ ID NO: 207208 - DNA, 540 bp, Homo sapiens
aatttcctcatggctcacacctgtcactttatgctaactagcaaggctggaatattaacatacctaaaatcaagcagaagaaatggcactgcactaataaaaaggaggtgcaaaaccttaagtggaataggtgcatgaagtttatttaaagactaacatcccaacttgggaaactcctaataaattctaaactcttccgaattttagaaccttgatatttctttacaccttttataaaagatgcctcttgactagggctaagcaagcagtgtgtacacaaacagaattgtgtgcaagtatacacacaccaaatgcactaataatgaagaagagagaacaaaatgaatttcaaatgccgaattcggraacctcctcaaactattgcctttttcaaatggctggaccaacgattaaacttcagccaagtttttttcttaaggtcttccatatcattaaaaacaaggcatgccaactctgactttataaatctaaaattcagtgatctgcacagtttctgagcttgaagtattgaattgtgac

SEQ ID NO: 207209 - DNA, 540 bp, Homo sapiens
aatttcctcatggctcacacctgtcactttatgctaactagcaaggctggaatattaacatacctaaaatcaagcagaagaaatggcactgcactaataaaaaggaggtgcaaaaccttaagtggaataggtgcatgaagtttatttaaagactaacatcccaacttgggaaactcctaataaattctaaactcttccgaattttagaaccttgatatttctttacaccttttataaaagatgcctcttgactagggctaagcaagcagtgtgtacacaaacagaattgtgtgcaagtatacacacaccaaatgcactaataatgaagaagagagaacaaaatgaatttcaaatgccgaattcgggaacctcctcraactattgcctttttcaaatggctggaccaacgattaaacttcagccaagtttttttcttaaggtcttccatatcattaaaaacaaggcatgccaactctgactttataaatctaaaattcagtgatctgcacagtttctgagcttgaagtattgaattgtgac

SEQ ID NO: 207210 - DNA, 540 bp, Homo sapiens
aatttcctcatggctcacacctgtcactttatgctaactagcaaggctggaatattaacatacctaaaatcaagcagaagaaatggcactgcactaataaaaaggaggtgcaaaaccttaagtggaataggtgcatgaagtttatttaaagactaacatcccaacttgggaaactcctaataaattctaaactcttccgaattttagaaccttgatatttctttacaccttttataaaagatgcctcttgactagggctaagcaagcagtgtgtacacaaacagaattgtgtgcaagtatacacacaccaaatgcactaataatgaagaagagagaacaaaatgaatttcaaatgccgaattcgggaacctcctcaaactattgcctttttcaaatggctggaccaacgattaaacttcagccaagtttttttcttaaggtcttccatatcattaaaaacaasgcatgccaactctgactttataaatctaaaattcagtgatctgcacagtttctgagcttgaagtattgaattgtgac

SEQ ID NO: 207211 - DNA, 495 bp, Homo sapiens
aatgtatgtttgagattactagataactgttgtacaaattggtatgtcacttaaattgttttctctcagaaagtccacataaataaatgaaatagactaatagtaatatagtgtagaaaaaaacacccttaacattatttccatagataaaactaattagaactgtaaattctaaggagattatttatctaaactaattttaaaatcagaagttaaggcagtgttttagatggctcattcacaactatctttcccctttaaatatgatttattgtctttctcatacacagatgtattgcttggtaaaagattggcctccaatcaaacctgaacaggctatggaacttctggactgtaattacccagatcctatggttcgargttttgctgttcggtgcttggaaaaatatttaacagatgacaaactttctcagtatttaattcagctagtacaggtaaaataatgtaaaatagtaaataatgtttaattacaat

SEQ ID NO: 207212 - DNA, 495 bp, Homo sapiens
aatgtatgtttgagattactagataactgttgtacaaattggtatgtcacttaaattgttttctctcagaaagtccacataaataaatgaaatagactaatagtaatatagtgtagaaaaaaacacccttaacattatttccatagataaaactaattagaactgtaaattctaaggagattatttatctaaactaattttaaaatcagaagttaaggcagtgttttagatggctcattcacaactatctttcccctttaaatatgatttattgtctttctcatacacagatgtattgcttggtaaaagattggcctccaatcaaacctgaacaggctatggaacttctggactgtaattacccagatcctatggttcgaggttttgctgttcrgtgcttggaaaaatatttaacagatgacaaactttctcagtatttaattcagctagtacaggtaaaataatgtaaaatagtaaataatgtttaattacaat

SEQ ID NO: 207213 - DNA, 495 bp, Homo sapiens
aatgtatgtttgagattactagataactgttgtacaaattggtatgtcacttaaattgttttctctcagaaagtccacataaataaatgaaatagactaatagtaatatagtgtagaaaaaaacacccttaacattatttccatagataaaactaattagaactgtaaattctaaggagattatttatctaaactaattttaaaatcagaagttaaggcagtgttttagatggctcattcacaactatctttcccctttaaatatgatttattgtctttctcatacacagatgtattgcttggtaaaagattggcctccaatcaaacctgaacaggctatggaacttctggactgtaattacccagatcctatggttcgaggttttgctgttcggtgcttggaaaaatatttaacagatracaaactttctcagtatttaattcagctagtacaggtaaaataatgtaaaatagtaaataatgtttaattacaat

SEQ ID NO: 207214 - DNA, 495 bp, Homo sapiens
aatgtatgtttgagattactagataactgttgtacaaattggtatgtcacttaaattgttttctctcagaaagtccacataaataaatgaaatagactaatagtaatatagtgtagaaaaaaacacccttaacattatttccatagataaaactaattagaactgtaaattctaaggagattatttatctaaactaattttaaaatcagaagttaaggcagtgttttagatggctcattcacaactatctttcccctttaaatatgatttattgtctttctcatacacagatgtattgcttggtaaaagattggcctccaatcaaacctgaacaggctatggaacttctggactgtaattacccagatcctatggttcgaggttttgctgttcggtgcttggaaaaatatttaacagatgacaaactttctcagtatttaattcagctagtacaggtaaaataatgtaaaatagtraataatgtttaattacaat

SEQ ID NO: 207215 - DNA, 567 bp, Homo sapiens
tgtgtgaccttaggctgttttaattaacctctttgaacacytttccataagatgaggaaataattctacctttctgatgaggttgttatgagaattaaacaggataaaaaaatgcatgtaaagcacttgacacaggcccaggcagtttgaaagtgttcacaaatcatggagttagattcattcccatccctaagcccattcaaatccctctttcaaggccacattcaagatacaaccccctccacgggtctttcctgaccagggcagcccatcacactgagttgttatggcacttgtgggctggatcctcatccgatgttcagaacaccctgtcttgttgctttcatatatttgtttgtatgggaagaggcaacatccccacttcaccatgcagcactgtgctgtgggtccctcatggattaattcgttttcattagtgttcttgcagaagagaggtgatgatgaaaaggagcttgtgactccatgtcagtggcatcaggattggtttttttggagtttatttcaagccctttggtagctcaggggcttggaggatggtacctgacc

SEQ ID NO: 207216 - DNA, 567 bp, Homo sapiens
tgtgtgaccttaggctgttttaattaacctctttgaacacctttccataagatgaggaaataattctacctttctgatgaggttgttatgagaattaaacaggataaaaaaatgcatgtaaagcacttgacacaggcccaggcagtttgaaagtgttcacaaatcatggagttagattcattcccatccctaagcccattcaaatccctctttcaaggccacattcaagwtacaaccccctccacgggtctttcctgaccagggcagcccatcacactgagttgttatggcacttgtgggctggatcctcatccgatgttcagaacaccctgtcttgttgctttcatatatttgtttgtatgggaagaggcaacatccccacttcaccatgcagcactgtgctgtgggtccctcatggattaattcgttttcattagtgttcttgcagaagagaggtgatgatgaaaaggagcttgtgactccatgtcagtggcatcaggattggtttttttggagtttatttcaagccctttggtagctcaggggcttggaggatggtacctgacc

SEQ ID NO: 207217 - DNA, 604 bp, Homo sapiens
cacagggggtcccatctacagagccttaaaaggacactgcagtaaaccagatttttcttcatttctctataggtcagtattatttttaaaattatctaaaacttagcaaaaaaaaaatgagtggcacgtctttttcaacgtcatatgtggcaaaggctacccaaggactatctaggtgaatgtacttcattttactcactatttgctgttgattaaatgcattatatgccccagatttaataaagttacatgttaccttatggatttttttccagtacagatgcaaataacttctgtccagtggaacatataacccaaaagattaggatttgttgtcctgtaagacattaactgattttctatctaacccagcaatcttatcctaacatttatttattcaactgcctagttatgaatttactaatctgacctctgtccacccagcatcctttgcagatgctctttaacatcttactggctcctccattaattcataaattaaataaaatccctgctccagkttaggcttcctatgagtatttgttatataatctttttttaaaaaaatgaaatgaaatccttggcacatgtttttcttatattt

SEQ ID NO: 207218 - DNA, 619 bp, Homo sapiens
gcacagatctatgcttcataaaagcatcactttagtagcaatgtggaaaaagaacttaggagagtatgaatcatccaatcaagaaatggtaccttaacaagacagtgcaggggagggagagagaaagaaaggatggatttctaaatcatgaacaccaaaggccttaaaattgggcattgggccatgtccaatccttcgatgtttagctattaagggagaaggaggcaacacagaggtcattgtatccatcacattttagaaatcaactctctcttagggcacttatgacaatttaacttgcattgtrgttttctgttgtttgttcatgtgatcaatcaactaaaatttactgtccacttaaataccaatttaaatacttaaataccacttaaatacttgggtgaaggtttcagtgacaaattgttgataagaagcatcagcaaagatcaagggaaagatataagctctggggaatggtgtggttcagctggaaggtgtggcaggaagaagaagatgtggggaactcgacttgagactcaggtggggtcagactgtatagggctgaggctgaagagtttgagccctgagtggtgcacatgaggagacactgaaggtttta

SEQ ID NO: 207219 - DNA, 424 bp, Homo sapiens
tctcacattccacagctgcctctgggaaccctcagagaaagaacatgcccacgtagattgcacatctgctagggcatctttctccttaacacctatgtcttcccttcaccccctaaagaaaagatttacattttttaaaataaaaaaggatgctcaaaactaacttgaaaaccaactgcatttaattgtaatattttgagccacaaaatgaaattgagtccaataaaaggcaggtggactgctctgggtttctgaaagaattttttaaaaatcayatgcaaagattatttctcaatagtgtcccatctccgctgaagtcaatgtcagctagaggccctgcattaaacaagagagagtccactctcctatctttccctccacttcctttctttccctttctgccttccaattttgttgacattct

SEQ ID NO: 207220 - DNA, 557 bp, Homo sapiens
aaaatgagtttattattagaaagtcaattgcattctacaatattttcaaatttccaaattcagggactgcatcagtccatcaagwttcctttggactcaactagcaaatcaacttgcagatccatctctcttttctgcatgctgcctgcctgcaaatagctaattaagaggagtctgctgtgctgggaggtaagtcctttctgcagtccaagatttctcaggataccttcaagaggaaaaaaataccaaagggctggctcatcagctcagctggggcagcttcattacaacgctaatgtctgatgataatgagatcctttcgaatcactctagacaagcgcttgtgctctctcttttctgtttggtgggtttttttttcattgttgctattttgtttagttttaaactcatggtttaaccataaaaatgtgagacactcttcatcagcctaaaacacaatcagttgttgtccaatattgtacttgccttattattatacaaatcaccaacagggagattgcaaagcatttcctcaggaagggcccattttcctctgt

SEQ ID NO: 207221 - DNA, 557 bp, Homo sapiens
aaaatgagtttattattagaaagtcaattgcattctacaatattttcaaatttccaaattcagggactgcatcagtccatcaagattcctttggactcaactagcaaatcaacttgcagatccatctctcttttctgcatgctgcctgcctgcaaatagctaattaagaggagtctgctgtgctgggaggtaartcctttctgcagtccaagatttctcaggataccttcaagaggaaaaaaataccaaagggctggctcatcagctcagctggggcagcttcattacaacgctaatgtctgatgataatgagatcctttcgaatcactctagacaagcgcttgtgctctctcttttctgtttggtgggtttttttttcattgttgctattttgtttagttttaaactcatggtttaaccataaaaatgtgagacactcttcatcagcctaaaacacaatcagttgttgtccaatattgtacttgccttattattatacaaatcaccaacagggagattgcaaagcatttcctcaggaagggcccattttcctctgt

SEQ ID NO: 207222 - DNA, 517 bp, Homo sapiens
ctcaatgtttgattttaaatgtcctttcgtggcaaaataaaattaggtggctctatgtcattttctagatcacttttttgaaatattctggtccaggaaatctaaaagtgtagaaactattgcctcagctggcagatcttcacagctctgagggaacaccatttgtgatgggaatcacttttaaatgaggcatccaaaatactgggactggggggcagttcagatatacctgcctctggggtcacacagggcattttaaatgatcccggtctccctttcttggggaaggggcacgcaggcttgttaccaaccagggcacaagctcccaagctcaccagacacaaagaagcacctcacagtgtgtgttaaagaaaaacattgactcctgggctcctctgctacagcacatgagtcagaagatatgggtaagaccaggaatctgtgttccctgagcctcccaaataaacgacttgccctggagtcaytggtgtagggtctgcttcagggggaaccaacc

SEQ ID NO: 207223 - DNA, 505 bp, Homo sapiens
gtgggctcagttctgcatcttctctccactgcacccccacccagagtttttattcatttgcaaaggcaaggaaagagagcaggagccaggggtataaaccaaggttatgggagtgccaaatctaataccaagtcaagcacaaagaccctgccagggacggtggcagcccagctccagctcagactcacaggttcctcaaggccacctaagggtctcaggacctcgttctccaagtcccggatcccactgaagcactgcccctactcycattccttggttggcattcgggctggctaagcatgttatgctaattttgaatataaatataaaagcaactgtcattttcttccccccagagatacaggccgacgtgacaatcacattgggagatataaatgaagcctgtggcactgaggaatgaaaatgctttccacggtgctggggaaggctgtgagccctgggaacagctcagttcatcttccacacagtcttcccttgctgaatg

SEQ ID NO: 207224 - DNA, 597 bp, Homo sapiens
gggtgccctatgacattttatgctgagttgggaccactatgacattttatgctgagtttacagcacatgtccctcccagagtgtacagtggaatcatctgcagtagggtagggagtcacccagcaaaaatcctatgtgagttgcttctataacccaggcaagatgaggacaaaaaatgtccccgaaaggaagcctccctttcctctaggagagtgacatttatgaatgcttacccatccctgatttcctgtcatcattgcagctaccctgttacgggctaactggtgtgccccaaaacactcatacattgaagtcccaatccccagtaccagagaatgtgaccttatttggagacagggtgtttatagaggtaatttgtttagttaaaatgaactcattatggtgaaccctaatccattatggctagtgyctttttaaaaagggaaaatttggacacagagacagacatgcaaagaaggaagacaatgtgaagagacacagggagaaggccacctacaagccaaggagagaggcctgggacacatcctccctcagagccctcagaaggaactgttgcaatctaatcactccttagtt

SEQ ID NO: 207225 - DNA, 445 bp, Homo sapiens
atgtcacgaaaacatctaggacatgctgttgcagagcaatgccttctacagtgcacagttacagtcgtgtgccacataacaatattttagtcaacaatggaccacatatacacaccttggtcatcccataagattataataccatatttttaccgtaccttttctatgtttagatacacaaatacttacccatgtgttacagtggcctacagtattcagtacggtgacatgcggtccaagttcgtagtctaggaacaatagcctrtaccatatacataggtgtgtagtaagctagaccatctacgtttgagtaagtgcactctgtgatgtttgcacaacaaaatagccttcaatgcatttctcagaacatatccccatcatttagcaacacatgactgtacttaaaatgtctttgaaacaccaccatcaaagtcattgccaacat

SEQ ID NO: 207226 - DNA, 561 bp, Homo sapiens
gagttctgaagcctttgcctgtggggtcagtctaacacatgaatctattggagtggccctgaaccctaggtctgctggagcagacctggatccactgatgttttaggccmcagggcctgggtaggagcctggcctggcctgatgctgcagtaggcatggagcctggtgttgtgggcactggccttgtccctggagccgcagaagctagcctgctatatggacctgtgggaccagtctggaggctggatccgcaggttgatgtggaagctgggtatacatgtattgctgttgatgttgtggttgttattctttgaaataaagtaaaatgaatggcagaggtgcttcagcgcacaggctgctggatgataatgatccaagattgtgaccaagattaatatttgttctagagattatatgaaggtgcattgatatgtcctaaagaagaattttatggaaatttagaggtgtgccagagatataggggacaatattttcacattccaaaaaagaatgtggaggatgaaatttaatggtccatctggtctcattgtgatgcatgtg

SEQ ID NO: 207227 - DNA, 561 bp, Homo sapiens
gagttctgaagcctttgcctgtggggtcagtctaacacatgaatctattggagtggccctgaaccctaggtctgctggagcagacctggatccactgatgttttaggccccagggcctgggtaggagcctggcctggcctgatgctgcagtaggcrtggagcctggtgttgtgggcactggccttgtccctggagccgcagaagctagcctgctatatggacctgtgggaccagtctggaggctggatccgcaggttgatgtggaagctgggtatacatgtattgctgttgatgttgtggttgttattctttgaaataaagtaaaatgaatggcagaggtgcttcagcgcacaggctgctggatgataatgatccaagattgtgaccaagattaatatttgttctagagattatatgaaggtgcattgatatgtcctaaagaagaattttatggaaatttagaggtgtgccagagatataggggacaatattttcacattccaaaaaagaatgtggaggatgaaatttaatggtccatctggtctcattgtgatgcatgtg

SEQ ID NO: 207228 - DNA, 600 bp, Homo sapiens
aagagctcagccccacaagctattagggcacaacctggaatcagactcttctagtaaccaggaggtgacccaacacactccctaatttatagatgagaccaaggtcctgagaagtgagagtttgccagatgtgctgtagcagggtagaagcagaactgggatgcaacctcgggctacttttggctagactcaacayggaaacatttttaaaatgtgtgtgtgtgtgtgtgtgtatttttaacactcaagtattttctgttatgtggctgccaggaaagggtggggaagccagtttttaagggcattcattcttttccttgaaacacccaattgcagcttgatcctccaccatctgttctgtgaaccacagagcgaagacctgaccaagaagatttatttgcttagaagaagagcaatgccctctaatttaaatttcacatcttttactgctgtggctttaagccactgtagaaaaaaagttgtaattccctacctccctagtcatgtataggtagctccatcatccagatagatcaggatagcaaacaatttttctgggtttcctggtactagatgcccctccaaatacacgatgggggt

SEQ ID NO: 207229 - DNA, 600 bp, Homo sapiens
aagagctcagccccacaagctattagggcacaacctggaatcagactcttctagtaaccaggaggtgacccaacacactccctaatttatagatgagaccaaggtcctgagaagtgagagtttgccagatgtgctgtagcagggtagaagcagaactgggatgcaacctcgggctacttttggctagactcaacatggaaacatttttaaaatgtgtgtgtgtgtgtgtgtgtatttttaacactcaagtattttctgttatgtggctgccaggaaagggtggggaagccagtttttaagggcattcattcttttccttgaaacacccaattgcagcttgatcctccaccatctgttctgtgaaccacagagcgaagacctgaccaagaagatttatttgcttagaagaagagcaawgccctctaatttaaatttcacatcttttactgctgtggctttaagccactgtagaaaaaaagttgtaattccctacctccctagtcatgtataggtagctccatcatccagatagatcaggatagcaaacaatttttctgggtttcctggtactagatgcccctccaaatacacgatgggggt

SEQ ID NO: 207230 - DNA, 593 bp, Homo sapiens
tttgaatttttgcatgagtgaaaaatcagaccttggtgatgaccttgagcaggaggatataaataactcccacatgcttagcgttccaataatggaacactaggcataagtgggctttaattaatcacaataccaaaaaatcatttttcagaactgaagaagataatgatatattcaataacttttctagttaagagagtgattttacagattaaatttttagagaaaacattactatgccactctaatatggtttcacagctttagtttatttgaagcaccatgactttcttcatgaattaccaaattgtgtcatggcagatgtgagacacaactatgaaggaaggactgaaaaatacagaaatccaaagcaagatataattgccgcatgaaacacctcataagcataccaactcactagaaatctaaatgcaaagaagattgaaattaaagttacattattttgtatctcctggagatcctgtttcaagatactgtgtatacccatcccttttgagakgcactaagtcaaagtcatgtcactgcatgattgacaggtggcagtcccggaatacaaggaccacatgggcagt

SEQ ID NO: 207231 - DNA, 497 bp, Homo sapiens
gctaatttaatggtaactttagagaaagtgttccctaaaatgcaagaaatcaacagaaacaaatagtaatttctccaaagcaatttagtttactttacggaataggttattttcatgatttactcttttgatctttatcatttcatagtttatgttcacaaggcagttaaaaataaaaatgtttatatgttatactaaataaatatctatctatccacacagaattacctaataatccagatcactgaggtacagcatgcaattgaccagcttaagagaaaactrgatactgacaaaatgaaactcatagtagaagttaaggtaatttacatttttcctaatcagattattataacatttatcttgaaataaaatattttggtgttttaactttgggtgtcaataatataagggtagccaggattgactgtattaaaattgttaccttaacagtaaagagcataggtgaaaaaaaaaatgcaggaagaaaaactaaa

SEQ ID NO: 207232 - DNA, 561 bp, Homo sapiens
acatcatactcagtggtagaaaactgaaagctttyttctaagttctagaacaaggcaaggatgatcactcttgccaattctacaattctactcaaaatagtactggaagtcctaaccagaacaattagacaagaagaagaaataaaaggtatccaaataaaaatgaagaaacaaaactatatctacagataacatatttttaaataaaaaatcctagagactcacaagaaaatctgttagaactaaataatgaattcagcaaagttgcagggtacaaaatcaacatataaaaatcagtagtgtttctatacagtaacaaaaatgtatcaaaaaaatcaagaaaacaatcccatttaaaatggcatcaaaagtaaaataatacgaaataatcttaataaaagagataaaagaactgcatacagaaaactataaaatattgatgaaagaaattgaagatgcaaaataaatgaaatatatcccatgctcatgagttgaaaaaattaatattgttaaaatgttcatataccgaaagatatctacatattcaatgaaatccctatg

SEQ ID NO: 207233 - DNA, 546 bp, Homo sapiens
ctacatcaaaaaagaagaaagatttctaatgaacaacctaacagtgcatctcaaggaattagaaaaaaagaaaacaaaaacaaatacaaaattcatggaaaggaagaaataataaagctcagagcagaaataaatgaattagagactaaaagaattcataagattgatgaaacaagttttttcttgaaaaaataaacaaaacyggcaaacccttagctaaaccaactaagaacaaaagagaaaagacaaataaaatcagatattaaaaagtagacattacaactgatagcacataaatacaaaggaccataaaagactattacaaaaactatactccaacaaatttgataacatacaagaaatggataaattcttgggcacatagaacctaccaagattaaattataaaataatagaaaatctgaacagaccaataatgaatgaggaaattgagtcagtaataaaaagtcttccatcaaagaaaagcccaggatatgatgacttcactgcttaattctaccaaacatttaaagaactagtaacaat

SEQ ID NO: 207234 - DNA, 525 bp, Homo sapiens
catagaattagtcaaactaaggctctagagaaacagttttcaatgttgaaaactaattcaacgttgtttctagtgcttcaaatccctgaacgcttttgcaaaatataggccatatttggatgcctgctaaggtcaagcccccatgctagatgcattacatatgttatctcaattaaacatcacagaaaaactgcaggtaggcgttatgattcacatttcatggattagaaaactaaggttcagaaaggttaagacaatttacacaaggctatgcagctagcgtgagaaaactcaaatgcagttttgatctatcagattccacagttaatgttctttctcttcattatttatttataagttttatgtatacataatagttgtacatataatggggtgcatgtgatattttgatacaagtatacaatgkataatgatcaaatctggctaattgggttatccatcacctcaaaaacctaccatttctttatgttgggagcattccaaatctttgttaccgaaatgaac

SEQ ID NO: 207235 - DNA, 530 bp, Homo sapiens
gaattcggctgtgaatttcatgatgtattatacaacttgttgtatagctatagtaatcatgattgcataggactggtggagaaatagacacattgctcagtgaaatacaatagagaactcagaaatgggcccacaaatgtatgcacaactaatttttgacaaaaatgaaaacaaattcaataaaggaagcatagctttttcaacaaatggtactggagagtttgtatttccataaacaaacaaacaaaagaactttgatctgtgtctcatgtcttatataaaaattaatcggaaatgaatcacagaattaaatgtatgatataaaactataacacttttakaaaagatataggagaaaatctttaagatctaggacaacaaagagttcttagaatattaagtgccatctacaaaaataatatttgataaattaaacctcatcaaaattaaaaagtttttctctgcaaaaaccttatggagaagacaaaaagataagctataacagggagaaaataattacaaaaaaattc

SEQ ID NO: 207236 - DNA, 524 bp, Homo sapiens
gtacctacatacttctattttctcttcttttttctttttagacagagtctcgctctgttggccaggctgggatgcagtggctygatctcagctcattgcaacctctgcctcctgggtgcaagcaattcttctgcctcagcctccccagtagctgggattacaggcacccgccaccatgcctggctaatttttgtatttttagtagagacggggtttcaccatgttggccaggctggtctcaaactcctgacctcaggtgatctgcctgcgttagcctcccaaagtgctgagattacaggggtgagccactatgcccagcctgcatacttctattttctagctctgtccttggagagggcctgaaagcagtggcgccttaggaacaatgggcacatatgtgcccagattgtttatttttattttttttgagacaaggtttcgctctgttgcccaggctagagtgcagtggcaccatcgtagctcactgaacctcaatatcccagtatcaagctatcttcacactg

SEQ ID NO: 207237 - DNA, 402 bp, Homo sapiens
cgtgccaggcagtgggaacaacagatgcaaaggttctgggtggggagtaaatctggtaggtttgagacagagcaaggaagccagagagctaaagctgagtaagggagggttgggtaacggtgtccaaatcacaagggttttatgggacattaaaaagattttgggagatggaaagccagaagaggctacaattaagttattgactcgattgtgtcagctgaggagtaatggggcaaacacagttgcatgacttatttggggagattaattaggtagtgtttgctgggttacactgcgtaacagyaaaccacttcaaaatctcagtggtttacattaacatgatttatttctcactctgtatgtttgtagttgcgggttggctggcatggttctgcttcagat

SEQ ID NO: 207238 - DNA, 526 bp, Homo sapiens
  misc_feature (1)...(526): n = A,T,C or G
ttgtgtagatttgaacccaactggcttttggctttgagcaagttaaatnaaatttttaggccttggtgttcattcatgcatatccgtgataataatactacctcatagagttgttatgaggattaaatgacttaatacatgcaaggcacttgtaatagtgcttggaatattttaagcactccaaaaatgtgacaagttttttttttttttttkttttttttttaaatttcaggtcaaaaagttcttaccacagtctggactctcaatcagggaacgcactggaagttaaatgttagttccatccctttgcctgagcattattaaactgcccatacagtttttctgtctaagcatcctttttttcttaatctttttcttgttcaaaacctgcacctgatttcatacatgaggaagctatgaaatctcctttcctattgcggtcctgcctaagaaacaaattaaaacaagggccacatgtggctttgggctttgtgttttgattgcctcctgccatgttgactaagct

SEQ ID NO: 207239 - DNA, 526 bp, Homo sapiens
  misc_feature (1)...(526): n = A,T,C or G
ttgtgtagatttgaacccaactggcttttggctttgagcaagttaaatnaaatttttaggccttggtgttcattcatgcatatccgtgataataatactacctcatagagttgttatgaggattaaatgacttaatacatgcaaggcacttgtaatagtgcttggaatattttaagcactccaaaaatgtgacaagtttttttttttttttttttttktttttaaatttcaggtcaaaaagttcttaccacagtctggactctcaatcagggaacgcactggaagttaaatgttagttccatccctttgcctgagcattattaaactgcccatacagtttttctgtctaagcatcctttttttcttaatctttttcttgttcaaaacctgcacctgatttcatacatgaggaagctatgaaatctcctttcctattgcggtcctgcctaagaaacaaattaaaacaagggccacatgtggctttgggctttgtgttttgattgcctcctgccatgttgactaagct

SEQ ID NO: 207240 - DNA, 283 bp, Homo sapiens
tatcaaacataggaagaaaagctccatatcactgatcattagagaaacgcaaaacaaaacgacaatgagatagtgttttgtgccagtcagagtggtgattattaaaaagtccagaaacagatgctggtgargctgtggagaaatagtaacacttttacactgttggtgggaatgtaaattagttcaaccacatggaagacagtgtggcgattcctcaaggttctagaaccagaaataccacatgacccagcaatcccattactgggtataaacccaaaggaat

SEQ ID NO: 207241 - DNA, 588 bp, Homo sapiens
tgcttgggaccagaagtgttttggatcttggatttttttttatgagtttggaatatttgcattatattccttaccaatgagcatttcctttgagcgtcatgttggcgctcaaaaaactaaggattttggagcatttcagattttggatttttggatgagggatgctcaacctatatcttggataatgagaattgactatataaaggggtgagggagagggttttatgtagagctctatacctatgataccatattggaaaacgtctaccatatttgaagtcgtatggagaagtctccattaagagattataccttcagacaggtggctgcgctgggttgggaggtggatatgggagatgagggtgctgacatgaaccaaggtggtatggtctgaatgtttgtgtgaatcctaacccaaggtgggttagatttcaacagaactcgaataggtcatgatggaggagcccccatgatggggttagtacccttataaaagaggccccagagaggtgcytcgccctctccatgacgtgagggtacacctaggacatgccatctgtgaaccagaaagtggccttccaacagaca

SEQ ID NO: 207242 - DNA, 560 bp, Homo sapiens
tgtgatgaagaaccttgtacaggtacatggttttcccctgtgagagcactggctcacacccggaatcccagcactttgagaggctgaggtgggcagatcccttgaacccatgagttcaaggtcagcctgggcaacatgatgaaatgctgtctcyaatttaaaaaaaaaaaaaaaaaaaaaggctcagacgaggcttaactctaggccctgctcgactgaggtagaaacatcctcagagcatccccaaggagctagagaaagaacaaataaatcaccagtgaatacaaagatgaataacttcagagaagtacttcatgaaaaagaaaatggcatttgttgaatgtaaaagaacaactgcggtagcaggttatggatcaaagctctcacagcctgaaaattaaaagaccctgcgtcacacggtcctccagggaaaatagccagtggccccacagttctggctacgaggcttcagcttccagagagagggagactgacatctccactggactagaagaaaggaagcctgtgtgcagatgggtggctttgcatgtggcagacct

SEQ ID NO: 207243 - DNA, 503 bp, Homo sapiens
cccagcactttgagaggctgaggtgggcagatcccttgaacccatgagttcaaggtcagcctgggcaacatgatgaaatgctgtctctaatttaaaaaaaaaaaaaaaaaaaaaggctcagacgaggcttaactctaggccctgctcgactgaggtagaaacatcctcagagcatccccaaggagctagagaaagaacaaataaatcaccartgaatacaaagatgaataacttcagagaagtacttcatgaaaaagaaaatggcatttgttgaatgtaaaagaacaactgcggtagcaggttatggatcaaagctctcacagcctgaaaattaaaagaccctgcgtcacacggtcctccagggaaaatagccagtggccccacagttctggctacgaggcttcagcttccagagagagggagactgacatctccactggactagaagaaaggaagcctgtgtgcagatgggtggctttgcatgtggcagaccttgaagctag

SEQ ID NO: 207244 - DNA, 563 bp, Homo sapiens
tgtgatgaagaaccttgtacaggtacatggttttcccctgtgagagcactggctcacacccggaatcccagcactttgagaggctgaggtgggcagatcccttgaacccatgagttcaaggtcagcctgggcaacatgatgaaatgctgtctctaatttaaaaaaaaaaaaaaaaaaaaaggctcagacgaggcttaactctaggccctgctcgactgaggtagaaacatcctcagagcatccccaaggagctagagaaagaacaaataaatcaccagtgaatacaaagatgaataacttcagagaagtacttcatgaaaaagaaaatrgcatttgttgaatgtaaaagaacaactgcggtagcaggttatggatcaaagctctcacagcctgaaaattaaaagaccctgcgtcacacggtcctccagggaaaatagccagtggccccacagttctggctacgaggcttcagcttccagagagagggagactgacatctccactggactagaagaaaggaagcctgtgtgcagatgggtggctttgcatgtggcagaccttga

SEQ ID NO: 207245 - DNA, 544 bp, Homo sapiens
tatcttctaatgattccatggccacttgagtcatccttctaaaatacacaccttaamacctgctgatgacttcctatggcctaaaagatcacctgacaccctaggggtggaaactgttcccaaaacacgacatcaactttttacttctcctaggcctgtcctgtgcttgctgatttctcagtgtgccttgtgctttcactctcctatattttcacatcttagcacacactatcttctttgcatggaaaggctgccctcctccctcagctatctggtgaacacctacccactctttgaggcacattaaagttgcaccttctcagacctccacctccatgttacagtcaatggcccatttctctgtgctttgtaagacgtgggcaatgctggatttttctgtgtgctcctctgaagcaggaggtgactctgccatttcccagtgcccggtgtagggcctgtcacaatgctcttaagtgttcagcaggtagatgaataagctaagcagacatacagcctcgttcctacatcaattggcccaaccgtg

SEQ ID NO: 207246 - DNA, 545 bp, Homo sapiens
tgattccatggccacttgagtcatccttctaaaatacacaccttaacacctgctgatgacttcctatggcctaaaagatcacctgacaccctaggggtggaaactgttcccaaaacacgacatcaactttttacttctcctaggcctgtcctgtgcttgctgatttctcagtgtgccttgtgctttcactctcctatattttcacatcttagcacacactatcttctttgcatggaaaggctgccctcctccctcagctatctggtgaacacctacccactctttgaggcacattaaagttgcaccttctcagacctccacctccatgttacagtcartggcccatttctctgtgctttgtaagacgtgggcaatgctggatttttctgtgtgctcctctgaagcaggaggtgactctgccatttcccagtgcccggtgtagggcctgtcacaatgctcttaagtgttcagcaggtagatgaataagctaagcagacatacagcctcgttcctacatcaattggcccaaccgtgtggatcccctc

SEQ ID NO: 207247 - DNA, 542 bp, Homo sapiens
tcttctaatgattccatggccacttgagtcatccttctaaaatacacaccttaacacctgctgatgacttcctatggcctaaaagatcacctgacaccctaggggtggaaactgttcccaaaacacgacatcaactttttacttctcctaggcctgtcctgtgcttgctgatttctcagtgtgccttgtgctttcactctcctatattttcacatcttagcacacactatcttctttgcatggaaaggctgccctcctccctcagctatctggtgaacacctacccactctttgaggcacattaaagttgcaccttctcagacctccacctccatgttacagtcaatggcccatttctctgtgctttgtaagacgtgggcaatgctggatttttctgtgtgctcctctgaagcaggaggtgaytctgccatttcccagtgcccggtgtagggcctgtcacaatgctcttaagtgttcagcaggtagatgaataagctaagcagacatacagcctcgttcctacatcaattggcccaaccgtg

SEQ ID NO: 207248 - DNA, 620 bp, Homo sapiens
gcttagcagctgaagactgacactgcctgatagatcacctcggaagcctacaggaccatcacaracgctctaggtaactctcacagtggaggataagtccatccccttcttaatcaatacggaggctaaccactccacattaccttcttttcaagggcctgtttcccttccctccataattgttgtgagtattgacagccaggcttctaaacctcttaaaactccccaactctggtgccaacttagacaatactcttttaagcactcctttttagttgtccccacctgcccagttcccttattaggctgagacactttaactaaattatctgcttccctgactattcctggactacagccacatctcattgccacccaccttaacccacaagtagaagatacctctattccctccttggcaacctatcatgcaccccttaccatctcattaaaacctaatcactcttacccctctcaatgccaatatcccatcccacagcatgctttgaaaggattaaagcctgttatcactcacctgctacagcatggccttttaaagcctataaactctccttacaattcccccattttacctgtcctaaaaccagacaagccttaca

SEQ ID NO: 207249 - DNA, 623 bp, Homo sapiens
ttggcttagcagctgaagactgacactgcctgatagatcacctcggaagcctacaggaccatcacagacgctctaggtaactctcacagtggaggakaagtccatccccttcttaatcaatacggaggctaaccactccacattaccttcttttcaagggcctgtttcccttccctccataattgttgtgagtattgacagccaggcttctaaacctcttaaaactccccaactctggtgccaacttagacaatactcttttaagcactcctttttagttgtccccacctgcccagttcccttattaggctgagacactttaactaaattatctgcttccctgactattcctggactacagccacatctcattgccacccaccttaacccacaagtagaagatacctctattccctccttggcaacctatcatgcaccccttaccatctcattaaaacctaatcactcttacccctctcaatgccaatatcccatcccacagcatgctttgaaaggattaaagcctgttatcactcacctgctacagcatggccttttaaagcctataaactctccttacaattcccccattttacctgtcctaaaaccagacaagccttaca

SEQ ID NO: 207250 - DNA, 633 bp, Homo sapiens
ccagatcttcttggcttagcagctgaagactgacactgcctgatagatcacctcggaagcctacaggaccatcacagacgctctaggtaactctcacagtggaggataagtccatccccttcttaatcaatacggaggctaaccactccacattaccttcttttcaagggcctgtttcccttccctscataattgttgtgagtattgacagccaggcttctaaacctcttaaaactccccaactctggtgccaacttagacaatactcttttaagcactcctttttagttgtccccacctgcccagttcccttattaggctgagacactttaactaaattatctgcttccctgactattcctggactacagccacatctcattgccacccaccttaacccacaagtagaagatacctctattccctccttggcaacctatcatgcaccccttaccatctcattaaaacctaatcactcttacccctctcaatgccaatatcccatcccacagcatgctttgaaaggattaaagcctgttatcactcacctgctacagcatggccttttaaagcctataaactctccttacaattcccccattttacctgtcctaaaaccagacaagccttaca

SEQ ID NO: 207251 - DNA, 633 bp, Homo sapiens
ccagatcttcttggcttagcagctgaagactgacactgcctgatagatcacctcggaagcctacaggaccatcacagacgctctaggtaactctcacagtggaggataagtccatccccttcttaatcaatacggaggctaaccactccacattaccttcttttcaagggcctgtttcccttccctccataaytgttgtgagtattgacagccaggcttctaaacctcttaaaactccccaactctggtgccaacttagacaatactcttttaagcactcctttttagttgtccccacctgcccagttcccttattaggctgagacactttaactaaattatctgcttccctgactattcctggactacagccacatctcattgccacccaccttaacccacaagtagaagatacctctattccctccttggcaacctatcatgcaccccttaccatctcattaaaacctaatcactcttacccctctcaatgccaatatcccatcccacagcatgctttgaaaggattaaagcctgttatcactcacctgctacagcatggccttttaaagcctataaactctccttacaattcccccattttacctgtcctaaaaccagacaagccttaca

SEQ ID NO: 207252 - DNA, 506 bp, Homo sapiens
tgcctgatagatcacctcggaagcctacaggaccatcacagacgctctaggtaactctcacagtggaggataagtccatccccttcttaatcaatacggaggctaaccactccacattaccttcttttcaagggcctgtttcccttccctccataattgttgtgagtattgacagccaggcttctaaacctcttaaaactccccaactctggtgccaacttagacaayactcttttaagcactcctttttagttgtccccacctgcccagttcccttattaggctgagacactttaactaaattatctgcttccctgactattcctggactacagccacatctcattgccacccaccttaacccacaagtagaagatacctctattccctccttggcaacctatcatgcaccccttaccatctcattaaaacctaatcactcttacccctctcaatgccaatatcccatcccacagcatgctttgaaaggattaaagcctgttatc

SEQ ID NO: 207253 - DNA, 591 bp, Homo sapiens
ctgacactgcctgatagatcacctcggaagcctacaggaccatcacagacgctctaggtaactctcacagtggaggataagtccatccccttcttaatcaatacggaggctaaccactccacattaccttcttttcaagggcctgtttcccttccctccataattgttgtgagtattgacagccaggcttctaaacctcttaaaactccccaactctggtgccaacttagacaatactcttttaagcactcctttttagttgtccccacctgcccagttcccttattaggcygagacactttaactaaattatctgcttccctgactattcctggactacagccacatctcattgccacccaccttaacccacaagtagaagatacctctattccctccttggcaacctatcatgcaccccttaccatctcattaaaacctaatcactcttacccctctcaatgccaatatcccatcccacagcatgctttgaaaggattaaagcctgttatcactcacctgctacagcatggccttttaaagcctataaactctccttacaattcccccattttacctgtcctaaaacca

SEQ ID NO: 207254 - DNA, 506 bp, Homo sapiens
tgcctgatagatcacctcggaagcctacaggaccatcacagacgctctaggtaactctcacagtggaggataagtccatccccttcttaatcaatacggaggctaaccactccacattaccttcttttcaagggcctgtttcccttccctccataattgttgtgagtattgacagccaggcttctaaacctcttaaaactccccaactctggtgccaacttagacaatactcttttaagcactcctttttagttgtccccacctgcccagttcccttattaggctgagacactttaactaaattatctgcttccctgactattcctggactacagccacayctcattgccacccaccttaacccacaagtagaagatacctctattccctccttggcaacctatcatgcaccccttaccatctcattaaaacctaatcactcttacccctctcaatgccaatatcccatcccacagcatgctttgaaaggattaaagcctgttatc

SEQ ID NO: 207255 - DNA, 607 bp, Homo sapiens
agactgacactgcctgatagatcacctcggaagcctacaggaccatcacagacgctctaggtaactctcacagtggaggataagtccatccccttcttaatcaatacggaggctaaccactccacattaccttcttttcaagggcctgtttcccttccctccataattgttgtgagtattgacagccaggcttctaaacctcttaaaactccccaactctggtgccaacttagacaatactcttttaagcactcctttttagttgtccccacctgcccagttcccttattaggctgagacactttaactaaattatctgcttccctgactattcctggactacagccacatctcattgccacccaccttaacccacaagtagaagatacctctattccctccttggcaacctatcatgcaccccttaccatctcattaaaacctaatcactcttacccctctcaatgccaatatcccatcccacagcatgctttgaaaggattaaagcctgttatcactcacctgctacagcatggccttttaaagcctataaactctccttayaattcccccattttacctgtcctaaaaccagacaagccttaca

SEQ ID NO: 207256 - DNA, 625 bp, Homo sapiens
aaataaataaataactaggcatgatggtgcatgcctgtagtcccagccagcaggctaaggcagaaggattgtttgagtccaggagttcaaggctgcagtgagctatgattgtgccactgcactccaacctgggtgagagagtgagaccttgtctctaaaaaataataaaatcaaataaaaatgtttccatgggagagaaacatggcatctattgtcttcacacctcagtcaaacccagacaggaagtgccattttcacaytgtgtgagtaaagcactcatcacaggactgtgtttcatagctaccagctttcttgcttctcgtacctccgtctgaatttcagcccccactccctgtgtctcaaattgggatcgccaagctctctaacatagcttttaatttttattgtaaccagaatctaaaaaatttgacaaacacacagcacaagttaatgcattcatattcattatcacaatgatattcacaatctccatctttcccctatcacacatatttacatggcggggagaggctggcagaaggggagaggacagatctgaggggacaataacgagagagacaactgtggggaaaaaggaagcctttaggcgtggggaggacagggc

SEQ ID NO: 207257 - DNA, 596 bp, Homo sapiens
gtaagaaactaaggccagtttagggcctgctgttccttccttcatcatgaataggtgtctattcagcacaatactcatagtactcctgtagatatcacttaattgtgaagtgcacataaagagatataatacatggtataatacaccacaatcacactgccctttaaagtcattatatgagcatgttattctcctgcttaaagataccacattgcccataggataaagagaagaatctttagtttgcatgttcaacctaactcaccagccccrtctcaagttgttctcctgcccactttctgcctttcaaacctactgggctttgggtcctttgaatgcttcattctcctttccacatacagtacagttttatgcacatgatatcatcaccctctcccttcacctaggtaacgcctactcacccttcagaggtcaaatggaatcttgcttatggaggaagacctccctaaatctcctagactggttccagctgctctgccatgacctgtcatgcaagctctgtgcctcttcatccaaatagtgattaagcagatgggcaaattatgtgtttaatgtttgtctcccctctagaattc

SEQ ID NO: 207258 - DNA, 258 bp, Homo sapiens
ccactgggcggctttagggtcttaaagtctgagtaagcacgtctttagcaactccttggcttttatggagatattagggagggctaaagcaggggcttcagttaatgctaaattaacgggctacttcattctgtacttcttggatrgctgccactaagatttttgtttgtcttctgaatgctttatcagcggcctttccagttgcctgtgttgcttttgttttttaagcttttgattatcaaaaactttttgggctat

SEQ ID NO: 207259 - DNA, 543 bp, Homo sapiens
ttaactgatcatccatactatatttgattagggctgtctcaacatcttttgtagcctgtactaaatatgcaaaatctgaaacaatgttaataggctgattaaaatcttgtaacactgaaatgacagcaaccaattctgctctttgagctgagtgatattgagtttcaatgacttgttcttttggcccagtgtaagccacttttccgttgctggaaccatcagtaaacacygtcagagcattttctagaggtttttgtctggtaattttaggtaaaatccaagtagtcaatttcaaaaactggaagatttttgcttttgggtaatgattatcaataattcccacaaaatcagcaagaccaatctgccctgcaccagaattgataaagacttgtctatcctgttccttgtttaaagaaacaatgattttatctgggtcatttccacacaattttactattcatagtcttgcctgaccaattaatgtagccatttgatctaagtacaatgtaaaagtcttaactgtactgtgaggaaggaatgacc

SEQ ID NO: 207260 - DNA, 502 bp, Homo sapiens
ttgtctggtaattttaggtaaaatccaagtagtcaatttcaaaaactggaagatttttgcttttgggtaatgattatcaataattcccacaaaatcagcaagaccaatctgccctgcaccagaattgataaagacttgtctawcctgttccttgtttaaagaaacaatgattttatctgggtcatttccacacaattttactattcatagtcttgcctgaccaattaatgtagccatttgatctaagtacaatgtaaaagtcttaactgtactgtgaggaaggaatgaccactccacaagatctgtattttgaacaataatgcctgttggagaatgtgcagtagcaaaaattaaaagttggagtggggctaagtgatctattctatttacttttgctgactgaaatttttcttcaactaattctatttctttagttgcctctggagttaatattcttttactatttaagtctggatcccctctcaagatagagaacaaattt

SEQ ID NO: 207261 - DNA, 267 bp, Homo sapiens
agggaagttactaatgcaagggaaaaaatttagagacagggccagccacgcttcttccaagtcctttctgtctgctcagtcacctctatgcttatttttcttctttcctctaagtagtgtcatgcgttttcttcctattcctagtcgctcctagtcaactaactcctctctttaccatcttttcatcagaacttgaaacctcctctccttcatgtattagtgatcatrtttctccataatactgctagaaacaagaattgaaacctg

SEQ ID NO: 207262 - DNA, 448 bp, Homo sapiens
ggtgaaggcttgaaaatagagggtagagcagatatagggcagccttctcaaggatatctcctcctttttttgaaaagagatgttctctttttcttgcatctttattctcagtccatttgccctacagcctctgtgcttccaagatgaagttctgataagtgtctgctgtgataagataataagagagtctatctatgtagcttggaaataaacactggaattgcttctcaaaaatccagattgatttaaacaccctctggcaatgttcttttggcatcctccccaattttaaataacttgggtcacagtttcctccactcattgactcagcacttcagtggcaaagtgaccctctaaatttcacctcagctaagatagcycctccacctcctagaaggataatattgtgaattaaatgctgatgctgtttctgatttagcacatatgc

SEQ ID NO: 207263 - DNA, 575 bp, Homo sapiens
cctcagcccctcagcagtccaatggcaaaaactggactcatttgtgatgtcatcatttgcctacatgggcatggmaatgagaaaattatacgtgtattttaaaactgaaatgggcctggcgcggtggctcatgcctgtaatcccagcactttgggaggccgaggcgggcagatcacaaggtcaggagatcgagacctcctggctaacacagtgaaacaccgtctccactataaaatacaaaatattagccaggcgtggtggcaggagactgtagtctcagctactcgggaggttgaagcaggagaatggtgtgaacccgggaggtggagcttgcagtaagctgagattgcaccactgcactccagcctgggcgacagctggactccgtctcaaaaaaagaaagaaagaaagaaatgaagtcgctgagaatctagaagtgtacaggggctgatagaacccctttgcccattagagactagaaagaatttgaagctgcttatacctgccaaggaaaactaagcttaagtgactgaagagaaagagaaagattaaaacagaaaatagaaaggcacttg

SEQ ID NO: 207264 - DNA, 458 bp, Homo sapiens
tagccaaatttggtctgcttggtcagcagccttttccatgtggccatctccatgtctgtcaattttgaggtaccatagcccagtgagaatcaggccactccttaatttcttgttgccatctgtcttagtccttttagtgctgctataacagaataccaccaactgggtatttataatgaagagaaatttatttcccacaggtctgcagtctggcatgtccaagaatgagggagtaggcatccracgagagccttcttgctgtgtcgctccatgcagaaagcaaatgggcaagagagaacctactctcaaaaatccttttgaaaggcattaaggcctaaaagcctgctgacctcttacagtccccaactcccaaaacctttacatgggccattacatttcaacatgaggtatgggaaagacacatattcaaactatactaccctccctagtaactaaca

SEQ ID NO: 207265 - DNA, 394 bp, Homo sapiens
aaattatagaaactaataggacatttgtgacaccccatgtatcatagatggtaacgatctgaaatatttgattagwtcattctatttttgattgcagtaaaatacatacaacatttaccatcttagagatttaaatgtacacttctgtggtgtcaagttccattcgtattgtgtgcagccatccccaccatctatctccagaacgtttttcattttgcaaaactgaaattctgcacccatctcccctcagtgcctgcaaccactttctctgaacttgactattctaagtacctcatgagtaacatcctatggcatctgcccttttgtgacggacttgtttcactcgaggcaatgtcctcaagctacggccgtgatgtatcatgcatcagaattc

SEQ ID NO: 207266 - DNA, 396 bp, Homo sapiens
gaattctgtttcttcccttccaacgtgggataaattatagaaactaataggacatttgtgacaccccatgtatcatagatggtaacgatctgaaatatttgattagatcattctatttttgattgcagtaaaatacatacaacatttaccatcttagagatttaaatgtacacttctgtggtgtcaagttccattcgtattgtgtgcagccatccccaccatctatctccagaacgtttttcattttgcaaaactgaaattctgcacccatctcccctcagtgcctgcaaccactttctctgaacttgactattctaagtacctcatgagtaacatcctatggcrtctgcccttttgtgacggacttgtttcactcgaggcaatgtcctcaagcta

SEQ ID NO: 207267 - DNA, 394 bp, Homo sapiens
aaattatagaaactaataggacatttgtgacaccccatgtatcatagatggtaacgatctgaaatatttgattagatcattctatttttgattgcagtaaaatacatacaacatttaccatcttagagatttaaatgtacacttctgtggtgtcaagttccattcgtattgtgtgcagccatccccaccatctatctccagaacgtttttcattttgcaaaactgaaattctgcacccatctcccctcagtgcctgcaaccactttctctgaacttgactattctaagtacctcatgagtaacatcctatggcatctgcccttttgtgacggacttgtttcactcgaggcaatgtcctcaagctacggcmgtgatgtatcatgcatcagaattc

SEQ ID NO: 207268 - DNA, 573 bp, Homo sapiens
gtgagagtggctgatctgcaaaaaaaaaaaaaaaaaaaaaaaaaaaaaaaaaaaaaaaggtgcatgcacagcctcattaggtgtctagtgttaaagtgagggtattgactggaaaagaatgggaccttgcaacttggaatggggacgtgtgggaggaccctgatgaagctggggacactgagtttgtaaaccttgatgaatcttttttgccaraaggagcagcttccccatttccattagtgacaacatctcctccctgacccatcctgccatcagcctttccacttttgtctgaagagataaaccctgtgctgtctgagggaacagtgatggcctcccctgaggcagataccaggcaaaataatgttgattctcctcaggagccacccactacacccctgtttacttctaaacctataactagactaaagccctggcaggtccctagaggtgatattgagagtgtgatccatgaggaggtgcatgacactcgaaaagaactgcttgagctttctaatttatagaaacagaaatttggagaacaagcatgggaatgcatattaagggtgtggg

SEQ ID NO: 207269 - DNA, 504 bp, Homo sapiens
aaaaaaaaaaaaaaaaaaaaaaaaaaggtgcatgcacagcctcattaggtgtctagtgttaaagtgagggtattgactggaaaagaatgggaccttgcaacttggaatggggacgtgtgggaggaccctgatgaagctggggacactgagtttgtaaaccttgatgaatcttttttgccagaaggagcagcttccccatttccattagtgacaacatctcctccctgacccatcctgccatcagcctttccacttttgtctgaaragataaaccctgtgctgtctgagggaacagtgatggcctcccctgaggcagataccaggcaaaataatgttgattctcctcaggagccacccactacacccctgtttacttctaaacctataactagactaaagccctggcaggtccctagaggtgatattgagagtgtgatccatgaggaggtgcatgacactcgaaaagaactgcttgagctttctaatttatagaaacagaaattt

SEQ ID NO: 207270 - DNA, 571 bp, Homo sapiens
ttgtggtcatctgttttaatagcttttctcttatatttctaattttcttcttctttgtagtttaaatatgattcattgtttaagaagctctttcatcttttgaaaaataaacataaacatattttcttctctaacataagcacttaacatataaaactaaacattgaacactgcggtagcagaaatcctacacattttcatatgttttattttcattatcatttagtttgaaatatttaatgtatcttataatttcttctttaactaatgtgttaatggtaatatcctagatatttcattattaatcatactaacagaattctattgtggccagagaatgtgcagcacagtatataaatcacgtgaaatatatagagacccatttttatggtacaacatatagtttatcttgatgacatttcaagtttatttaagacaaartgtctattttgttaccgctgtatatagcgttctaaatttgtcagtgaagtgtagatagttggtagtattcctcagtttgcctgtgtgcttactgatcctctgctcagagtcgtataaactactgagcaaa

SEQ ID NO: 207271 - DNA, 571 bp, Homo sapiens
ttgtggtcatctgttttaatagcttttctcttatatttctaattttcttcttctttgtagtttaaatatgattcattgtttaagaagctctttcatcttttgaaaaataaacataaacatattttcttctctaacataagcacttaacatataaaactaaacattgaacactgcggtagcagaaatcctacacattttcatatgttttattttcattatcatttagtttgaaatatttaatgtatcttataatttcttctttaactaatgtgttaatggtaatatcctagatatttcattattaatcatactaacagaattctattgtggccagagaatgtgcagcacagtatataaatcacgtgaaatatatagagacccatttttatggtacaacatatagtttatcttgatgacatttcaagtttatttaagacaaaatgtctattttgttaccgctgtatatagckttctaaatttgtcagtgaagtgtagatagttggtagtattcctcagtttgcctgtgtgcttactgatcctctgctcagagtcgtataaactactgagcaaa

SEQ ID NO: 207272 - DNA, 635 bp, Homo sapiens
ggtcagcatagcacccgatgaatcttctgctccaattttttttttttttttattgagacagagtcttgctctgttgcccaggctggagtgcagtagtgcaatcttggctcaccacaacctctgcctcccaggttcaagcgattcttctgcctcagcctcccaagtagttggactacaggtgcacaccaccatgcccagctaatttttgtattttttagtagagatggggtttcactatgttggctaggctggtctcaaactcctgaccttgtgatctgcccaccttggcctctcaaagtgctgggattacaggcgtgagtcaccacgcctggccccaatttttaaattatagttacattcaataaaatgaccaagatcttatctagagcatgaccgaaaagaggacaagtcttaaagaccattttgtctggtagccttcaaattgaggcccacatacccctacaggtatacaaaacctcacaaaagatacctgagtgtacacatttttaaagaaattaatttccagatccttaacttgcatcctacaataaacctgcrttgcttctgctttctcattttcccatctcagtctccttcctgtcactttgcaagaaaatggtgtacctcccacacaa

SEQ ID NO: 207273 - DNA, 443 bp, Homo sapiens
catcatatgcagattcatttttaaataatatttcttttattaacaacctattaattccataagataataaaggagcaactcaccagaccagkcttacaagaaattagggtagaagaagacagatagttgcctaccaaatggtatgaaatgaggaggtgcagaaggaaggcttctcatcccaaatgaaaatattcttccttctcacacatctatcagaggctagaattccccccattaaaatgtgttgtcctaacaaaggcaataacatattttatccattctacaatacttttcataatttctcatttctaaaatctaaatgtattttgcaatcaatgttgatgtctacatttaatgtagtagtattccgccaccctctactgccaacaaaaagctgtaaaatcagtgacatatcttacaattaatggcatgttaatatcaag

SEQ ID NO: 207274 - DNA, 477 bp, Homo sapiens
aatcaatatggacatttaaaaatttattgaaatgaatgacaatagtgatacaagttatcaaaacctccaggatacagaaaaacagtgctaagaggaaagtttatagcactaaatgcctgcatcaaaaagtctgaaagatcacaaattgacaacctaactttatacctcaaggaactagagaaataagaacaaacgaaacccaaagctaacagaagaaaagaaataacaaagatgagagaggaaataactgaaattgaaacaaaaaaataaaagaccaatgaaaaaaagttcattctttraaaactgatagagcattagctagattaaccaagaaaagaagagagaacattcagaccttctctgaattagaaagaaaatggagactttacaactgacctcacagaaacaaaaggatcatttgagactactatgaacacctctatgcacacaaactagaaaatctagaggaaagggata

SEQ ID NO: 207275 - DNA, 468 bp, Homo sapiens
gtggaaactgacaaggcatagattgcaaagtgacacattcaaagtcaaagatggccggatggtgtaggggtgtccagcactcatatctgatctcataatgccagccccgtgctcttggctacttggtctcataaattcaaactccaatatrgtcccaagtttaaaactaagacaagccacccaggtcccaccccagggaaacatttctataataatcaggcaacctacagtcatcaactatgttagagtctatacagaaccacatcaactgaggtacacccttcccagggctatttttatttggtgggagatataaagcccttgccactgtccttgatgtggaacaataggacaagccatacttgcagggtttgccaacactctgagctcagttgaactcaattcaacctaatcttctgtttaatcctgcttcttcttcctgctattgatccttaataaatagcttgc

SEQ ID NO: 207276 - DNA, 577 bp, Homo sapiens
ttatttctgaacaagattaacatttatatttctgaatagataatttggattagcttccctatttttcatgaactagacattaatttgtacaaaaaaagaaatatattatggtaaagatgttttaaatattctatgtgaagacaatcaagtttcaattcaatgaaataaactttatgcaaaacagtatgtgtgtgtacatatttgcattttcctaaggagggaacccatagattccattacaaccttaaatgtatytgtgagtccaaaggggaatgagggaagatagttaagaaactgtgccctaggaatccccctatcttgcaaggtgtagcagcttctagtgaagctactcatcacacttttttcatctgtcacattcaataggaggcgcacagtctacggttgtggagtaactaacttagggtaggttaaactatcagcatgacgtgagcgcctatttttccaggaaattatggcttttgtaatgagtgatacgggaaactagcaagacacatcagcaatgatctccactctcataggatttctagtataggtcaaaagactggacctaatcata

SEQ ID NO: 207277 - DNA, 558 bp, Homo sapiens
ttctacttcatgatgtaaagctagaatcaatatgtttttccttctactttatttatgagactataatctcactgagtcaaagcctgaaagaaatcttgtgttgggtaagttagaattttagtacagatggaaacacgactctcagaaacaagttctgcccatgtgagaggagatgctgacttttggtgcctggtccctgccttttgtccccaactaccccttgatgatgatttgcactttggttctgcccactgtggctctgtcactcttctcttctttcctctgtctcaggcgaggaacctatgacctcattttctccagggtttcaccttaaatggaagaacattttaaaactcacactcaagtgtctgtcagaggggacaatgctcaatatatgagaaagaatcacaaattacacatgattaggcattatagaaaacaaggatgaaagtatatagaggacatttgaagtctaatgctagagagacaatgccctgaattactgtcacaacagtcaatrtttagaccaaaatgtgctatgcaaagaataagcattgg

SEQ ID NO: 207278 - DNA, 544 bp, Homo sapiens
tgtggtttgcaagggtatattttaaactatttcttcctaggtgctctggtgccggagatttacatgacctgtgtgatttgaagagaacattccccaaagggtgtatataactgagtcaaggaggatacaactctttttaattygcattgaagttttgcttataaaaatagtcagtgtgggaagattgcttgaggccaggagtttgagaccagcctgagcaacatagcaatacatcgactctacttattaaaaaaaaaaaaaagaagaagaaagaaaaatagccacgtgtggtggcatacctgtagtcacagctactcaggaggctgagactagaggatcacttgagcccaggaggtagaagctgcagtgagccatgattgtgccactgcactccagctgagtgacagagtaaggccctgtcaataacaaaaatggaactatgaatggaactatgaatgggtattcttttgccaactattcatttcaaaacttacatacacatctaggtttctaaaggaaatttttgatagcttttatgggtaat

SEQ ID NO: 207279 - DNA, 544 bp, Homo sapiens
tgtggtttgcaagggtatattttaaactatttcttcctaggtgctctggtgccggagatttacatgacctgtgtgatttgaagagaacattccccaaagggtgtatataactgagtcaaggaggatacaactctttttaattcgcattgaagttttgcttataaaaatagtcagtgtgggaagattgcttgaggccaggagtttgagaccagcctgagcaacatagcaatacatcgactctacttattaaaaaaaaaaaaaagaagaagaaagaaaaatagccacrtgtggtggcatacctgtagtcacagctactcaggaggctgagactagaggatcacttgagcccaggaggtagaagctgcagtgagccatgattgtgccactgcactccagctgagtgacagagtaaggccctgtcaataacaaaaatggaactatgaatggaactatgaatgggtattcttttgccaactattcatttcaaaacttacatacacatctaggtttctaaaggaaatttttgatagcttttatgggtaat

SEQ ID NO: 207280 - DNA, 573 bp, Homo sapiens
cttattttacattgctatggaaactactttgccccaaatttggtcctcagccttcataagattatttatcaaggacaaaaggaaaatcttaaaggtcttctccaaaatcattggtaagaagctttaacatatgaacaggtgaacttcacttgtctaattttaccagaaatataatttagatccaacwgtctttgtataaactgatgaatttatattactgtgttttactgtcatgactaaacttttaaaatgaacgctagaagatttttgtttgtgtgtgtatgtgttcatgtgcatttacccatgtcgtattttgtgtctacatggtaaaatctggcttagtcagccagaaatcccttaagaaattccattcaaactggcttaagataaatgagcactcttataaattaatacttgaaacagcaaaaatgtatagtaattaacccaaataccttttagtttatgtgacttaactaaatatgtaacaaatatgctggctttaattttgtttgtaaaataaaaatgaagatgtcttcagaattgttagcatgtattttctttcacctggactta

SEQ ID NO: 207281 - DNA, 549 bp, Homo sapiens
ttaggatatagaaactattagtgggccattattctgccttccacagacatacctgaaagagtgaggccagaggtcatcttttatatcaaatagtgttgaatccttaagttttaaaaattatatatataatgggtgcagcacaccaacatggcacatgtatacatatgtaacaaacctgcacattgtgacatgtaccctagaacttaaagtataataataaaaaacaaaagaaattattaatatttcaatgtggataaaagaaaatatgcataaagtttttcttacccccatttgtttaactccagcattcatagtttgtgatttaatatttaggattaaaaaaatggaatsagtttgttttattcaaatccatttcaatacatccaagcaactattttactcaagcatctcatttccccatgaacccatctgttatggattgaattgtgtcaccctcaccaaaattattacgttgaagccctaatccccagaacctctgaatgtgaccttacatgaaatacagtcattgctgatgtaatcagttaaact

SEQ ID NO: 207282 - DNA, 549 bp, Homo sapiens
ttaggatatagaaactattagtgggccattattctgccttccacagacatacctgaaagagtgaggccagaggtcatcttttatatcaaatagtgttgaatccttaagttttaaaaattatatatataatgggtgcagcacaccaacatggcacatgtatacatatgtaacaaacctgcacattgtgacatgtaccctagaacttaaagtataataataaaaaacaaaagaaattattaatatttcaatgtggataaaagaaaatatgcataaagtttttcttacccccatttgtttaactccagcattcatagtttgtgatttaatatttaggattaaaaaaatggaatgagtttgttttattcaaatccatttcaatacatccaagcaactattttactcaagcatctcatttccccatgaacccatctgttatggattgaattgtgtcaccctcaccaaaattattacgttgaagcyctaatccccagaacctctgaatgtgaccttacatgaaatacagtcattgctgatgtaatcagttaaact

SEQ ID NO: 207283 - DNA, 532 bp, Homo sapiens
aaaaataaaatattacctaataaatagaacacagaaacataattcaacttttcttcaggctatgaggacattcttagaaaaaaatatgtatttttctcttatataagacagtggggaagatgaagaggatgaacagctgtcatgtgaatggctttttggctctgtttcttgtgtccccagttttcaggtcttattctgtgtctttctgtgagattatctgtccactctctatatgttgattctacaaaccctcrtacttttcactgacttctccctaatttttaattagttgcaacttaacaagatcagacattccctaaggaaaaactagacagttcagtttatggagttggaagctaacatcacacatgatcctagatcaatactatggatctgaagaagattctattgctctctagaaaaaaataaaatatgtactatattatagctctctgttcagaacaacctttatttgtttctatacgtaaaactatattccagatagctgaaactagcaaggattaagcattac

SEQ ID NO: 207284 - DNA, 538 bp, Homo sapiens
atagcatccaaaatacatcagcttaaagctaaagtgcaccaaccctgtacagatttggaagtagcatttcaggaagaggaagcaactggtaaaaaggcccaaaagcaggaacrggggtgatcaacgtgtggtggacaaagagaagagttttttgagaggatggtgaggagggtagaagctggctgtgtaggactttataagccagggtcagcagttgttcaatctcatcaagttgtataccttaatatctgtagatgtttatgcatgtgcgtaatatatatattatataatttttaagcatggtagtgacattatctgacttttacttttaaaagattgttttggtttggcataaagaatagattgtagagggagcaaaagaggaagtagagacaccaattagaaatctggtacagttgtccaatacagaggtgatgatggcctgccctagcacagtggcaataaaaatagagagatgatggatacaggatatgttttgcagctgaatagataagacacattgatagacttgacatga

SEQ ID NO: 207285 - DNA, 538 bp, Homo sapiens
atagcatccaaaatacatcagcttaaagctaaagtgcaccaaccctgtacagatttggaagtagcatttcaggaagaggaagcaactggtaaaaaggcccaaaagcaggaacaggggtgatcaacgtgtggtggacaaagagaagagttttttgagaggatggtgaggagggtagaagctggctgtgtaggactttataagccagggtcagcagttgttcaatctcatcaagttgtataccttaatatctgtagatgtttatgcatgtgygtaatatatatattatataatttttaagcatggtagtgacattatctgacttttacttttaaaagattgttttggtttggcataaagaatagattgtagagggagcaaaagaggaagtagagacaccaattagaaatctggtacagttgtccaatacagaggtgatgatggcctgccctagcacagtggcaataaaaatagagagatgatggatacaggatatgttttgcagctgaatagataagacacattgatagacttgacatga

SEQ ID NO: 207286 - DNA, 538 bp, Homo sapiens
atagcatccaaaatacatcagcttaaagctaaagtgcaccaaccctgtacagatttggaagtagcatttcaggaagaggaagcaactggtaaaaaggcccaaaagcaggaacaggggtgatcaacgtgtggtggacaaagagaagagttttttgagaggatggtgaggagggtagaagctggctgtgtaggactttataagccagggtcagcagttgttcaatctcatcaagttgtataccttaatatctgtagatgtttatgcatgtgcgtaatatatatattatataatttttaagcatggtagtgacattatctgacttttacttttaaaarattgttttggtttggcataaagaatagattgtagagggagcaaaagaggaagtagagacaccaattagaaatctggtacagttgtccaatacagaggtgatgatggcctgccctagcacagtggcaataaaaatagagagatgatggatacaggatatgttttgcagctgaatagataagacacattgatagacttgacatga

SEQ ID NO: 207287 - DNA, 590 bp, Homo sapiens
acttagggaggccaaggtgggaggacggctgtagcccaggagtttgacactcacctgggcaacatattgaaaccctatctctaccaaaatacaaaaattagctaggctttgtggcttacacatgtggtcccagctacttgggaggctgaggtgggaggatcccttgagcatgggatgtggaggttacatcccttgagccaacagcgagccactgcactctagcctgggagagacagcaaaaacctgtatcaaaaaaaccctaaacaaaacagtcttaagaaaaacaaaaacaaaaaattttaaaaatcctgttaacacaaagggtctgcgatgcacacccttcagattcttagaacatttttgtctgtttgaaaggatatgaggccccacctaacatctttgaggtcttaaaggattgtacaagaccacccyggatttgatctctgccctgaaaatagtacttgagagtttttgttttctggtaaaataagaaacatttattttcaaaaacagtcttgacatcttactgtttcctctatgtttttattaaaaactgaacagttgcatttttggcttatctgtctatttgt

SEQ ID NO: 207288 - DNA, 590 bp, Homo sapiens
acttagggaggccaaggtgggaggacggctgtagcccaggagtttgacactcacctgggcaacatattgaaaccctatctctaccaaaatacaaaaattagctaggctttgtggcttacacatgtggtcccagctacttgggaggctgaggtgggaggatcccttgagcatgggatgtggaggttacatcccttgagccaacagcgagccactgcactctagcctgggagagacagcaaaaacctgtatcaaaaaaaccctaaacaaaacagtcttaagaaaaacaaaaacaaaaaattttaaaaatcctgttaacacaaagggtctgcgatgcacacccttcagattcttagaacatttttgtctgtttgaaaggatatgaggccccacctaacatctttgaggtcttaaaggattgtacaagaccaccccggatttgatctctgccctgaaamtagtacttgagagtttttgttttctggtaaaataagaaacatttattttcaaaaacagtcttgacatcttactgtttcctctatgtttttattaaaaactgaacagttgcatttttggcttatctgtctatttgt

SEQ ID NO: 207289 - DNA, 528 bp, Homo sapiens
cctgaagggaataaagaccttaaaactgaaaggtcttcatatggttttcctttaggatatgtttagttcaataggggaaatgcaatttacctccaagatttattatgcacttccagaaggtagacrtttactctcccctcatcaccaggattaggcacaattatgtcattaaccttccaaacattccttttggatggtggtgaatttcccaataaccattatggtcaagctgaggtcaggggtaaaccaaaggttaagcatcacagagtctagggtcgtataacttcagaggcgaaaaccgtgattggaatctaggttctctctctggtggattgcctcactcccatgcaggttggtttgcctcttctgatacctacagagactttgagtcccggacgttcacaggacatgaggaaagcacaaaagacatggaaaaacgatcaagtaaccatgaacaaaaggaggggttcctccgcctgcttcatcatggctgtgacccgtttatcagggatatggcttacacaacta

SEQ ID NO: 207290 - DNA, 531 bp, Homo sapiens
cttgcagtcccctgaagggaataaagaccttaaaactgaaaggtcttcatatggttttcctttaggatatgtttagttcaataggggaaatgcaatttacctccaagatttattatgcacttccagaaggtagacatttactctcccctcatcaccaggattaggcacaattatgtcattaaccttccaaacattccttttggatggkggtgaatttcccaataaccattatggtcaagctgaggtcaggggtaaaccaaaggttaagcatcacagagtctagggtcgtataacttcagaggcgaaaaccgtgattggaatctaggttctctctctggtggattgcctcactcccatgcaggttggtttgcctcttctgatacctacagagactttgagtcccggacgttcacaggacatgaggaaagcacaaaagacatggaaaaacgatcaagtaaccatgaacaaaaggaggggttcctccgcctgcttcatcatggctgtgacccgtttatcagggatatggcttac

SEQ ID NO: 207291 - DNA, 528 bp, Homo sapiens
cctgaagggaataaagaccttaaaactgaaaggtcttcatatggttttcctttaggatatgtttagttcaataggggaaatgcaatttacctccaagatttattatgcacttccagaaggtagacatttactctcccctcatcaccaggattaggcacaattatgtcattaaccttccaaacattccttttggatggtggtgaatttcccaataaccattatggtcaagctgaggtcaggggtaaaccaaaggttaagcatcacagagtctagggtcgtataacttcagaggcgaaaaccgtgattggaatctaggttctctctctggtggattgcctcactcccatgcaggttggtttgcctcttctgatacctacagagactttgagtcccggacgttcacaggacatgaggaaagcacaaaagasatggaaaaacgatcaagtaaccatgaacaaaaggaggggttcctccgcctgcttcatcatggctgtgacccgtttatcagggatatggcttacacaacta

SEQ ID NO: 207292 - DNA, 451 bp, Homo sapiens
gtttattcaacaaggtcaaccaacctggagcggggcagcatcagccagtgcagcgacaaaactggattcttccagctaaactttttcctgcataaacaggaaataagcaatttctctcctcttattatgtgaattgtctaggttgcagctcagatgctaagttaaaacaactgaaatatactgagattctactgtgtgctatatccgacactgggcattttacatatattttctgacttaatttttaataacaaactgcaagttatatattatgctcccactttaccaagaacactgaggctccagaagaccaagtaatttacccaagtgaagtaacagagctgggacttttactatgcaaagtttagcaggctccaaagtctgtgatctctgtgctttgttttcattttctygcaaagaaactcgctgtaaggtgaaggcctgatcacaa

SEQ ID NO: 207293 - DNA, 582 bp, Homo sapiens
gaccaggttccagcttcctgtggtgcctcatttgctgaagaagaaaaaaaaacttgtgagctggttaacttggtaaaggttaagttaaacttcctttaccaaaaaggacttcctttaccatctacttggtgatcaagcctttctttgatatctgaattaaccctcaaaatagtaaatttaagagtgtagttgaaagcctaaaattaagaaaatctcagtttttaagggttcagagttgaaggggcctgaaaattccatccccacccctgcaggcttcgtccagctggggcagggcctgggctttgacacaacatggttacaagagcctcaggagagcagccaacagatgtcctggaggaacaggagtggacttcacaggaatccacaaggccctggccttcactctcagtccagctggctctcagttacaaaaggcaaattccaccagctgaatgaatcccagcagctgtggtagcctggaggctccatcctgtacaatacatcaggcagccagccagttctgagccgactrctttctgtgtgatgaatcagccctggcccccaaaagagaggcagttcaac

SEQ ID NO: 207294 - DNA, 655 bp, Homo sapiens
ggctcctgttctcttccattctgtcattcccagaaataccagtgcaagaaagcttcatcaggaactagggtcacagtgtcagacaaagcttattgtctgggtaggtgattttattccaggaaragagctcctaaagtaataccaaaataccaataaatgtagctagactgactcattttcaagccttttacggttctattttgtaaacccaacatagagaataattaatttccaaaatctacaggacaccttactaccaatttttgtggggagagataatgacttgaatggaacataagcagagagttgattttaagtaaggaaatggggtcagagagaggttaagtggctggcctggggtcagatagcaagctggtgactcaactttgcagctcctggatctgaggactgcaaagaaaaccagagctcatttcctctagataagttaactgccccatatctgtggtctgccataagcttttaagagccacattccttttgtgactatagacctgagttcctatggctttcactggagaatggaaaacactttcaaggtcagactgtgttacatagagggcagaatagcacttatttaccaccaaaaatcatcatgcaatttgtaggaactgccgtcttttgcatgccttctggt

SEQ ID NO: 207295 - DNA, 655 bp, Homo sapiens
ggctcctgttctcttccattctgtcattcccagaaataccagtgcaagaaagcttcatcaggaactagggtcacagtgtcagacaaagcttattgtctgggtaggtgattttattccaggaagagagctcctaaagtaataccaaaataccaataaatgtagctagactgactcattttcaagccttttacggttctattttgtaaacccaacrtagagaataattaatttccaaaatctacaggacaccttactaccaatttttgtggggagagataatgacttgaatggaacataagcagagagttgattttaagtaaggaaatggggtcagagagaggttaagtggctggcctggggtcagatagcaagctggtgactcaactttgcagctcctggatctgaggactgcaaagaaaaccagagctcatttcctctagataagttaactgccccatatctgtggtctgccataagcttttaagagccacattccttttgtgactatagacctgagttcctatggctttcactggagaatggaaaacactttcaaggtcagactgtgttacatagagggcagaatagcacttatttaccaccaaaaatcatcatgcaatttgtaggaactgccgtcttttgcatgccttctggt

SEQ ID NO: 207296 - DNA, 626 bp, Homo sapiens
tgtatctcagcaagccctgtgctgaaatgtaagtgccaattcccttgctgcttatcataaaattcccatcagttacatgaatatttttaaacacttaactttgatcaatcctttggctttttcctgtgtatgcgtatctgtgtacgcctgtgtctatggtgattcttttattagatgggtcttaaatgtgataggcaataatgcaacaaatctaaaatttctaagtctatgttcagggtcaggactaggatgagacaagaaaggggctaaagtggcaaaattcaagaaggccctcactctactctcagggtacccaaagctttttcactgccagtcccactcatctgaggctctgtaaagtgacatgctttactactgtgcaaaaaacacacacrcgtcatctaatcctctcacaaaaaatgctgtgtctcctcttctcatagctgactaattctcaaccttcaagttctagctcagatgtctcctccttggagagaatgttcctaaataccttctttaaaggagtatcctctcctataattcatcatggcactcttatagttcttctccatgttggtcaaaatgtataattacttcttgtttattgtcagtttccacaagaatat

SEQ ID NO: 207297 - DNA, 435 bp, Homo sapiens
ggtcaacatggcgaaacccctgtctttactaaaaataaaaaaattagcctgccatggttgtgcacgactgtagtcccagctactcgagaggctgaggcataagaatcacttgaatccaggaggcggaggttgcaatgagctgagattgcaccattgcactccagcctgggcgacagagtgagagtctgtctctaaataaataaataaacaaataaatctacagttaacawcatacttactgatgaatgacaacattttccctaaggtcaagaacaagacaaggttattctaaaagtattccacattgccctggagtgcttgcaataaggcaaggaaaaaacaaaacaaacaaacaaaaaaacacaaggcatgtgaattggaaaagaagaagtaaaactctttatttgcagactatataataatgtgtatagacaa

SEQ ID NO: 207298 - DNA, 565 bp, Homo sapiens
ccctgtctctactgaaaacaaattagctgagcatggtggtgtatgcctacagtcccagctattcaggaggctgaggtggaaggatcacctgagccggggaggtcaggactgcagtgaacagtgattgtgcctggctgacagagtgagaccctgtctccacaaaaaaaaaaaaaaattgtcctgagactctgaggttcttcctttggggacaatgtaagaatacctaagacttctaccagctctccagaaattctagatccctgtactatctcactggttaaggaaaggcagagaaagcactccccatcactctggataccaatcagagacccagggaagaagaaaatggtggtttttatcactgcccatttcctaaatatctgamaagacccttgaggccacccatcccagcataaaagcatcagcgctgccactgaagacaggcaaatcatcttgaatctgtcttaaaaagaattcacagcagtagcaaaattacatcactttcctaaggatgaagaaatgtgaaggatgcagactcagggtgccaaagattgcaaaacaagct

SEQ ID NO: 207299 - DNA, 597 bp, Homo sapiens
ggcatggtggctcacgcctgtaatcccagaactttgggaggccgaggcaggcggatcatgaggtcaggagatcaaggctatcctggctaacacggtgagaccccgtctctactaaaaatattaaaaaaaaaaaaaattagccaggcgcggtggtgggcscccttagtcccagcttctcaggaggctgaggcaggagaatcacttgaacctgggaggtggaggttgcagtgagccgagatcgtaccactgcactccagcctgggcgacagagcaagactccgtctaaaaaaaaaaaaaaaaaaaaaagagagagagagaaatagctttagttcttttacagaagatgaaagaagcatggaaaagcctgaagcctcacatttctacaatgcaactgtaagactgctgttctcactttttttgcataggtccctccacttggttcagcagctgattccctatatggcctttgggcacagaggagttcacaggtttctgatgtgaggactcaggaatggtacttggtcttctgctgaaaagctaataattgcttgctttgggtacaacttccccacccagaaaattcaacttgtaattctt

SEQ ID NO: 207300 - DNA, 645 bp, Homo sapiens
ctcacttcaaacacatgacccttgagaccatcagatgcaattttggttccttgggtcctggtgatggcgtctttccaatatttcttatattgaacatagcaagtgctttcacatcataccaatctttcttagaaaattgatcaatcactttcttcttggctccctttttgctgcctttcataaagcacttgttcttgccaactgccatggtgctggtcagagccaaaaggctttttaatttttttttagacagagtcttattgtctgcagtacagtggcacaatcatggctcacggtagcctcaactttctgagcttaagtgatcctcccacttcagcctccyaagtagctgggaccacaggcacacaccaatatgcctggctgattttcaaatattttacagagacatggtctccctatgttccccaagctggtcttgcacttctgggctcaaggaatcctcccaccttggccctcctaaagtgccgctttcttttctttttattagtgttagcatagtccatctttcttattattttagttttactctgtgtcttcatatttaaggtggctttctggtaagcagtgtttagttgggttttgatattttatccgctctgacatatctgtcttttaattggtgca

SEQ ID NO: 207301 - DNA, 466 bp, Homo sapiens
tcttaatacatagtatggcccaagacagaaactgcagacatggcccaggcctaagccagtcaatgtagttctatcccctggcaagagtggctgtttcagggacaggtatgtgactggtttcaggcccaggagagtgaagctcatggattttcagaattgttgcaagagaatatttcttttctgctgggcctgggaaaatgagagtctatgaaggaaggaagcaccgcmcaatgaagagaggaaaagcaaatgcctctggggactctgttgggagtcctggatccagctattcctgaagctagctagctgtgattttccagatgagccataaaacctgtctctctggtttttttaaagccaaacaagcctcatctgcaacagaaagagtcccaactcattccctgagcaaacaggggctggctgagtgatgtcaaaccatttgaaccccccgattccacacggaatg

SEQ ID NO: 207302 - DNA, 610 bp, Homo sapiens
taatgttaaaagtgtcaatacatcagggagatataayactgagaaaaatataagcatttaacaatatagacctaacatatataaacgaaaacctacagaattgaaaaaagaaatagacaattcaacaataatagttagagacttcaatatcatattttcaataatgattagaacaactagacagaataacagtaagaaaaaactccaaaattataagccatctagaccacacagatgtctatagaacattctgcccaacaacaacagaaaacatattcttctcaagtacacatggaacattctctaggatagaccacatactatgccataaaacaagcctatatatatattatatatataacatatatagtatatataaaataattgaaatcatgcgaagtatgctctgtggctatatggaatgaaattagaaattggtaatgaaaataaatttggaaaattcacaaatatataaaattaaacaacacactactaaataatcaaggtgtcaaagaagaaatcacaagggaaatcagaatacactttcagatgaatgaaaatgaaggtataacaaaccaaaacttatgggataaagataaagtagttatta

SEQ ID NO: 207303 - DNA, 367 bp, Homo sapiens
tcaaggcatcaacagatttggtgtctgatgagggactgcttccttgttcatggatgggtatcttttcatgtgtacttacatggtggaatgggcaaaggagctctctggggtcctttttgtaaaggcactaactttattaatgagggctccattcccatgatctaatcacctccctagaagtcccatctcttaatacsatcacattgaaagttaagttgtaacatacaaatttgggagaaccacaaatattctatctatagcaacattggagattaggttacaacatgaattttggggagatgcaagcatttagtctatggcaattctagtgtgtgtatgtgtgtgtgtgtttaacaggttattaaat

SEQ ID NO: 207304 - DNA, 576 bp, Homo sapiens
aactttccatctccctgagtgaagttctagtcctatatttttccttagcattttgttcttctgcaacataattcttattacattattaattttccagtatatttttaatatcctctgttaagttgtaagctctgcgagcattaagtgttaactacttttcaccattcattcattttttttttttttgagaccgagtctcgctctgtcacccaggctggagtgcagtggtgcgatctcggctcactgcaacctccgcctcctgggtacaagcaattctgctgcctcagcctcctgagtagctgggaccacaggcacctgccaccacacctggctaatttttgtatctttagtagagacagggttttaccatgtgggccaggctkgtcttgaactccccagctcaggtgatccacccacttcagcctcccaaaatgctggaattataggcatgagccatcacgcccagcccattctttcaatttataagtagtcagcaccttctgtattccagacacagcactaggtgttaggaattaacattctagtgggatagaaggacaaaaagtaaataaacag

SEQ ID NO: 207305 - DNA, 641 bp, Homo sapiens
tgactccctggtaacactcaggacccaggccgatagagaacctgccatctcatagctatagcaacccggaatacatgacttcttcaatcaccacagcagggaaacagatattggagaagagtatttggacttttcactgcctacacagaagtgatacatgtcacttgattacataactcacatatgcattacctcatgtattagtccagttttayattgctataaagaatgatctgagggtatgtaatttataaagaaaagaggtttaattgactcacaggtctgcatggctggggaagcctcaggaaacttataatcatagctaaaggtgaaggggaagcaagacacatcttacacagtggcaggagagagagagggcaaggggggaactgccaagcactttaaaaccatcagatcccatgaaaactcattcactattatgagaaccatgcggagaaaccaatcacctgccaccaggtccttccctcaacacatgggaattacaatttgagatgagagttgggtgaggacacagcgccaaaccatatcacctcacatactcatcatttttgtggtgcgaaaaaatttatagccactctcttagcatttttcaagaatatgatatgttatcaagtacagtt

SEQ ID NO: 207306 - DNA, 509 bp, Homo sapiens
atgcttcaaaaaagatgactgaactttgttatgagcttgttaaacagccgctattgaatgaaacttttagcacaatatgtccctgctccctgtaatcatgctataattctgtcatattgaagcaaaaaatgttcatcattttgtcagctctgtctgcaaagcagagaattaccttcccaagttcctgagatttatgcttttaattacctcctatctgcttcactactctttaaacctaagaatcaatataaatagtcttatttatggcaaaaatgtaaaatgtttgacaaaagcaggttatcattttctagatttccatctgatgctattgattmtattttcagtattatatttcttgacagaatcagttggttttttcaaacttacagtattattcatttattcaacaatttgtactgctgaacagcagatgtaaactttgcaactagctttttggttcctaacccagcaatgaaattatcactactgtggttatctctttatttaat

SEQ ID NO: 207307 - DNA, 387 bp, Homo sapiens
attgattctattttcagtattatatttcttgacagaatcagttggttttttcaaacttacagtattattcatttattcaacaatttgtactgctgaacagcagatgtaaactttgcaactagctttttggttcctaacccagcaatgaaattatcactactgtgrttatctctttatttaatcacctgctgcagagttcagtttatatgtgactttctccaaatccccttatcataaggtcacttttctgtgagggtcaacttccttggcttatttaggttttgcatgagaggctactatttgcatgggtgaaatctaatagcttagtcactagtattcttgaacatacacacacatatacatacactttatatgaaattgtgtata

SEQ ID NO: 207308 - DNA, 560 bp, Homo sapiens
gccagcccagcaagctggtcagttacaaactttgctgtatgtccctgaaacaaacaaacaaacaaacaaactggatgaggtttccctctcctcttgttttatgtccttgagagcttgacttgtaaccatatggtagtactttctcttggtctttgccacccagaggacaggaattttggagttcatgtcatacatagctccaaaaatcatcttgagcagttaaaagccttaaaatgatattattttaagagggctggttcctcaagggggcttaggggtttgttatcatgctaggtctcttaggaacgttgttatatggagatttatggctttgcaattgtgaccataaagaattgggcaagaaatagatatgaygttgcattgcaaactatgaaactcacaataacataacataaatgactaagagtttcttgcctatcctacctttgccccatgatacatacctcatcaagacattagaagttattataaaaataacttcacatggagaatagagaaaaataactcataatcttgtcacactaaacaggagttttcaa

SEQ ID NO: 207309 - DNA, 523 bp, Homo sapiens
aaacatagaaagacaaaagatacatttacgaatatctagtttcaagttcttagtagactattgtatctattgacatctccaaaaaaatctttgaaaataaatattcccattaagttttaaaaattgttagctgcctacataattttttacataactcctaatacagttttttttgtttttgtttttgtttttgtttttgttttgaggcagagtcttgctccgtggcccaggctggagtgtagtggtgmgatatcagctcactgaaacctctgcttcctgagttcaagcaattctcctgtctcagcctcctgagtggctgggattataggcacccaccaccgcacctggccagttttttttttttttttttgtatttttagtagagactgggtttcgtcatattggccaggctggtctcgaactcctgacctcaggcgatccgcctgacttggcctcccaaagtgctgggattaccggtgtgagccattgtgcccggcccctaatagttttattctgcccaaat

SEQ ID NO: 207310 - DNA, 523 bp, Homo sapiens
aaacatagaaagacaaaagatacatttacgaatatctagtttcaagttcttagtagactattgtatctattgacatctccaaaaaaatctttgaaaataaatattcccattaagttttaaaaattgttagctgcctacataattttttacataactcctaatacagttttttttgtttttgtttttgtttttgtttttgttttgaggcagagtcttgctccgtggcccaggctggagtgtagtggtgcgatatcagctcactgaaacctctgcttcctgagttcaagcaattctcctgtctcagcctcctgagtggctgggattataggcacccaccaccgcacctggccagttttttttttttttttttgkatttttagtagagactgggtttcgtcatattggccaggctggtctcgaactcctgacctcaggcgatccgcctgacttggcctcccaaagtgctgggattaccggtgtgagccattgtgcccggcccctaatagttttattctgcccaaat

SEQ ID NO: 207311 - DNA, 523 bp, Homo sapiens
aaacatagaaagacaaaagatacatttacgaatatctagtttcaagttcttagtagactattgtatctattgacatctccaaaaaaatctttgaaaataaatattcccattaagttttaaaaattgttagctgcctacataattttttacataactcctaatacagttttttttgtttttgtttttgtttttgtttttgttttgaggcagagtcttgctccgtggcccaggctggagtgtagtggtgcgatatcagctcactgaaacctctgcttcctgagttcaagcaattctcctgtctcagcctcctgagtggctgggattataggcacccaccaccgcacctggccagttttttttttttttttttgtatttttagtagagactgggtttcgtcatattggccaggctggtctcgaactcctgacctcaggcgatccgcctgacttggcctcccaaagtgctgggattaccggtgtgagccatygtgcccggcccctaatagttttattctgcccaaat

SEQ ID NO: 207312 - DNA, 537 bp, Homo sapiens
ctggggaaccttcattttgttacagtgcaagggtaatgtcagaatttcctggagtcggtcatcacaggaaattatcagcaattcatagactcccttttacatttgcttcagcctctagggtaatcacaaaagattacagtctccatttcagctctcatatcactgaaatatcctctgccgagagcatgattgatttccagaggccagcttttaacctcagctttgggagggccaatggaactgtagtggtttgataactgccaacaactgacattgtgatattgttctattgtgaggcagaaatttggtgattcttgactaattatacaaaatctttttaataaagtggcatatcagcktcttgtgttgtcaggtgtaggtatttgtctgattataattagtattacaggttgtggggaggcagaaaggtgaataaaaatttcagatgagtttcatgaagactgaagggccaagcatcctgctagactgaatttcaggaaagaaagcagaataattcagaaacatttctgaaaatct

SEQ ID NO: 207313 - DNA, 534 bp, Homo sapiens
accaaccccatatcctaccccttcctctgccagtctgattgtcagaccttaatgtttctcattcaaattctatagagaaagaatcccagtctcctgactatgcattattgaaggtatctgctgcatgggaattaaagacttctgaaattctgcttatcagcagtcggggggattgaccactccacacaacttcaacccatatctttttttacagctcctcaccttatccccacccgcagccatgccaggtgatgcaaagtcctttcagatgtcactctctgaccacaccttaggctttggcatcttccaacaacatgattggttctcttcttctattgtttttttgccttccagaattgtgttgagctctctcaccctttacttcctccaatcccataattttttaaaaatcagtttattccttcattttagtggggtttggagraggacaagagataaacatgagtgggcaacttggtgtgtttcacagaaatcttacacctcttgtgttactacttgggaaattgcttcctt

SEQ ID NO: 207314 - DNA, 623 bp, Homo sapiens
ctggtggggctgacctcatccatatgtacctgaaatttattacataggtggaaagttgattatacattattatgaggtcatggcttctttgaaaatctgacaacagttgtagaccttcccccaagcaaaatgcacataatgcatgtacacacatagtgtatataatttcaggagttttgtgttctccctttgaaggtcagctatgaagcccagaagttttgtatcagagtaagtccctttgtatactaaacaaaagaattcatatttcctctagaatatgtgttgaaatgaacatacaaaacatacctaagagaacacacacatttatgtattaacttgggaagtcacttgtgtaagaatttaaataattttattcatgagagaatttcctatattaaaatgagttagaaaaggagaaaaaaatctttacttacgaggtggctgggatgtttacctttaccttcacgggtcaagggcaaatggaaggtggtgaagccaaccaagtactcctgctatcctaaagagtttcagcctrtgagagtaaaagacctgcagaacgttgataagaacatgcagagatttgggagttgggactttagaacaggagaaagagtttagtaaag

SEQ ID NO: 207315 - DNA, 505 bp, Homo sapiens
agaagtcatgtattagaaattataacctcaagtttgtaccacacttagatatggggtatacatttgtagtacttcatggcttgggaactcacagcggagaacataacataaaaacatagttgaatctttgaaatctattgggttctagaagaaacaagtgtaaaactattctgtaagatactttcatgacaaaagaattcaataataataataataactccttctggagattatctcacaataaaaaatataaatgacacacaaaataaattagctgagcatcagcaaatacaacaaacaagataattaagaccttgagaattgcagatactaatccaaaaagaattaacataagactttcaaaatacttagagttaaaaaggaataggaactattgtgaaaaaggacactatgaaaaagagaagggrttgatttttgttgtttttttttttttcagagacagggtctagctctgttgcccagtgatggacatgttgcccagtga

SEQ ID NO: 207316 - DNA, 357 bp, Homo sapiens
tactttactctatcatccaccagggggcaatagtgtggtgcttggagccctgaagctcttgaatgctaatgttgaaccgcgatttgggatccaggcaacagagccaycttgaagcacagccagtgaggccggtattcttcctctcctattaaagtggggctcccaggtaggtgtctcaacactgaccaggctgacagtggggcacgatgtgtcacagggggatcataagtttctctaccactcaataggcatttttcaaactcttctgtggttgagacagcttcggtaatcattcttgagctgcacagaactttggaggtgggaaatagccccaagtttgtctcaactgtggtgaag

SEQ ID NO: 207317 - DNA, 595 bp, Homo sapiens
agagaaccctctagtgaagaaacactttgcattttgatttctagctcttcaggataaagatcagtagactcttcctcatggctcctggtaataagagtctctcctgagaggcagtatcattatggatagctggtagccaagttcacgcctttgttaaaacaaaaggctagctttaactctcactcttagaattcccaacatggctgagcccattttaaaatcaatatagcrggcagctaagcactgaaatcagtttggaagcagaacaccaagtaagagtgcaaaagtaccactctcaggccagagcgcgagaacttttcaatagggtggttgtttgcttcatctacaggcaaaaaacataaactgacccactagtcactgaggtgcaaaatacaacctggatcacagattctcaaagatagtgtgtagaacaatcacctggaaagattattaaaatgcagatgccagagtcccaccctagagattattattcaggaaggtgtaagtggctcccagaaatctgcatcatagcaggtgccccctagtgtaaccaggagaaggcagaacagtctagctcataagattaaagaagctt

SEQ ID NO: 207318 - DNA, 399 bp, Homo sapiens
ggaattcaggcatatgccagcacacctggctwttttttttaaacaattatttgtagagacatggtctcaactatgttgtccaggctggtctcaaactcctgggatcaagtcatccttcttccttagcttctcaaagtgctgggattacagattcgagccgcggctcctggcctgcaaagcatttgaaattgctaaataaataaatatagaaaagacttcttttggcttatatactttctcgaagacttctaaaagagtaggttaccatttccccatgtcgggaagacagctccctgcctcgtgctcccagtgtgttatactgggtgggtctataccatataatgttcagccacatggaccctagagccaggctgccctctttaaatcctgcctccacag

SEQ ID NO: 207319 - DNA, 619 bp, Homo sapiens
aggggtgaatattaactggaagcagtgtttattgtgacatggtgatgaggatgaggatgaggatgatgagaatgacaatgacaactccaagcacaatgccaagcacatcccatttcatcaggaagctcttcaaacaggcattaaacaaaaccaaaagcaaatctctacactcgactattcagaccacactattgataaaataactattactgtttttctcataattattagtctgtcataaagctaacattcactaatgaaggacagtaagtacagagcagcaaatgtctagattctcttccatgggagcatatataatcccattgagaagatggctctaatatacaagaaataattttgttaacaagacagaatatagcactattaagtcaaatgctaacttgtattgtgctggctgcctggaataagaattccaaaggaaaagtgattggtggggctggagcagtcagtgggtttgtaactgaatgacagaagaagacagatttttttaaagacgaagaagaagaagaagaagraggaggaggaggaagagagaggcaaggtgtggcggctcacacctgtaatcccaacactttgggaggctgaggtgggcagatca

SEQ ID NO: 207320 - DNA, 464 bp, Homo sapiens
tctttgtctagcatctcctccagaaagtgtctagtacactcattctcagtgaaacatacaggttaatcctaacatttcacatcttgcttaattagttggcttcccctgacaactctactaaataatcaaaatagcaataacccttccaggaaacaagatgttcaaagcagcctgacaaagtggtaaaggtcagaggcattccttccagattctagtccagtactgccaataattaactgtgtatcctggaaaagcacttccyttgtttgggcctcagtttctctagtatctaaagggattggagtcatgctgtcaaaagtccttttcacttggaacattttgtcatgtaggtgaaaagactttgaaaggtaaaaagcatcatgttaagtaaatatgcttaactacacaacactcatttgaggcattatttttctttaaagcgtattattggaaaacttagaatt

SEQ ID NO: 207321 - DNA, 456 bp, Homo sapiens
gaattcaagttcccaccacctcaaactctttgtctagcatctcctccagaaagtgtctagtacactcattctcagtgaaacatacaggttaatcctaacatttcacatcttgcttaattagttggcttcccctgacaactctactaaataatcaaaatagcaataacccttccaggaaacaagatgttcaaagcagcctgacaaagtggtaaaggtcagaggcattccttccagattctagtccagtactgccaataattaactgtgtatcctggaaaagcacttcccttgtttgggcctcagtttctctagtatctaaagggattggagtcatgctgtcaaaagtccttttcacttggaacattttgtcatgtaggtgaaaagactttgaaaggtaaaaagcatcatgttaagtaaatatgcttmactacacaacactcatttgaggcattattt

SEQ ID NO: 207322 - DNA, 581 bp, Homo sapiens
ccaccctcacagatggaattagtatccttataaaagaggcttcagagagctgcctccmaacttctgtcccttccaccatatgaggacacagcattcctccacttctggaaaatgcagcaagaaaagcaccatcttggaagcagagagcagccctcatcagatatcaaacctgccagcaccttgatcttggacttctcagcctccagaactgtgagaaataaatttctgttatttataaattaccctgtctcaggtattttgttatagcagcccgaacaaattaagacaaagggaaactaagataattagttgccaacagaccttcactaaaagaattactgaaggaaattcttcacagagaagggagattatatcagaagtaaacttggaggcaggcacagtggctcacacctgtaattctagcagtttggcagaccaaggcagggggattgcttgagttcaggaatttgagaccaactgggcaacacagtgagaccagtctctacaaaaaattttttaaaaaaattaattgggcacggtggctcacacctgtagtcccagttatttgggaggcttaggtg

SEQ ID NO: 207323 - DNA, 581 bp, Homo sapiens
ccaccctcacagatggaattagtatccttataaaagaggcttcagagagctgcctcccaacttctgtcccttccaccatatgaggacacagcattcctccacttctggaaaatgcagcaagaaaagcaccatcttggaagcagagagcagccctcatcagatatcaaacctgccagcaccttgatcttggacttctcagcctccagaactgtgagaaataaatttctgttatttataaattaccctgtctcaggtattttgttatagcagcccgaacaaattaagacaaagggaaactaagataattagttgccaacagaccttcrctaaaagaattactgaaggaaattcttcacagagaagggagattatatcagaagtaaacttggaggcaggcacagtggctcacacctgtaattctagcagtttggcagaccaaggcagggggattgcttgagttcaggaatttgagaccaactgggcaacacagtgagaccagtctctacaaaaaattttttaaaaaaattaattgggcacggtggctcacacctgtagtcccagttatttgggaggcttaggtg

SEQ ID NO: 207324 - DNA, 581 bp, Homo sapiens
ccaccctcacagatggaattagtatccttataaaagaggcttcagagagctgcctcccaacttctgtcccttccaccatatgaggacacagcattcctccacttctggaaaatgcagcaagaaaagcaccatcttggaagcagagagcagccctcatcagatatcaaacctgccagcaccttgatcttggacttctcagcctccagaactgtgagaaataaatttctgttatttataaattaccctgtctcaggtattttgttatagcagcccgaacaaattaagacaaagggaaactaagataattagttgccaacagaccttcactaaaagaattactgaaggaaattcttcacagagaagggagattatatcagaagtaaacttggaggcaggcacagtggctcacacctgtaattctagcagtttggcagaccaaggcagggggattgcttgagttcaggaatttgagaccaactgggcaacacagtgagaccagtctctacaaaaaattttttwaaaaaattaattgggcacggtggctcacacctgtagtcccagttatttgggaggcttaggtg

SEQ ID NO: 207325 - DNA, 608 bp, Homo sapiens
agctttttgaaaataaaattattgttaaccatattcacccagtagtgctacagagcattagaatttaatcctagcattagctgtaactttgtatccataaaccagtcttttcttattctcccttccccttcccgttcctagcctctcataacctgtattctagtctctacttttataagctttttttttttgctcccacgtataagtgagaacatgcagtatttatctctctgtgtttgacttatttaagataatgttctccaggttcatccatgttgtcacacatgacactattttcatactttctcatggctgaatagtactctaccaacttcattgttgtttataaatatccatttgttccagcactgtctgttgaagaggatattctatccccattgaatagtcttagcaacttcttaaaaatcaacaggtcgtagatagatggacatattgatgtattcygaattctgttccattagcctctgtctattcttatgccaaaagcacactatttttattactgcagttttctagtaaattttaaagttgggaactctgagtcctccaatattgttcttgtttttcaaaattattctggctctgtg

SEQ ID NO: 207326 - DNA, 371 bp, Homo sapiens
tgcagtacacttgtgaaaaagagatttctgtgagctttcctgctgcctttggcrcatttcctgttttgcatttcatacgggaatgagtgtttgtgttggtgtagtctcagcctggggctagtactcttcaggatttgaatccatttttctagttcccacatacgtttcataaatgtgtagaaggttggatttcttcttcaattttctggcctgtggtgagtttgttctctgctagagatgatagtaatcctgtgttttttttctcacggcaagttctcataattttttgaaatttagtttggtgaggctctcttatgggtttctaaagagctaactgcttctcacattagataggaacaatggtctcttac

SEQ ID NO: 207327 - DNA, 371 bp, Homo sapiens
tgcagtacacttgtgaaaaagagatttctgtgagctttcctgctgcctttggcgcatttcctgttttgcatttcatacgggaatgagtgtttgtgttggtgtagtctcagcctggggctagtactcttcaggatttgaatccatttttctagttcccacatacgtttcataaatgtgtagaaggttggatttcttcttcaattttctggcctgtggtgagtttgttctctgctagagatgatagtaatcctgtgtyttttttctcacggcaagttctcataattttttgaaatttagtttggtgaggctctcttatgggtttctaaagagctaactgcttctcacattagataggaacaatggtctcttac

SEQ ID NO: 207328 - DNA, 464 bp, Homo sapiens
aagacctcaaggccttggctgctgtgttgtcaatatccctcttctttaaagtaaagcaacaaagcagaacggtttcccaggtgcctctttttgtttcaatacaaagcatggaggcttcttttaggtttcatgtgtttactgttagtgaaaacagagaaacagaggggtgaagaataaacatgaaacacacacacacacacacacaygcatgcaaacacttccacaatatctcttgcatttatgcaggtcttttagaatgtataatcattctatagtcaggatcttatagggaaggggcaatgttacctttacccctactatatgtataaagaaacataggtcttaaaaatttaaaagatttaccctttagctagaaatggtggaactggagatgttattaatgctgactctcttggctgcctggctccttctaacacagcatgaggaacgcttagcagtgctgg

SEQ ID NO: 207329 - DNA, 482 bp, Homo sapiens
aatttccccttctcttagaaagttaaggtttgtactgcatgttactgtgcaagtcctgtgaggagggagcagagaaggttacctatataatgtagaagttatcgccccttaaaagattgctctgttagagttttgcagggcttgcctgcataagtgtgggctatttctaaatccatgatgaaattattggttaaatgtataggtagctttcccaaaagaaatagagctattagaagraaagatgaattcagaggttgggtaaatgttaaggaggcacccatcttggaaagtatatttttgccccaaagaggtgtggggtatttagatatactagggactgattagagaatggtaattggtcccttaagtaatacaaaggggtgtgaattatttcttttggagggaagggatgccatttgccccaattactcaacaggatttggaggaggtttgttcagagaaggagattagcacagagcagg

SEQ ID NO: 207330 - DNA, 337 bp, Homo sapiens
tgtcaccactattattcaacatagtaccagaagacctcacttgagcaatcagacgagagaaataaagggcattcaaattaaaaaggaagaaatctaattgtccttgtttatagatgatatgrtcttatatttggaaaaatctaaaaacttcaccaaaaaactgttagaactgataaattcaataaagttgcaggatacaaaatcaacatacaaaagtcagtagcatttctatacacctatggtgaacaatctgaacaagaaatcaaaaaagtaatctcatttacaacagccaccaataaaattaaatacctaggaattaaccaaagaagtgaaagat

SEQ ID NO: 207331 - DNA, 603 bp, Homo sapiens
ggcccaggaaagccaaaagattagacacccctgatgcaacctatatcaggttactctggagacaacctttattacctgagatttttttctgtataacaaggcaagccttattcgccatgcatttcttaccctcactctcctgtaacctatttccaccaccccrtagaaatcccaagctcctgttcctttctgtaggtcagattgttttattatataagcttcaattatctaatcctttgagtctcatatttctgtgtgattctcatgcatacataatataattgaaattgtttttctcctattaatctgtcttatgtcaatttaatttgtagcccaaagaacctggaagggtagggagacgccattctcccaacaccagctacattaggaaacagatacataatagacttgctccaagaaaattcactctgttcattaccataggtttatccttaaccctaattgtttccgggtgaagaggatggaccacatggaactacagggtcttctttatcctagagaaggtgtctctaagtcttacaacactaaaacttggccaagtagccttctttgcaccatccctttaggaccacaccaaaattg

SEQ ID NO: 207332 - DNA, 608 bp, Homo sapiens
accttccgtgaattacaagttcaagcaagagatgctttaatttcagctctttacctggatgccaagaaattgccagaattttctcaagtctaatttgatattattaatcccattttacagatgaagaaactaaggcacaaataggcacaacacaaggctcaaatttatgtaaatattaaagctagtatttgaacttatagaactcactggtggaaactatgttcttaaccactgtgcaaaactgcttctcactaaaaccctaccttgccaaggggccctgaggccttccacartctgacccctcacatttctctggtctcattttcttctaagctcactcttttccagttgaactggactccttgcagttacttgaatatttccaatacacccccactccaggcctctgaaactactgtcctctccttatcaccagatatcctcacgacatcttcctcacctcttctgatgtctaatcaaatgtcacccccacaaagtgggcttccctgacctctccatccataaacgaatccttttttcccctgcttcctcacccgctactcttttaacctgcattatttaccttcatagcacttattaaatattac

SEQ ID NO: 207333 - DNA, 608 bp, Homo sapiens
accttccgtgaattacaagttcaagcaagagatgctttaatttcagctctttacctggatgccaagaaattgccagaattttctcaagtctaatttgatattattaatcccattttacagatgaagaaactaaggcacaaataggcacaacacaaggctcaaatttatgtaaatattaaagctagtatttgaacttatagaactcactggtggaaactatgttcttaaccactgtgcaaaactgcttctcactaaaaccctaccttgccaaggggccctgaggccttccacaatctgacccytcacatttctctggtctcattttcttctaagctcactcttttccagttgaactggactccttgcagttacttgaatatttccaatacacccccactccaggcctctgaaactactgtcctctccttatcaccagatatcctcacgacatcttcctcacctcttctgatgtctaatcaaatgtcacccccacaaagtgggcttccctgacctctccatccataaacgaatccttttttcccctgcttcctcacccgctactcttttaacctgcattatttaccttcatagcacttattaaatattac

SEQ ID NO: 207334 - DNA, 608 bp, Homo sapiens
accttccgtgaattacaagttcaagcaagagatgctttaatttcagctctttacctggatgccaagaaattgccagaattttctcaagtctaatttgatattattaatcccattttacagatgaagaaactaaggcacaaataggcacaacacaaggctcaaatttatgtaaatattaaagctagtatttgaacttatagaactcactggtggaaactatgttcttaaccactgtgcaaaactgcttctcactaaaaccctaccttgccaaggggccctgaggccttccacaatctgacccctcacatttctctggtctcattttcttctaagctcactcttttccagttgaactggactccttgcagttacttgaatatttccaatacacccccactccaggcctctgaaactactgtcctctccttatcaccagatatcctcacgacatcttcctcacctcttctgatgtctaatcaaatgtcacccccacaaagtgggcttccctgacctctccatccataaaygaatccttttttcccctgcttcctcacccgctactcttttaacctgcattatttaccttcatagcacttattaaatattac

SEQ ID NO: 207335 - DNA, 605 bp, Homo sapiens
cctgaacaggagctgatggggcctggacattacgaagaatttttcaatgcactgattggatagaaaatggctatgtgtaccctctacccattttctaaatctttatcagttaatcacctttcataggttcataaattttataatacatttcaaatcaaattgattatacagacatgcctcccccaccagactccaaatttgcccatagactcacacaccctaggggtgtggggcatgctgagctaagaccttcaccatgtcttgcttaatstttggtcctaactggtctacctccttcttaatctcttcactttctagtgtatttcccaaactgccagagtgttctttctaaaatgcaaatctgatcaagttttccctgtttataacccttcaatgtctaggaaaccaaactgaaattccttaggttggaatgtaattttcttcatgacctggcccctccttgtctgttttgcctgaccttacacaataccccagtagttactctatgttctaaccctaacaggattagaactacaacaggaagttttccacatcctcagtgttcttaaacattcttccctctcttagattcccttaacattact

SEQ ID NO: 207336 - DNA, 529 bp, Homo sapiens
ttgttgaaaaatatatattatgttgtttttgggtgtagtgtttatagatgtcatttagtcaaagttggttggtttcagaatttccttcctgatcttgtccttaaatgrttcatcatttattgaaaaagagatattaaaatttcctgctataattctgaatttgtctattttttgcagttctatcagtgtttgcttcatgagaattcatactattgtttttccctgtattttccatacactcatgtactgatgagtactccagtgaatactagagggattcgttctaccagtccctaaaaagtttatctatgaaacttttttgtttggtgctcttccctggatgctccagcagtctttgccaccatggatgctcagtcttgtctcctgaagtcaaggtatcttctaggctctgattgggcttcctttactaatgctgaggtctgaaaattctcaggaagcaattatcttggcaactgtaagatttaacctcatttatttcctgtctcttggggatcactgttttgttgcc

SEQ ID NO: 207337 - DNA, 545 bp, Homo sapiens
cttgttgatttctttactgatagattgagtatcttgcttcatattccaactctctttgagcagagtttaatcaacagggcaacttcttggtatataacaaaacccgacgctagtgtccctgggcagtctctcttacctgccaccttctcttcacccccacttctcactagtccctttcaccaggtggctgggaacstgtgataaaccagagtaaaatgcttaactacattaggaggttgaagaatctgcatcataaactgttctgttttcagcaggtatttctttttaaaattctttccgccattcttttttgccttcccctctttactcccattgtcttattcttctatgtatgttttttttgtttgttttcttccttcctctttcatccatctcctgtaccaacctatgtcacagccagagatcttcgggcattattgaccgtcaccagtagccccaatgccttctgagaagtccctcgcctgtcagttctttcagcacaaattaatggagggctgagacacttaaagatgtaagtcctgaaa

SEQ ID NO: 207338 - DNA, 381 bp, Homo sapiens
aaaagaccttaagtctataacttgaagaatatctaaaaatttaattttacattgcctctcttggagaaaaggtgctctccatcacatcaagtgatagaaatcctaataataaacaatttaaaaataatccgaacacactggattgtactgaggaaatatttttacttctcccagttcttatttatttctggctgggaatggatagttgttaaaatcatctcaactttcaccacaatctaaattcatcttgctttgcctttatacataaagataagcagaatttgagaaaattctagttgaccattttgacrtgcctcaaagctagagcaaaaatcctattttctttggcaactctcttgggtaaagttttggttttgatta

SEQ ID NO: 207339 - DNA, 416 bp, Homo sapiens
ttgggtgattttgtccactcacatggattctactaacacctttgattttgcttctaaatttcaattttcctctcagatctactaatgcctaactcagttgcttccyggacacatctgtctcaaatgtccttcaaacttaatatgaccaaaactgaacttgctatctttcctcctggtttctcctattttcaccaagttaaataatgctactactatattataacctaaactagaaatcagagttatcctacattcctccctcttctatttctcccatattcagttgttcactagatcaaattttagtttgtcatctcctcatttcgtgattattttaatagtgacttttacagtctggtctggaaattctccaatccattattttctctgccacaagaaggaatttttaaaaaccc

SEQ ID NO: 207340 - DNA, 418 bp, Homo sapiens
ccttgggtgattttgtccactcacatggattctactaacacctttgattttgcttctaaatttcaattttcctctcagatctactaatgcctaactcagttgcttcccggacacatctgtctcaaatgtccttcaaacttaatatgaccaaaactgaacttgctatctttcctcctggtttctcctattttcaccaagttaaataatgctactactatattataacctaaactagaaatcagagttatyctacattcctccctcttctatttctcccatattcagttgttcactagatcaaattttagtttgtcatctcctcatttcgtgattattttaatagtgacttttacagtctggtctggaaattctccaatccattattttctctgccacaagaaggaatttttaaaaaccc

SEQ ID NO: 207341 - DNA, 413 bp, Homo sapiens
actcacatggattctactaacacctttgattttgcttctaaatttcaattttcctctcagatctactaatgcctaactcagttgcttcccggacacatctgtctcaaatgtccttcaaacttaatatgaccaaaactgaacttgctatctttcctcctggtttctcctattttcaccaagttaaataatgctactactatattataacctaaactagaaatcagagttatcctacattcctccctcttctatttctcccatattcagttgttcactagatcaaattttagtttgtcatctcctcatttcrtgattattttaatagtgacttttacagtctggtctggaaattctccaatccattattttctctgccacaagaaggaatttttaaaaacccaacctgttgattt

SEQ ID NO: 207342 - DNA, 639 bp, Homo sapiens
atatgcagaatctgtaacgaccttaaataatcaaacaagcatgaaacaaccccactaaaaaaagagcaaaagacataaatacacacttctcaaaagaacatacaagcagccaataagcataygaaaaaacgctcaatatcactaatcatcggagaaatgcaaatcaaaaccacaatgagataccatttcacaccagtcagaatggttattattaaaaagtcaaaaaataacatgctggcaagactatagaggaaagagaatgcttatacacggttggtgggaatattaattactccagccattgtggaaagcagtgtggatatttctcaaagaacttaaaacagagctaccatttaacctagcaattccattactgggtatatacccaaaagaaaagaaattctgccaaaaagacacatgccctcatacactcattgctgtgctattcacaatagcaaatacatggaaataactcaagtgcccatcagtggcagattggataaagaaaatgtggtatatatatataacacagaattctacacagccataaaaaaataaaattatgtccttggcaataatatggacacaattggaggccataatcctaaacaaattaatccacaaacagaaaaccaaatg

SEQ ID NO: 207343 - DNA, 639 bp, Homo sapiens
atatgcagaatctgtaacgaccttaaataatcaaacaagcatgaaacaaccccactaaaaaaagagcaaaagacataaatacacacttctcaaaagaacatacaagcagccaataagcatacgaaaaaacgctcaatatcactaatcatcggagaaatgcaaatcaaaaccacaatgagataccatttcacaccagtcagaatggytattattaaaaagtcaaaaaataacatgctggcaagactatagaggaaagagaatgcttatacacggttggtgggaatattaattactccagccattgtggaaagcagtgtggatatttctcaaagaacttaaaacagagctaccatttaacctagcaattccattactgggtatatacccaaaagaaaagaaattctgccaaaaagacacatgccctcatacactcattgctgtgctattcacaatagcaaatacatggaaataactcaagtgcccatcagtggcagattggataaagaaaatgtggtatatatatataacacagaattctacacagccataaaaaaataaaattatgtccttggcaataatatggacacaattggaggccataatcctaaacaaattaatccacaaacagaaaaccaaatg

SEQ ID NO: 207344 - DNA, 639 bp, Homo sapiens
atatgcagaatctgtaacgaccttaaataatcaaacaagcatgaaacaaccccactaaaaaaagagcaaaagacataaatacacacttctcaaaagaacatacaagcagccaataagcatacgaaaaaacgctcaatatcactaatcatcggagaaatgcaaatcaaaaccacaatgagataccatttcacaccagtcagaatggttattattaaaaagtcaaaaaataacatgctggcaagactatagaggaaagagaatgcttatacacggttggtgggaatattaattactccagccattgtggaaagcrgtgtggatatttctcaaagaacttaaaacagagctaccatttaacctagcaattccattactgggtatatacccaaaagaaaagaaattctgccaaaaagacacatgccctcatacactcattgctgtgctattcacaatagcaaatacatggaaataactcaagtgcccatcagtggcagattggataaagaaaatgtggtatatatatataacacagaattctacacagccataaaaaaataaaattatgtccttggcaataatatggacacaattggaggccataatcctaaacaaattaatccacaaacagaaaaccaaatg

SEQ ID NO: 207345 - DNA, 393 bp, Homo sapiens
cagtttgaaacattttttactttctttgtgttgtcttctttggtttattatttatttagaattatgtttatttccaaacatayggagatttgtttttctctttttgtattggaatctagctgaattgcatgtgtctagaggacatattcttcatgatttttgcctttcaaactggttaagatttgcctctggcttagaatagtcaattattaatgatctatgtgtgttagaaaagaatgtttaggccaggtgtggtggctcacgcttgtaatcccagcactttgggaggctgaggcgggtggatcagttgaggtcaggagttggagaccagcctggccaatgtggtgaaaccttgtctctactaaaaaattacaaaaattagccggccgtgga

SEQ ID NO: 207346 - DNA, 451 bp, Homo sapiens
tgttttgttatgttttgttgtgtttttatgaagaaactaaccattctttcacaaagatctatccattaaccctttcaagaaatatttacttaatgccaaccttgattgaggcactgatccaagaactagaaatacaaagtcatacagaactcagcagctatcttctggatattgtcatcatggcggaaccgacatttgaacaaacaattttagaaaagatgcatacattgtgagaaattcctccaggtgagtttctctcttctaacttgtcttatcgggtatgccaagaatgcaaggacctgactgatcttcatcggtgtcgtttctcaggattgtgtttgcaacaagaaaccttgagggataaggtaaarcctctcttcagtataaagagtaggcttgtttattgcttgctaatggaacagctggtaacccaagctcactcctcctcagt

SEQ ID NO: 207347 - DNA, 601 bp, Homo sapiens
acttttctgccttacatgtctaaaacaatcggttcattagctagttaagagactggccagacagaaagtggaaaaagtttgctgaagagagaggtacacacagctcagttagttaaagagaaagaatttcttgaaggtctgaagaattaaaacaacatgaccattaagtcaaactgaatgctatggtttactcagcaattttagaagcgtttgctatgataatgtatatatcctggtgcacacattatcttggatatacacaacattctaagaaaatccatcaaagtgcaataatttgttattcatgctggcgacaatgttttcaaatgggtttttatctattttgtaattacacacacacacacacacacacayacacacacacaagtccatggagacacaaaaactcactcacactgccacactcagagaaaataaaacacaaagaaagagagagggagatttatactcccaaaataaaccgtggctgggagaggggtcgatatattctttttgaaggcagctataaatgttcaattaacctatttctcatgtcttttattatgaccacatatggtgacaaatgggcctaacaagaagg

SEQ ID NO: 207348 - DNA, 360 bp, Homo sapiens
gaacgtcatgcacttggagaaaataaatgtgagggagaaagcaagtattgataaaacatttctaatgtctctagttgtttaatctcattggactaaataaatctgctcattactttaataagacaaattcyttatctcaagaacttttaactttttactttgcagtagctttagacttatggagaaactgcaataatgaagctgagtccctatatacactctactcagtttcctttaaggtaaaaatcttatataaccatgggacaattatcaaatatcaattatgaattatcattgcaattttcaatactaagaaattaacataggcacaatgtcattaaccaaactgaatatttaatc

SEQ ID NO: 207349 - DNA, 592 bp, Homo sapiens
atagcatgaattgattggcatttataaataaaatatttgtataatgtaattctgttgcaaagctgtgtatattgcatgacttttttgacttttggttttgatacattttcaccatagctaaggtgatcatgtaatttattactcacatcagaacatttagagatttaaagagggagctattaataattatgccaggtcatcagatgcgaactgagacagtcccaggcaaattataatgtagagcaagaatctgcaaactatgtcccatgggctaaattcaggccacttcccattttccaacagcccacaggctaagaatgatttatgcatttttaaatggtttgaaaaacaccaaagaaaaatatctcatgacacgtgaaaaatgatacaaaatttaaattagagtttctatcaataaataaagttttattggtatacaaatatatcaaatcacttatatattatctatgactgmtttcatgctacaatggcagaattgaatagctacagcataccatattgtctaaaatatttactgtcagaatctttacagaaaaaggtatactgatccctgatgtagagtaatcctaac

SEQ ID NO: 207350 - DNA, 383 bp, Homo sapiens
ttagcaaaagaccctatgctttgagacacccattccacagattaacacattactcatcagtttgacatgctgaatctaaaaggggatttggcaaattcaaatcggcactctaactaagacttagtcatatgaggtatgtcgttaatgcttggaatctgtatcagactgttaaggtattgttataaagaaatacctgagactgggtaatttataaagaaaataggtttaattggctaatggttctgcaggctatacaggaagcrtggcactggcatctgcttggattctagggaggcctcaaggatcttttatttagggtggaaggcaaaacgggagcagacacatcatcacatggtgagaacgggagcaaaggagagagagtg

SEQ ID NO: 207351 - DNA, 601 bp, Homo sapiens
tacttctggttccagaggaaaataatccgtctggttatgggacccagcactgagactgcagagcaagaatgaaatcactcccatctcagtacagctcatatttacctaagtaacataagagtgtttttggagaattgcactttaattcagggtctttgatatgttctatcatgctccttaatgattttcatggcaaccacaagcagggagtgttgtgggctaaattgtgccccgtcaaaatttctatgttgaactcctaaccctcagtacttgaaaatgtaactatatttggagataagaccattgaagaggtaattaactctaaatgagttagggtggggcctgattcaatatgactgagtcccttgtttgaggaggaaatttgtacacagaaatatcataatttgtacacagaaatatcatgagagtaggccatgtgaagacttaaggggaaagacagctatctacaagccaaggagagagacctcaaargaaagttacgttgaggacatcttgattttagacttttggccttcaggactgtgaaaaaatacacgtctgttttttaaaccacacattctgtgggactttgttatgacaa

SEQ ID NO: 207352 - DNA, 589 bp, Homo sapiens
tctgtcagttcatctcaccagtcctttaggcaaatytgtgctcctttgacttctctgagccaattagaatatctgcctggcaccctcattatgaattaagtaaaatctttaacatgaattgctttatgtctgtatgatattaatgattttttactttgaaatattttatttaacaaagttaatatatgtaaaaacaattagaaccttctctggtaggaaaagatgaatgaatgttactgttgttactattgttgttaggagacagcattcttgattcttagtgctctgatacaatcatgattaaactgaagaaggtcagtctgtagtaggagaaccaagtaaataaatagttccagtagaatgtgttaacatatgtaattgaggtaagtacaaggtctaatagaaacataaatagaacagcaattgactatgccttagcggttgagaggggacaacatctgagagttagacaagaaaaggagtcacatagtcacattatttgccctagatatccgtcttgaataaccattatcagaaattgtaaaattatgagcagaatcaaggcaaaggcagagagtgaataagcttt

SEQ ID NO: 207353 - DNA, 618 bp, Homo sapiens
ataacttgtcatgttaaccatagcttgtgggtcaaggtagtaacattaattaaaagccagcgatgacatttctaacgtacctaaaaacttctaaaacaaagagaactataagtttatagatatgaatgatgacagctagattagggtgcaaggtttgcagaggaaagctgtggaggactaggaaaagtcaatgaatggaacatgctgactcstgtaacccaggaactacaggacccagaggaattatgctaccaaattgtccatgttgagaaggagagtatggcacactagacacacttttgcactattagcaaaactggaaagttagaaagtagaacatgctactttggtgggaagagtgatgttgaattgtttaaagcttgcaatgactgttagctatttacatggaactgtgcgtgaaatacaaatctggaacttgggtgagtgattatggttggaaatacaggtttgggagttatttgacataaaataatggttgaaaccatgaaagtaaatgacctctgcaagggagtgatcataaagggtgaagagttttattttaaagctcctattttcctttaaaagaatcctccgtgacttatccatctatatccgtgc

SEQ ID NO: 207354 - DNA, 534 bp, Homo sapiens
tgccttctgttgttcaggacaggtaaaataaaaatgagatgactttgttcaaaaattatttcatagagcaaacatgggacccttctaaagatgggtgcacaagtcatacatacatgaagtcagcccttttggtgtttacaactctcttatgctaacccttgcattttacataaacacactcacctgctgacatgtacatggcagaaacaaggtagacctcctgactgaaatgagagccaaagggaataggtttttccatcagatgaatggccttagctaagcttgcaatgtagagtagaggcgatggtctggctgccacctctgaattctcagacagcttgatttcctcccaagagtccccagccaatgttgttttgtycttgctcacactttcctcttcaaaatgcctattcatccatcttggaccttcaagcctctgcaagctgctttgtagcaactacataattggataaaatacaaaggcaaaagacctacagggtgctaatgtttattttttctctgctaagattaatt

SEQ ID NO: 207355 - DNA, 451 bp, Homo sapiens
ggagccaccactcacgttactgcaccttgttttcagccaataatgagatctcccctcacttcaacctctgcctcctggattcatccaattcttgtgcctcagcctcccaagtagctgggactacaggtgctcccsaccatgcctggctaatttttgtattttttagtagagacggggtttcaccatgttggccaggctagtctccaactcctgggctcaagtgatcctcctacctcagcctcccaaagtgttggaattacagacgtgagccaccgcacgaggccacacttttactttcttatttattgttacattttgcagttgtgtcatatgcattggtattattattctgattgtctttcagtttgtttacagtcaggttctacctttaaactttttttaaatcacaaaacgcccattctccagcattaaagcaaactgaaataagata

SEQ ID NO: 207356 - DNA, 477 bp, Homo sapiens
gaattcttcccacagaggtctagcagggagccaccactcacgttactgcaccttgttttcagccaataatgagatctcccctcacttcaacctctgcctcctggattcatccaattcttgtgcctcagcctcccaagtagctgggactacaggtgctccccaccatgcctggctaatttttgtattttttagtagagacggggtttcaccatgttggccaggctagtctccaactcctgggctcaagtgatcctcctacctcagcctcccaaagtgttggaattacagacgtgagccaccgcaygaggccacacttttactttcttatttattgttacattttgcagttgtgtcatatgcattggtattattattctgattgtctttcagtttgtttacagtcaggttctacctttaaactttttttaaatcacaaaacgcccattctccagcattaaagcaaactgaaataagata

SEQ ID NO: 207357 - DNA, 511 bp, Homo sapiens
agcagggagccaccactcacgttactgcaccttgttttcagccaataatgagatctcccctcacttcaacctctgcctcctggattcatccaattcttgtgcctcagcctcccaagtagctgggactacaggtgctccccaccatgcctggctaatttttgtattttttagtagagacggggtttcaccatgttggccaggctagtctccaactcctgggctcaagtgatcctcctacctcagcctcccaaagtgttggaattacagacgtgagccaccgcacgaggccacacttttactttcttatttattgttacattttgcagttgtgtcatatgcattggtattattattctgattgtctttcagtttgtttacagtcaggttctacctttaaactttttttaaatcacaaaacgcccattctccagcattaaagcaaactgaaataagataaaggaagctttaggtttttgtggcrgggatttgctttcatcacaaaaatgaattc

SEQ ID NO: 207358 - DNA, 594 bp, Homo sapiens
acttggacttttgtattcactattctctttgcctgggatctccttcccctccaaccccatttttctgcaatgggcttgagtttcagcgtaaatgtcatgcttctagaggggccttctctaaccacctgtttaaaatgtcaccccacgctgattcacatatgtaaaccatttcctgtttcaattccttgtttattttcttcatagcatttttttaaatgttaaatattcttaatgatgctcatgtttctcctttgctaatagtttaccccaaagtaagcttcacgatgtcagaaaacttctatgacaagtttgctgctgtgtgtagaatgcttcaataaatatgtgctataagaatgtatgaatttgagagatatttattagagaattgagttgtatttggaagaagtttacctctaaagctgtgagcgtctcrctttccttttcctttctgtacgatctcccacccattcttactttcaaattaaaacaggacatctagaatcacaggccaccgttttcagtctacaaatatttgcatacctggcactgtgaggaaagctaaagatattagaatgactaaagctgtccataacc

SEQ ID NO: 207359 - DNA, 594 bp, Homo sapiens
acttggacttttgtattcactattctctttgcctgggatctccttcccctccaaccccatttttctgcaatgggcttgagtttcagcgtaaatgtcatgcttctagaggggccttctctaaccacctgtttaaaatgtcaccccacgctgattcacatatgtaaaccatttcctgtttcaattccttgtttattttcttcatagcatttttttaaatgttaaatattcttaatgatgctcatgtttctcctttgctaatagtttaccccaaagtaagcttcacgatgtcagaaaacttctatgacaagtttgctgctgtgtgtagaatgcttcaataaatatgtgctataagaatgtatgaatttgagagatatttattagagaattgagttgtatttggaagaagtttacctctaaagctgtgagcgtctcactttccttttcctttctgtacgatctcccacccattcttactttcaaattaaaacaggacatctagaatcacaggccaccgttttcagtctacaaatatttgcatacctggcactgtgakgaaagctaaagatattagaatgactaaagctgtccataacc

SEQ ID NO: 207360 - DNA, 626 bp, Homo sapiens
gaattctggtcccctctttgggcccaaaaattatccgacaaatatttaatatcaattctatgccaagaacacttgataatggccattttttaatggtctattacacaatcaatatttttctccttccagaagaatgattttcatctgcttccccctttattctcacatgtcacaacttataattcaggtcttctttctcctaataagtagaacaaatgaatgaacatatgcatggcccatggaagacttcttttacaaatttgtaaagctttatcaactaaatttataaaaaaamacacacacacacacacacacacacacaactttatcttattctctatagagaaatttgggaagtgttgactagctgctgcttggatgacatagttttccttttcaaatacagatattttaaaagcctttgataactcattttactgttcatatgtgcccaagagtaagtggtagagactatgccatgccttcaccagatcattttctttccccgtagaacacaggaaaactaccattctcagtatccctgatggttagatttgagccacgtgattgggttctggggagtataaaaattagtggaagtgatttgttgtttgcaacctgtggca

SEQ ID NO: 207361 - DNA, 493 bp, Homo sapiens
tgggggaagtagattgggctgaactctgagtacagcataatcaagtggaaatttgtagccaaagagcaggtctggggccagtggatggaaaattactagaggaaacatcagaggtaaaggagattctgggtaaaccaacctaccaagattcttgttgaagacaggccagggtgattagacaacacctgggggatggtggaggatgagaaacctgatcagctctctgagatactgggggatcagatattgagaataggaggttcttgctaaaytgacttagcagggttccttgctattgctggattttacaaggaagtatacatatgggcctaggataaagtttagagcttaactaaagtgtggtcaagcagaaaatcttttgcaacatccactgatacggtatttttaattactcttttgtttttttttttataacaattctttttttaatttgctaccctcaaaatctcttgattgttcttactcatcccaa

SEQ ID NO: 207362 - DNA, 559 bp, Homo sapiens
taagatctagctaagatcattagtgaaactggctaacattaaacagtaggttttcagtgtagatgacacagtcttctattggaaaaagatggcatctaggactttcatagctagagaggagaagtcaatgcctggcttcaaagcttcgccggaaaggrtgactctcttgttaggggctaatgcagctgatgactttaagttgcagccaatgctcatttaccattcctaaaattttagggccattaagaattatactaaaactactctgcctattctctgtaaattgaacaacaaggcctagaagacagaacatctgtttacagcatggtttcctgaatattttaaggccactgatgagacttactgcttggtaataaaacattgctttcaaaatattactgctcattggcaatgaactagtcacccagagctcttatggagatatgcaagaaaattaacattgttttcatgcctgttaactcagtatcctttcttcagcccatggatcaaataattttgatttgagaacatactgcttaagaaatatattttgtaagcc

SEQ ID NO: 207363 - DNA, 587 bp, Homo sapiens
attcttttaatgacttatttttcagtgtgttttctggtgtatgttaaaaacagtgcattaacacatgtaagtgatttacaaatacctgcctatatagggggcagacattaagcagtttggctgatcaggggtaaagtcagaataatttggaggccacttagagagggacagaattaataackttgatcgattggaagtagaatttgcctcttcctcttcaatttgatgacaacatgattcagatggtttactttatttccatgagtaacctcatttataaatagagaatcttttacagtgcatgtcttattttattttaaaataattattagatttatgtgccaaaatggcgaagcagtctttatggactcttccctattttaacctcccccctccttctttttttttttaaataaatgaaaaatctcctgatcatttttaggactgtgaggacgtgggaagttgaaaatccaaagaagcaaaaaagtgtgtttaaaccacggacgatgcaaggcaaaaaagtcattcccactacgtgcacatatagtagagatggaaacctcatagcagctgcctgccagaatgga

SEQ ID NO: 207364 - DNA, 586 bp, Homo sapiens
tattcttttaatgacttatttttcagtgtgttttctggtgtatgttaaaaacagtgcattaacacatgtaagtgatttacaaatacctgcctatatagggggcagacattaagcagtttggctgatcaggggtaaagtcagaataatttggaggccacttagagagggacagaattaataacgttgatcgattggaagtagaatttgcctcttcctcttcaatttgatgacaacatgattcagatggtttactttatttccatgagtaacctcatttataaatagagaatcttttacagwgcatgtcttattttattttaaaataattattagatttatgtgccaaaatggcgaagcagtctttatggactcttccctattttaacctcccccctccttctttttttttttaaataaatgaaaaatctcctgatcatttttaggactgtgaggacgtgggaagttgaaaatccaaagaagcaaaaaagtgtgtttaaaccacggacgatgcaaggcaaaaaagtcattcccactacgtgcacatatagtagagatggaaacctcatagcagctgcctgccagaatg

SEQ ID NO: 207365 - DNA, 587 bp, Homo sapiens
attcttttaatgacttatttttcagtgtgttttctggtgtatgttaaaaacagtgcattaacacatgtaagtgatttacaaatacctgcctatatagggggcagacattaagcagtttggctgatcaggggtaaagtcagaataatttggaggccacttagagagggacagaattaataacgttgatcgattggaagtagaatttgcctcttcctcttcaatttgatgacaacatgattcagatggtttactttatttccatgagtaacctcatttataaatagagaatcttttacagtgcatgtcttattttattttaaaatarttattagatttatgtgccaaaatggcgaagcagtctttatggactcttccctattttaacctcccccctccttctttttttttttaaataaatgaaaaatctcctgatcatttttaggactgtgaggacgtgggaagttgaaaatccaaagaagcaaaaaagtgtgtttaaaccacggacgatgcaaggcaaaaaagtcattcccactacgtgcacatatagtagagatggaaacctcatagcagctgcctgccagaatgga

SEQ ID NO: 207366 - DNA, 641 bp, Homo sapiens
ttatttcacttttacattatggggatgctgaatggacttttcagaaatctttgtcagatcccactgtcttttgtttttaaattatttctttaaaagaaaggaaggaaggagagagggaagggggaaaacatcttgacctggaacataattatcttttttttaaaaaaaaaaaaacattttgttttctttagagtcaggggtcttgctctgtagcccaggctggagtgcagtggtgcagtaatggctcactacagcctcaaactcctggactgaagctatcctcctgggcartgagtgaggcagtcccagattctcctcttaccacctgtgttgtcagaccactgctggtaccacttgtgttagtctgggtcctctgagaagcagacaccaagacaggattaaatgtgtaagagatttactggggagtacctagaagggaaattggggagggagccagagaagtctggagagagtcagaccatgatgtagaccatgcgtttgtgaaggagagaggaaagaatggaatattgaatatccatcagctgatgaatggataaataaaatgtggtacatccatacagtgaaatattatttggcaataaaaagaaatgaagtgctgatacatactgcaacatggacga

SEQ ID NO: 207367 - DNA, 322 bp, Homo sapiens
tcttgcctaccttcatagtcttgtaaatatgttatagaactaaatcaacagagtttgcccaatgaaggcagttagctttattgtaatttgatatatagagcttgaccagataattcatctccttctcgctgctatttacctcaccgttagtaacaatagtggtgataacaatattagtgatagtagtaataataattattttaataactgctaacattgtgtacccactgtgtaccaggaattgttattaatgcytttcaatgtactagctcattttatagttatatgaggttagtgtttttatccctgttttaaggatgag

SEQ ID NO: 207368 - DNA, 559 bp, Homo sapiens
caaatgtaaatatgtcccatgctcatcaattgcaagaaccaatatcatgaaaatgatcatactgcccaaagcaatctacagattcaaggcaattcctatcaaaataccaacatcatttttcacagaatcaatcctaaaattcatatggaactaaaaaagagcctgaatagccaaagcaattctaagaaaaagaacaaatcaagaggtataacattacctaactccaaattatattgacaaggctacagcaaccaaaacagcatagtactggtataaaagtagatatgcagaccaacagaacagaatagagaacccaggaataaagccaaatacttacaaccaactgatctttgacaaagcacaccaaaacataaattggagaaagaacaccctattcaataaatggtgctgggaaaactggacagccacaagcagaagaataaaactgtatgcctacaaaaatgaactcaacatggattaaagcaaacttgtccaaaccayggcccggaatggctttgaatgtggcccaacacaaatgtgtaaactttcttaaaatact

SEQ ID NO: 207369 - DNA, 591 bp, Homo sapiens
tccgatttttgatagcaactccaaccaagtcagaactgtgataccagagtttgaacttcagtggtgctgatgtttctcgttaggaccttcgatacattaacttcaaaatggccaatttaagccgctgcaatcttgcacatgcaaatctttactgtgcaaatcttgaatgwggtgatctctctggatcagtgcttgactgtgcaaatctccagggagtcaagatgctctgttctaatgcagaaggagcatccctgaaactgtgtaattttgaggatctttctggtcttaaagccaatttagaaggtgctaatctgaaaggtgtggatatggaaggaagtcagatgacaggaattaacttgagagtggctaccttaaaaaatgcaaagttgaagaattgtaacctcagaggagcaactctggcaggaaccaatttagagaactgtgatctgtctgggtgtgatcttcaagaagccaacttgagagggtccaacgtgtagggagctatatttgaagagatgctgacaccactatacatgtcgcaaaatgtcagatgagaattttaggggctagaggaagatgtacaagatgaaa

SEQ ID NO: 207370 - DNA, 508 bp, Homo sapiens
gaattcaaaataataatcttaaggaaactgagtgagatacaagagaatacagataaacaattcaacaaaatcaggaaaacaacttatgatataagtaataaattcaagaaagaggtggattatcataaaaaagaaccaaaaagaaatcctagagctgagaattaaatgaatgaaatagaaaatataattgasagcttcaacaacagactataccaaatggaggaaaaaatttctgaacttgaagatagatcttttgaaataacacaagcagtggcaaaaatgaattaaaaagaataaggaaagcctaaaggatttatgagatatcattaagcaagcaaatattcatactatgggcattccagatggaaaaaagaagggtaaaggtgaggaaatcatatttaatgaaataatagcagaaaatttcctgagtcttgggagagagatgagcatttaggtccagggagctcaaagaaccccaaacagattcaacccaaacaggtcctctctg

SEQ ID NO: 207371 - DNA, 591 bp, Homo sapiens
tccgatttttgatagcaactccaaccaagtcagaactgtgataccagagtttgaacttcagtggtgctgatgtttctcgttaggaccttcgatacattaacttcaaaatggccaatttaagccgctgcaatcttgcacatgcaaatctttactgtgcaaatcttgaatgaggtgatctctctggatcagtgcttgactgtgcaaatctccagggagtcaagatgctctgttctaatgcagaaggagcatccctgaaactgtgtaattttgaggatctttctggtcttaaagccaatttagaaggtgctaatctgaaaggtgtggatatggaaggaagtcagatgacaggaattaacytgagagtggctaccttaaaaaatgcaaagttgaagaattgtaacctcagaggagcaactctggcaggaaccaatttagagaactgtgatctgtctgggtgtgatcttcaagaagccaacttgagagggtccaacgtgtagggagctatatttgaagagatgctgacaccactatacatgtcgcaaaatgtcagatgagaattttaggggctagaggaagatgtacaagatgaaa

SEQ ID NO: 207372 - DNA, 637 bp, Homo sapiens
ttaggggctagaggaagatgtacaagatgaaaacattttccttatcacttttctttctccacccactcagttgtctagaagaagtaacactgtaaggaaatttttaaaaaacattgagagaattatgcttgctctcagmggtgcataagggaaaaaattgactttttttccatattctgatttttaacagaaaagcactcattaataggtatacggaaactagatattgctgctttttgaatggggtaggggggttccactcaataccagaggcaagttccactcaataccagaccaagcaattctatctatttacactattagcctagttttcccatacgatcggcacaagcataggaagatacttcaaaaccaaaaaaccaaggtacatcattaatattcatttaattcaaataccaaataatttacataaggccagcttagaaatcgatattaaatccagatctactgcaatcaaagcttatacaatatgagtgaatatggcagagttgcctgataaaagacaatgtaatatattgaagctagaaccctacagtgggtaatgaggaattttagacagacatttgattacagccaccagtaaatatatataaagtaaaaataaaggcatttggct

SEQ ID NO: 207373 - DNA, 637 bp, Homo sapiens
ttaggggctagaggaagatgtacaagatgaaaacattttccttatcacttttctttctccacccactcagttgtctagaagaagtaacactgtaaggaaatttttaaaaaacattgagagaattatgcttgctctcagcggtgcataagggaaaaaattgactttttttccatattctgatttttaacagaaaagcactcattaataggtatayggaaactagatattgctgctttttgaatggggtaggggggttccactcaataccagaggcaagttccactcaataccagaccaagcaattctatctatttacactattagcctagttttcccatacgatcggcacaagcataggaagatacttcaaaaccaaaaaaccaaggtacatcattaatattcatttaattcaaataccaaataatttacataaggccagcttagaaatcgatattaaatccagatctactgcaatcaaagcttatacaatatgagtgaatatggcagagttgcctgataaaagacaatgtaatatattgaagctagaaccctacagtgggtaatgaggaattttagacagacatttgattacagccaccagtaaatatatataaagtaaaaataaaggcatttggct

SEQ ID NO: 207374 - DNA, 542 bp, Homo sapiens
aacctaattcaaactatgaggtaaaatcaaattctatattttatcaaatcactgacctgcagtcctcaaaaaatgtcaaggaaaaataaagacgaaataatgcagagaagccattcccaattaaaggagacaacagatatgatgactatatacaatgtgtgatcttgatcagagcctggaactggtgaaaaaatcattatacagattgttgagataatcagtgaaacatgaatgtgaaatgtgatttagataataatacgttatcaatgttaaattcatggctatccaccaggcatggtaacttgtgcctggtagtcccagctactagggagrctgaggcagaaggattgcttgagcccagggattctaatccagcctgggcatcaaagcaagaccctgtctcttaaaaaagaaaattatgattatgtatgaaaatgcattgttattaggaacacctcactgaagaatttaggagtaaaagagcatgacgtttacaacttactttcaaaagctgaaaactaaacacacatatatgtaattta

SEQ ID NO: 207375 - DNA, 627 bp, Homo sapiens
aactggtgatgattcatttcacattttagttctcttagccctctgataccatccctcaccctcacccataataccctgtctgctcttctgctcccttctatattaactctattttttctttccaaatgcttagtaagtttgttcttcccttcctttcttcttccatctcttcatcttcttattgactgaagatagtaatttaaattctttaagtttggaaaataagaatatttatatttgacattacatatttttaaaatgtttttaattttcatgggtacatagtaggtgtatatttatggactacatgagatactttgatacaggcatataatgcgtaataatcacatcagggtaaatgggatatccatcacctcaaacatgtatcctttcttcatgttacaaacaaatcagtttggmaaaagctccaaactgttctacatagtggttgtactgatttacattcccaccaacagtatatgagtgttctcttttctccacatcctcaccagcatttatttcctgtcttttggataaaagccattttaactggagtgagataatttcacattgcagttttgcatttctctgatgatcagtgatgttgaacaccttttcatctatttg

SEQ ID NO: 207376 - DNA, 627 bp, Homo sapiens
aactggtgatgattcatttcacattttagttctcttagccctctgataccatccctcaccctcacccataataccctgtctgctcttctgctcccttctatattaactctattttttctttccaaatgcttagtaagtttgttcttcccttcctttcttcttccatctcttcatcttcttattgactgaagatagtaatttaaattctttaagtttggaaaataagaatatttatatttgacattacatatttttaaaatgtttttaattttcatgggtacatagtaggtgtatatttatggactacatgagatactttgatacaggcatataatgcgtaataatcacatcagggtaaatgggatatccatcacctcaaacatgtatcctttcttcatgttacaaacaaatcagtttggcaaaagctccaaactgttctacatagtggttgtactgatttacattcccaccaacagtatatgagtgttctcttttctccacatcctcaccagcatttatttcctgtcttttgsataaaagccattttaactggagtgagataatttcacattgcagttttgcatttctctgatgatcagtgatgttgaacaccttttcatctatttg

SEQ ID NO: 207377 - DNA, 582 bp, Homo sapiens
tctttattgaaaatctgtctggaagatctgaccagtgctgaaagtggggttttgaagtttccaactatattgtgttgggttctctctcgttagctccagtaatgtttgctatatacatctgggtgctccaatgttgggtgcatatatatgtataattgttatatcctcctgctgaattgacccctttatcattatgtagtgactttctttgtctcttacagttttttgtcatgaaatcgattttgtctgttataaacatatctattcttgctcctttttggtttctattggcatggaatatctttttccatcctttgttttcagtctatgtgtgtctttgtggatgaagtgtgtttcttgtaagcaacaggtcattgggtcttgttttttcatccattcagccagtttgtatcttttgattggagagtttagtccatttacattcaatattattgataagtaaggaattactcctgccatttttaattaaaaaawttttttttgtggtcttctcttccttctttccttctttctttcttttagtgaaggtgattttctctggtgatatgttttaattttttg

SEQ ID NO: 207378 - DNA, 616 bp, Homo sapiens
agatcttataggtatgcttcattcttttttattcctttttttcctctgactgaatattttcaaatagcctgtcttcaagctcactaattctttcttctccttgatcagtkctgctgttaagagaccctgatgcattctttagcatgtcagttgcatttttcaactgcagaatttctatgtaattattttaaattatctcaatctgattgttaaatttatgtgatttaattctgaattccttctctgtgttatcttgagtttatttgagattcctcaaaacagctattttgaattctccatctgaaaggttacatatctctgtctccagcattgttccctggtgccttacttagtttgtttggtaaggcaatgttttcctgggtggttttgatgcttggggattttttttggtgactgggaattgaagagttgggtatttattgtagtcttgtagttttggcttgtttttacccaccattcttaggaaggcttttcaggcatttgaaggaacttgggtattgttatctctgtttttggtcactgtagtcatattttcattagggggcaccccaaaccctgtaatgtggtggctctcgcacactcatagaagtaccac

SEQ ID NO: 207379 - DNA, 635 bp, Homo sapiens
gaggtccctgttcgtggctgtgtgggcctctccacagtgctgctggatgccctcatgacatagtctcttgcttcccccattgggagtgataacagaggcagagamcaagacagaagtcactgtgtcttttatgccctgccctcaaaatcacactccatcatttctgaaatatcctactggctactcaggccagccccatccaatggaggcagagtctgtaaaaggaagtgaatactagaaggctaggaaatgagggctatcttgaaggctggctgtgacagtgtgactccagctcccaatggttcacatgcctcccacatccaaaacacattcgcccctccccaaggctccccaaaatctcattctatccaatcagcttgaagtctggaatctcatcatctaaatcaggtttaggtgtcaatacatcttcttgggtatacttctttacgtatagctccttgagtacagattctcccaatttgaactcctgggaatgaaagagacaaattatctgcccctgacacagtggtgggacagacatagggtaatgactatagacactcaagaaagttgtcaccagagccattctgaagtctagctgggaaaatgttggaattttcttgattagtggtcag

SEQ ID NO: 207380 - DNA, 549 bp, Homo sapiens
atcttcaaattggtagatctctctctgcctccactatcatcctagtcctgaactactgaaagaacttttaactgatcactgcccttcgatttttgccattcatcccaatgcattctccccacaacagcctaagtcatagcatgtcactcctttacttaaaaccttcaacagtttgccacttgtcttaggacaaaacaaaatctcctactgctgtctacaatatcatacctggcttaggtccagtttacctatccagactcatcctcagccactctacaccttgatttccaggctccaggcacattggtgtttctgtctttgcaaaactccatgctcagaagccttcatatagtttggtccttcccaggagagcacttttcacatactaattcactcacttaactccactcattcttcagatctcagttcattatcattgccctcgggaaccttcctcatcactcgtgcctcttcctccccaccactacatcagttcctcctgctacacrctctcataactccccacacttactgcagtttgcaattata

SEQ ID NO: 207381 - DNA, 474 bp, Homo sapiens
gctgtagtgcagcggtgcgattacagctcactgcagccttgacctccctggctcagatgatcctcccacctcagcctctcaagtagctaggactacagatatatcaggcctggctaatttttttgtagagatagggtttcgccatgttgcccaggctggtctcaaactcctgggctcaagaaatctgcttgctgtggcctcccagtgtgctgggattacaagtgtgagccactgtgcccaatccctcttaagttattttaaccaaatatcaagcatcgtatgattttacccttacaatttgcagtaatcatctaagaaaagtgacattttcttacaagaccatattgttatacawtattttattaaacctaacaaaataaatccttagtatcatttaatatttaatccatattaaaacttcttagattttctaaaatatgagagagaagagatgtttgcatgattcaaacagtc

SEQ ID NO: 207382 - DNA, 591 bp, Homo sapiens
tttcttatcaaatgtgcaaatattaacataagcatatagttgggatttttgcttttgtttgggattttttgcaattagacagttatttctgcataagagggcttaggttccacttgcttgctatgtttactatctgatgtggccttgtagggtactacttctataagataaagggaacaacttccttgggtatccagatctgcacacttaacatgcacttggaggataatattatccaagccactttattgtttatgtaaggcacacttgtatcctgttggctgggctgctttcagtttccccagaaaacctagcaaagttccaggaggttctcaaccatcagttgcctgtttctcagcctgaaaagtatcctcctctcaggaatgttaactttaattgcctgagtttgccttagatatccasctgcaccttctggctcatgagttactgagcactgtgcaaggcacactttggatatacatagtataaaaggcaccacccataagtaagagcagagtcagtgtcctatttctcactcctgttcctccagtacagtgacttatagcagcagccaggcactggctaccaaga

SEQ ID NO: 207383 - DNA, 591 bp, Homo sapiens
tttcttatcaaatgtgcaaatattaacataagcatatagttgggatttttgcttttgtttgggattttttgcaattagacagttatttctgcataagagggcttaggttccacttgcttgctatgtttactatctgatgtggccttgtagggtactacttctataagataaagggaacaacttccttgggtatccagatctgcacacttaacatgcacttggaggataatattatccaagccactttattgtttatgtaaggcacacttgtatcctgttggctgggctgctttcagtttccccagaaaacctagcaaagttccaggaggttctcaaccatcagttgcctgtttctcagcctgaaaagtatcctcctctcaggaatgttaactttaattgcctgagtttgccttagatatccacctgcaccttctggctcatgagttactgagcactgtgcaaggmacactttggatatacatagtataaaaggcaccacccataagtaagagcagagtcagtgtcctatttctcactcctgttcctccagtacagtgacttatagcagcagccaggcactggctaccaaga

SEQ ID NO: 207384 - DNA, 528 bp, Homo sapiens
tgatttatgtgtaaactggatcatcgtaaaggtccacttcttcatggctctgtagatatcatcagaatcatgtgtgcaaggccaaatgctttccttctttatataaaggatttattctaagtgaacatcttttcattttattgtggcaagaacacttcatatgagttctaccctcttaaacaattatgtgtataatacastattgttgattataggtacaatgatgtacaacaaatccaagaacttattcatcttgcttaactgaaactttatgtctgttaattagcaactcctcatttctccctctccacaccacccaaccctggaaaccattctgctctttgactatgaatttgactattttagacaccttacagtatttgaatattacagtatttgtctttgtgtgactggctaatttcacatagcataatgtcctcaactttcattcatgttctctcatgttgtagaatttccttctttcttaatggccaaataatatttggtcaatggacatttaggttgctt

SEQ ID NO: 207385 - DNA, 431 bp, Homo sapiens
tatagtggacatttggcattcatcagcaatacttccagagtcctctacatatccttaaatttgatattccagaacwttttgcatggatcttgattttctccaaaatcacattctattgaaaataacctgtttccttttccttctcaactcctaagtttactactaaatttttataaaaccatgtctcttattttatacacatacaaaaattgtagttataagcacttagtgatgcacaataaagactgcttgatgaagaagaaccacagtcatattgagatgcacatgctgggagcagtaaaatttcagagccctctggaggtcacttgggaaaattcaaaaccacaagtgtcaaatctgtgaatgcaaagaatctaatggatactaagtgcttattatatgcaagacattgtggcgagtgctgcagagaa

SEQ ID NO: 207386 - DNA, 270 bp, Homo sapiens
cacaataaagactgcttgatgaagaagaaccacagtcatattgagatgcacatgctgggagcagtaaaatttcagagccctctggaggtcacttgggaaaattcaaaaccacaagtgtcaaatctgygaatgcaaagaatctaatggatactaagtgcttattatatgcaagacattgtggcgagtgctgcagagaattcaatatgcataattgtctctgttctaaatattttactaattagtccagtgcctctatctctgttgtatcac

SEQ ID NO: 207387 - DNA, 428 bp, Homo sapiens
tatagtggacatttggcattcatcagcaatacttccagagtcctctacatatccttaaatttgatattccagaactttttgcatggatcttgattttctccaaaatcacattctattgaaaataacctgtttccttttccttctcaactcctaagtttactactaaatttttataaaaccatgtctcttattttatacacatacaaaaattgtagttataagcacttagtgatgcacaataaagactgcttgatgaagaagaaccacagtcatattgagatgcacatgctgggagcagtaaaatttcagagccctctggaggtcacttgggaaaattcaaaaccacaagtgtcaaatctgtraatgcaaagaatctaatggatactaagtgcttattatatgcaagacattgtggcgagtgctgcaga

SEQ ID NO: 207388 - DNA, 601 bp, Homo sapiens
aaacagcaagattatcaggtttgttaactgctgtctggtgtttaaaggatgcgatttggtttgtggcatatcaagatcatgtataaaagcaatcgaaagctgagggagcatttgtatttgacaacgttggtccagtttttgattaggtacacgcacttttgctattagtactaggtataggtctcagagatcattatgttcagtggtttttaaatgtatttcctggagccctggrgaactttcatgaagtgttgtggatgacatggaaaaaaaagaaagatcaggcaggccttcaccaccttgcaaccaaagttgctcagcttttacttgtcttataaattgaggaaaaatataaaattgtatttgaaaaagaaagaaaattatctcatccaatgtcttcctttttcagatgagaacattaagtaccagattgtttaaccacctctacaattctctgttgctacgatcagatgtagtgcccaactcttacctaacctagcccaatttttaaaaattataccacttataccctttcaggaggctactagggattggaaatttccagaagtcaaattatttggggacaacttttcctttataa

SEQ ID NO: 207389 - DNA, 601 bp, Homo sapiens
aaacagcaagattatcaggtttgttaactgctgtctggtgtttaaaggatgcgatttggtttgtggcatatcaagatcatgtataaaagcaatcgaaagctgagggagcatttgtatttgacaacgttggtccagtttttgattaggtacacgcacttttgctattagtactaggtataggtctcagagatcattatgttcagtggtttttaaatgtatttcctggagccctggagaactttcatgaagtgttgtggatgacatggaaaaaaaagaaagatcaggcaggccttyaccaccttgcaaccaaagttgctcagcttttacttgtcttataaattgaggaaaaatataaaattgtatttgaaaaagaaagaaaattatctcatccaatgtcttcctttttcagatgagaacattaagtaccagattgtttaaccacctctacaattctctgttgctacgatcagatgtagtgcccaactcttacctaacctagcccaatttttaaaaattataccacttataccctttcaggaggctactagggattggaaatttccagaagtcaaattatttggggacaacttttcctttataa

SEQ ID NO: 207390 - DNA, 607 bp, Homo sapiens
taactgctgtctggtgtttaaaggatgcgatttggtttgtggcatatcaagatcatgtataaaagcaatcgaaagctgagggagcatttgtatttgacaacgttggtccagtttttgattaggtacacgcacttttgctattagtactaggtataggtctcagagatcattatgttcagtggtttttaaatgtatttcctggagccctggagaactttcatgaagtgttgtggatgacatggaaaaaaaagaaagatcaggcaggccttcaccaccttgcaaccaaagttgctcagcttttacttgtcttataaattgaggaaaaatataaaattgtatttgaaaaagaaagaaaattatctcatccaatgtcttcctttttcagatgagaacattaagtaccagattgtttaaccacctctacaattctctgttgctacgatcagatgtagtgcccaactcttacctaacctagcccaatttttaaaaattataccacttataccctttcaggaggctactagggattggaaatttccagaagtcaaattatttggggacaacttttcytttataaattgctagatgcaactgcaaagtcaagctt

SEQ ID NO: 207391 - DNA, 579 bp, Homo sapiens
tattcaatggcctagtgcctcaataaagtctttgctttggctaattggaacttggatatctcccagccccatgtgaacrttgaaaattactcagctgggtggtgggtgaggggagggagagcattagtacaaatggctgatgcatgcagggcttaaaacctagatgacgggtaaattggtgcagcaaaccaccacggcacacatatatctgtgtaacaaacctacatgttctgcacttgtatcctggaatttaaagtataatttttaaaaaattactcagcttacagttgccctatggttttcctactcaagagaatacctttgtttagaatgtcctctccagtattctactctttcagctgcctccatgtactctgaacatcctctcttcctgtcagcaagcccactgtggtttgcttaggttttctccatttctgtgctactgcccagaaattacttctatgaaacaggctaggtcaatggtagggctcaccttgtttgtttactttctcctaggccttactgtcctggacttcctgtgttttagtctctgtaaactctaatttaatattacgttaa

SEQ ID NO: 207392 - DNA, 610 bp, Homo sapiens
cctgtgctgaactactaattgtgtagtagtttaaaacctggggctctatcactcttctttcatcctgtagccattttactgctgagatgtgctatggcctgaaccccaaatccagcaggctgtgtcccagagaactggtcccctggcttttctccttctgaacaagacatttcgaagatcacctgttctgaatgttttggccagctattataaaatatcaagctatataataaatcaagggcattttctgggcatcaggattttgaaaacctccctatgtaatacccactggtctcctgctcctctcccaggtggatttcaacgggagtcttttggagacaataccttatcccttatctatagcaaaggatctaatggtatagatttttggcaaattgtttgataacaagtctctaattaacttgtgaatcacattttagccattagtctgttcgcttgggatagatatgtgagaaagacccctgttaaggtttccatgtcaygcttgccaaccagctttagctaatttattctggatcaaaggcatattcttcctttacgcagacgtagagagtccagattgagttataactgctcctgtcgccacccc

SEQ ID NO: 207393 - DNA, 610 bp, Homo sapiens
cctgtgctgaactactaattgtgtagtagtttaaaacctggggctctatcactcttctttcatcctgtagccattttactgctgagatgtgctatggcctgaaccccaaatccagcaggctgtgtcccagagaactggtcccctggcttttctccttctgaacaagacatttcgaagatcacctgttctgaatgttttggccagctattataaaatatcaagctatataataaatcaagggcattttctgggcatcaggattttgaaaacctccctatgtaatacccactggtctcctgctcctctcccaggtggatttcaacgggagtcttttggagacaataccttatcccttatctatagcaaaggatctaatggtatagatttttggcaaattgtttgataacaagtctctaattaacttgtgaatcacattttagccattagtctgttcgcttgggatagatatgtgagaaagacccctgttaaggtttccatgtcacgcttgccaaccagctttagctaatttattctggatcaaasgcatattcttcctttacgcagacgtagagagtccagattgagttataactgctcctgtcgccacccc

SEQ ID NO: 207394 - DNA, 595 bp, Homo sapiens
tggtcttctgctctccttgatgaaacaccaactccccccactcccyggggagggggaagcctttcttacctcttcctccccaaactcccagtcacctcccaaacactcacacattgtcattaatagagattggcagctactccaactgaatcactctgaaaaatagcctgtatcccacctatgtaagaaagaaaaatataaacaaataaatcaaaggggcaagaaggcagagaagaaaaagtgggctaagtgtgacaaaaagttgaaaatttgttccattgcctacagtttcaaatgccattgattaactactttgccattttacagcctcagagacatcaatgtggatttaggggctagtaccaagaaagggctcatattcccccaaaaagacagtgtagtgttaaatataagtgactcatcttaaaaaaaataactgggtctggtagaggattatttaataaatcatagccctgtgcactaaatggtgcttctggcctagggaagttaatttttttcaaaagcttaataggtattcgttgtatagctactctggtgggatctagcccagaaacaaatgttggacccaattctt

SEQ ID NO: 207395 - DNA, 238 bp, Homo sapiens
attgtataatgttcttctttgtcctttttcactgttattgcattaaagtccattttgtctcatataagaatagctactcctcctcacttttggtttccatttgcgtgaaatatctttctccatccctttaccttaagtctatgtgagtccttatgcgttaggtgagtcccttcaagatagcagatacttggytggtagaatttatccactctgccattctgtatcttttaagtggggc

SEQ ID NO: 207396 - DNA, 599 bp, Homo sapiens
taagcttgtatctcctttctactatcacagctggtgctctcttgaaagcaccacctcctggctggaggctaaccaactcaagccattacagcaactcatacaagaacaaccctgccccaaggaagaagaaaacaacagctaatttcactgcctgcaacatcctggcttatcagaggtcctgagtctgtccatgtgacaatttgactgctagcataaccagcatttgagaaaaaccagcacactgaacaaaactacaatcaaggaattccaaaaagtcaacttcactcccctgccacctccactggagtaggtgctggtrtccatggctgggagatccgaatatgaatcatataacaggattctttgcagacattctgcaacaacaatccagagcccagtagccccactgggtgggttagactcagaagcacagtaacaaccactgcagtccagctctcaggaagcaccatccctaggggaagggagagagcccacattaagggatcccacttgggacataaaaatctgaacagcagcccttgagttccaaatctttccattgaaagagtcgacccaaatgggaaggaaccagaaaagta

SEQ ID NO: 207397 - DNA, 403 bp, Homo sapiens
ggaattccaaaaagtcaacttcactcccctgccacctccactggagtaggtgctggtgtccatggctgggagatccgaatatgaatcatataacaggattctttgcagacattctgcaacaacaatccagagcccagtagccccactgggtgggttagactcagaagcacagtaacaaccactgcagtccagctctcaggaagcaccatccctaggggaagggagagagcccacattaagggatcccacttgggacataaaaatctgaacagcagcccttgagttccaaatctttccattgaaagagtcgacccaaatgrgaaggaaccagaaaagtaattctgataacatgaaaagaaaaaaaaaaggttctataacaccccaaaagatcacactagctaaa

SEQ ID NO: 207398 - DNA, 405 bp, Homo sapiens
aaggaattccaaaaagtcaacttcactcccctgccacctccactggagtaggtgctggtgtccatggctgggagatccgaatatgaatcatataacaggattctttgcagacattctgcaacaacaatccagagcccagtagccccactgggtgggttagactcagaagcacagtaacaaccactgcagtccagctctcaggaagcaccatccctaggggaagggagagagcccacattaagggatcccacttgggacataaaaatctgaacagcagcccttgagttccaaatctttccattgaaagagtcgacccaaatgggaaggaaccagaaaagtaattctgataacatgaaaaraaaaaaaaaaggttctataacaccccaaaagatcacactagctaaa

SEQ ID NO: 207399 - DNA, 497 bp, Homo sapiens
tttttacccataacccgtgagccatctctaccagactgctgggttagagctcacagcaggcaggccatgttgagaattcagttttgatgcagaggtccatttaacttgtatcttttggggttagggttaccacataaaaatacagaacacccagttatatgtgacatacttagactacaattttatttatttttcacctgaaattcaaacctaattgagcatcctgcgttgtttatttattgacaccaactctagtcactgtccaaatgcctgtgtttcctcctaatccttcctgcytattcctttccccaactccctcaccaggtctgcaattgttgtctattggcacagggctgacaggtataagccatgtgctttagtataataatttctttaaatgatattgtctgcaatgggttctgttttgaggtctatctcacctggtacctccctaaacaggacattgcaaagccagtctttgtatatcatctaagttg

SEQ ID NO: 207400 - DNA, 539 bp, Homo sapiens
tttgagctatgtgagtctaggctttatcagctgatgctacttttatacaaatttttgcttatggagtttaaatgcagccaagtatccaaagtgaaagacacagaggcttgtaacttccagtatgcttcaactgcaacccacaaagaatgcaatgaattcctcctcctatttgtaacgtttatctccttccataaatctttcccaggtacccagccaggctcagataacattttccaaaaggattgcaaatttggcaaaccttggcaaagtktaaagtctaaggcattacctcaaatctactggctactaactgaggcttaaaaagatctaaatatctattcctatcatttttatcagtcatattaacaaggtttcagtggatctttatatgcaaagtggttcaacacagtattcacactttaaattgttgaaaacaataagaactccatctttctcttttccaattactctctccattgctctgtctgtaaatcttttgttttattcctatatcagtaacattcttcaaaatctaaaga

SEQ ID NO: 207401 - DNA, 457 bp, Homo sapiens
tgtcctctttttacacaaagatgaattgcataaattctgattttgatattataaaagggttagtatgcttcaacacaggtcaccaaaattggatgaataaagcatgcttctgkatcccaactttctggcttaattctaaaaacaaattgaggttgagtctccagcacttgtattcagacattgttttattaacctccctaaggtcctgactatggaccttggtccaaagcagtgtttttccacctttttttcattatcaatcacccttagggagcttttctagacattctcttcctaatcctgccttctcctgtcaccctggccctgctcagaaactttgatgccacacatataccatataactgattatatactgtggtcctttggaagcccaagccattgtaatatttaataattaagatcattcttggcccccagaaactaatgttcactcctt

SEQ ID NO: 207402 - DNA, 428 bp, Homo sapiens
gtggttaaggtgcaaagatgccatggagagaaatggtcaaagtattggcaggcaagagataaattactagctttttgccatggttaaggccaacttgataatgaggacagtgagaaagaactgaaactacaactgctagaagctactggaagaaaacacagaggaaacactttgtgatatgggactggaaaaggatttcttggatacaacttcaaaagcacaggcaacaaaagcaaacatagacaaatgggattacatcaaactaaaaagcttctgcacagcaaaaatagtaatcaacagagtgaaragacaacctacagaatgggaaaaaatacttcgaagtcatacatctaattaggggttaatatccaaaatatataaggaactgaaacaactaatctaaaaatgggcaaatgatctgaatagaa

SEQ ID NO: 207403 - DNA, 640 bp, Homo sapiens
atcttcaggttaggcccaggctgaactggcctctggaaactgtggtcaatataactttcatccagtgactctcttccatgttgggtctctaggtattatggaaccaaaaagaagaaggttcattttctggataggaggagctcaatttgactgctttttataacaggccaattttgtaacaggggaagatagtagggaatatatttgaattttgtttgactttcccatttggcccccaaccagaccactcctctgtcctcacatagggcagctgtggatggaccatgcagtggagtgagttaggaactctgggtggttgttacagttagtgttatgagtggtcattcwtttttttttttttttttttttttaggggaagggagttgctctggaaatagggaaggtatggcaaagggaaagagaaaataaggggataggaactgggtctcttacctcatagacctggaaaaaaatagggatttggagtcagcattttgaaggaaaaaaaaaaagaatcaacacttaatcactcatttcacacagctggtacctgtctgcattatacaaaggtctgggggtgtgtcttactgaacaggggacagaggagcaggacgtgtccacctggggatgctttcttacc

SEQ ID NO: 207404 - DNA, 508 bp, Homo sapiens
ttcagctatttcacacttttatcaaaggcttgcccttgtagttgagtgaaaggtctaaggttaatgcagattcagatccagrtctttgtcagttctagtttttaggtattgagatcagttgcaaacaccataatctcccacctgaaaggctgggggctgaagagagcctgaactcactataatcttggagctgagatttcatacctcagccatggtgaagatcttatacatctctgggagaatgacaggagcaacaagtggcatctgtgtgtctgttacttcacgagtgaattctacaaagaaaaaagtagtactgttaaaaaaaaaatactgcttcataaagatattaagtgtgatattttctgaactgcttctaggtggcagttcccaaacagacagcacacaggtaaagacactggcctggtggtctcattctgtgaaagcaaaagtagcaagagttactgattatttgttagaaggagaaagaataatatggaaataaagaaaa

SEQ ID NO: 207405 - DNA, 583 bp, Homo sapiens
tggtgcctgatttctctgaggaccaacatgactcccttccatctagaagggccaggcagctgtccctcggtgcttattaggtrtgcatctctccacagcctcttctctggctctggagcttcagatgtgtgtgaaataaaagcagtgagctgagaacatcttgtcatgttgatctgcagctgtctcaggtaccctttacagggacattctgcagaaagcaagccaagactgcattcaggggtattttagttcacagtggccttaaagacatgcagctcaggagtttcccatgtatccatcatgtatcatcacaattccagcccagggcattcagaagaatggacggggttcagcgtggatacgaagagcacaggaagattaggttcttctacttgctctgccactagctggctatgtttcctggacctgctcctcatttgtaaaatgatctgtaagtcatttcaagtcttgtggacttggtttagagtcacatacatgccctgattatcaccacagaggaaaaatgtactggctgctgggccaagggggacaggcagggactgtcaccgaagattctgccaca

SEQ ID NO: 207406 - DNA, 583 bp, Homo sapiens
tggtgcctgatttctctgaggaccaacatgactcccttccatctagaagggccaggcagctgtccctcggtgcttattaggtgtgcatctctccacagcctcttctctggctctggagcttcagatgtgtgtgaaataaaagcagtgagctgagaacatcttgtcatgttgatctgcagctgtctcaggtaccctttacagggacattctgcagaaagcaagccaagactgcattcaggggtattttagttcacagtggccttaaagacatgcagctcaggagtttcccatgtatccatcatgtatcatcacaattccagcccagggcattcagaagaatggacggggttcagmgtggatacgaagagcacaggaagattaggttcttctacttgctctgccactagctggctatgtttcctggacctgctcctcatttgtaaaatgatctgtaagtcatttcaagtcttgtggacttggtttagagtcacatacatgccctgattatcaccacagaggaaaaatgtactggctgctgggccaagggggacaggcagggactgtcaccgaagattctgccaca

SEQ ID NO: 207407 - DNA, 583 bp, Homo sapiens
tggtgcctgatttctctgaggaccaacatgactcccttccatctagaagggccaggcagctgtccctcggtgcttattaggtgtgcatctctccacagcctcttctctggctctggagcttcagatgtgtgtgaaataaaagcagtgagctgagaacatcttgtcatgttgatctgcagctgtctcaggtaccctttacagggacattctgcagaaagcaagccaagactgcattcaggggtattttagttcacagtggccttaaagacatgcagctcaggagtttcccatgtatccatcatgtatcatcacaattccagcccagggcattcagaagaatggacggggttcagcgtggatacgaagagcacaggaagattaggttcttctacttgctctgccactagctggctatgtttcctggacctgctcctcatttgtaaaatgatctgtaagtcatttcaagtcttgtgracttggtttagagtcacatacatgccctgattatcaccacagaggaaaaatgtactggctgctgggccaagggggacaggcagggactgtcaccgaagattctgccaca

SEQ ID NO: 207408 - DNA, 560 bp, Homo sapiens
aagcttttatgaaggtgagatgaatagatttctaggacccggactccagaaccctagaagtgaccaagtgtttattgtggggcaccagccacagcatttggctattaggcatttcttgattygtagatttgttttgctcctaattctttactccaagttgctggcaataaccgttagttctcaaaccaaccaaagtctcatttcctagcctttttggcaatgacaaagtttgctggagatgagctccaaagaaatcttttattgaaaccctagtatagatctgagccgagtcctgtgaggagccagggccaggaaacaagagtttcagcctctctgcacctctgagtcatgcttcttcacatttcctaccctgccactgggacctgacttcttcacctccatagtaactacttcctttctctctctttctctccttctgtgctcccttcttcaggctgaggagaggatgcaatctgaggtagggtggaaagcctttgtctctgcttgttaacatcactgcacctcattttccttccaaatcttatacagcttctgcagcc

SEQ ID NO: 207409 - DNA, 639 bp, Homo sapiens
tttctaattcctgggctcaagtgatccacctgcctaggcctctctaagagctgggattacaggcawgcgctaccatgcctggcctacatggtgctttttagtgttcatcacggataaaaataaataagacaaatataaaaatatataaggtatggaaaattgtatacatattacaataaaaatcattgagcattatgaaaagtaaatacaagcttaaatatttttaaatgaatattaattggctttgacttctacattgccagagaataataatgtacaaatacacaaataagcaaaaggaataaagggttactgttaactagctcagattttattcttggctaatttcaccaaaatcttatactagtcagatttatcacttagatgatctttctgatttagagtggaacaaatttgttagaaaaggggtgcttatgattctcattctcttaaaaatgagaattccctccccatggtgtagtgaggtaaagaatatgtttaaaaatagaaatttgtgcttactgaggttgaagataattgtcattttccaatgcaactctgaattttatttttagtactagataatgttcaaagtcccaaactttctaattaatgtgtgcagtaatattgatctctaag

SEQ ID NO: 207410 - DNA, 639 bp, Homo sapiens
tttctaattcctgggctcaagtgatccacctgcctaggcctctctaagagctgggattacaggcaagckctaccatgcctggcctacatggtgctttttagtgttcatcacggataaaaataaataagacaaatataaaaatatataaggtatggaaaattgtatacatattacaataaaaatcattgagcattatgaaaagtaaatacaagcttaaatatttttaaatgaatattaattggctttgacttctacattgccagagaataataatgtacaaatacacaaataagcaaaaggaataaagggttactgttaactagctcagattttattcttggctaatttcaccaaaatcttatactagtcagatttatcacttagatgatctttctgatttagagtggaacaaatttgttagaaaaggggtgcttatgattctcattctcttaaaaatgagaattccctccccatggtgtagtgaggtaaagaatatgtttaaaaatagaaatttgtgcttactgaggttgaagataattgtcattttccaatgcaactctgaattttatttttagtactagataatgttcaaagtcccaaactttctaattaatgtgtgcagtaatattgatctctaag

SEQ ID NO: 207411 - DNA, 639 bp, Homo sapiens
tttctaattcctgggctcaagtgatccacctgcctaggcctctctaagagctgggattacaggcaagcgctaccatgcctggcctacatggtgctttttagtgttcatcacggataaaaataaataagacaaatataaaaatatataaggtatggaaaattgtatacatattacaataaaaatcattgagcattatgaaaagtaaatacaagcttaaatatttttaaatgaatattaattggctttgacttctacattgccagagaataataatgtacaaatacacaaakaagcaaaaggaataaagggttactgttaactagctcagattttattcttggctaatttcaccaaaatcttatactagtcagatttatcacttagatgatctttctgatttagagtggaacaaatttgttagaaaaggggtgcttatgattctcattctcttaaaaatgagaattccctccccatggtgtagtgaggtaaagaatatgtttaaaaatagaaatttgtgcttactgaggttgaagataattgtcattttccaatgcaactctgaattttatttttagtactagataatgttcaaagtcccaaactttctaattaatgtgtgcagtaatattgatctctaag

SEQ ID NO: 207412 - DNA, 616 bp, Homo sapiens
gatttcattccttttttatggccaaatactattccattgtgcttatacaccacatattctttatccattcatcctttactagacacttaggtgattccatatctttcctattgtgagtagtgctgcaataaacatacgagtgcaggtatccctttgatatactgatttgttttcctttggataaatactcagtagtgggattgctggatcatacaggagttctatttttagttttttaagaaaactctgtactgttttccatagtgggtgcactaatttacattttcaccaacagtgtataagtgttcccttttctctgcatcctcaccagcatctgttattttttgtcttgttaataatggccattctaattgtggtaacataatatctcattatggttttaatttgyatttccctgacgattagtaatgtttagcatcttttcatatacctgttggcgctttgcatgacttctgagaaatttctattcatgtctttgtccactttttaaagtttctttattgttcaattccttgtaaattctggatattagtcctttgttggataaatagtttgcaaatgtcacatgttctcactcatatgtgagaactaaaaa

SEQ ID NO: 207413 - DNA, 616 bp, Homo sapiens
gatttcattccttttttatggccaaatactattccattgtgcttatacaccacatattctttatccattcatcctttactagacacttaggtgattccatatctttcctattgtgagtagtgctgcaataaacatacgagtgcaggtatccctttgatatactgatttgttttcctttggataaatactcagtagtgggattgctggatcatacaggagttctatttttagttttttaagaaaactctgtactgttttccatagtgggtgcactaatttacattttcaccaacagtgtataagtgttcccttttctctgcatcctcaccagcatctgttattttttgtcttgttaataatggccattctaattgtggtaacataatatctcattatggttttaatttgcatttccctgacgattagtaatgtttagcatcttttcatatacctgttggygctttgcatgacttctgagaaatttctattcatgtctttgtccactttttaaagtttctttattgttcaattccttgtaaattctggatattagtcctttgttggataaatagtttgcaaatgtcacatgttctcactcatatgtgagaactaaaaa

SEQ ID NO: 207414 - DNA, 425 bp, Homo sapiens
ggagacttgttaaattgttgttaccaaaatgctgatagtgatatgggcaatgaagtccatgctgagatgctctcaaatggagatgaagaactaatttggaaccagagtaaaggttactcttgctatgctttagaatagagactagcagcattgtgactgctctagagatctgtggaactttgaacttgagagagatgacttaggatatctgatgaaagaaatttytaagcagcaaaacattcaagatgtggcctggctgctttttactcataagcttatattcgtgagcaaagagatgatctgaaactggaaattatatttaaaagggaagcagagtacaaaagtttggaaaatgtgcaggcctaccatgtggtagaacagtaaaacctattttctggggaggaataactaagacaacaggaaaa

SEQ ID NO: 207415 - DNA, 607 bp, Homo sapiens
gtcatatgactcaattctttttaaaacatcatttgaattttcagctctgctttaatgcaaatgtgttacctccccaaacatgtgtgctgtatcatttaaagtgtgctaacacatgctaggctctgagaagaaccagaattctgccagatgggtatttgtgatgttcttagacaagtcagagtcccttaaggaaggaccatgggattaatccatacaaaacattatgatacacaccgtccctaaagtttgacaatcaaagtgcaagtccttaaagcccattttgaactaaatgttttgataaagtactcgtgcagagagttatactatccttgacaatatagactgtgctttcaggtatatatcaagtttttatttaatactatattttcagtaatagccataggttagcctgtgtatgctatatctcaaaagtataaatcttaatcatgaaatgtattctgtgtacmataacagcatcaaatttattaaataagtatgtgctgtattctgttcatgatatggcagcatataaaaaagctgttcactcccagcataacacttcacaaagaaactgggtttttgggttttgccttcctaaatttataga

SEQ ID NO: 207416 - DNA, 447 bp, Homo sapiens
tattaagagtccaaagcaatgtttctcaaacctacttatggattagaaacacttggagagatttggaaatatcaatacccasgtaccccagcataattaaattggtatcagggcattagttttttgttgttgtttgctttgctttgttttctaagcttcttaggtgagtctatggttcagtctggattgtaagtcactagtaaaaagaatgataataaaatgaatatgcatatcccattataagcctaaaaaatataaaattgccagtcaaaatcctctaggttatttttaatagaattatcagccatttctttctctatctcaaacatacaaggtatccatatcctacattttgcattaataattccttgttttcctaataaatatctctaaacattttaactttcagttttcctatctttggcctttatataaatagaattacac

SEQ ID NO: 207417 - DNA, 493 bp, Homo sapiens
gagtccaaacagcttgatagccactgccctagaatactgttgaatgtatcctaagaaacagcaacattgatagcaacattatttataactaaaagtargcaacgttgaaaatccttcaacaggaaaatggataagtattttcttatccttaactgtggtattttcatatcatggaatattagactgtaatataattgaatacatgatagccatataaaacagctggatgaatctcaaaaacataatgtcaaattaaaaaactactcatggaagagaatatacagaattattacatatatatgaacttacaaagcaatcacaataaaaaaatacatggtttagagatacacatacttgtgaacaatctatgaagaaaggcaaagaaatgataaatacctgaggatgatgattatatctttgtggagaaaagcgtatatcacagtggagggcacacagagggttcaaaggaatcattttaattccatttcttaag

SEQ ID NO: 207418 - DNA, 560 bp, Homo sapiens
actctgtttgttatattaagattaagcacaatgatgttgacagtattaatacatttaaaagcctgtcacgttccatggtgttcaygagtcctggggactgcaggattgaaataaaaagtgactagaggcaaaattaagaattatggaatgtgtagaaggtgaagaacacagaggtagactctgaaatgagtactgctacccaggaggatattaacctcttgcctgcctggcttttcccataatattgtgaagccacattttactgaaaagagccgcatgcttcatgaaatagttatccaacctccttggcctactgctgcttcatgaatgctgccagaataggggaaagtttgtgactgaagttaaaggggggttggtttcactgctatactagtgtaattattaaaatgcgaacacactcaaattaaatacaccagaaagaaaatcattctatggagctcagtttcctaagaaataatgagaccaatttgcttttatatgaaaacactccagtttgtgatatcttcatacactgctggtgggagtgttcaacagtacaa

SEQ ID NO: 207419 - DNA, 517 bp, Homo sapiens
attaatattgatgctaccactgttaacctcaaagtcatataatattactattgaaattgttaaggttttatgaaggggtgaggagaaggtaagacatgaagtgaagagcaattaattagtatagtacctagaatatgagtgctcaataaatattttctgaaagaatttaatagatttaataaattatacattgaaaatactgtggcttaggatgagtgtagatcttcaattatttaacagtcaagtaaagtgacagacattttaatttctatataactctgagaaagtcctccaggttcctgattacaatacagaaaagtatagaacttgatataagcagccatmttattgagaagcttcaaatcttaaaggtagttttcagaaatcttcaactaagaattggttatggtgattggtggtttaaagaaagtctatggtgaaattttagttggatgaatgtttattttttgttaataactgccttatttattgtaattcacttttatcatgaattatt

SEQ ID NO: 207420 - DNA, 559 bp, Homo sapiens
tttaaaaattatacatatcttttttttagaaacctttacaaggaatagtagcatcctatgaaaagttggcttaatatttgattatatatggtgtgtatgattatctccataatttgagacattaggctattggtcagaaatgtgatctccactgtaacagcattttargggaacaattatatttgatatttctgttttcaatttatagtgtctattctagaaatataatctgccataatctgtcaaaactgccaagactgtttgtagtacttcagtggtactttacagctaatatcaccaccacccaccacccatctgcataatgcatttaaccttacaaagaatacttttatctattatattacttcattttcaaaatggtcttataaaacaggtagagcagggattttaactgaatttccattatgaggaaaataaggtaacaacccattcctggcaaaatctagactagaattcaaatcatttggctccaaactaacacatgcttctccaaaaagcagcccagtatttccagcgacttaatttaatgaacagattc

SEQ ID NO: 207421 - DNA, 398 bp, Homo sapiens
gaccagctggccaacatggcaaaatcccatgtctactaaaaattagctaggtatagtggtacatgcctgtagtcccagttacttgggaggctgaggcatgagaatcgcttgaaccctggaggtggaggttgcagtgagccgagatcacaccactgcactccagtctgggtgacagagtgagactttcaaaaaaaaaaaaaaaaaaacctgaaattttcttagtaagaaagggatgaagaggaaggttattggatatgcaaacactgtttgttaaattcaaataactgagtgctaacaatgccagacactgttctagttgcttgraatacttcagtaaacaaaatgaaaattattcttgcctggagggacttatattcccatggtggggggacagacat

SEQ ID NO: 207422 - DNA, 399 bp, Homo sapiens
tgcatttcaccttctctcttctagccttttccttagttcacatttaaaaaattgttttgcctgcactttgccaaaagtgcagttctgacttttcttatacttttatgtaccttcttcttgtttacatgtctgatgcagtgtgggagcagttttggggacatttggcaatgtctggagatatttttgtttgttacaacttgcagggagagggtgctactggcatccagtgtgcaaaggccaaggatgctctaaacatcctactattaacatcttactatatatgggtcagccccctacaacaaagrattatctggccccagatgtcaataagtgacaagattgagaaatcctggtctaatgcatatattctcaacagggatagtaacttaaatatggctc

SEQ ID NO: 207423 - DNA, 218 bp, Homo sapiens
agcagtttgtagtctcagaatgtagcaaagctacctagacactgtcaagctggtaatcaaatactttctttactaacatcttagtttctaaaccataaaacttgactattracagtttctttcatttctgtttcaatggattatatcctatttggactggatcattcccactgagcctctgacttcacccttttgtttgatctccagcctccaacccc

SEQ ID NO: 207424 - DNA, 532 bp, Homo sapiens
ctgccctgtcgaatatcaaaatgcatatagcaatgagctcagttatgaggctcaactaaatatmgtatgacttcaggtatatttttaatgatatattcttatgtaacttcatttgtctgctttcctatactattataatttcaggagccaattattaggtaacatttttcttctccttgtcccttctcaccttagtttgagattagaaatgtttgtggatctgacagctctgtggctaaaagacagatgataatcagtaactagaatatgaatacaggcatacctcagagatattgcaggctcagttccagatctctgcaataaagtgaatatcacaataaagtgaatcacacaaatgttttgtttgccagtgcaaataaaagttatgtttacactgtctctactgtagtctattaagtatctaatagccttatgtctaaaaagccaaagtacatactttacaaatacttcattgctaaaaaatgctaaccatcatctgagccttcagcaagttgtaatctttttgctggtg

SEQ ID NO: 207425 - DNA, 560 bp, Homo sapiens
gataatatattcacaaccttggggtttattaattaagatttcttagaaaagctgtaaaaataaaaaaaggaggggaaygaagaagctttctggggtaatggaaatgttttacgtcttaacctgggtggtggttactaaagcatatataatggttaaaaaaaaattgaactgttcacttcagatctgtgcatatcacttcacataaatgatacctcaataaaatagagttaagatgcaaaaaaaaaattcattcaattgagaataacaaaagcaactcatcacagaaagtttcttgggtttttttttaaactaggatcctctccaacatatgttctaatctgactgcaatcaaaccagagggttttgtctacttacatttctgtaaatataaatatcaggcacacaaactaaacacaaaaatattcttcactctagtttcctcataactgcattttcaaagacaactatagaaggtacttgtgggtatgggtgtgctctatgaaatctgacccaccagacacataccttctactatctagctcaccaaatacacacatagc

SEQ ID NO: 207426 - DNA, 560 bp, Homo sapiens
gataatatattcacaaccttggggtttattaattaagatttcttagaaaagctgtaaaaataaaaaaaggaggggaatgaagaagctttctgrggtaatggaaatgttttacgtcttaacctgggtggtggttactaaagcatatataatggttaaaaaaaaattgaactgttcacttcagatctgtgcatatcacttcacataaatgatacctcaataaaatagagttaagatgcaaaaaaaaaattcattcaattgagaataacaaaagcaactcatcacagaaagtttcttgggtttttttttaaactaggatcctctccaacatatgttctaatctgactgcaatcaaaccagagggttttgtctacttacatttctgtaaatataaatatcaggcacacaaactaaacacaaaaatattcttcactctagtttcctcataactgcattttcaaagacaactatagaaggtacttgtgggtatgggtgtgctctatgaaatctgacccaccagacacataccttctactatctagctcaccaaatacacacatagc

SEQ ID NO: 207427 - DNA, 562 bp, Homo sapiens
caaccttggggtttattaattaagatttcttagaaaagctgtaaaaataaaaaaaggaggggaatgaagaagctttctggggtaatggaaatgttttacgtcttaacctgggtggtggttactaaagyatatataatggttaaaaaaaaattgaactgttcacttcagatctgtgcatatcacttcacataaatgatacctcaataaaatagagttaagatgcaaaaaaaaaattcattcaattgagaataacaaaagcaactcatcacagaaagtttcttgggtttttttttaaactaggatcctctccaacatatgttctaatctgactgcaatcaaaccagagggttttgtctacttacatttctgtaaatataaatatcaggcacacaaactaaacacaaaaatattcttcactctagtttcctcataactgcattttcaaagacaactatagaaggtacttgtgggtatgggtgtgctctatgaaatctgacccaccagacacataccttctactatctagctcaccaaatacacacatagcaaactctaatcctag

SEQ ID NO: 207428 - DNA, 364 bp, Homo sapiens
tgcctgttctttctcatccttccgatcaaatggcccctccccgaagtttctccttgaccactctagcttaggtcacatcccgcctccccattattctttatggcagttctctatttccttcctagcacttacaacagtctataattkttctgattatttgtttgcttaaatgcgtattgtctttcactagatataaactttaggaagtcaggaattaggttgttttgtccaccttgctaatgtgtttcaaaaatatttgtagaattcaagacagatgaatccagcacacttgtaaacttttcttaatgacctcaaaataagaaattataaaaagggctccttgaggactttttggtcctcttgt

SEQ ID NO: 207429 - DNA, 512 bp, Homo sapiens
ttggcctttttttcgtaagccatccttaacccagtctgtttttcacaaagctgccagagtaatctttctcaaagagtgttgtccacatgtgcatcactctgtcttgcctattgtacatcttagtcttattctggcattcaaaaccattttattagctctaccatccccaaccatcaccaccactattctacaacctccctccaccactcccaggatggctagttcaagtgcaaggcagaaaaaggcaycttgtcctcaagatatttgactgccatctgcagcagagttgttgctatcagccagggtctcatcaggaaacagatgatgttaagttgggtaatttaaggacagtttaataaaagaactacttacaaagctatgggcaggatttagagaaagaaataatgggggtatagtacctcaggacttgtaacagttggaaaccattatcacccactaggcatgaagattcaagggcagggcacagtcaccacaatccagagaaaggtaac

SEQ ID NO: 207430 - DNA, 561 bp, Homo sapiens
ttagtgctattaaatgagccccttctacgctgtgaggacacaaygagaaggcaccatttatgaaccagtaaggaggccctcaccagacagtagatttgctggtggcttggtcttagacttcccttcccagcctccagaatagtaagacacaaattatttttcttctcctttttttttttttttttgagatggagtctcactctgtttgggtcgacgtggcatgatatctgctcactgcaacctccatctcccatgttcaagcaattctcctgcctcagccttccaagtagccaggattacaagtgtgcaccaccatgcccagctattttttgtatttttagtagagatggggtttcaccatgttggccaggctggtctcgaactcctgacctcaggtgatctgcccgcctcggcctcccaaagtgctgggattacaggtgtgagccactgcacccggccaacaaatttctgttgtttataagccacctggtctatgatgctgtgttaaagcagcccagactaagacacccttcgaccttgatagaaattgccaccgatctt

SEQ ID NO: 207431 - DNA, 558 bp, Homo sapiens
cagccccagatgccatgcccgtgaaagagagctgagacactgatccagtctctccaagtctttcggtgtttgctcaaaggttattaccaaactttaaaaccaaaacagctctaaatatacatgttcctcaaaattagatatgctgacaagagaaatggagaccaagtttttaaagctcaaaatgaatttcagcgttacagagttctttatacatagggaccatttggaagccccaaggaagcgacctgcgatgggaaacaaagctcttgtccccactcctccagcgcccggtgtgtaactttaacaagtcacttatgtgccttagaatgcagtgtccttccttctaatgaaattgtatataaaattaaaacgttgagaacaaatacragaggaactgctggctgccacccaggcagcctccctcctgatgccttggtaacagcttctgggcctctcagtgaaactctgggatcctgagtactcaggtacctattaatctaagccatatgatcatgacactcctaactatagcctcaactaatataattttttagaatt

SEQ ID NO: 207432 - DNA, 556 bp, Homo sapiens
tatactataatttttttcttcttaattgacctaacaggatacagtttgttcaaaataataatggcaacacaatattagattatgtatgctttgtagatataccaatgctatgtatatttgtataaggaagaaatgaaagctaagtgatagaaggaataaaaaagaattaggaatattttgtgattgtaagatacttgcactatcagtgaagtggtatagagttatttaaaaatgaacttgctttagctgtaattgcatattgcaaactctaggactaccactaagaaaaaataaaaaggaagtataactagtaagctaagaaatgaaaaaaaattgaatcatataaaatgctcaattaaaaccacaaagggtggaaagaaagtagaagaaaaaataggaacaaagaacaagagcaataaatagaaaacagtaacatatatggtaaatatgaatycaaatttatcaaattactcaacatcagtggtctaaatattataaaagagattaccagagtggctgacaaaacatgacacaactatatattatctaaaggaaa

SEQ ID NO: 207433 - DNA, 592 bp, Homo sapiens
ccttggaatgttcccaaatgagttgaatactcatgtccatacaaaaatctgcactcaaacatttatagcaattttgttcgtattggctaaaatttggaagcaaccaagatgttcttcagaaagtgaatggataaatgaactgtggtacatccagagtggaatattattcagcactaaaaagaaatgatctatcaagccataaagatacatggaagaaccttaaatgcacattactcagtgaaaaaagccgatctaaaaaggccacgtgctgcaaaatttcaactatatgacactcgggaaaaggtaaatctgagaggagacaataagaaaggatcagtgtttgctacagtttaggaggggatggaaaaatgaatgagcagagcatagaggatttttaggacataacattagtttgtatgatactataatggtggatacctgtcatwatacatttgcaaaaatacatacattgtacaatatcaagagcgaaacctaataatgtaaactatggacttgtgtgatgatgtgtcattgttggttcatccattgtaacaaatgagtaacattaccaggacatataaaaacagtgact

SEQ ID NO: 207434 - DNA, 596 bp, Homo sapiens
caatggttgcatcatccttaaagcatgctatctaacttgaaggcagcctatagggtggcagttagagcacacatccgtggtttcaagtattagttaatattttttaagaggatgtgagagagttttaaagggtaacaaaatcaaattttgagaggacttttacccatatcatttagttttttttccccagacaacatttttaggttggtaagccttgaactctgtgagttttaagatgacatacaagacatttttaaaaatcataattacaatatgtttgttgcattattcacatctatctgataaaaatatgcaaatttagtcagaaaattgagaaaagatttagatgcagtttccaaagacatttcatttcaacttttgttctttcttggaatcctgtttatcaccaatcagagttgtgtctggatttgcrataggttctggggactacaaaggaacagaagtcatggttgaagactttactccgttcccacaatatgctaggagctgtcaggcatacagcattcttcacaatcataaccccctgttaagtacaattttctgttcaaaacagatcaaaataacttttttttttt

SEQ ID NO: 207435 - DNA, 580 bp, Homo sapiens
tccacattacaagttttagtatatgaccattttgattatttaataatcatctgtaaattattttatcctctttgatttgttatattgggatgtgcttttaaatatctaagtgttaaatattttctgtttaaataagtggttatgacctatatatatatatatatattctgacggttctaatttattaaagttttctttgtgtctatccacgtcaatttgtaaatgttccagtgatggggagctatatattcagataattctattggtagttagctttaagcgtcacaataaaaaataacttgaagcaagctctttaattttatttatttaacaaacacatagctgaccaagtgccaggaaatttttcaattgctttgtaaatattacttaatgtatcctcacaaccctgtaagttaatccctgttattrttctattattcagatggcacagaaaggataagtcacttttacaggtcacacagctagcaagttgccctgcttacatctaaacatgaatgtcctggtcccagaagccatatctttaacactctcctaaacgagctatcaatcaataaaaaag

SEQ ID NO: 207436 - DNA, 201 bp, Homo sapiens
gctggatcagtagcctgagctgccccatccttcctgtgcagagatcctggtgcaggggggctccaggcagatgtccagacatttggagcaccgcttatttggttcagcagcccgaactgccccactcttcttggatatagattgtggtacagcaatgccctcttggctccatgcccyggcaaatctctaagcattcagaaa

SEQ ID NO: 207437 - DNA, 619 bp, Homo sapiens
ctcccccctgctctggctcaaatcctgctgctgtcctccctgggtctctcatgtgggttctgctgcccactcctctggcagcagcttctttcaggtgagcctctggatgggtcttcctgccagcgtgccttctgccccctgcctccttcacactrtgcagacagctggagctcttcccaggcattgccagaaaggactgaaagtcacccctgactgactgaaagagagcccctgacaagtttgtcctaggaatagacagctagatcaatggccttctcttcctacatctgtttggttgagtatctgccagacactgagctaggtgacagatacaaggtagctatgaggctgttcttgtttttaaaaagtttatgacctgtgaggaagcagatcagacttacagataatttaagtgatctggcaagtgctacaacagaggtctaaaccgagtgctacggatgctggccttagtctaagggttgtaggaggacacctcctgcctcctgtgcaggttactccgctggaacatggccctgcactgggacacagatggtttccggaaggcaagacttgtttcctcaaagagaaatacatgtctgatttggatttcctttttccc

SEQ ID NO: 207438 - DNA, 506 bp, Homo sapiens
ttggctgcaaacagaagggaatgttttagggtgatggaaatgttctatatcttttgtggtggcagttacctaagtgtatatttgttaaagctttgcacttaaaatgagtgggttttattatatgcaaattatatctcattactgttgatttgttttctgtaaatgggctaatgactttaatagccacttaacaaaagggaatatccaaatgtccaatacatataaaaatatgttcaatgccattattcatcagggaaatgcaaactaaaattacaatgagatgccgctattcacccaccaaaatggccagaatttaagtgcctgacaagttttrgcaaggatgtggaacaactggtgggactcctaaaatggcacaactactttgaaaatctgtttgaaattttccatcaagactaaacattgcctgtcttataaaccagctattttaccactaggtatatacgcagagaaaaaagggttgtgttcaccaaaaggcagatacaaga

SEQ ID NO: 207439 - DNA, 564 bp, Homo sapiens
tttcttcacttccatatttcatactgtgtttccaaggagagaacccatttctcaaatttgtttataggccctattctaagaactcttaagttggagcccaagcaagtaaaggtctgccacatactaagggctcaataaaagaaaaaaatgtaaacagggcagaatctgagacactccgttttgtgagtggagaatggtgggtggaagtgatcagmggagagataaagggatagggggcagagtagagttgtgggctgctgaggaaatgcactatgagaacattttaagagccttttgaggaatatctaatgtccttaaagaaaatggcagatctcatgaattaggattttgttttctgcttctgaagaaatgtacaatctaatcacctatttgattaccaatgacagacattcatttttagagatgcctgctgaatgaaagccggggctctaatagcacatggtgagtgtttccagtcatgatgatgagttattagcaaatttttttttttttaggatggcatcttgctctgttacctaggctggagcacggtggcacaatctc

SEQ ID NO: 207440 - DNA, 605 bp, Homo sapiens
ccaaattttgtttctattgtatttcaccttgttcaggttgataatatttacattctgcttagaaacataattcccatagttgttgagtaatcattcaataattaatcaaattcagtgctcatcgccagctccttccctccatggtctctccatccctgagttcttcattttgagtcttttcattgtgtggatttcttaacaagttgtttttacaagaaaagcctctgtgtgctaagttctgagctctttgtctctgggaaggtatgcttggttcttttatacttaaatgacatattcacttgctatcatactctttggtcacaccagtttcaacatgtcttaatataaaccatttcactgtcttccctgtgacaaagtctaaggccagcctaaataatctcaccttatagggtgatttcttccttcccgaatccagatattaagaatcttttctttatccttgaaatttagtagcttgactacaatatgtatcactgttgaacattctatataaaaattttccagaacctagtaatctttcagtctgtaaatttttcatttgggraagttatcttgtattttatctctgaacacatttttgttcc

SEQ ID NO: 207441 - DNA, 406 bp, Homo sapiens
tttttgtttgtggatttcttctacaatcttgcctctgtcttctttaatttccttttctagtttttgtcaagtactgtggtgaagagaggagaaaataatttctgtttttcatgctggaaactttctttggctagtggtcattggctctctggtcatttttaagattggggtctcaaagctgattggracctttgaataaatgggtaagtgtgcaggtgatttggtgaggctatttcactctgggaaacaccagagttggtacctttagatctttttcttagcaagtcagaacctctagggaataactttccagtttctgctttgaaggtataaacctggttgctagaagcagaggagggaaggaactgctcacattgcagagtgtcaacttttacttattctcatt

SEQ ID NO: 207442 - DNA, 399 bp, Homo sapiens
ttattagtctattctcacactactataaagagcttcctaagactgggtaatctgtaaaggaaagaggtttagttgactcactgttctgtatggctgaggaggcctcaggaaacttayaatcacagcagaaggcgaaggggaggcaggcaccttcttcacaaggcggcaggagagagaataactgaagaaggaacttgccaaacacttataaagctatcagacctcgtgagaacccactcactatcacgagaacagcatggggaaaccaccccatgattcaattacctctacctggtctcccccttgacatgtgaggattatggggattacaattcaagatgagattttagtggggacacagccaaaccatatcaggatatgaaatcaacttgttgatga

SEQ ID NO: 207443 - DNA, 603 bp, Homo sapiens
aatgaacaatactaataaaaaatgagaggagagttcataggctgattcattcttcatctcttagaacaaacttttgtgtgcctaagaatcacttggggagcctgttaaatatatatatatatatatatatatatatatatatatatatatatatawaaaatatgtatttatatatataaataaattgaatatatattatgtatatatgtgtgtatatatatacacacatatatatacacacacatatgtatgtgtgtatatgtgtgtgtatgtatgtacgcgtgtgtatgtatgtacgtgtgtgtatttacatgtatccagtgaaatagtctctggaaccagcagcttatgtttctaagctctctctgtgtttctgaagacagcttggtgtggaaccttgctctgcaatcaggggcaactctggccttggtagaggaaacttcttctcagtccctgccaccctagaatcccaagaagggcagccttcactttttcagccttctcttccctccaccgcaaggaggtgtgtgggcaagagctggctcctctgggcttgcaccatacctgaacatgcctcatgtcactggttgcatgatactgtaa

SEQ ID NO: 207444 - DNA, 484 bp, Homo sapiens
tgatttatattctggcacgagttctgtatctcatgacgaataagtaataattcaaatgggcgctggtgcatggactgtgcttcgagtagtacttgacgcagatcatagccatggtgatgtgagcagcaatctccttaccagcactatgccagggaactaatccaaaaacctcagcttcttaggaaaataataagaggagtgaaaacagatgagcacaagagaagcaaatattctcttttttcattcatcgtacaactaactgcaaatatatagcaggtactaggtacctgatttattcttttgttttcctttatagtccctctaaatcttaactttcccctattaaaaaacaggagaatcgcttgaaccgggaggcggaggttatagtgagcagagatcscaccactgcactccagcctggcaacagagcgagactccgtctcaaaaccagaaacaaacaaacaaaacgacaacaacaacaaca

SEQ ID NO: 207445 - DNA, 456 bp, Homo sapiens
gaaaaagaagcatgagtgtttctcatgatccactggagatagttttagatcctgtataatggggccactagagaagggatgggacctgcagtagctacagcagaggctggatgcccaagtgtaagggatgagctggagcagtgttatcactggcattaggggctgtgcaggtgaaaaatcactcatggggctgggatccaataacccacaaaagcactcagaaaacacacaacacctccaaacaccagccggacttagaaaacagaaggccagctcaatayacgaacagtcgaagaaggaactttccttcccttctaatcttcttttttctgaaagaaaaaaaaaccaccatgcagattccaatgacagtaatctaggggtgaaccagagcaaaggcatttttcaaaacatctccaatgattctaacatatatctggagtttggtgccaatggttt

SEQ ID NO: 207446 - DNA, 609 bp, Homo sapiens
accatttcttcttagccaggtgcaaagaaaagctcttcactgtgttcaggttgtgagacaagaggatccctcctgatagataagtctttcttctagtccagaaaagatgctcttcctagctctgtatggctctagataattttgctgtacatttytaaatcttgcttccattgtggtgcaaaactaacaggaaaacattcactctgcctctagctttctcttcctaaactctgcccttcattttacctggagaacttgccttttccttctgttctccaaatctaattaagcagctgattcttggaggggttgacatttgccactgtggctggagctgaacagcactaatgatccttgttaaggtggggacacttcagagagggctgtccctgttgggtgacaggcagtctaatgagtcctagtgagttcttgagtaggctagggatggtgtcttagtagttcctaaaataatttgactcctacttctcattttgcattgcctggtgattttaattccattaggctgctataggttcctaaccaaccttaaggaaaaaaaaaaaaaagaagaagaagaagaatcgcagtgggactgcaaatgtgttacac

SEQ ID NO: 207447 - DNA, 609 bp, Homo sapiens
accatttcttcttagccaggtgcaaagaaaagctcttcactgtgttcaggttgtgagacaagaggatccctcctgatagataagtctttcttctagtccagaaaagatgctcttcctagctctgtatggctctagataattttgctgtacatttctaaatcttgcttccattgtggtgcaaaactaacaggaaaacattcactctgcctctagctttctcttcctaaactctgcccttcattttacctggagaacttgccttttccttctgttctccaaatctaattaagcagctgattcttggaggggttgacatttgccactgtggctggagctgaacagcactaatgatccttgttaaggtggggacacttcagagagggctgtccctgttgggtgacaggcagtctaatgagtcctagtgagttcttgagtaggctagggatggtgtcttagtagttcctaaaataatttgactcctactyctcattttgcattgcctggtgattttaattccattaggctgctataggttcctaaccaaccttaaggaaaaaaaaaaaaaagaagaagaagaagaatcgcagtgggactgcaaatgtgttacac

SEQ ID NO: 207448 - DNA, 573 bp, Homo sapiens
tctcatcccatggttttcagctccctcaggtcacttaaggtcttctctacactgtttattctagttagccattcgtttaatcttttttcaaggtttttagcttccttgcgatgggttgaaacctcctcctttagctcggagaagtttgtttttactgaccttctgaagcctgcttctgtcagctcgtcagagtcattctccgtccagctttgttccattgttggcaaggagctgcgatcctttagaggagaagaggcgctctgatttttcaaattttcagcttttctgctctggtttctccccatatttttggttttatctacttttagtctttgatgctggtgatcacagatggggttttggtgtggatgtcctttttgttgatgttgatggtattcctttctgtttgttagttttccttctaagagtctggtccctcagctgcagttctgttggagtttgctagagatccactccagaccctctttgcctgggtatcaccagcagaggctgcaraacagcaaatattgcagaacagcaaatattgctgcttgatccttcctctggaagctt

SEQ ID NO: 207449 - DNA, 521 bp, Homo sapiens
atttcactcatctcatagatcaatgtcagcttcttaccagagcacacacctgtaaaagttggccaaggaggccaggcgcggtggctcacgcctgtaattccagcactttgggaggccaagacgggtggatcacaaggtcaggatttcaagaccagcctggccaacatggtgaaaccctgtctctactaaagatacaaaaacacaattagccaggcatggtggctcatgcctgtaatcccagctattcgggaggctgaggcaggagaataagttgagctcaagaggcagaggttgcagtgagccgagatcacaccactgcactccagcctgagtgacagggtgagaytccatctcaaaaaaaaaaaaaaaagttggccgaggagcaatagcctcactccagtgacaacacttctgtggccatcaatcctatgatcaatcaatctttaactactccctcttaagtgtttttcactattttcaagattttatgcttccccaaatcaaatatatcagtagtttgt

SEQ ID NO: 207450 - DNA, 441 bp, Homo sapiens
gagacctcgggaaaaccagctaaaatccgaggcttctctgactaaggctgcagggaggcgtgtctggagcgctgaaaccagaacactatgataatgatttctgtgaatgtgatgctaaggttgttcggctagaattttagggaacaccatggaggaaatattttcagcctgatatcaaatctggggtccagagagaaaagtctcagcttgctcatggagaagagctacaagagaagcccacatctgtttgccagggtgggagaaccagcaggagatgaaatagaaaagccacaaaagaaaaggcatcatggtaaaagcaagccatgttctactgccytcagtgatgtactgtctgcggtcacttacactcaacattggcagagaccacgtggtccacaaagcctaaaatgtttacttgctggccctttacagaaaaagttt

SEQ ID NO: 207451 - DNA, 607 bp, Homo sapiens
cattttgtagttttcaattttttaagcagttgtgatattgtatttttaaattttagtgtccacatgttcattgctattatatagatacacaattgattatcttttattctgccaccttgttgaagtcagttctaggagagttttcttgtagatttttttgttttgttttgttttttgctttttttgagacagagtctcgcactgtctcccgggctggagtgcgatggcatgatctcggctcgctgcagcctctgcctcccagcttcaagtgattctcctgcctcagcctccccagtagctgggattacaggcgcccaccaccatgcccagctaatttttctgtatttttagtagagacggagtttcactatgttggctaggctggtttcaaactcctgaccatgtgatctgcctgtctcggcctcccaaagtgctgggattacaggtgtgagacaacacgctcggccctgtagatttgttttkaagatttgctgcaaatagaaatagtgtatatcctcgttcctgatgtgtgtgctttttagttcctttttgccttattgacctgactagaacttccaagactatgttgagtaagagcagtgacagc

SEQ ID NO: 207452 - DNA, 632 bp, Homo sapiens
gacatcaccgtgtttgagaatgcagaacctctctaatccaccagaaatcagaccaaaccatcactttcaggagccagcacagcaagaaaagttgagctagttgagtgattcaaccaacttacttttgatccattcctttaaatactaaactaaaaatcttctatatccttataaacagtgtcattttatccacattaatatctaatctttcaatttgattttagggccaaacatattatgttttggatcgatcatccctctggcatctcttccatttgggatgtgactttcatgtacccagcaggccttttagataagggatccaaatggtcatctgtgctggaagcagggacatcatcctttatgagagtttcatagtgtaacaagttcttttcactgtattaatgagatcagggctattctttctgtatcctgggaaagctagggtgtcttttcctctttttaaaattgcaacaataaaataaaagttggaaagaggttttaaaagtgctatgaaaactattacaaggtaaagaagcacttgtttttaacacatgaagaagattttctttcttgactyggttactcttctattctggatagtccaagtgcaagcatatttcaaaaaagac

SEQ ID NO: 207453 - DNA, 483 bp, Homo sapiens
ctgggtactgctgccggacttgtcagcaccttgtcacggcttcctgttgcgtgggctaccatcggactctgtgttcttaacaattatccataaaaaaccccagaagatccttcacaattaaaaaatatatattaacaggtaaaaaaaaaaaaaagccactttaaraaatgcagtttcctggagcgggtgctatgtgtaaaggctgcacagccttgactaactgcagcatggtctcgtctttcccagccccgtgatgctcttttgttcatggtgtgacaaggatgtagggagccaatacgatttaactaaataatacacaaatgtcaagaacactttcatgtcttgtgtacagaccagaataaatgactcggatggaatgttttgtttttcttttcagggaacaactccacagtttacaaggagctttgctgacaagaagtggctaagaaatattatttaaaataacctattttaatgtaggag

SEQ ID NO: 207454 - DNA, 643 bp, Homo sapiens
catctggtgcttcaaattttgtatgatgcaggatttagttttctattctaattcctaaaagccatatttcaggctgcattctattaggggtgtctcacttaaaataagaatactattatgtagcttaacttgcatctatttcctttttattatggccactcaattgttcstgactttctttgggaatgatttgttaattttattccagtctcagctatgtgccttcacttaacaatgaacattgactactggatacttagcttaccttttttacaagatatatatttcaaggttttgttttcatataacataaaacagtaaggcattcattaatcactattaaattcattcttttcctctttattgaattctaaaggaaaatcagctagtcttttttttggcatgtgtcagcaaaagtatgttattatgaggtgttcttaaataatatatcttcataaaacaatataggtggaggtttaaggagaaataaggaaagaaattggaaccatctggatatccaaagtagagaaaagtttttactaatggttgtcatgtacacgttacaaaaataacattatacagctttctaactggacaggaaaaggcagaactatcaaaaagttgaaaaagaagatagccctgg

SEQ ID NO: 207455 - DNA, 582 bp, Homo sapiens
gggtgatgtgcccatattaaaatgaaaacactcacaacgtaaatgcaattggcaggtttcttctgcagaggtggttttgaatgcaactgatgaaacagaggacataagagtcatttggaaagggatgacaccatgtgggaaaggaagagcaaaaaggaaagtgaaaaataaaaagacttattcagcatttgctgcatgcctaccactggactgaggmctttatctagatccatcgttttcaacgggggggcaattttgcttcccaggagacacttggcaatgtctggagacatttctaattgccataattgagagtgtagtgtacacacagtgttaggatgtggcaagtagaatccagggatggcattcaacatactaccatgcacaagatgccaacctcccccagtaaattacccagtccccaacatcaatagtgccactgttggaaaccttgatctagattttctgattatctagaaatgttgagaatagggcaaagagaaatttaatcttttctccagccttctcatagttagtgatggtttgagccacactcttaaacactcacattcaattaagctt

SEQ ID NO: 207456 - DNA, 499 bp, Homo sapiens
atagcaacgtgcagaacttctgagattttgcaagtgttcccatgtgacatgtggtgcatgaggttgccatggcagtgagctcctccagcaaggatattaggaggtatacytgcctgagtctcttttctgtttccatgacatgagattgaatggagaaggcagagagtaacaagtgtaatgagattctgatttttctgtttatgctcatggaatatctgaaaagaaaggaaagcatgacatctattttttcaaatggcagcatgtgggggcttaggagctgttcattttaaagctccggtggagatttttgactggcttttacatattccactgtttgtggatatgctccatcacaagcagacattttaaaagctgtagtgggccaaactttgttttattttagtatttgtccaccaaagatgtccatgaaatttctaatgtttatttgtgaactgttttggagaaagtagggaattggaagccctgaacagtagaattg

SEQ ID NO: 207457 - DNA, 540 bp, Homo sapiens
gcatattggaatcctcatgggcagctcccagtcccctcattttrtgaagtggagatacctacctcatagactggttgaggcaattatatgaggtaatacataagcaaaacctagcacagggccagacacacaagtccttcataaatcttagctctgagcattattattattatactctattgttattatttcagtttccatactctccctcaatcataatggttgagtgtggttgaaaccaaacagtataattcttggtaaatatgtacattttaaaattataagatgaaaataaatggttgtacattttctccattttttaaaaaaattatgtatcacccaatgtatttgccccagagagctcttgttagcccagtcactggtttctaatgccattcgtttattaattcagttatgactattaataattcagttatgatttattcagttattaatgcagttatgaccaagatgggcagggatccacatgaagttcacagtcaagtgcagaataagatattaatagtccaatggggaaat

SEQ ID NO: 207458 - DNA, 540 bp, Homo sapiens
gcatattggaatcctcatgggcagctcccagtcccctcattttatraagtggagatacctacctcatagactggttgaggcaattatatgaggtaatacataagcaaaacctagcacagggccagacacacaagtccttcataaatcttagctctgagcattattattattatactctattgttattatttcagtttccatactctccctcaatcataatggttgagtgtggttgaaaccaaacagtataattcttggtaaatatgtacattttaaaattataagatgaaaataaatggttgtacattttctccattttttaaaaaaattatgtatcacccaatgtatttgccccagagagctcttgttagcccagtcactggtttctaatgccattcgtttattaattcagttatgactattaataattcagttatgatttattcagttattaatgcagttatgaccaagatgggcagggatccacatgaagttcacagtcaagtgcagaataagatattaatagtccaatggggaaat

SEQ ID NO: 207459 - DNA, 577 bp, Homo sapiens
aagaggaaaattatgaaccagctcccctcagagaggaagtgcctttgcaaacaggtcgtcaatcatgagcatagtggctgcctccttcctcccaggaacagccctgcctcctaaattgctgactctcccctcacaggctgtttggattggcatgactgtaggacktgtgatagaggcagcgtttggcatattcctacttatcctacaagcactttgggaaagaattaactatgtgtattttcctggaaagacataatttccgttgctcattgattgtgtctttaatttataacaaatgccttgaaaatgggacacatgtgatgttataagccttctacaagcctcattctctaggttttttaattccttcaggaatgaattattagaatggaagaggtgagacacagaggcataaatttggaagagccctttctgatcagctaacaaatttctctcccattttttggatggtaaaactgaagcccagagaaggcatgtgacttgacaaagatgagtttccaaaatacaaattggatttcagggctttatgtttttatttttattttcctaagcttgt

SEQ ID NO: 207460 - DNA, 384 bp, Homo sapiens
aagtgttcaggtgctgtcctttgtagtctgtagcctattaaaataatacacaactgaacacagacccaaggaaaggggttctactcatcgctcgaatgtaaactctaacaagataaggattttgtctgcttcatttattactgtattcccaactcctaaaagagtgtccagcacttagtatctgttggtaagtacctgttgaattaattaaccagtgrtgagactttggaaagcagctagtccatctgtaagattgttttctcatctgtgagatgagtcagttagattagatgttttctaagcttattctagttttaaaattgtatatttctataagaaatgataaatgaaaaatgtccattcctttttcatctccatcaccca

SEQ ID NO: 207461 - DNA, 528 bp, Homo sapiens
ttccagccaaagtcgagacacrcaattgaatttatgcatcatttagtagagaccccaaaatattcatgcctcagtagtaatgcaaaattgtccctacaataaaaactacagtagctcccccttatacatactcttactccctggagcttcagtcacccacagtgaacttcactccaaaaatattcattggaaaatctcacaaataaacaatccataaattttaaatagtacactgtgctgagtagcatatcgaaattctagccagcactctgtgtcccacccagaacatgaatcatccctttgtccagtatatgctaccctcccattggtcactgaggttatcagaatgactgtggcagtatcgcagtgcttatacacaagtagccgttgtttcgtttaataacagcccccacatgcaagaatagcaatgctggcaatttggataagccaaagagaagccacaaagtacttcaagtaaaaatgtgaaagttcttgacttaacaaggaaaaaaaagtcatgctgaggca

SEQ ID NO: 207462 - DNA, 593 bp, Homo sapiens
ttagaatgatttcttcaatttcctacaaaatggaccaatgtttatgaaagcatcccaaatgtaaagaattatacattgataaatgtacagaaagaacatttcggtgtttaaactgtggcattgaaagygccaaatgagaaaatacatttcagaaattcagtgcatgcacttacatttatcagtgcaccctctctttctctgcttagattttatggtgttattattgagattcatataatacagcctattcaattggacaattggaatattgttatacacagttaatcaacagactctgtataagtgataaggcctcagagaagaagaatattagagctcaactccagcacgataagtcgttaacacccttgggaatgtatagctgttaaacaaaacaaggagaccatattgccctgtgaattcaaagggatctaatgggaatttcagagtaaatttattttaaggtatgtaggaagcctaatcatttaaagtgctttttctattccgaagcaactcatcccaccacatcttttcatttagtactgatcagtttccttaaaagattagaaggtgaaatgatgcactccaaaaag

SEQ ID NO: 207463 - DNA, 584 bp, Homo sapiens
tgctcttaacaagaaacatatcatctctgatttgtcactaaaggagatgtcaagaatatgaggctgtaggtcctgatcttatttctctcactggccaattaactttgcagaatgggcaatcatgggactatttactgactagaccagagtaatgtaaaggcaatgtaaagttaaagatctcacaagtcctttacttatgtgagaagtctgcctaagtgggaaaacaatttacttttctagtgcaaatcactctctgctcgacagcaaatttagaatctggaattcagagccggttaaatcaggacacaaaccttggatttgtaaatttccactggtgcaaacttggacaagatactcaatatctctgaggcttatttttwaatttatgatttaaaaagcataacaatacataccttaaaatatagttgtaaagtattaactgctcagcatactttgtgttaaacaattccattataacagagtcactctagtggtgctcaagcaaccacaaaggagaataagaaacagtcatacaagaaagcatgttttctaaataatatccttaaatcctgaataatttgttt

SEQ ID NO: 207464 - DNA, 563 bp, Homo sapiens
gatagcaaaaacaaacactagctcaatcatattattagagcttgcaggaattttagatgctatctggtcaagggccctaattttctatgtgtagaagctcaggcccagagagaagagcagctagttaggtaacaaggtggtcattccagaattattgggtaaaactgacccaggttgaatgaaaaatggtgctctctatatctaatccattttcttctgctttccatgattacttgggtcttccatcattccagtgtctttttctcaacttttctaaaactgtgtctactgagcactgtgactctcacgatccctrtgatatattttcaacctagactctccagtttctgaaactctggtgatatctcagtttgtcagagtgatttctacttgattctactaaaactggtgtaaaactgtgtcctgttgtacatactgcaagaagctatcctgggcacaacttacctttgtgatgattgtataaggataaattcataaatgattacctcccttaaatacaaatgtaagttgtttccatagatacctgttcacaaagattaatt

SEQ ID NO: 207465 - DNA, 557 bp, Homo sapiens
agctgcctcctgtaggctggcctcagaggaagcacacatgctccatcagttgcaacaaggcgaaagtcagaagagtgtgaaagtgtcaggcccagtgctcccggaaaatgaacccggaaacactcartgaggcaccaccggtgtgagaaagaagagacaggtgtcttctccaatgggcacaagtatgtcatgcttagaaaagcagaacacaggatgaaacaaaacatatttatttgcaaagaaagatcatgtttaaattgtacctgtgtttaaaaatggcctctttgatgggttataaaagtgcaggcaggttttatgaaacacgcactttgcctctcttctatccttttgtgggaagcaggcagatgctggctggaggacatttgagagctcggagctgaggctcatcacagccaaatccctcactcaccaagtgagcggagctgccactgacgcttctccactcccgcagaatctactattgagcactgggccccctgaggacaggatgtgaccctggctggcatgattcattcaacccgttcatcttggaattc

SEQ ID NO: 207466 - DNA, 572 bp, Homo sapiens
tctagccaacaaatatctgttgaacacctactcctctaaacactataaatttctgtccttggaactggttgagaagagacatgtggcccaatcctagtcaaagacatgtaagtgtgctggaggattgctagaaaaggggtctctactcaagtaaagacacaagagaagagatgatctcttcatctgctggccattgcctgccactacatggctggcactgcaggagctgtctcaaggccagcagggcagactgcagcctagaagacggcagaacagaaaggggtaaagaagctgggtcttcacaggtcactgagccgctgaataagccagtctgccaaccaccctatctcagaacgtcttgttacrtaagaaaataacgaatttccttagtgtttaagccattttgaaatgcgttttctatcacttgcagtcaaaagcatcctgactattataaaatcctatggagaaagtcaaaggtcttttttgttatttagactctacaaaaagaatcacaaggctcccttcctgtagaagttgaccaagtctactacatagataacatacatgaactc

SEQ ID NO: 207467 - DNA, 584 bp, Homo sapiens
atttgtggttatatttagcatattttattatacttgagagcttcataagattccatttattccccacttcacataaaaatcaagcatcacctttattttctttacctttgtatatcaaaartctcataagttcacagaaatttgaaaaaagagatagcacagaaaagtcttgtgtgtccttcatccagtttccccaatggtgatagtttgtgtatagtacaaaatcaaatacagtaaattggtgataataccatccacagaccttattcaaattttaccattttacatacactaatctgtgtatttgtataattatatttacatataaagttccattacaacaattaaactccaatacacaactctcccattaccccaaaaatcctttacgttacccttgataaccacacacaacactggcttcctccctatcttatattgaccactaaaataacaaaaccactagactagaataagttatgcacatgtaatgtaatatctaaaacaagtactaaaagatttatagaaagatatactcaaaaccactatggataaataaaaataaaattttagaaaatgtttac

SEQ ID NO: 207468 - DNA, 584 bp, Homo sapiens
atttgtggttatatttagcatattttattatacttgagagcttcataagattccatttattccccacttcacataaaaatcaagcatcacctttattttctttacctttgtatatcaaaaatctcataagttcacagaaatttgaaaaaagagatagcacagaaaagtcttgtgtgtccttcatccagtttccccaatggtgatagtttgtgtatagtacaaaatcaaatacagtaaattggtgataataccatccacagaccttattcaaattttaccattttacatacactaatctgtgtatttgtataattatatttacatataaarttccattacaacaattaaactccaatacacaactctcccattaccccaaaaatcctttacgttacccttgataaccacacacaacactggcttcctccctatcttatattgaccactaaaataacaaaaccactagactagaataagttatgcacatgtaatgtaatatctaaaacaagtactaaaagatttatagaaagatatactcaaaaccactatggataaataaaaataaaattttagaaaatgtttac

SEQ ID NO: 207469 - DNA, 590 bp, Homo sapiens
caatcttgtaaggtgcagtacttggcttaggattcagtacttagcctcctcttggaggaaagaatggaaaattgagtttcaaaattagtcaatgtctctgttttcttttgcctctgactgtgaaagaaaaattatttctgcattttcacattactctatttcattatacatgtttctgccaagtggaagtaacccaatccattcctgacttaatctcgagttcagtactttcttcaccatcgttataaacattgtagcttctagcttagctcagayaagtaatatgcataagccactattaggatccaaaatatattgctcagaggtacatagtcatgagccactattgccatgcagtattaatgtaaagtagcacttactggagaaactcagaggcaaaaagagcacctgaacacatatgatcttgaagctctaagtattctacaaaaagatcagttggggctggacataactgaaaaattgtggaagaatttcaggaaggagatttcacactgtgataatttacatgtttgtagaagacttgaaggagggacaagaaacatgggttacatggtttaaaccatatcaca

SEQ ID NO: 207470 - DNA, 572 bp, Homo sapiens
gggctggacataactgaaaaattgtggaagaatttcaggaaggagatttcacactgtgataatttacatgtttgtagaagacttgaaggagggacaagaaacatgggttacatggtttaaaccatatcacaattagagctttttgatcaaggagaaagctttgtcaagacccttctcctggtattattcaaaagccttatgttgttctgctcagctaattttgattaagctcccaaatataaccctagcaccatccatatatgctttccattaaaatcatattaatgaatctatgaaatagtgatcatagwtatgcttgcaaaatatcaataggaaggaaataaactaaaggtaatttgtagaatttcatttaaaaaaatagagcatatcttaacaatggactgcatatcccatgccatctatatacttacataaatactatatttatgtgaacttatgtgaaaagaaacaaggatcactgaagtgtgccacctctccttccatgtagataactagaaataatagacaagaaaatgattagagagatgcatatttgtctacaaaatatcaag

SEQ ID NO: 207471 - DNA, 572 bp, Homo sapiens
gggctggacataactgaaaaattgtggaagaatttcaggaaggagatttcacactgtgataatttacatgtttgtagaagacttgaaggagggacaagaaacatgggttacatggtttaaaccatatcacaattagagctttttgatcaaggagaaagctttgtcaagacccttctcctggtattattcaaaagccttatgttgttctgctcagctaattttgattaagctcccaaatataaccctagcaccatccatatatgctttccattaaaatcatattaatgaatctatgaaatagtgatcatagttatgcttgcaaaatatcaataggaaggaaataaactaaaggtaatttgtagaatttcatttaaaaaaatagagcatatcttaacaatggactgcatatcccatgccatctatatacttacataaatactatatttatrtgaacttatgtgaaaagaaacaaggatcactgaagtgtgccacctctccttccatgtagataactagaaataatagacaagaaaatgattagagagatgcatatttgtctacaaaatatcaag

SEQ ID NO: 207472 - DNA, 517 bp, Homo sapiens
gactcccacttaacatttataaaagcttcataaggtaggtggtctttttatatttaattttcacctacagcaaaaggctgaggtttaagaagtagaataattttcttaaggcctaaaatggttagagagcagatgcaggattcctcaaaactcaattactgtatctgttagaatcatctcttttattccctatttaaaaaatggattatccaataaatctttaaaaataccttaaccttttttttgttttgatcctttatttctcatccctactctatctcctctcagtcctctgaatgtgtgtatatctacgtasttttcctagtcctatcattttacttcatctgtaatacatttaaatgaatgtttattttcatgcatttggcaagactgtaagctctggaaggccaataactgccccatatctgtttttttgtagccatatgcagtgccttgcatgttgctttgtaaatacatagtgattacaaaacagatattttggtagtgaattgaatta

SEQ ID NO: 207473 - DNA, 649 bp, Homo sapiens
ctgttttccatagaagttgtactaatttacattcctgccaggaatgtataaggattcccttttcaccacatccacacaacatctgttgtcttctgatatttaataatggctattattgcaggggtaagggggtattttattgtggtttttattggcatttctcagaagattagcaatgtttagcattgtttcatatgtttgttggccatttgtaaatattctcttaagaattgtctattcatgtcatttgtccactttttaatgggattatgttttttttctgctgatttttttttttgagctccttgtagattctggatcctttgcaaatgtatagtttgcaaatactttctcacattctgtgaattgtctgtttaccctgatgattwtttcttttgctggagacacccaatttaaatgtgttacttagggaatcacatttttgcaatatttagttactaatttacttatcctgactttaatgtcctaaatgatctaactcttgtctgtctcctctgccttatctaacagcccttttgcctatctaagctatagccctactgatagtccaccgggttctcaaattctcaagctctttacttcatacatttagctgcaatgttataatatttactttaaaacatttacc

SEQ ID NO: 207474 - DNA, 649 bp, Homo sapiens
ctgttttccatagaagttgtactaatttacattcctgccaggaatgtataaggattcccttttcaccacatccacacaacatctgttgtcttctgatatttaataatggctattattgcaggggtaagggggtattttattgtggtttttattggcatttctcagaagattagcaatgtttagcattgtttcatatgtttgttggccatttgtaaatattctcttaagaattgtctattcatgtcatttgtccactttttaatgggattatgttttttttctgctgatttttttttttgagctccttgtagattctggatcctttgcaaatgtatagtttgcaaatactttctcacattctgtgaattgtctgtttaccctgatgattatttcttttgctggagacacccaatttaaatgtgttacttagggaatcacatttttgcaatatttagttactaatttacttatcctgactttaatgtcctaaatgatctaactcttgtctgtctcctctgccttatctaacagcccttttkcctatctaagctatagccctactgatagtccaccgggttctcaaattctcaagctctttacttcatacatttagctgcaatgttataatatttactttaaaacatttacc

SEQ ID NO: 207475 - DNA, 372 bp, Homo sapiens
taccaagtgtgggggaaaatgtacacaaatgggagccctcatgcattgctagtgggagggcggatggtaaaaaactttggaaaacagttgggcacttgaaaattttgacataaayttatcatacagcacaacaattccactcagaaatctaccaaaataagtgaacacacaagtccattcaaagacacatatgtgaacattcacagcagcatggttcataatagccaatacctaaaaagaatacaaatgtccattaactggtgaatgattaaaaatatgcagtataggaacaaattgtaatagtatgcaataaaacttaacaaactactgatacatgctgcatcgtgtataaatctaaaaacattgtctagt

SEQ ID NO: 207476 - DNA, 506 bp, Homo sapiens
tagccttttgcatatgccactttaaaattttgcctggatagccttaaaagaagggttgctgtttttttcaggtattccaaatttacttttcatagatgttgtatatagaaatattttcttcagcagcrtataaatatgtatttcccgacaatctctccaatggattatattgctaatctgttaacatgttgtttaaagggaatttttttgcatctagagttgaaaatgaatccttctattagacaaaatatattcaagtcattgtctattcaagaactttaaataatatttttgcctttagaggctcagtgggtatatgagttttaacagtcatactgacttttgaaaaaggcttatctaatcatttgggcatcttccagtaaaatatctctgggaggagtgatagctcaagaagatatatagcatagtagtttacttgacttcagaaggcctaaaaatttaagaaaacttttagcaatagagcctatgctgtaaccttgatccag

SEQ ID NO: 207477 - DNA, 489 bp, Homo sapiens
tctcgtggagtatcttaatggtgttctctgtatttcctgagtttgcatgttggcctgtcttgctaggttggggaagttctcctggataatatcctaaagtgtgttttccagctcatttccattctcctcatctcctctagtactccagtcattcataaatttggtcttattatgaaatcccatatttcttgggggctttgttcattcctttttattcttttttctctattctttgtgcatgttatttcagcaaggtggtcttcaaactctgatatcctttcttctgcttggttgattyggctgttgatacttgtgcatgcttcctgaaattcttgtgttgtgtttttcagctccattgggtcctttatgttcctctctaaactggttattctagttagcaattcctctacccttttatcaagattgttagcttttttttgcattagtttagaacatgctcctttagctcagcgtagtttttaattaccc

SEQ ID NO: 207478 - DNA, 438 bp, Homo sapiens
  misc_feature (1)...(438): n = A,T,C or G
nnnnnnnnnnnnnnnnnnnnnnnnnactgtagaatcttattttacttcacatacctctttgaaggcattttatccaaatgaaatcacattctgggctactaaarggacttcaacatacaaatttgaggggacacagttcagcccataccacaactaaagtgtaaaaagctgcaggggtggcatgtggtctccattaatgatctctatttaattcttttgtctgacctctgcagccactgtgtgaatcctggcaatgacagtagagagtgattgttacataagtgcaacaaaggagcaacctgataggagaggctatgccaggcataataacattgctcgtgtacattgataagacctcaggtacatggtatttggccattgatttcttgaccaatttctatttaaattagaaaaagcatcaggaaaagttcatattca

SEQ ID NO: 207479 - DNA, 416 bp, Homo sapiens
gagaatgtaatttttgcttaaaatgagagttgagtgctatacattatactcaaatgacagctttagatggattccacaaatttggatatgttctattttcatgtttaatcaatttaagttttctttttcaatatctcttcagacttcctcgttaacccatgggttattaagaaatatgttaatttccaccaggtgcagtggctcaggcctgttatcccagagatttgggaggcccaggggggcagattgcttgagaccagcatggtgaaactcagtctcaaaatatatatacatatatatatacacacaaaaaattagccaagtgccttsatcctagttactcaggaggttgaattgggaggatagcttgagcctggaaggtggaggttgaaattagccaagattgtgccattgca

SEQ ID NO: 207480 - DNA, 609 bp, Homo sapiens
tggaggatgagatggatgaattgaaagaagtagtcttcagtaggtgggtrataacaaactactgagctaaagggcatgttctaatccaatgcaaagaagttaagaaccttgataaaaggttacaggagctactagctagaataaccagttaagagaggaacataaatgaccttatggagctgaaaaacacagcacaatcacttcgtgaagcataaacaggtatcaatagccaaatcgatcaattggaagaaaggatatcagagtttgaagaccaccttgctgaaataaggaatgcagacaagattagagaaaaaagaatcaaaaggaatgaacaaagcctccaagaaatatgggactatgttaaaagactgaacctatgattgattggagtacctgaaacacacagagagaatggaaccaagttggaaaacacactgcaggatatcatctaggagaacttccctagcaagacaggccaacattcaaattcaagaaatacagagaacatcactaagatattccacaagaagatcaaccccaagacacataatcatcagattctccaagcttgaaatgaaggaaaaaaatgttaagggcagccagagagaa

SEQ ID NO: 207481 - DNA, 609 bp, Homo sapiens
tggaggatgagatggatgaattgaaagaagtagtcttcagtaggtgggtgataacaaactactgagctaaagggcatgttctaatccaatgcaaagaagttaagaaccttgataaaaggttacaggagctactagctagaataaccagttaagagaggaacataaatgaccttatggagctgaaaaacacagcacaatcacttcgtgaagcataaacaggtatcaatagccaaatsgatcaattggaagaaaggatatcagagtttgaagaccaccttgctgaaataaggaatgcagacaagattagagaaaaaagaatcaaaaggaatgaacaaagcctccaagaaatatgggactatgttaaaagactgaacctatgattgattggagtacctgaaacacacagagagaatggaaccaagttggaaaacacactgcaggatatcatctaggagaacttccctagcaagacaggccaacattcaaattcaagaaatacagagaacatcactaagatattccacaagaagatcaaccccaagacacataatcatcagattctccaagcttgaaatgaaggaaaaaaatgttaagggcagccagagagaa

SEQ ID NO: 207482 - DNA, 554 bp, Homo sapiens
gttaactgagtttcctgaatcaggtgaaattaccataccctccttctcaaatgatttctgaacatcactgacaaataaaactaatatctcccccaatactaaagatataatgtttaaaatatttgagagtttattattttaaaaaatttcaagtgcttgattctttaaatatctattaattattttcaaattgatattaagcaatgctcctagatgcaacagtatgacaacaatagccacgctagcatcagacagtggacatctctctgtcctgcttcactctctggcccacatgtggctctcttaaattcctttcctgaatttaatctatcccagatgggrtaatgctctcatcacttcctctactgtgtaggccatttctctctaggtgttcttcaggcactatcatataacacaatctgtttggtcctcttctggccatctccaagaaatgaggaaagtaaaggtaacatttaaagaatttaagatgtgggaaaattagttgaaaataattaagaattaaaatccagctcccttgctatataactgggcaa

SEQ ID NO: 207483 - DNA, 554 bp, Homo sapiens
gttaactgagtttcctgaatcaggtgaaattaccataccctccttctcaaatgatttctgaacatcactgacaaataaaactaatatctcccccaatactaaagatataatgtttaaaatatttgagagtttattattttaaaaaatttcaagtgcttgattctttaaatatctattaattattttcaaattgatattaagcaatgctcctagatgcaacagtatgacaacaatagccacgctagcatcagacagtggacatctctctgtcctgcttcactctctggcccacatgtggctctcttaaattcctttcctgaatttaatctatcccagatggggtaatgctctcatcacttcctctactgtgtaggccatttctctctaggtgttcttcaggcactatcatayaacacaatctgtttggtcctcttctggccatctccaagaaatgaggaaagtaaaggtaacatttaaagaatttaagatgtgggaaaattagttgaaaataattaagaattaaaatccagctcccttgctatataactgggcaa

SEQ ID NO: 207484 - DNA, 554 bp, Homo sapiens
gttaactgagtttcctgaatcaggtgaaattaccataccctccttctcaaatgatttctgaacatcactgacaaataaaactaatatctcccccaatactaaagatataatgtttaaaatatttgagagtttattattttaaaaaatttcaagtgcttgattctttaaatatctattaattattttcaaattgatattaagcaatgctcctagatgcaacagtatgacaacaatagccacgctagcatcagacagtggacatctctctgtcctgcttcactctctggcccacatgtggctctcttaaattcctttcctgaatttaatctatcccagatggggtaatgctctcatcacttcctctactgtgtaggccatttctctctaggtgttcttcaggcactatcatataacacaatctgtttggtcctcttctggccatctccaagaaatgaggaaagtaaaggtaacatttaaagaatttaagatgtgggaaaattagytgaaaataattaagaattaaaatccagctcccttgctatataactgggcaa

SEQ ID NO: 207485 - DNA, 470 bp, Homo sapiens
gaaaaaatggatctcatttaatatgttacaaattcctgataattctggcacataaatatttctcaaattcattcytatcaatacctatatcagtcacttccatggctggctcatcttttcttactttgattatgggaatgattttctaactgttaaggattgaactatgtccccgaaaaaaatgagttgaagtcttaaaccccatacctatgaatgcagtgttatttgggaatagagtttgcagatgtaatcaaatgaaggtatcatgctggattaaggtacaccctaatccaatgtgactggagttcttatcagaggagaaggaatatacagatgcgcagggagaatgctgtctcaggacagaagcagggatggtagtagcataactgcaagccaaggaacaacagggataacagccaccatccaaagttagagagaaatgaggaaggatcctcctccaaagccttcat

SEQ ID NO: 207486 - DNA, 579 bp, Homo sapiens
aaacactgctcaaatcttaggctgattcttgaatcatgcttatgtgagacagactcagctaagggaaaattagcctacctgagatgtgagctgttgcccaagaaatggtgttttctgagtctgaccaaattattaataattgcttgctcctataaaagattcagtgtttttagaataatataaaagaatccaaaatctacacaatataatatttacaatgcccaggattaaatccaagattactcaacatacaaaaaaccagraaaatgtgacctctttacaagacaaaaagtctgacaatgcaaatgaatcacaaaatgactcagagttaggaatttatggaaagatatttcacataaattataatgctatattcaatgatataaagaaaaatatgcttactatgagtgaagcaacaggaaattatagaaaactagatatagaaattaagcaaattgaaattcattttacttgaaaatacatgtaagaattacttcttaaaaagctagatttcagtagcaatgagtacatccagcacttgatcttggtttctaatgctattttgccataattggaaat

SEQ ID NO: 207487 - DNA, 579 bp, Homo sapiens
aaacactgctcaaatcttaggctgattcttgaatcatgcttatgtgagacagactcagctaagggaaaattagcctacctgagatgtgagctgttgcccaagaaatggtgttttctgagtctgaccaaattattaataattgcttgctcctataaaagattcagtgtttttagaataatataaaagaatccaaaatctacacaatataatatttacaatgcccaggattaaatccaagattactcaacatacaaaaaaccagaaaaatgtgacctctttacaagacaaaaagtctgacaatgcaaatgaatcacaaaatgactcagagttaggaatttatggaaagatatttcacataaattatwatgctatattcaatgatataaagaaaaatatgcttactatgagtgaagcaacaggaaattatagaaaactagatatagaaattaagcaaattgaaattcattttacttgaaaatacatgtaagaattacttcttaaaaagctagatttcagtagcaatgagtacatccagcacttgatcttggtttctaatgctattttgccataattggaaat

SEQ ID NO: 207488 - DNA, 597 bp, Homo sapiens
gaaattgaaatgattctctactcttctgagtatttataagagtgagagcactctttcctgcattacttgtattggattgctagttccaaaagcaaagtttctgaacccatttttgacttggtcacaagtcaagtttttaaaaataaagaaaatatttggtccccaaatataggaccttgttttttacaaccatggcagaatatagaaaggctcccccatttcagagattcccaaatagcagctgtgcacataaggattggtagtttctgtgttggtgggttttcctgccactattactagggatcaacaaagaaagcagtagtgatattactaggaaactcaaatwtaacgggagaaaatctagcctatggttattcagaaaacgagaggcagagaggaatttagggtaagtgaagccatataaatcaactaatttatagttgtaatcccagagtcataataaatgatctaacttatattcagcaaaggactgatccaaacagctaaaaaatcgggttgcataatatggtttgagaaatttttaatggatcagaatctgtcctttattagtttattgagaataaattagttaagttt

SEQ ID NO: 207489 - DNA, 577 bp, Homo sapiens
tgtttctgaactaaaataaatggataaggatggagctgaacaagtattacacatataatgaaatacttaagaaaattacaagtgattccgccttagcttaatttttaaaaagattataaattctttatgcaagacaatctttttttttttttttttagacagagtttcactcttgttgcccaggctggagtgcaatggtgcaatcttggctcaccacaaccttcgcctcctgggttcaagtgattctcctgcctcagcctcctgagtagctgggattataggcatgtgccaccacacctggctaattttgtattttttttagtagagatggggtttctccatgttggtcaggctggtctcgaactcctgacctcaggtgatctgcccgcctcggccttccaaagtgctgggattaaaggtgtgagycaccatgcctggcctacgcaaaacaatcttaacaaactatttacttcaaacactcttcactttatcaatacatctttttctattgaaaatgattcctaaagaacaaaacagtagagaaaacagatcaacaaaacatttgagaaccatattc

SEQ ID NO: 207490 - DNA, 578 bp, Homo sapiens
actttgagtggatttaaatttgaagccaactaactcgaagctcaattacatgtcagatttgtctcaagccttttatttctgtttgtgtccgaaaagactgattccatggtcataggtttgaggttatttgttcttaaraacaatatctgggttatctgtcattgggacaggcagccaatgttggcggtgcagaaatattctgggccccactgcagggttacagttcatagacccggtctctctagaagatatatgagtcctcccaccattgttcagtgttcagtccaggagtttaacagaagaaatcaatgaggtgcaactgtgcaaaataggggtcaaatatgtacagctgtggctccacatgtatcagatagctctgtttgatttttctctagacagtattcattatcaaaatgggcttcagaagctttttattaaaaacaaattgatgttaattaattcagattacagtggccattagtcagctatctcattgcagaaaactgaatcaaatcaagactgttccctgcaatctctgagagtttcctatctttaaatctaattgtaaattggaattc

SEQ ID NO: 207491 - DNA, 379 bp, Homo sapiens
gtattttttgtctttgagctactaacagtttagtagaagaggaaaacatgtaaacaaatgattacacaatatgttttgaggacaaactgaagaaagaaactaaactctatgggaaaatagaaagaagctttttatgtggtaattaccgagcagtcttgcaagattaataggcrtttccagggacatcagtgaaataaatctaatacaggaaaatggatatgtatgcaaatattaacattgactccaacttcctgtttcccttactctgtggcttagattcctgagtttgaaaatatttctcataaactttaatttacctctgcagtttgtcagagttagaggagtattaattggtgttattttaaggggtatttgtcaa

SEQ ID NO: 207492 - DNA, 612 bp, Homo sapiens
taatgacaaaaagtgaatccctgtcttatgatgatatggtcattatgagaattaagtaaaggtaatatatgccatatcatgaagtagtaacagtaattcttaagagtccaccagaatgacatcagsagaacagcgatgtttggccagcaccgcttaagagtgtggtccagggcccaataatgtcaggatcacccggctccactccagatctcctgaaacagaatttctgtgtgggacccaggaacctgtgttttaataagtttgccgtccaatttttgtgcacactaaattatgagaagcagtcctctaatctgctctcagctatatttccagtacctacatttacagtgggcaacaaagataagcctaattcattaatatttgtttaaccattctctcagtaatgattgctctgtacttcaagacgtcttttcttatacttactattgggaaacatctcaggatgagagacttcaagtaacttcctttgttattttgcaggtcacagcaacagtaaggaacaaaaattgtattttcaggtattttacatcgtcagataatccttttggaatgacaataatagcagtgcctacactataggacagttgtgaa

SEQ ID NO: 207493 - DNA, 590 bp, Homo sapiens
tagctctcaacatatacaaaaattaactcaaggtggattaaagaccaaagtgtatgacgtgaaactataaacattctagaagaaaatctaggaaaacatttttggatacttgtctaggcaaataatttatgcctaagacctcaaaatcaaaggcaacaaaaacaaaaataaataaatggaatttaattaaactaaaaagcttctgcacaacaaaaagaaataatcaatagagtaaaaatacaatctataatatggaagagaatatttgcaaactatgcatcygacaataggctaatatccaggatctataagaaactcaaacaactcaaaaagaaaaacaaaaataaccccattaaaacataggcaaagaacatgaacagatttttttcaaaagaagatatacaaatggccagcaatgaaggaaaacatggtcaacatcagtaatcatcagagcaatgcaaattaaacccattatgacataccatcttacaccagtcagagtggatattactaaaaagtcaaaacaacagttgttggggaggatgcagaaaaaaggaaatacttatacactgttggtgatcatgtaaatt

SEQ ID NO: 207494 - DNA, 523 bp, Homo sapiens
aaaacttacattccttttctttgttcttaaatgcctcaaggcatttcagccctgtgccaggtgagactgaaactgatccctagaacagtgcattgaaagccttgcaatattggatgcttgttccattccctcttttcctcaagggagaaattacaggctgaaatgatctttcttggcactagatgtgccagcttgggcaaggggtgaatgcgggtaaagtaaaatttatcttattatccttttcaatgcagctattctcagttctgtgctcatctggagtattgcaacttcttaactgacttttgaaaaatctcataaaggtattttactgcatatattattaaatttgttttcttgtgtgtaatgagggctgggacttcctactcagtcactcggctaatgtcactcccacttagttctttatatggcacaaaacaaataagaagtggtaactacttaacagtgtataayagaaatatatattaattcatgaaaatagctatttgtatacatttataatgta

SEQ ID NO: 207495 - DNA, 545 bp, Homo sapiens
ttctattttattggttgtttcttgtagcacatgccaaaacaacattgatgttattgtacttcaattgttctactcacccctgcagaatcatcctttacctaaggtgtatatacygtgagtctgtagggtagtggcatggggatccaccatcttgttttgttgcttgcctgagacacagacatgggctctgttactagttcctattaaatgtttcttcttgagaaactggatatgccagcctctttctttggcctctcagcttcattggacttctaaagtaggtttgcatagacctgctcaccatggaacagcatacaagtggtgctatcagagctcctttccttattctgtggaatacacatttgtatttcaagatgcagcacaaatatcaacttttaaggggaagattttctctacatttctcacctgcagtcctgccccactgcactgttatgtatttcttcttcattttatagatatgatggaccattaaggcatataagaaaaagagtgcagtgaggcacatttagaaagatagctggtaa

SEQ ID NO: 207496 - DNA, 590 bp, Homo sapiens
tcatctctgacttatagaagacatttcctctccctttttgaagctgtagcatctggaacacattcaacctgaaagactgatggggcaggaagaaaataattgtggaggaagcacttctacttttaaatttctcaggctaggagagacacacactaattctattaaaagtccattggccagtattgttcagtacctctacactaaccacaagtgagtctgggaaatataaagaagctccaagatatgagttttttaatctatgtcataaaatgttatcagttttgtccattaactrtaagatatacgatgaaaatagaaaccagagctccaacttaagaactatttatgggtataattgataagatatattaactggtatgtgattaggcagaatgtgagtaggataaggagagggaagtaaaaagcataacaggatattaaaggataaaagagattaaaatgatgacccaatttctcaatgtacacttagctgaatgatggttctacaaactgaccccatggatacatgtgggtgtgtgtgatgagcaagtcataagtaatacagacctaaaatttgcctgatgtgaatg

SEQ ID NO: 207497 - DNA, 590 bp, Homo sapiens
tcatctctgacttatagaagacatttcctctccctttttgaagctgtagcatctggaacacattcaacctgaaagactgatggggcaggaagaaaataattgtggaggaagcacttctacttttaaatttctcaggctaggagagacacacactaattctattaaaagtccattggccagtattgttcagtacctctacactaaccacaagtgagtctgggaaatataaagaagctccaagatatgagttttttaatctatgtcataaaatgttatcagttttgtccattaactgtaagatatacgatgaaaatagaaaccagagctccaacttaagaactatttatgggtataattgataagatatattaactggtatgtgattaggcagaatgtgagtaggataaggagagggaagtaaaaagcataacaggatattaaaggataaaagagattaaaatgatgacccaatttctcaatgtacacttagctgaatgatggttctacaaactgaccccakggatacatgtgggtgtgtgtgatgagcaagtcataagtaatacagacctaaaatttgcctgatgtgaatg

SEQ ID NO: 207498 - DNA, 555 bp, Homo sapiens
tcaatgatgctgtactaaaatttcatttcttgatgggtttcgtcattggaatgggtattccaggaacttacaagttcataagtaatgtagcaggtagtcagaataaaacattagccaaaacattggagaaattgatatgattcataaagggccacagcccttgctctgtccttattacttattttccctccttgatccctgagatgggctccactattttcaggccatagggttatgagggtgatgttcataaaaatatgctgtggaagaaggatgaaagaaaacaagtcctaggactctgaagaataaggagtatagaagatacaggaracttttgaagacttaaccttagacaaagttcatgaatgccttaattatttcacttctgtgactcaacattaatatgtgattgggtcaacgtactttaaaagtgacatcattttgagggtcatggctttataaacacaaaatgtaaaattaagctcaacaatgctagatgagatatttatgcatttaaagaagatgaattagcaaaagttgtaaccattcttacaa

SEQ ID NO: 207499 - DNA, 569 bp, Homo sapiens
aatatttgttattcttttaagaaaacaacttttggcttcatttatcttttatatgggttttcacgtctcaatgttgttcagctcagctctgattttagttatatcttttcttttgctaacgttggggttggtttgcttctgttttttctagtacatctaggtgtgatgttagttttttaatttgagatctttctaccttcttgatataggcatatagtgctataaactttcctcttgctgcttgaactgtgtttcagagattctggtatcgtgtatctttgttttcattagtttttttttttaatttctgccataattttacccaacagtctttcaatagcaggttgtttaatttccacatggttttgagagatcttcttggtattgktctttatgtttatggcactgtgatctcagagtgtggttggtaacatttcatttttttaaaatttgttgaaaactttgtgactgaacacatggttaattttagagtatgtgccatgtgcagatgagaaaaatatactctaagtagagtattctgtagatgtccgttgggtccatttggacaa

SEQ ID NO: 207500 - DNA, 569 bp, Homo sapiens
aatatttgttattcttttaagaaaacaacttttggcttcatttatcttttatatgggttttcacgtctcaatgttgttcagctcagctctgattttagttatatcttttcttttgctaacgttggggttggtttgcttctgttttttctagtacatctaggtgtgatgttagttttttaatttgagatctttctaccttcttgatataggcatatagtgctataaactttcctcttgctgcttgaactgtgtttcagagattctggtatcgtgtatctttgttttcattagtttttttttttaatttctgccataattttacccaacagtctttcaatagcaggttgtttaatttccacatggttttgagagatcttcttggtattggtctttatgtttatggcactgtgatctcagagtgtggttggtaacatttcattttttwaaaatttgttgaaaactttgtgactgaacacatggttaattttagagtatgtgccatgtgcagatgagaaaaatatactctaagtagagtattctgtagatgtccgttgggtccatttggacaa

SEQ ID NO: 207501 - DNA, 559 bp, Homo sapiens
cctgctgcactggaggggttgaagtgttcccagtctgcaggtgttgtgatgggagctgttgataaaagtgctayggcatggcaagtcgtgggccacaagacagtgtgccacagcgagggggtcacaggcaaatgtgcatggtagggcagtgggagagggctgcaggtgagtgcacaccaacagggctgtggaatgatacaggcacatgtgcacacatatgtgcactggcaaggtggcaggtagaagctgcaggagaatgcacactggtcggggaaggctgagggcaggtatatgccagcgaggtgccatctgaaaaagagttcaaatggaaaggcgagggcttctggtgaaaaatctgcagtggtgctcgctggaaagtatttcagcaggacaactaaggctctgctgcaagcagatgtggccaggcagggacagtaagagggactgtatacaggggagtattcagatcagactcatcccatctgacagaaaagacagccctgttctctccacttctggcagctaataaatgctaaagccacctagaggagtatggtgg

SEQ ID NO: 207502 - DNA, 559 bp, Homo sapiens
cctgctgcactggaggggttgaagtgttcccagtctgcaggtgttgtgatgggagctgttgataaaagtgctatggcatggcaagtcgtgggccacaagacagtgtgccacagcgagggggtcacaggcaaatgtgcatggtagggcagtgggagagggctgcaggtgagtgcacaccaacagggctgtggaatgayacaggcacatgtgcacacatatgtgcactggcaaggtggcaggtagaagctgcaggagaatgcacactggtcggggaaggctgagggcaggtatatgccagcgaggtgccatctgaaaaagagttcaaatggaaaggcgagggcttctggtgaaaaatctgcagtggtgctcgctggaaagtatttcagcaggacaactaaggctctgctgcaagcagatgtggccaggcagggacagtaagagggactgtatacaggggagtattcagatcagactcatcccatctgacagaaaagacagccctgttctctccacttctggcagctaataaatgctaaagccacctagaggagtatggtgg

SEQ ID NO: 207503 - DNA, 559 bp, Homo sapiens
cctgctgcactggaggggttgaagtgttcccagtctgcaggtgttgtgatgggagctgttgataaaagtgctatggcatggcaagtcgtgggccacaagacagtgtgccacagcgagggggtcacaggcaaatgtgcatggtagggcagtgggagagggctgcaggtgagtgcacaccaacagggctgtggaatgatacaggcacatgtgcacacatatgtgcactggcaaggtggcaggtagaagctgcaggagaatgcacactggtcggggaaggctgagggcaggtatatgccagcgaggtgccatctgaaaaagagttcaaatggaaaggcgagggcttctggtgaaaaatctgcagtggtgctcrctggaaagtatttcagcaggacaactaaggctctgctgcaagcagatgtggccaggcagggacagtaagagggactgtatacaggggagtattcagatcagactcatcccatctgacagaaaagacagccctgttctctccacttctggcagctaataaatgctaaagccacctagaggagtatggtgg

SEQ ID NO: 207504 - DNA, 648 bp, Homo sapiens
catttagtaaaacaggtttataaagggtatatataatcaattttggattaacaatattgctgtcagttatagtaaaaataatttcttattatcttactgttatggactcaatatttttgtctacccaaaatttatatgttgaaattctaactcccaatgtaatagtattagaaagtggggtcttgggatataattaggttataaaaccctcacaaatgggattagtgcttgtgatggttaattttatgtgtcacyttgactgagctaggagatggacaatagctatcaaaacattatttctgagtgtgtttatgagggagattccagaagatattggcatttaaattagtagactgagtaatgaaaattcctcttgccaatgtagtggatatcatccattctactgaggatccaaagagaacaaagaagggagagaaagaacaaaaggggagatgaattatcttttcttgagcagggacatccatcttctcttgccctcagatatcatagctcctgattcttggactccaggacccccagcctcatattcaggccttcagacccccacctgaactccaaccaaattacatcaccagtttttctccaacttatagactccagatggtgagacatctaggcccccattat

SEQ ID NO: 207505 - DNA, 648 bp, Homo sapiens
catttagtaaaacaggtttataaagggtatatataatcaattttggattaacaatattgctgtcagttatagtaaaaataatttcttattatcttactgttatggactcaatatttttgtctacccaaaatttatatgttgaaattctaactcccaatgtaatagtattagaaagtggggtcttgggatataattaggttataaaaccctcacaaatgggattagtgcttgtgatggttaattttatgtgtcaccttgactgagctaggagatggacaatagctatcaaaacattawttctgagtgtgtttatgagggagattccagaagatattggcatttaaattagtagactgagtaatgaaaattcctcttgccaatgtagtggatatcatccattctactgaggatccaaagagaacaaagaagggagagaaagaacaaaaggggagatgaattatcttttcttgagcagggacatccatcttctcttgccctcagatatcatagctcctgattcttggactccaggacccccagcctcatattcaggccttcagacccccacctgaactccaaccaaattacatcaccagtttttctccaacttatagactccagatggtgagacatctaggcccccattat

SEQ ID NO: 207506 - DNA, 648 bp, Homo sapiens
catttagtaaaacaggtttataaagggtatatataatcaattttggattaacaatattgctgtcagttatagtaaaaataatttcttattatcttactgttatggactcaatatttttgtctacccaaaatttatatgttgaaattctaactcccaatgtaatagtattagaaagtggggtcttgggatataattaggttataaaaccctcacaaatgggattagtgcttgtgatggttaattttatgtgtcaccttgactgagctaggagatggacaatagctatcaaaacattatttctgagtgtgtttatgagggagattccagaagatattggcatttaaattagtagactgagtaatgaaaattcctcttgccaatgtagtggatatcatccattctactgaggatccaaagagaacaaagaagggagagaaagaacaaaaggggagatgaattatcttttcttgagcagggacatccatcttctcttgccctcagatatcatagctcctgattcttggactccaggacccccakcctcatattcaggccttcagacccccacctgaactccaaccaaattacatcaccagtttttctccaacttatagactccagatggtgagacatctaggcccccattat

SEQ ID NO: 207507 - DNA, 573 bp, Homo sapiens
ttcaggccttcagacccccacctgaactccaaccaaattacatcaccagtttttctccaacttatagactccagatggtgagacatctaggcccccattatatatgagctaattcccattttatacatatatatgaattatatacatatatatatacacacacacacaaacatatgtatttcatatatatttcatattggttctgtttgtctggagaattctgactaatccagtgcccttacaaaagagatcccagaaaactctctatcccagttttccattatctgaggatacatctagtagttggcagcctacaaccctgaagaggcacctcactagtctctgtctatgctgggaccctgatctcagactcccaagcttcagaactgtgagaaataaatttctgttgtcttttatatatgtctttagttgatttgaagattactctagttgatgagtttggctcccatttataaagaagtcacacattttcaagawaaccaacagcttcaaaatatgagtagtgtcttcttcaataagactgcaacaaacctacctgagttgattctttcc

SEQ ID NO: 207508 - DNA, 526 bp, Homo sapiens
tcccccttctgctcagcacttctttttgctgccaccatgtgaagaaagatgtgtttgctttcccttctgccacgattacaagtttcctgaggcctccccagccacgaggaactgtgagtcaattaaacctcttttctttataaattacccagactcgggtatgtatttattagcagtgtgagaatgaactaatacacagagtttggcatatgctttctgaaaatatccagatagtaaatatttaggctttgcatgtcatatgctctctgccrtaactacttaactctgcttttctagtgtgtaagcagccacagactataggtaaataaatgagtgttgctgtgttccaataaaactttgtttacaaaaacattgagtcagccagttttggcccattggctgtagtttttccaaatccagttctaagagaataaaaaggtgttttgatttgttttattttgttttttccttttccatgtggttaagaaagcagtagagtatctgttgttcatcattcagcagttgc

SEQ ID NO: 207509 - DNA, 602 bp, Homo sapiens
tatataacgggcttaacagtaaatacttgcagataaagaaatagaagtaatgctgtccctaaagcagtttatgccgtagtgagataaaaaatactaactggagaattaaattacctgcaaattgtcttccaattttattcccatcccttgaactctaaaattgtctggttcgttacaacaaagtagagaaaattaatgaatatgtgaatcagtttgatgagagaaccttggagactggaatgttccatgaaactaatcaacaaaggggttatcattccttttggcaaccacaatccataccaggaacatggatgcraataggagagattctatgtccagctacagtgaagaagctgtgagaacttgcagggaactttccttctttttcaatgtacatgaggaaaaaagagaatccactttgcagctaatatttttccacctatgaatggaagccatagttcccagcagttcttgctgctgactctgccacccagaattgttttccagagtcatcaaacaccactgtgtagcatggggtatggggtgtgggagacctagtaaaggaacactagagaaacaccaagaccaatttaccattaagc

SEQ ID NO: 207510 - DNA, 621 bp, Homo sapiens
acaaaacaaaacaaaacaaaaaaaccaaaaaactctttcatgtccacttcacaaaagaaaacagcattgtgaattgtgattactcccagggactgtattttatcttcagtggctgcctgattttacccccacaattaaagttgaaggaatcctgaaaaaaaacaaaaacaaaaaaagaaaacatgtattgagatattcttttyaaagacattttagttaacagagtaaaattccatcatgaaaagcaagatttgcaaacatcagtactattgatattttggactggataatttattgttgtaggggactatactcttgtgcattgtaaaatgtttgccagcatccctggactcaaccactagatctccctgctccctagatgtaataaccaaaaacaactccagacattgccagatgtcctcatgggtacagaattctccagttgagaaccactaataaggaataatcataattatattcactcttctgttgatggacatttcagtaatttgcatattttgatataatatatccagcttcaaagaatgaatgaatgttccctcccctcctccagctctctcttcctctctctccctctctgatttgccttcatttctttca

SEQ ID NO: 207511 - DNA, 621 bp, Homo sapiens
acaaaacaaaacaaaacaaaaaaaccaaaaaactctttcatgtccacttcacaaaagaaaacagcattgtgaattgtgattactcccagggactgtattttatcttcagtggctgcctgattttacccccacaattaaagttgaaggaatcctgaaaaaaaacaaaaacaaaaaaagaaaacatgtattgagatattcttttcaaagacattttagttaacagagtaaaattccatcatgaaaagcaagatttgcaaacatcagtactattgatattttggactggataatttattgttgtaggggactatactcttgtgcattgtaraatgtttgccagcatccctggactcaaccactagatctccctgctccctagatgtaataaccaaaaacaactccagacattgccagatgtcctcatgggtacagaattctccagttgagaaccactaataaggaataatcataattatattcactcttctgttgatggacatttcagtaatttgcatattttgatataatatatccagcttcaaagaatgaatgaatgttccctcccctcctccagctctctcttcctctctctccctctctgatttgccttcatttctttca

SEQ ID NO: 207512 - DNA, 557 bp, Homo sapiens
caggctgcttagcggctgggctctcctccaaccgccccagccaaacgccacatcgttccgccggtcgatggccttccagtgcctctctctccatgtccagccgcttgtcttcttccgctggtgtgttcytcttgacgtccagctgcttgtgtgtgtgcctgctagggtctccgggttttttattggcacaggatgggggtgtggcaggccagggtggtcttgggaaatgcaacatttgggcaggaaaacagaaatgcctgttggcacctaagtccacgggcacaggccctggccagagccctaaccaggaaccacaacctcctctacccaacacttccctgaatcctttccatatcaatatgtatatgtgtgtgtgtgtgtgtgtgtgtctatatatatatatatatatatatatatatatatatatggagaaaaagaatatatatacatactccttttctctcctttttctgttcagtggaatttgcatgtggtggaaggaactaaaatagtgtcagagccaagagaaaagttcccctttgcctgctgaaggttca

SEQ ID NO: 207513 - DNA, 557 bp, Homo sapiens
caggctgcttagcggctgggctctcctccaaccgccccagccaaacgccacatcgttccgccggtcgatggccttccagtgcctctctctccatgtccagccgcttgtcttcttccgctggtgtgttcctcttgacgtccagctgcttgtgtgtgtgcctgctagggtctccgggttttttattggcacaggatgggggtgtggcaggccagggtggtcttgggaaatgcaacatttgggcaggaaaacagaaatgcctgttggcacctaagtccacgggcacaggccctggcmagagccctaaccaggaaccacaacctcctctacccaacacttccctgaatcctttccatatcaatatgtatatgtgtgtgtgtgtgtgtgtgtgtctatatatatatatatatatatatatatatatatatatggagaaaaagaatatatatacatactccttttctctcctttttctgttcagtggaatttgcatgtggtggaaggaactaaaatagtgtcagagccaagagaaaagttcccctttgcctgctgaaggttca

SEQ ID NO: 207514 - DNA, 557 bp, Homo sapiens
caggctgcttagcggctgggctctcctccaaccgccccagccaaacgccacatcgttccgccggtcgatggccttccagtgcctctctctccatgtccagccgcttgtcttcttccgctggtgtgttcctcttgacgtccagctgcttgtgtgtgtgcctgctagggtctccgggttttttattggcacaggatgggggtgtggcaggccagggtggtcttgggaaatgcaacatttgggcaggaaaacagaaatgcctgttggcacctaagtccacgggcacaggccctggccagagccctaaccaggaaccacaacctcctctacccaacacttccctgaatcctttccatatcaatatgtatatgtgtgtgtgtgtgtgtgtgtgtctatatatatatatatatatatatatatatatatatatggagaaaaagaatatatatacatactccttttctytcctttttctgttcagtggaatttgcatgtggtggaaggaactaaaatagtgtcagagccaagagaaaagttcccctttgcctgctgaaggttca

SEQ ID NO: 207515 - DNA, 564 bp, Homo sapiens
gcatcagactctatttagttaaagtgcatttaaaaatacataggaagacagataatctgaattttctttctaatgatgccaacctcatgaagtactgttgttgaagaatacacgaagcgctgagagatctattttgctgacttacagaaagtcattggtaattaattttctctccaactttggtttaacaatatatttgaagcaaactggagttttgaatcaaagactagaagcataaaatcaaagagaaacagtcctggattctaatgccaggtttgctatctaccagctgagaagcagtgggcaaaytatttaaccttgctgggtcctgatgtgctcatccacccttttcaattcacctagcctctatgtcaaatttcacagcattttccaaccaggaacaaggtgagtatggcatctcagcttacctaatgttttatacaatgttaatacttgaataagacagtgttattaaaataatacaatgaattattataattattatagtaatacaatgaataatgcaaataaatacaatgctaatacttgaataaatacaacaaa

SEQ ID NO: 207516 - DNA, 559 bp, Homo sapiens
aggtgctgctgtaacaaatgcctaaaaatgtggaggtggctttggaactgggtgatgggtagaggctagatgagttttgtggtgcttgctaaaaataaaattaagattgtcacgaagaaatataaatattaaaggcaattgtgttgagggctttgaagaaaagacgagagctaaagaaaaagcctccatgytcttagagaatatgtagagaataatcctgaatagaatgttggtaaaaatatgaatgttaaagtcattctggtgtggtatcagacagaaatgaggaagttgttatcggacaatggagaaaaggtgatcactgttacaaagtgctagaggacttgcctaaattgtgatctagtgctttaggggagatagcacttgtgaaaggtagaattgcatatttatgtgaggagatttccaagtaaaatgttcaaggtatagcctggatcctcctgactacttataataaaatgcaagaggtgagagttgaattgacaaaggaattgttaatcaaaaagtaacaggaacttaaagatttgaaaaattacctgcctgt

SEQ ID NO: 207517 - DNA, 389 bp, Homo sapiens
aaaaaaaaccataccaatcattttttattaagcagcaatttaacatcattttaatttaattttctattgtaaagcaaaaagagataaataacattgcayttcatcagcacttgctcccaataactcccatgctcagcaagaaataaatattgagataattgcagtacatttcatttataaacaaggtaacagaggccccctttttccacagtgaaaggtcctcaacagcagcgctattggaccactaaatactctctatccagcaggtcttcatgatgcttccattagagtatggtgtatctgaaaagttcaaccttaccttggtttagcactgcttctctcatgtggctggttcgtatagcctcagtgtaaaggctgccgaggaattc

SEQ ID NO: 207518 - DNA, 469 bp, Homo sapiens
catattactgatggatcttacctacatctactttagcaattgaatctcacctcatgctttccctgcttactcttttgaagttttttttttwaactattttctgcaatatcatctttataaaatacttctaggggtttgtgccaaccgttcttccagtatttattacctctctcctcttcactgtttggtaaacagttttcctttaagaaatcaggtcaaacgtaacctatctgaaatatccctaaacaatttcctattaaaatttcctctatggtatcatagaattagctttatatgtccagcaattcaaagggcatgaacaatagaatgtatttaaccaatgattattgaattaacaaatctattaatcttgtaaatttatttcaaaaatgtagaaacaaatgtcagctttatgcctctatgttgtttttgtgattttaaaaaattatctgtgaagatggaaaatagt

SEQ ID NO: 207519 - DNA, 560 bp, Homo sapiens
acacttcaagctctgcactgttcattagtgcatttataaaattttttataatttataaaatgctcacagactcttctaacacttcttaaactgtccctgtggctcaaatatctacagcgtaaaatccatactacttatgggtccatattactgatggatcttacctacatctactttagcaattgaatctcacctcatgctttccctgcttactcttttgaagtttttttttttaactattttctgcaatatcatctttataaaatacttctaggggtttgtgccaaccrttcttccagtatttattacctctctcctcttcactgtttggtaaacagttttcctttaagaaatcaggtcaaacgtaacctatctgaaatatccctaaacaatttcctattaaaatttcctctatggtatcatagaattagctttatatgtccagcaattcaaagggcatgaacaatagaatgtatttaaccaatgattattgaattaacaaatctattaatcttgtaaatttatttcaaaaatgtagaaacaaatgtcagctttatgcc

SEQ ID NO: 207520 - DNA, 444 bp, Homo sapiens
ctaatggggctgaaaaattcccattgcttattgacatcatagccttcataacatcatagagcaatatattacctttctttgtttagatatgtttagacacaaaaatacttactgttgtggtacaattgtttacagtgttcaaaacaataacacayggtacgggtatgtagcctaggagcaataagctttaccatatagccaaagtatgtagtaggtggtactatctaggtttgtgtaaatacactctatgatgttcacacaatgatgaaattacttgaagacacatttctcagaacatagccttgtcattaagctatgcattactgcatgtattcatacttaaagagagaaagagaaagaatgaagaagaggaggaagaacaggaagaagaaagataaatatggcaaaatgttaatatttgggtaagctggatgaaaagtgtat

SEQ ID NO: 207521 - DNA, 520 bp, Homo sapiens
ctggcaagttacttaacctctctagatgtctatttcttccattggcaaaaataggactcctaattattaatgttatatctaccacaaaatccatcatagggctcaaatagggtaatccctctaaagcacttatattagcactcaacacgtattgctcaagaygaacgttgctgattattattttcatcacagtctcaaactttgctattaagtgttactgttccttatcacatattattttgaactatatttactttatctcatatataatgctttctgatggataatccgacccattctggaaattagcatataccccagtcagatggatgcttaagggttgaggtgtcttcctttgaaaattataatttaatataagttgtttcatatacattattaagagagacatttagcctactttaattattctgcaaatacttattagcttgcctttcagtgaaagagactatcatttgcatatgtaacaatctgaaataaaattataggatatatgtgcacc

SEQ ID NO: 207522 - DNA, 520 bp, Homo sapiens
ctggcaagttacttaacctctctagatgtctatttcttccattggcaaaaataggactcctaattattaatgttatatctaccacaaaatccatcatagggctcaaatagggtaatccctctaaagcacttatattagcactcaacacgtattgctcaagacgaacgttgctgattattattttcatcacagtctcaaactttgctattaagtgttactgttccttatcacatattattttgaactatatttactttatctcatatataatgctttctgatggataatccgacccattctggaaattagcatataccccagtcagatggatgcttaagggttgaggtgtcttcctttgaaaattataatttaatataagttgtttcatatacattattaagagagacatttagcctactttaattattctgcaaatacttattagcttgcctttcagtgaaagagactatcatttgcatatrtaacaatctgaaataaaattataggatatatgtgcacc

SEQ ID NO: 207523 - DNA, 644 bp, Homo sapiens
tttttacaggtttgccacatgggtwtattacctaaggctgcagtttaggcttctaatatacccgtcacccaagttgtgaacatagtacccggtaagtactttatcaattcttcctccctcccaccttttggaatacccagtgtttattgttctcatctttttgtctgtgtgtacacaatgttcagtttccatttctaagtaagaaggtgtggtatttgattttctgcttctgcattaatttgcttacgtagaatagttgaattattcaatgatataaaaatattaatattaaaattatacatagagaggaaaggtctaaaattaagaatcaaaatctccacattaataagatagaaatggaagaaaaaatatatttaaattaggcataaaaaggaaataataaagataagagaactagaaaaaatggcaaataaagaaaaataataaagctaaaagtcaagttgtgaaaaagtttaataaaattaattatctcttccctagactgatcaagaaaagggagaagtacatgcaaatatccaatgtaatatatgaaagataagagtacttcccaactcttgagactaattttcatagacaacctgataaaagtgttatgagagaaggaaagggtaaaatgatacttt

SEQ ID NO: 207524 - DNA, 620 bp, Homo sapiens
gtatttctgaaatttggaggcattttgcctgccacaagtgaggtcacttgtgatacacttgtttttatgtaaactaggcaaacatagtgacagataaaatacatattcatctgacagtcaccacacttatttacatkgatagcaccgcatgagattaaatctgatttcaatttggataccaaatttgtagttcagatgcctgcaaatattatagcagtgaggtaaaaaatgtctgtatactatacctatttattttcacatgacagaaaatgaaaatacaactaaatttcttgaaatagttcataagatgttcttagctatgtagtctacaatggataactcaatcattccaaagtcaagaacagatcaagtcctttttctgtcaaaagttacctgttgacctttaagagaagccattatacttctggaaacatacaatttaataaaaggggaaaaagtttgttaattcaaccaaattcaaaattctgataaaacattgacattcttcaatataactcaaaattacaaagataattctaaatatgataaaaagatcaagattacaaaaacaaaaaatacaaaataggccactgtgatattcaaaagtaattcagaacaca

SEQ ID NO: 207525 - DNA, 620 bp, Homo sapiens
gtatttctgaaatttggaggcattttgcctgccacaagtgaggtcacttgtgatacacttgtttttatgtaaactaggcaaacatagtgacagataaaatacatattcatctgacagtcaccacacttatttacatggatagcaccgcatgagattaaatctgatttcaatttggataccaaatttgtagttcagatgcctgcaaatattatagcagtgaggtaaaaaatgkctgtatactatacctatttattttcacatgacagaaaatgaaaatacaactaaatttcttgaaatagttcataagatgttcttagctatgtagtctacaatggataactcaatcattccaaagtcaagaacagatcaagtcctttttctgtcaaaagttacctgttgacctttaagagaagccattatacttctggaaacatacaatttaataaaaggggaaaaagtttgttaattcaaccaaattcaaaattctgataaaacattgacattcttcaatataactcaaaattacaaagataattctaaatatgataaaaagatcaagattacaaaaacaaaaaatacaaaataggccactgtgatattcaaaagtaattcagaacaca

SEQ ID NO: 207526 - DNA, 581 bp, Homo sapiens
catttgtcaaattaaaagtgatttgccatttgctattttattcaaattctcaacaatcagaaccagtgttatttatataatcttcaacaaagtaaaattgaagttgcaggaatgacaggtaacatgctcaaattcatacaatagtaccagactctaacrcagagtttcttaaattaatcctcactctatttctaatacataaataattacccacttacagaacatttggtcccccagataaaaggagtgattctagaattataatacaaaccagggattttgatgctaagcataagttctgcaaatataagttactgtacatcacatacaatcagataaaaatcagcatctaacctttttcctggtatgtttatgtagagaacactaaaagaatcttctgattttatgagaattattttctgaggatttggcatggctgtgtgtagagtctgtgtgcaactattattgtatttacttattgtcatttattttgtttacttcattaatggagtcaactatcaatggacagctgcaatgattattggaaagtctcttgttttccttgctggcacagtagaggc

SEQ ID NO: 207527 - DNA, 627 bp, Homo sapiens
cattattcattagtcaatagaacaattaaaataagaaagaaaattaattttctttgtattatatgtacttttatttatacataaaactcccattgctcctcagtcagttgtgtggatacaagtttttatctgctatgatattaattttgcctgaagaacttcttttaatatttttgttgtaggtgtttattgttataaattatctcctgtytgtttgtttgaaacaagccttctcttttatttttgaaagttatttatacttggtaaagtattctgggttgaccttttctggtctgtttggcattttaaacatgtcacttcctctggtttctgtaattttgaatgcagtcttgagaagtctgctatcattcatagacatatatatatatatatatatatatatatatacatatatatatacagatacgtaaaatatatattattctgtatttaaatatgttatttttttctggattccttcaagatttcctttttacctttagtttttagcatttttcatatgctattttaggtgatttatttatttagttaaatagctagtcagtttattctgcttggttctctatgaatttctttgatctgtggtttcacatctttcattatttt

SEQ ID NO: 207528 - DNA, 628 bp, Homo sapiens
gcgcggtggctcatgcctgtaatcccagcactttgtgaggccaaggcgggcggatcacaagatcaggagatcgagaccatcctggctaacacggtgaaatcccgtccctactaaaaatacaaaaaattagctgggcatggtggcaggcgcctgtagtcccagctactcaggaggctaaggcaggagaatggcctgaacccgggaggcggagcttgcagtgagcggagatggcgccactgcactctagcctgggcaacagagcgagactccatctcaaaaaataaataaataaataaataataaaataaataattaaaaaatggactgtgccamcttattatgggactaaattgatacaatgactacttctcacttgggccagtagcatctagcggcttttcattaagactataatagcagtagcaaagggaagtttataagattgttatttttctcttgtttgccccatttgtaaccattctcattaaccacagagtgcccatcctcccaacaaaacaaagactatcctgtgtgacttcctaggccttcagactgaataggagaatatctcctagcatgacaattaatctaattcccagggaggccaagtgcatgcagcagaaattca

SEQ ID NO: 207529 - DNA, 628 bp, Homo sapiens
gcgcggtggctcatgcctgtaatcccagcactttgtgaggccaaggcgggcggatcacaagatcaggagatcgagaccatcctggctaacacggtgaaatcccgtccctactaaaaatacaaaaaattagctgggcatggtggcaggcgcctgtagtcccagctactcaggaggctaaggcaggagaatggcctgaacccgggaggcggagcttgcagtgagcggagatggcgccactgcactctagcctgggcaacagagcgagactccatctcaaaaaataaataaataaataaataataaaataaataattaaaaaatggactgtgccaacttattatgggactaaattgatacaatgactacttctcacttgggccagtagcatctagcggcttttcattaagactataatagcagtagcaaagggaagtttataagattgttatttttctcttgtttgccccatttgtaaccattctcattaaccacagagtgcccatcctcccaacaaaacaaagactatsctgtgtgacttcctaggccttcagactgaataggagaatatctcctagcatgacaattaatctaattcccagggaggccaagtgcatgcagcagaaattca

SEQ ID NO: 207530 - DNA, 609 bp, Homo sapiens
attagaccatgagatataatgaaagtgaatcttccaaatgcccttattgccactccaactgaggcaagaaataatatgccttggagaaagattkcagagaaaggcatataattcattaggactcagtcacagttcttgttactcaaccccactagaaattccatccttcctttcccaatcatgatactctttgctgctcccatctctcctttaaatgacacccatacttagctccataataaactttctttaccagggcatggttatattagaaccttctttttagtaatacttatcattgtttaaaaattttattttttatacttcaaattatattggctttaatttaaactagatcccaactcattccgaggtgaatgagaaaaggaaaatatgactgttgttttctacttcccaatagtttgtaaatctcaccatgcggtaatatctgatttttttaaaagagttttttttgctaacaaagtataaactaccaaatatcaaagtgattctagatatttgtaacagattacttagaaaattctgttgtattttttcctgtcagaatatcctggagtcataagctttatttaattacaattttgacag

SEQ ID NO: 207531 - DNA, 572 bp, Homo sapiens
taattatttcattatcttacaatgtaataataatagcaataaagtgcacaataaatgaaatgtgcttgtatcatcctgaaatcatcccacccaccccagtctctgaaaaaattgtcttccacaaaaccagtccctggtgccacaaaggttggggaccattgatrtagaggattttgtgatggatgctatctgggaaataagaggagtcaaggataactccccataataggagaaacattagagaatgtggaatcacacaaataaaaaaaaaagttttgaagaagtagaaatgatcaattttcaattgctgctgagagatcaaacacagtaaggactaaaagctgaccactgaatttgaaaatatagagcagattggcagccaaggtaagacaagttttggaggagtggtggaaatggaagcataattgaattgagctaatgagagctggaaaggcatagaagtggatagggtgattataagcaactcagtttagttgagaagagatataggcagcaaatgcattttctagattttcatgaatttttttgactgtccatacagtattattttc

SEQ ID NO: 207532 - DNA, 593 bp, Homo sapiens
tggttttaacttcatatgactaaaagaggcactgaagaggttaaaaaaaaaaaaatcttgaatccctgacgtcaccttctcacctcccccagcagcagctggtggcacagagagagaatctttgttcttgggagagggagagcacagcaacmattgcattgaattcagtgctgccctgtacagcagagagcaaaaccggactgactgacctcagccacctggactgatcgacaagagaaagaaatagagggcatccaaattggaaaggaagaatgcaatcatccttgtttgcaggtgacatgattttatatttggaaaaacctgaagacatcacctaaaaactactagaaaagataaacaaattcagtaaagttgtaagatatcaaattaacatacaaaaattagtagcattttatatgctaacagtgaacaatgtaaaaaagaaataaaaaagtaatcctatttacaacagctacaaataaaataaaatatctaggaatcaatttaaccaaaggaatgaatgatctctgcaatgaaaactgtacaactatgatgaaataaattgaagagaacacattgctaaaatgaccaca

SEQ ID NO: 207533 - DNA, 593 bp, Homo sapiens
tggttttaacttcatatgactaaaagaggcactgaagaggttaaaaaaaaaaaaatcttgaatccctgacgtcaccttctcacctcccccagcagcagctggtggcacagagagagaatctttgttcttgggagagggagagcacagcaaccattgcattgaattcagtgctgccctgtacagcagagagcaaaaccggactgactgacctcagccacctggactgaycgacaagagaaagaaatagagggcatccaaattggaaaggaagaatgcaatcatccttgtttgcaggtgacatgattttatatttggaaaaacctgaagacatcacctaaaaactactagaaaagataaacaaattcagtaaagttgtaagatatcaaattaacatacaaaaattagtagcattttatatgctaacagtgaacaatgtaaaaaagaaataaaaaagtaatcctatttacaacagctacaaataaaataaaatatctaggaatcaatttaaccaaaggaatgaatgatctctgcaatgaaaactgtacaactatgatgaaataaattgaagagaacacattgctaaaatgaccaca

SEQ ID NO: 207534 - DNA, 593 bp, Homo sapiens
tggttttaacttcatatgactaaaagaggcactgaagaggttaaaaaaaaaaaaatcttgaatccctgacgtcaccttctcacctcccccagcagcagctggtggcacagagagagaatctttgttcttgggagagggagagcacagcaaccattgcattgaattcagtgctgccctgtacagcagagagcaaaaccggactgactgacctcagccacctggactgatmgacaagagaaagaaatagagggcatccaaattggaaaggaagaatgcaatcatccttgtttgcaggtgacatgattttatatttggaaaaacctgaagacatcacctaaaaactactagaaaagataaacaaattcagtaaagttgtaagatatcaaattaacatacaaaaattagtagcattttatatgctaacagtgaacaatgtaaaaaagaaataaaaaagtaatcctatttacaacagctacaaataaaataaaatatctaggaatcaatttaaccaaaggaatgaatgatctctgcaatgaaaactgtacaactatgatgaaataaattgaagagaacacattgctaaaatgaccaca

SEQ ID NO: 207535 - DNA, 460 bp, Homo sapiens
agcatgaattgtgtcctgttgtaacttttttctaacacttaataccaaagctccagctacaatttcttttcaccagagaatgttttatggactttattatattgactaaactaattcatttttagaatgatgtagcattgattcctcaaatgtatttttacagtttttgttgtttatgttttaatacaggaatgaagaaccaaaaagactgtacgaagaaaagtattatatcttcctcaactagaaataaattattgctaatgtcattccccttacaagaagaaatttatcataaaaagaatagaacagacrtatagtatgatataccactacattttatgcaaatactagccgattccctaagtaggattataatgtagagagtactgggaaatacaagtttattccacaatcttgacaattctgtctagctagatgagtagatagctatactttaaga

SEQ ID NO: 207536 - DNA, 581 bp, Homo sapiens
agtatattaaattccgattgcttgaaacgaaaattaaattttttttttattttgaagaaaaggacttctggtagatttaagcgtaggaattcatatgaagacgtatctctcagaccccagaatataaattacttaatccttgacacataaataattactgatactaggctcttctaacagactaggtaattaaagtaaaatattaggttttcctaaattatctctactctgcctatggataactaaaccgttctggttttacataggctttgaaagaataattagaggagtaacccagtagaaaaagtaaaggagagtccagagaagtggcaaggagaagtttgggygcctctgactaatcaaagtggggtctggagtgcagggaaatcatcaaagcttgatgtccagccaagtcttctaataaattgtccataattcagactataatatcattgagattaaggtgatattaaagtggtttaaagcaaaagtctctgtaatatttgaatatttgtcttgcaaagccatcaccacctccgtaactgccataaccaaccagcacaatgatactaccactaata

SEQ ID NO: 207537 - DNA, 575 bp, Homo sapiens
agcaattagttgccattttctaagacagggaaggatatggcagcgacaggggaaaacaataattaatacaataatctcatttctgttacaaatggtacaacttttctttagtatttctgatcagtgcttttgtttttctttactggagattcttatactgatttaaaatttgccataagcaaaacattacattatttttaacatattgctaaatgtttttcttgaaatttttactamattttaacattatcaagataatatataagcaatgaatgcttgtataggaaagacaaaacagaaaaaagtctttgcaggcactaatagctaagactattttaacagtcttttaataccttggtaacataaataacttagaggtaagccatattcttgccctgttagtacaagctaatacaactgttgcaaaattcactattgtgtgtaaatccctgatttacagtttctcacacagcagccttaccaccaaagcaatagaccctactacattgacagttatgttaagtgttattatatcgggtgacatgctttttattttttttcttttaaaccaggaa

SEQ ID NO: 207538 - DNA, 497 bp, Homo sapiens
cagaattctatatccagcaaaaaatatctttcaggaatgaaggtgaaatcaaaatgttctcatacaaggcaaaaacaagaggaatttttgactagcagagttaccctaaaagaattagtgaaaaaaaaatcccataatatatagaaaaggatatgaggaggaatattgggtggtcaagaaggaagaaagaacaagaacatgtaaaaatatagaagctacgtctggagatggagatatcagttttcttgaatcaytgaataaataaaagctaaaaacccattagtagtaatatctaaagactgtaataccattatttcttttgcataaaatctgaccaccctacctaccttgaagaaaatgtaggaaactctacccctgagcacatagtgtaatgcacaaatagagctgtttctgaaacaagtaagttgacccccatgatgttttgaatcatgcaggatatattaccacaggatggggtcagaaaggatgtggtatat

SEQ ID NO: 207539 - DNA, 407 bp, Homo sapiens
aaatgacccagaacaacgtttaactgcaatcttccatggttttgtagactgacataaagaagaaaaaactgctgtttaaggagacctgttgacttttatagctcagaattgatttcagtcacagcagttgcttcatctttatatcctaaaaagggatagctctgtgggacaaatagaagaagcaggaagcatcacagcttcctatgttttagaggaacactctgatgccaacaggagattacaagtgaacaaggygcatttattgttaaagtatatgatttatgaagttctcacataaaacatatttgttacatacaacaaatttttacatattctttacacacttagttgataaaattcatatattattaattagtaatattttagaaaaaagaggcaagaaattt

SEQ ID NO: 207540 - DNA, 617 bp, Homo sapiens
ttttaacccctgccctatattgattatatatgtaacaaatattttctccaaatctgcaagttactatttcactcttccctagtgtcttgtgaaaaatagctttaatttgaaaagaagtctaatttaccagtctttttcccaattattagtaattttgtaactttttaaaataaatccttcatgcaactgaagtaatttctaatttgtatatatatttataaaatctgggatagtcctcagtgaaggcttctataatgactgagtgttgcatttatcatatatatttgcatcaattgattttgcttctttaacctgttaatgtggtggattagaatgattgcttattgaatgtgtacccggcttgcatagctagaataatcatacttcaccatagtgtataattatttttatacagaattagattagacttgctaatattttttgaagatttttgaatatttatgcacragatattttggtctgtagttttccgctatggtaatatctttacctggttctggtattagatgatgcctgcctcattgaataagttatgaaaggttctatcttgtaagttttccagaagacatcatgaataattggtataatttttaaaa

SEQ ID NO: 207541 - DNA, 428 bp, Homo sapiens
aacttaaccgtgcataacatagctttaatttctgatattactaccttggatttttaaaagtgagaaaaaaatatcatttggttacataagtgatgttcagaagagatttgtagtttttaaacagaaaactcyaaaatagtaattaagataccctgctcctacagatttgacataagtcagacactaacaaataaactactgctggcaacataacttccttttaaacttaccctaaaaatggcctttaaaagttagtttaactaataactgattattaatacagtttttcaagtaagttacatgaggttgaagacacatctttttaacaaagctctctaatattgaacatagagttagcaagtattattgaaaatttttcttagtttattattctctactcataaataaaaagacatatatttatcgat

SEQ ID NO: 207542 - DNA, 428 bp, Homo sapiens
aacttaaccgtgcataacatagctttaatttctgatattactaccttggatttttaaaagtgagaaaaaaatatcatttggttacataagtgatgttcagaagagatttgtagtttttaaacagaaaactccaaaatagtaattaagataccctgctcctacagatttgacataagtcagacactaacaaataaactactgctggcaacataacttccttttaaacttaccctaaaaatggcctttaaaarttagtttaactaataactgattattaatacagtttttcaagtaagttacatgaggttgaagacacatctttttaacaaagctctctaatattgaacatagagttagcaagtattattgaaaatttttcttagtttattattctctactcataaataaaaagacatatatttatcgat

SEQ ID NO: 207543 - DNA, 462 bp, Homo sapiens
tcaccgtaatctaactcctggcctcaagcaatccttctgcctcagcctcctgagtagctaagaccagaggcacacgtcaccacatatgactaaattttctttatttttgtagagacgacgtcttgctgtgttgcccagactgatctcaagtgctgggcctcaagtgattctctcaccttaaccycccaaagtgctgggattacaggcatgagccattgcacccagccctttgcatttctttaaagcagtttcctaagatatttgttgatgttggaataaaaatgctattttgcccttgccttgtgataaaaatctaagaaaatgaatatacatttagcacagaaaataaattacattttaccatattgatttgagaattatcaacaaacaaaacaaaataccaaaaaaggctcttggatggaaaacagagggagacttatttttattgatgcaaggaaacca

SEQ ID NO: 207544 - DNA, 562 bp, Homo sapiens
taccagtcagaatggctattattaaaatgtcaaaaagtaacagatgctggtgaggatgctggagcaaaggaaatgcttacatactgttggtgggaaagtaaattagttcagccactrtggaacacactttgaagatttttttaaaaatttgaaatagaactaccatttgacccagcaatctcattactgggtacatacaaaagaaaaataaataattctaccaacaagacacatgtattcatatgttcattgtagtgctatttacaatagcaacaacatggaatcaacccaggtgcccatcaatggtggactgaattaagaaagtgtggcacgtatacaccatggaatactacacaaccataaaaatgaatgaagtcatgtccttgcagcaacatggatgaaactagagtaatcctaagttaattaatgcagaaagagaaaactaaatacagcatgttctcacttataagtgggagctaaacattgggtactcatagatataaaggtgagaaaaacagacactgggaactactagaggaggaagagaaggaggggagccatg

SEQ ID NO: 207545 - DNA, 425 bp, Homo sapiens
catcctttaaaattatcttttttgctagagagttaaggaaaagcagttctcacatgggacagagaagtcttaaattattttaaggttcttagttagtttattataaaaaaaattaaaggtttttagctctgttcttggacactccactcgtagataaaatttcagcagtgccttagtgcctagctcaaatattaccttcacaatgctccatcttcaaggcaattattttctttctttttagaattggtatatttataactctatattttgtgtttttgagcatattaagcctttttattttaaactcatacttaatattcttataacatgaataccttatgggaggtttatattgcttgttatttgtccaaggttttatgttatcttctctcttcyatgcctggttattattgctttggtgactg

SEQ ID NO: 207546 - DNA, 566 bp, Homo sapiens
tgcaagaaaaaaattgcaaacagattcttgtttatacagaaataggctcagattttttattgtttgtttttcttgcaaaacattataaatcctcaaacctctacaacatagaagcaaataagtcttcctttckctagtgtcgaaatgcagactgtactatcattatagggcagaaaacaaaacaaaacagaaaaatctgcactgagaacttaggtgaaacaggggcttgcattgtatctgtctgtgtcctttcattgctgagagcagtgtagaactttacgctccaggattcagctgtttgctgatttgctctaaactcaattcattttctaatttcatctctttgatgttattccagtgagaagcctgcaggtagtacctccaccaggaagatattattaattagcagccaacagggtgagcagaaatcacgtgctccatttgcacagctaatggttcggttcatgaatggttctcaaaatattttacaccagccaatctgaaaaaacatatgattctggttaaatttaaggactcttggatcctgcaggcccagatattcatac

SEQ ID NO: 207547 - DNA, 407 bp, Homo sapiens
aagaactttagggatgcagagccaaatcaggagtgtgtgcctttcaggagcttagaggcagagatgaacacagaacacaaatgactataaaatagagaaagcaaaaaggaatgtgtaggtggaatgctgggaaaagctagargagggaaagttagaactttgggaaaagggacattgggcttgcacttagagagtgcacatatggggaaaggcagggcaatttcaggcaaaagtgtttttggaatgagatgataaattattaagtcagagcagacaactcacagctatatccttgttcattattgatcaagaataggacaacttgagtagaaatgaaggccattgataatcccaaattttatctacatgtgagtttcagccttctccatgatgataaatacaatact

SEQ ID NO: 207548 - DNA, 625 bp, Homo sapiens
  misc_feature (1)...(625): n = A,T,C or G
gtttgcaatacaacctggacatttcatcattggccttcagtgggtttgcagggtgatttctaggggaggcagaggagaacacacgtcttccttagcatctctgagttgacaccaccaggctggggtgcagccttgagccytgctttggggagcagatggcttggtcagatggagtcggtctctcctgattaggaagaggacaaaaggtcccatgagttgaggcctcgaaaaatgtgtgagtttgtcaggcaagttgctgtttgaaagtctcaggccctgagcacctccttttctgacttatgcagatagcatcaaaggcctcggagatcaaccaagggcttttaagtaggcggagtggaaagactgtgattgccaggccgtgcttgcatttgccttttggaggcccttttagttgtgctcaaccccaaccacagggggacacaggttcagctgtgtttttgctggaaatgacagagctttgttggcacacaaggtttcacagctggctgggaatgagaagaataaagaaaaaaggaaaggcttgcagttgcaacctcagtggcccanggcaatgttctgtgctaaggagcaggtctctctgtgatgctggaatgtgaaaacacct

SEQ ID NO: 207549 - DNA, 625 bp, Homo sapiens
  misc_feature (1)...(625): n = A,T,C or G
gtttgcaatacaacctggacatttcatcattggccttcagtgggtttgcagggtgatttctaggggaggcagaggagaacacacgtcttccttagcatctctgagttgacaccaccaggctggggtgcagccttgagccttgctttggggagcagwtggcttggtcagatggagtcggtctctcctgattaggaagaggacaaaaggtcccatgagttgaggcctcgaaaaatgtgtgagtttgtcaggcaagttgctgtttgaaagtctcaggccctgagcacctccttttctgacttatgcagatagcatcaaaggcctcggagatcaaccaagggcttttaagtaggcggagtggaaagactgtgattgccaggccgtgcttgcatttgccttttggaggcccttttagttgtgctcaaccccaaccacagggggacacaggttcagctgtgtttttgctggaaatgacagagctttgttggcacacaaggtttcacagctggctgggaatgagaagaataaagaaaaaaggaaaggcttgcagttgcaacctcagtggcccanggcaatgttctgtgctaaggagcaggtctctctgtgatgctggaatgtgaaaacacct

SEQ ID NO: 207550 - DNA, 577 bp, Homo sapiens
tcaacacaccaagttttgacattaatactcccccaaaactgttcccaggaacatgaatacataatacacgctcaagagattcacaatccacagagtagattaaaggctcgaacggtcttactgtaaagaattctacttaattttgtttaaaccagcatttgtcaagcttgtttattcatccagctgttcattcatccattttatgaattacagagcactcactctaggctcagggtgtcctgggtgctggggataaagagtcaagggccttactcttacagcacttgcatggragaagactgcaaatgggcaaattaacagctaaaggtgctagaaagtagcaggcaacactcactgccacgatgaacacatagcaaggtgacatgatagggactgactcaggaactcttttaatttgggtagataggaaaggggcccctgaggaaatgacatttattaagctgagatctgaatgacaagaacaatttaattatgtatgggtcttggagaagaacatgttaggcagtggcaacagctagtgcaaaggccaggaaagagcttggtgtccttaaaaaca

SEQ ID NO: 207551 - DNA, 583 bp, Homo sapiens
cttctaacaggattgttagacagctatggtttttatcagtattatcaatattattcttcatggtcctctctattaagaatctagtagcttgtagctgggcatggtggcttacgcctataatctcagcactttgggaggctgaggtgggcagattgcttgagcccaggagttcaaacccagtttgggtacatgtttacctatgcaacaaacctgcacattttgcacatgcacccttgcacttaaagttgaaaaaaaaatttttgttttaaattagctgggtgtggtggctcatggctgtaatttcagctactcaaaaggctgaggcaggaggatggtttgagcctgagaggtcgaggctgcagtgagccatgtttgcmcccctgcattgtagcctgggtgacagagtgaggccttgtaaaaaaaaaaaaaaaaaaaaaaaaagaagaagaagaagaaaagaaagaaagaaagagaaaagaagaaaaaagaaaatgaaaaaaagagatttgcaatattaaaaataaaaagagggatatacagagagatccagcagagactataaagataatagtgtactattaaa

SEQ ID NO: 207552 - DNA, 583 bp, Homo sapiens
cttctaacaggattgttagacagctatggtttttatcagtattatcaatattattcttcatggtcctctctattaagaatctagtagcttgtagctgggcatggtggcttacgcctataatctcagcactttgggaggctgaggtgggcagattgcttgagcccaggagttcaaacccagtttgggtacatgtttacctatgcaacaaacctgcacattttgcacatgcacccttgcacttaaagttgaaaaaaaaatttttgttttaaattagctgggtgtggtggctcatggctgtaatttcagctactcaaaaggctgaggcaggaggatggtttgagcctgagaggtcgaggctgcagtgagccatgtttgccccmctgcattgtagcctgggtgacagagtgaggccttgtaaaaaaaaaaaaaaaaaaaaaaaaagaagaagaagaagaaaagaaagaaagaaagagaaaagaagaaaaaagaaaatgaaaaaaagagatttgcaatattaaaaataaaaagagggatatacagagagatccagcagagactataaagataatagtgtactattaaa

SEQ ID NO: 207553 - DNA, 589 bp, Homo sapiens
gtcatctagtttgacccctttgtctcccagaggaggacactgaggctgtgaacaacataagaagtcttttaaaagaatcataaaaatgaaaggtgtgaaaagcaatctttggggttattctaactgaaaaatcactctaacagctaatcacagggctgggactaaactctgaggcttctgacttgcagtccaatgttcttgctgttgtctctacttagccttttcctaccatatttcagtttgtgaatgactcagatcttcatgatattatataaactctttagggaaagaacagtttaacatgtttttgagtccttatatctgttaaaacagggctgagcaaatagcaatgctggaatatttaatgattcaatagaatrcaatcctcatgtttcccccaaagcccacacctcccagcacacagtctcagtgtgatggggccagggatcctgacttgtcacttaaaacatcccagaatccaggcagtcagttctcaaacatctattgaccaccgcatggtctgtaccacattcctggggatgaaaggtattcttggagagaacacaacctaagccagatattggtttca

SEQ ID NO: 207554 - DNA, 679 bp, Homo sapiens
attcaaccagttccccgaagaatgaaaacatattgcttcatacagaggcaattctctaaattcctagagccatgttaatatctgaaaatattcaagcctattctttctcctaacttttgctagaataaagtgtctttgatgattttgatgatgacaattgaacttaggagcaataacaaatatttctaaatagagtccttctcttggccacaaggtcaagctatgaaacagttgatggtaagccacaaacctctagagaattaaagtgatttcttcaagagccaggcttgcagggraaatctaagggccggcagcctttcatgcacagacagctcagctctggcctttgttctaagagacagcagccagctcctgagggaagctctccactggtctctttgggggtgtgcaatcaagcttcaaagaaccccctgatttgggcacagggaagtgcatgtttctgggcacccatgagactaagcaaaagcaaaacccaaccaccaaatgggaacaccaaggattctaagatttatggggaaagagctcagagcaaaaaaggaggctgaagacaaattttccaataagagacaatacaaaaaattcatcaaagaaaatcaaaggttcccaaattaattttcttgtttgtgaatttagtgctatgtcattccttaattcagtg

SEQ ID NO: 207555 - DNA, 679 bp, Homo sapiens
attcaaccagttccccgaagaatgaaaacatattgcttcatacagaggcaattctctaaattcctagagccatgttaatatctgaaaatattcaagcctattctttctcctaacttttgctagaataaagtgtctttgatgattttgatgatgacaattgaacttaggagcaataacaaatatttctaaatagagtccttctcttggccacaaggtcaagctatgaaacagttgatggtaagccacaaacctctagagaattaaagtgatttcttcaagagccaggcttgcagggaaaatctaagggccggcagcctttcatgcacagacagctcagctctggcctttgttctaagagacagcagccagctcctgagggaagctctccactggtctctttgggggtgtgcaatcaagcttcaaagaaccccctgatttgggcacagggaagtgcatgtttctgggcacccatgagactaagcaaaagcaaaacccaaccaccaaatgggaacaccaaggattctaagatttatggggaaagagctcagagcaaaaaaggaggctgaagacaaattttccaataagagacaatacaaaaaattyatcaaagaaaatcaaaggttcccaaattaattttcttgtttgtgaatttagtgctatgtcattccttaattcagtg

SEQ ID NO: 207556 - DNA, 584 bp, Homo sapiens
acctgtgtgccctgccagggctctggtcacagcctctaatctgccgtggacaccagctctgcttcacatatgagtgggaatagacgggcagaacagtattgcgtggatctggatcatttcctcccctcctctctgcttttgcctcccagttctagctttcattctctcaaaccaggtccacatgattttccatcttcttggtccatttctcttatgtagatgacagactagttaatcaaggttcatttacatttgtcttgactattgttattggatgggtgaggtctgagcacagctgagatttgttttgtgctcttggttctgcttggtygtgtttacagagcatcctcctcaacatttcagagctcagtgtacatcatggccacctcggtcttatgacagtcacctatgaggttcctatagcatgtcttttttccctgccttcctgtgggggatcatgccaggcaaaaatatccagagccttggagaagaggatgagagtaagggttgcctgtcacctgtcagtctcagagctctttctttttaggcactcatatgctgcaggaagctagccatcagctgcg

SEQ ID NO: 207557 - DNA, 620 bp, Homo sapiens
aaccatctggtgcctacaagagaccaacctaatagctaaaggcacctgcagactcaaaataaaggaatgaaaaaaagacatatgtgaatagaaaacaaaaccgagcaggagtagccattcttatatcagataaaacagactttaaaccaatgacagtacaaaaagaccaaaaaaagaaaagcattatataatgataaaggrttcaatataacaagaaatttaactgtcttaaatatatatgcacccaacaccagagcacccagattcatactactagatctaagaaactgctaaacctaagaaaacagagtgacaacaatacaataatagtgaggaactttgacaccccgctgacaacactaagcagttcatcaaagcagaagatcaacaaagaaactctggacttagactagactctagaccaaaagaacctaatagacatttacagatcattctttccaacaaccacatgatatacattttctcatctgtgcacagaacattctccaaaactgaccatgtgcttggccataatgcaaatcttaataaatttttaaaaatttaagtcatatcaagtttcttctcagaaatagtggaataaaattaggaatcaataccaa

SEQ ID NO: 207558 - DNA, 620 bp, Homo sapiens
aaccatctggtgcctacaagagaccaacctaatagctaaaggcacctgcagactcaaaataaaggaatgaaaaaaagacatatgtgaatagaaaacaaaaccgagcaggagtagccattcttatatcagataaaacagactttaaaccaatgacagtacaaaaagaccaaaaaaagaaaagcattatataatgataaagggttcaatataacaagaaatttaactgtcttaaatatatatgcacccaacaccagagcacccagattcatactactagatctaagaaactgctaaacctaagaaaacagagtgacaacaatacaataatagtgaggaactttgacaccccgctgacaacactaagcagttcatcaaagcagaagatcaacaaagaaactctggacttagactagactctagaccaaaagaamctaatagacatttacagatcattctttccaacaaccacatgatatacattttctcatctgtgcacagaacattctccaaaactgaccatgtgcttggccataatgcaaatcttaataaatttttaaaaatttaagtcatatcaagtttcttctcagaaatagtggaataaaattaggaatcaataccaa

SEQ ID NO: 207559 - DNA, 573 bp, Homo sapiens
gtacagagatcacatctgtgggtgctgatgaaaagctgacatttgcggtaggaaggaggctatacatatagaaaaaattttacaccagtgtgacagaattagaatcctcaaagggcttttacagactagcgtgacggacccaatctaatytgttgtctaggtctcagttttctcagctgtgaaatgggggatcgtgagattatcattcccataggattgctgtggagattcaataaaataatggattaaatgacaatgcatttagccccacacataggccatgtttagcgctcagctattattttctttgatacaactactaatatagttacaggcaataagtaaaaccaaacaaaaggaaaaaccaaaaaactccagacttagagtcaaagatcagcttcacatatacaaaaccaggaaggtgtaacttaatggaaattcatgggacaaatatctaagtgtttggactgaccttaagctccatatgagccagagtgtatctaactgtcactaacattgcatgtgtgacttggattgcctaccagaatttgtgtctagaacaagaaaagtagc

SEQ ID NO: 207560 - DNA, 573 bp, Homo sapiens
gtacagagatcacatctgtgggtgctgatgaaaagctgacatttgcggtaggaaggaggctatacatatagaaaaaattttacaccagtgtgacagaattagaatcctcaaagggcttttacagactagcgtgacggacccaatctaatttgttgtctaggtctcagttttctcagctgtgaaatgggggatcgtgagattatcattcccataggattgctgtggagattcaataaaataatggattaaatgacaatgcatttagccccacacataggccatgtttagcgctcagctattattttctttgatacaactactaatatagttacaggcaataagtaaaaccaaacaaaaggaaaaaccaaaaaactccagacttagagtcaaagatcagcttcacatatacaaaaccaggaaggtgtaacttaatggaaattcatgggacaaatatctaagtgtttggactgaccttaagctccatrtgagccagagtgtatctaactgtcactaacattgcatgtgtgacttggattgcctaccagaatttgtgtctagaacaagaaaagtagc

SEQ ID NO: 207561 - DNA, 476 bp, Homo sapiens
atgcaatgaggctggtacagggacagtagaaagaagctggaagatggaatgggcaaaggcttctgcctggtgaagagccgctggcactgccaygcacaagaagcaaatagagaggatgaaatcccttctccctccttctgccttccagtctctcctcacggtcctttggggcagaacccaactgggagctgacatggagataatagggatatcagagtccagcccagcatcagaaaattgagtattaacagcttagtctggagctgacagacactagggtatcaaccactaaagcagtaaaataggcataataatacctgccttaaagccagattagattttatgtgtaaaaatacaaagcgctttgtattgaaaacaacattattgacaaaggctacggaaggtttattgggctggttgtagaggatcaaactgatgtataggatgtggacagtctgctttttagccactaactt

SEQ ID NO: 207562 - DNA, 549 bp, Homo sapiens
gaattctatggccctgcccaccaccgrttcctccccatactagcacagctgatgctctctggaaagcgccacctcctggcaggaggccaaccagcacaaaaacagggcatgaaatcaccaaaactaagaaccctcacagagtccatttcaccccctgccacctccactggaataggtgctggtatccacagctgagagacccatagatggttcacatcacaggactctgtgcagacaacccccagtaccagcctggagcctggtagacttgctgggtggctagacccagaagagagataacaatctctacagcttggctctcaggaagccacactcacaggaagaggaggagagtactacatcaaaggaacaccctgtgggacacaagaacctgaacaacagacttcagccctagaccttccctctgatagagcctacctaaatgagaaggaaccagaaaaccaactctggtaatatgagaaaacaagactctttaacactccccaaaaatcacactagttcagcagcaatggatccaaaccaagaagt

SEQ ID NO: 207563 - DNA, 549 bp, Homo sapiens
gaattctatggccctgcccaccaccgattcctccccatactagcacagctgatgctctctggaaagcgccacctcctggcaggaggccaaccakcacaaaaacagggcatgaaatcaccaaaactaagaaccctcacagagtccatttcaccccctgccacctccactggaataggtgctggtatccacagctgagagacccatagatggttcacatcacaggactctgtgcagacaacccccagtaccagcctggagcctggtagacttgctgggtggctagacccagaagagagataacaatctctacagcttggctctcaggaagccacactcacaggaagaggaggagagtactacatcaaaggaacaccctgtgggacacaagaacctgaacaacagacttcagccctagaccttccctctgatagagcctacctaaatgagaaggaaccagaaaaccaactctggtaatatgagaaaacaagactctttaacactccccaaaaatcacactagttcagcagcaatggatccaaaccaagaagt

SEQ ID NO: 207564 - DNA, 562 bp, Homo sapiens
gcccaccaccgattcctccccatactagcacagctgatgctctctggaaagcgccacctcctggcaggaggccaaccagcacaaaaacagggcatgaaatcaccaaaactaagaaccctcacagagtccatttcaccccctgccacctccactggaataggtgctggtatccacagctgagagacccatagatggttcacatcacaggactctgtgcagacaacccccagtaccagcctggagcctggtagacttgctgggtggctagacccagaagagagataacaatctctacagcttggctctcaggaagccacactcacaggaagaggaggagagtactacatcaaaggaacaccctgtgggacacaagaacctgaacaacagacttcagccctagaccttccctctgatagagcctacctaaatgagaaggaaycagaaaaccaactctggtaatatgagaaaacaagactctttaacactccccaaaaatcacactagttcagcagcaatggatccaaaccaagaagtaatccctgatttacctgaaaaagaattc

SEQ ID NO: 207565 - DNA, 549 bp, Homo sapiens
gaattctatggccctgcccaccaccgattcctccccatactagcacagctgatgctctctggaaagcgccacctcctggcaggaggccaaccagcacaaaaacagggcatgaaatcaccaaaactaagaaccctcacagagtccatttcaccccctgccacctccactggaataggtgctggtatccacagctgagagacccatagatggttcacatcacaggactctgtgcagacaacccccagtaccagcctggagcctggtagacttgctgggtggctagacccagaagagagataacaatctctacagcttggctctcaggaagccacactcacaggaagaggaggagagtactacatcaaaggaacaccctgtgggacacaagaacctgaacaacagacttcagccctagaccttccctctgatagagcctacctaaatgagaaggaaccagaaaaccaactctggtaatatgagaaaacaagactctttaacwctccccaaaaatcacactagttcagcagcaatggatccaaaccaagaagt

SEQ ID NO: 207566 - DNA, 636 bp, Homo sapiens
gcacagaagctctttagtttaattgggtcccatttgtcaatttttgcttttgttgcaattgcttttggtgattttgttgtgaaatctttgactgtgcctatgtgcggaatggtattgcctagattttcttctaggatttttacagttttggattttacatttaagtcttcagtccatcttgagttgagttttgtatgaggtgtaaggaaggggtccagattcaattttctgcatgtggctagccagtgttcccaacaccgtttattaaatagggaatcctttcaatggaatagaatagagatcttagaaataagaccacaaatctacaactttctgatctttgacatttgtttatttttattcagcttacatgttcaaacatcatagcataacttttctcaataatttctatttaaactaaaaattttccagtgttttctgaaaatgtttgttgtttgtgttatgaaaagcttgggataaatatgaaatacataacattttaaaaaaatatatcatgctaatatcctatgtctttctttacagagtactgtcaatttttgctrtttaaatttttaaaaagttctagtaattgcacattttgttttgtgtgtttatgtatatatgcacaactgatat

SEQ ID NO: 207567 - DNA, 574 bp, Homo sapiens
gtgtggttttaagcgcgagtttgtggtattcagccacagcagcaatgagaaacagacataacttccgtgtgattccttgacaggccacgtggctcaggactcctgactccttcctggctttgcttgcttgactgcaagacacagtagggctagacacctgctgcggtctgagtgtggcccccaaaagcatgtgttggaaacttggtccccagtgcaacagcattaagaggtgggaccttttattttttaaaataaaaaggttccatgaggaagagctgaagtaggtggaatctttaagaagacgtgattaggccattaaaactctaccctcgtgaatggatcaatgcccttatctcgggagtgggttagttatcatggtagtgagtacctctctctctctygctctctctctctctctctcttctctccctccccctctctttgaccttccaccacgggatgatgcagcaagaaagccttcccttaccagatgtcagcatcttaatactggacctacaggtctcaagaactgtgagacataaatttctttataaattaccccatcagtgtggta

SEQ ID NO: 207568 - DNA, 663 bp, Homo sapiens
acataaagctatacctcaagtcggtgcctcagactggcattggccttctctctgactgccaagtggtgatattttgtgagcaagttttaacatgtggtcttttggttccctaacttctgcagtgtccatcccgaagtcttgcatagacccttttcccacagtgttttctgtgccatagaaaccatgccagctctgttctgatgccacaatgattcaggagtgctagggtgggggaaattcgtagagagagaaaattaactttcaagttttattatcaattaatgtttataaagcataacctgggtgaaaacaaatgggttaaaaaaacaaaatatggaattcttacctatgaagtcagcagcacaagcttgcagggctggagaacacacactcagaatataaatggacatcaagaaacaggacaaagaggcataagatctgcataacagagcaatggccacacttgctgaaataaagccaaagcacttagatgattatgataggattataatctctaaaatggcaaagcccccctgtcttctgtttgcggctagttaaatcaggagcactgtgccctgtcttgggagcaccatggctaaccaacagtgtggtcatgaacagccatcacagtgcaaggtccrgaaaactgggctatgtgagaac

SEQ ID NO: 207569 - DNA, 557 bp, Homo sapiens
tctggctggcatcagcctttgcgtcaaagcttccagaggaaggagcaggcagcaatctttgctgttctgcagcctccaccactggtgatatccaggcaaatagggtctggagtggacctccagcaaactgcagcagacctgcagaagaggggcctgactgttagaaggaaaacaaacaaacagaaagcaataaaatcaacatcaacaaaagaaccyccaaaaagaaaccccatccaatggtcttcagcctcaaataccaaaggtagataaatccatgaagatgaggaaaaatcactggaaaaatgctgaaaatttaaagaaccagaatacctgttttcgtccaaatgattgcaactcctctccagcaagggcacaaaactggacaagaaatattttgattaattgacagaagtaggcttctgagctaaaggagcatgttctaacccaatgcaaggaagctaagaaccttgacaaaagttacaggaactgctaactagaataaccagtttagagaacaaaataaatgacctgatggagctgaaaaacacagcacaaga

SEQ ID NO: 207570 - DNA, 597 bp, Homo sapiens
actgccttggggggtgctcttttcattaggcccatgctattctgtcttagttgaacacaatctataggtatctcttaattagaaccccaaaagcactgacagtgacgtcctttggataggcctgyagtaagtgaactaagcggtgtccacctgaggccaaacataatctcccctctccttcaaggtaaacttctataaaatagaaaacaaagaaactggattttgatgaatctgaaatgaatccctcttcatatatttattactcgtatataggaggttttcttttatactttttgaggattccccaaaacaaaactgcacttgtatagctaggaggactagggaacaatgcagacgtgggagaaagggtgagttcttgtgacccagaactgggtttgaagcagcaacttccgttcaatcaagcatgcctctcagcattgcaggtgccaagttgccattctctctctttccttccatgcgctcaggtttcccagctctcgactgctttttttctgacacctttttttatttcttcctctccacaggtctctcagttttgctgataaagatatttcactctaccccagtttctttatt
